United States Patent Application Publication US 2014/0230087 A1 - sequence listing, part 6

SEQ ID NO: 2951 - DNA, 5430 bp, Glycine max
  Intron number 1 from transcript Glyma15g14650.1 (locus Gly ma15g14650) derived from phytozome v7.0 (chr-ID Gm15; pos 11135226 to 11140655 reverse strand)
tgccatcaaacttcaggtacgtgcactcattttctacgtacgttcctgtcattgtccaatacttttacattttctaagtaatgatcttcctctgttgattgatagctgatctttttttggttttgttttctgttatgtatgttaatgactatatatctgtcttgatgcgttataaattctattaacttctacatataaaaataaataaaaattaataaaatgaaattatttttttataaattaaaaataacttggatatcttagatttcagagattataaaagttaagttttgctacatggcactttttgtgatggtgtggccaaacgatggacaagaactgctgtataagaaaagtaacagttgggggatgacaaggtcgtgactcatgaataaataggatatgaataattaacgatggatacacacgtctctctttacataatcctcgcaataaaataagatgtggggctatgatttcgcctaggttactttacattacacgcactaaatttttctgtcccccatttatggattggaattatttgccaagggggatttatgtgtaattaccattattcaacaacaatattataaatattttttttacaagtggggtagcatttcatgtattaagcaatgatataatattttattgcaaattactaaattctagattatttttataaatattttttgcatataacatttatcattattcatgtggaaacatgcaagatgctttattaagtaaaaaaaaaaatcgtattctgaaatatgtatatcaccttacttatataacaacatcaaaaatgtaatttagacaagaatataaatattaatatcataaatgaaataaaaaattaacttgcacgggaagcaccagagtgatcagataaattaattcttattcgtaggatatttgttgttggtacatggaccatgctagctagtaagttcttgccagcttaagtagtgaccacctcagtacttataacgcctgatttaaagacttagtgtgatattttttatatatattttattacacaacttattgcactattatttattaattttcttttatttttattttcttatctctttatctttccatgcaaaatggagtgtacgatttattattttcctggcttgaaattacgtacctccctatgagttgtatctgaccaacaaagaacggagagagaatgtggtttcaacgttattccctctgtgagtgatggcactgtgccaaccattctttatagaccagcacgttgctagtggtccttgcatctgcattatgctacaagagaaatgctacaatttgagcttgtccctcgctctatttggaactctaacttcgaaatagtaaggatgaacttttatttttatttacattattttaactttttgaaatttatataactgcataaagaattaaaatatatgttaagaagaaagatataacgacattgtgttaaaatatagtagaaaatttaggtaaaataaaaagcattgaataaaatttcatttaaccattaaatgggtgtgaccaacaagttggttcaactaggtttgaattccttttaagtaaaatctgagcttcaaactttatggatagaaaaatgtgattaccaaggaatattctactaaaagatgtgtcgcacgtagagatttataataaaaatgagttattaataaaattaataaataatcatttatacctacaacaagataccaaaaaataggtgtgaatgtgatttttccaaataacaaatgacgtggggtgaagtgagaccataagctaataaagattgttttaagcgaaacatattattttgtttggatgaatatatagaaatgagaaagaagctagcaaagaaatttccttctactaacttggtcaaagtgaaaagaaaataaacaataaataaataatttaaaaatatctttatattaattaaaagactaaattaaattagcatcccctaagattttttagaattacatgttctttcttgtttaatgtttacaaccacctttcttatatgatgggagtgtcattttaatattttcaaacaggaggttagtaatgtaatatacaagggatatcagcataatattttttaacattaagggagttaattatacagaaaaagaatagtattagataatgtcttaacaagaatgttagaccataaagaagctatcatatctcatttaagttgggctaaccttttttggggttttatactctcggatttatgtccataatgatgtcaggcttgctttcggtactcctcagaaacaaatctttgattgaacctatatttgctcaatcaatacagtctgctcatggtaaactttctatggattcatatagtgtgtaatttgaaaaaaaaaaaaaaggaaatgcaaatgcaatcttctttaataatttgtacttcattattttttcttaacataatttttttattatgaaaattaaaaaaaaaattgaaaagagagagagattgtgtcaattagaatacagattgtttaatgataaaatatattattaaattaagtgataaataaaaagaaacgtatatatgaagtatcccctaattcatttaataagtgataaaaaaaggtataatttaattaaagaaaatttttttatcataataattattctatgtaattaatatttttaagatacgtacattacgttaaatgatagagaatatgagttagagagtatgtattttatatattttaaaggatttgtctaatatgtcaatagacatacgataactctaattattagaacagagaatatttattgtataaagaatatatataaaactcagtaattttttgaagtaatttaaatcacttgataaaatatatcatgagtttcctgtaaaagaaaaaaaattaaattagttttttttcttttaatttatttttaacgtttattttgatcctttattttttatttaatttgactctaatttttaaaatttgttcaatttgattctctattttttaaaatcagtttaatttggtctcaccatctaaattaatttaagtaatcatttaaatttaatcattccctctaaatatgtattctgtaccgctttaaaatcattaggaagtgattctaagcaactacaaaatatgatttcttaacataacgatacaatttagacaagaagattaaatttaattgattttaaaaattaaaggattaaattaaatttaaaaaatagaaaatcaaatcgaaccttaaaaaataaattgaaaaactaataaactaatttaagcaaagaaaaatttactttaaaacgtcccattaatatgaaactcataatgcagtaaaatctatacttattaaaatggtttgaagtgtcctactgtttaaaacacaccacatattaacatatatgacttcgttgtctgcagatcaatgctatgagaatttgagtccttgtgacttaaacaagaccattggttcaagaatgttatgattggtttgataaaagtggggtggggaaaaagaagaaagaaagtagcgaattagatgagaaaagaaaatagaaaataaaatgtgacttaccaaattaatcacagcaaagaaagtgagattttctttttctggaagttaaaattttttacttttcacataaaaataaatatggattacgaaaatgtctttatattaaaaaatatttaataaaattaatttttttttatcaaattaaacaatctaagactcatttaatgtttttattcatcttccgttctctcactttctcacatactaggcatagaaggagaaaagcaaaggtattgaaaaagggtttctattatttttacacaatttctataacatttttataattttttttttttttatttttataatttatatttttattataccattattttatattacaataatcctccatccctgattataacatcatttcaaataatttatgtctcttaagaaaatgaattaatttagttaattacttaaattatattattattttaaaagtatttttttttattttttaattcatttaattatttttcattaatgtttgaagagagaataattaaatgaaagtatatacaaagaaaaaaatatatctaaaaattagaaaaaaaaatttataaaaagaaagaaatagatttttaaagaagattttgtaattagaaatagtaatttttttacttttcattaaaaaaaatggggatgcacgtgagatttgaagtcattcatgatgcacatgggactatggaaaaggagtaggtagtcctaagaggtgggattgtatgtcagatactcactttacctctttctactctaatgacattcctgtctttgtcacgtcaacacttatctgtggtgcgtggttgtgatttatttactcatggttatgattaatttggggaaaaggagggaaatcaaataggaaaggtcagaaaaaagttctgctggataaaaacattggggtttcagattgacacatatgtatctcaagactcaaataaatctacaacgtccaatcaaatcaaaaccaaaaggtgaactttactttaatgagttgaaaatgaaatccccaaattgttatcaacaagttcgttattaattaattttcttccaaaacaatcaatctcagaaaaatgaaatataaagcctatggtgtcagtgccgtgtccggttaatcagacccatggggaccgccatggtgcagattaaaacctgctctgctacttctaccattgacatcttcacttcactgttccctagctgtagaattgatgtaatagttttctttttataaattatatattttttttattgaaaataattttatttgagttattaaaattattataattcgtaatattcaaaacatttttttaagaatttaacataattaaatattcagaacttaatcttgattttactgattaagcttagttaactacatgttactcaattcataccttcaataacacgagtcttattattcatacaaattattaaagatgctcttatccgtgtaaaattgtgcatatagtcaaatgcaacttacatattatttaatcaaagatgtataacaacttacatattatttaattaactaagcgaaacaccttagtgtttataacaacatattatttaatcaattaagtgagacaccttagtgttaattaattagcttgtttaattgttaatgtttgctcatgtgtaaactatgatattatgtgaatccttcttacttgagggagcatagcatttattaaaagcagcattttatatatgcaaaaatagcaaaaacaaatagctggttataggctgagaggagtgtgactgtggtaattgtacatgacagctctagtgtgagtgcatacacagaaggtgtgaggg

SEQ ID NO: 2952 - DNA, 4475 bp, Glycine max
  Intron number 2 from transcript Glyma10g11000.1 (locus Gly ma10g11000) derived from phytozome v7.0 (chr-ID Gm10; pos 10928480 to 10932954 reverse strand)
atatccgtaagtacatgacaatttaattaccatacacttaatttgtataagactgatactcaaagacagttctataaatcatacacctcattatactagtattttttataattaacaagtgtcagaaatgattttttaatatgttttattattataattagagtttcacagtcagagattcaccttgacatttaatcaagaccttcaacattattgagataaaacttcaattctaaacaaataattaacaacactaaaaataccgattaaactacatatattttctatcatattttttatgtctttcttttcatcatatcatatcatttattactattatatgtatactacttaatttctctttttttctcaatatatttaatagaatgttgtgtctacctaatttttcctttaaataaacttttttttaataattacttatatacaaaaaaatattgtgaaatcaacctattcaaatgaattaaacttcttttgttgtctagattgattctttgtagtcctaccgtcaaccattcaatgatacagtttgactctcggataagtgaaaataatggacgtacaccatcacttgttgatttttattttattttattgtgaaggattacttatgtaacgaataaacaataacaacaacaacttgattttaaaaacgtttttgacaatgaaatcagacatgcatgcaaatcacaaagcaatagatgatcttgtagctttccatgtatgtgtttgtgaaagtatgatatatatatatatatatatatatatatatatatatatatatatatatatatatatatcatatagttaatgtaaggcacactttatataggaagggaagcattttgtcatactaattaatactaatttaagagtagaagttaatgaaccatggacataagttaccttgtttttttattatattacttggtttgactctttttacggtcttcttcttaattaaaaaaaattcttgttaaataatggtattgtgcgtcttaactatttacttaattacttaccttattttatttctctttattactcctaaacaaaacgttaacattttgtagtttgtaccatctgaatgaaaaatttgatatgtttctttattagtgaagtattatttgaatttcagccattcaatttaaagagcaaatgctatataccatcggtctaggtttgtgtcgtgcccctatagtatccacaaaatatacgtggtgaggtttcctctgttgtctgatttactactttacagatctgggtagatttcctttttctgattaataataatgacacaacatatgcatttataagaatgaccttttggcaagggcaaaacaaactcaagtacatgtgaaaaagtaaaaatagaaaaaagtcattcattttcttttaaactgctatgaaacaaaaaagtacagtccctgttggtacccttccgttacccagaaaagattgctaatgctggaagtgataataacggcccctgactggtcagtgataagtatgagaaatttctttttaaagtttgaaaggcaaattcattgatataaaaaatacaagaatcttaaccaaatcgtactaacagtgtggaggctaaaaaaaccatttttttttcctgattttaatatatgatgattatattgtaggtacaaagtattaattaattttactaataactaaatttttagtgaaaaatttggttaactatatttagtagtatcttaactatgtatttttacccaccgtgttatactcacttattttgaaagatatagaagttaaagatatttctatatgatattaaaaaatgattatttaatatttaagaaaggggtcgaatttagatctttgtcttaataaaaaaattgtgaaattatcatatttaaaaaatataagagaattaaaaaaaaattatgtatatttactgatattattttcatgttgttagttctcgtattttaactctgatatatatacttcctgaactttttagataagtaatgattttcatcctttatagatcacaaatagtttatatagtgagaaagaacgaaaataattttttccctaaatttaaaaactaaatttgtcaaaattaaagattaaaatcaagtttcacataaaggagttgaaaacttcagaactttggctagatctccattcatgccatggtaatatggcaacatcttaatgtagaggtggctaacatgcttggaaatatatgcatgttgaattcactgttaaaccaaacacacacttacctacttgcgttcacattgattcacgtacgcgaaggaagggaagtgtctttgtcggatccaatccaaccagccacctctgactacaaaccccgtgattaacgatccaaaaaaacaggtaactatagtggtacccacactacccaccactgaaacgaccaagacagtggtgtagctgctgtccatagataagtgtcattttcgttagaccaatcatatatacgtgttgccgttaataattgtatcattattatatattactagggcgtgcctctctaaaatttataaataaataatacaaaaaagaagataaatatagtagtgagaagttatgaagttactgtaggttataaaaaatatttgaaagtttaaaaaatagtttaaagacaaaattatctaaatgaaatatgaatatcgaatgagatattttctttattattagtataaattagaaaaaaaatatgccttaaggataaaatgagtgatttgttaaggtaatgaaagataaaatattaatttgtggatgtaattataagagaataaaatgaatataaaaatattatatcaaaacaccttattttctttatatatagttatagatatatacatgtatataatttatttaatgatacatattaaaattttaatatattaaagcatcaattgatatatactcggtgtcaaattttcatactattattaataacttttttctaaagtataaaattaccaattcaacaattgaattgaaacattttcataatatatttagtttataatgaaatctcatacaagaataattaatgctttatcatactacttttctgtaacagataatatattatctggaatacaagtaaatatccacgactaactaaagtataaagtcatgtataaattatgtgaaatttgttatatatgattaaaataaaaataaaatagttggatcaatcataatctaaaaaaattattagtgtaaatataaaatttatcaccttatattaattaatcatctcgtccctatttatacttgcatatagtttttttacgcgcttaagcacacttatttattcttttatggacaaaaagcacactaattctatcacctaaatatatgcaaatgtttacatatatatagtaacgtcgttttaattagctgtactaattatctgtaatgcatgcacactctcaattttccatttctctctgatgtgattcgtgggtggcttttcattttcttggggagacttcttatttttttgtttcttccccttgttcccatcctcatttataacaatgttcaagcatttttttctttctttctcggagtaccattatgtggggaacacgacccattttgtggactaatatgtctttgaaagacaatttagctcttaattatgtcgtacctacgggtccacaacatacaagtgaacatgtctctttctgtgtttttttttccttccttttttctgggagagcaaattgccccattcttggggccactcaattaaattcaggttgactttttattttcactgctatgtggataacacttcacttattgatgaacaagtagttgatacaagtgacacaagtttcggggtcgtcccttaagcttgtaatgaggagttcgaattctaattgatgtatttagagaaattcttgttggaaggaaataattcacctatgatggctaacagatttcttggataagatgaaaaaattttgtgacctaccgaggataattctatgcaaccatatgaaccaaaaaaaaaaaacttcacttattgatgtcaatgctcaagtcacatataaccatggtccatgctaccccacttgagttttcatggccagcaaatgttgcacccttttaacggatcatgtaatgtcaatgacatgagaagcatccatgcatagtactttcttgcaaatcatattaaagatatttaccaccctatagcataacacaaccacatacttagtcaagatcaagaacgtgcattttttattaattaatttctagtgcactattgtgccaagtgaaactaatatatagttgcatgcttggtatatactatataggcttctgattgtaggagcttctttttcccaccttgaattttataaagagggtcatttactatgtatgttgcagctgaggatattgaagctggacctaggacgaagttt

SEQ ID NO: 2953 - DNA, 1530 bp, Glycine max
  Intron number 1 from transcript Glyma02g44260.1 (locus Gly ma02g44260) derived from phytozome v7.0 (chr-ID Gm02; pos 48876708 to 48878237)
ttgggtttctgcttgtgcttctgtcactcattctggtgaggaaaacagcctactcttcttacctcacggatttcgcttcgttttttttctctcttgctttcattgctctttgtgatgatcacatgctgcatttgcttttttctgatttttttcttccttttatttcgttctcagtgtttgtttcaccgtttaatcgaggcttattgttggtttagggttttctgcttttggaaatgcttcgctgttgttcatgtcctttcgtcttgtgatgttttgttttactgcatgtgtttcagctttgatcgtcgttttttgtgtgtttattttgaagagaatatgttttcgttgacttcaaactcgttttgcttccgacgcgaagattgtttgctagaattttcagactgtttttttgagttaatccttgcgttttcactggttgttatttcgccgtgacgtttctttttgcttttttaaaagtgttaaatttttttgaagcgaaaactctgtttggtgtcatggtggctcgaatcggcggccacactgagtttaataaaattaattttcaccgtctttatgatttttccgtaccgatgttttatgtatttgcatttttaaattttgtttaatttttttttggaaagcggaaactctgtttgctctgatgatggtcagaatcggtgaccacacctacctatttttgggcatttgtgttccgaagtcagatatttgcttcagggtgcctgattttgctgccagaggagcttttttgtgtttagttgtatttgttttttaatttcgttattatttgtattttttttaatttgacttgttttaacattttacgtcttccgtgcgtagtattttgtttactgcacttttgtgtattttctttgcttgcattgcatgtgcttacttctgtgttggtttatttgtataaaatgcgttttgctagttacttgtttgtttcatcaatttgagtgagaaatgttattctagattctatattattgtattttattttgctgccatgatagttgttccttttttgttttgttgtatgaaaatgttttactatattatttttccctaatttcgcataattagagtttatgtagataatctaataatattttaaatttattttcttcgtaggtttataaacgctttttgttgtttgttttcatagtttcaccgcttcctattcgagtaataaatattactctagatttttgtttcccttctcttaaattgatgttcttttttcggttttatttgcaagatagctgttcgtcctttttttttatgaaaatttgttgtaccatagcgtttggcgcatgcttggagatacatgtagacaatctcagaatatttagttattttttgaaatttttgtttataatttttgttcaaaggattatgtgaacttactacttatgctgagacacaatttatttaacaacttttcctatatagctgacactgctttttataatttggatgtggtgatttaatacatgatctatgcaggag

SEQ ID NO: 2954 - DNA, 5934 bp, Glycine max
  Intron number 2 from transcript Glyma12g10250.1 (locus Gly ma12g10250) derived from phytozome v7.0 (chr-ID Gm12; pos 8097595 to 8103528)
caaggaggcttaaggagtggggtaaagatatagagtatgtagaatttgaaggacaacaacatggtttcttcactattgatcccaactcggaaccatcaaacaagttgatgctgatcatcaaacaattcatagagaagcatttcgggaaagtttgaagggcttcaaacacaactagtctactacaacatgtatgtttactgtagtagcttttactcttgcatttgtaactccaacaatgttttaggtacgagtgatgaaaagggacaaaataacatttctaagcctcaagtatgcattgcacaaaagatgtgttaaattacaattgtaataaaactttgcccttcaaagctaataatatatcctgcaatttctctgagccagctacaaagctagcattctaaacttcaagtaggcagtacccaaaatcagattagcaaacacaattcatcaaagagggcttgatagagcaacacacttcctatcggtatcccttctatcacattctctattataaattaaagtttagtgggaaaattctaagaaaatgattgtttcatggattttttttttatttctaggaattttattttcaaaaatataacatgagaatatcattcttgggtattttaaaaaaatatatttggttatattttaatattcctggaaatatcttttaaaattcaaaaataatttaaataaaaaatacataaaaaagatattaatgatattttaggaaataatttcccttatttggttgtattttcagaaattatatgactaggaaggttattcctaagtatatttaaaaacgtatttgattacattttaatattcccatgattattttttaaaatttaaaataatttaaataaaaaagtaaaaaaaaatgaaagttacatttgtattagaaaataatttttcatatttggaaatatcacattctcatccctgaataaaaacatgaaaaagatagtaaaaaagttataacatctccataaatcaataacaattgaaaaaaattaaaaattttataacaaacatgaagatgttatgagtgcagatccactatggtagagtccgctagctgtagtagaattatggagcaataactcaattactttctgctcaatataagtcttaaaccctagatttgaccacagatcaattcattataatacctataattattccacgtcaaggctcaactccaactaattcttcaaattgaaagcgtgcaaagtttattcttaaaaaagtatcataaattatagttgcatataacgcaagatgatgattttcacttcctccgtctttgatgttcttactagcagtatcttatgttgttctaacttgaaaaataagataatttgacatatcatataatagtattcattcattatttagaaaaagaaaatagtatgtaagcaaaagtgtaatgatagaagtattgcaactgagcttcgcttgaattgacattaactgcgacgatcttctttttttttttggacttgctttcatcaaagtttttttgcattattttgctagctgtctttttccccccctattattagcagtgttaataaattcatgtggaaaatatatataaatgacaaaagaataccaaattaataatatctttagcgttatatgcaactacaatatgatattttttttaaaagacaccttgcacgctttcaatttgcagaactggttggaccttgatggaataattatagatgttagtagaaagaattgatctggtatgatctaaatatataatttaacacttatattgatcagtagtggagctactgtttcaaatattgcacaactctactacagagatttgtactcgaaatattacattctggcgcttatattctcaaaaataaacttttaattcgtaaaacatcctcacgagaatatctcattttcgtcccttttaatgagaataaaagtgtgaaaaagtataataaaaatggaagttattacattcctggaatgaacaatatccatgaataattttttacaacttgtaacaaatatagacatgtaatattcctatgttacatgcctgataataaacttttaatccgtgaaacaaacgcatttcacctatatttagacttataaagtgatagagttttgattttaatccctctagaaagttttctttattttcatcttttgaaatttgaaattactattttatatatatatatatatatatatatatatatatatatatatatatatattttaaattttcatccctcaaaaatctgaaatcgttatttttggtccatgattttcttaaggtagacaaataacattcattttagaatttttagaggtgttacatactgacatgatactgctaatagtagtaggtgtggatagtcatacgatcttccattaaaaatgcaagttgttaacgagtgtatcttgacaataagactaaaaataatgatttcatatatttttaggatgaaaaaaaaacctttaataatgattaaaaattacaaaattatgaattaaatttcaaataataatatagcgtataagaggttacatcaagagaaagggtatgagttttaagtttattccttttgaaaaacgaataaaacaattaactcataatttacaaacatcttatgattgaaaattattaaattattttcctaattttaccaaaaactgttgtgacacacactgtttaatgtgatgaaaattttataactatcagacgagaatatagactcttcatttctacaccaattgagagtttaattcatgatagactcactcacataataaattcaaggatgtattatcaaggccagtcataacaatttatgagtttgttacaaaacaatagataaaggccctatgtgtacttgtataataaatatatatttcataaaaaaaaattgacacacaatttcattaaaaataatatattttattacatataaaatattttttgtattcataaatacatacaaatataaaatattagatgctaataaatatttatttttttagaaattaaaattttcttatctttaatgcttgaaaaagttaaaatcaaagaataaaaaaagtttttaaaaattcgagaagataagattatcgctaaaaggaaataattttttttcctactcacacaccatagttgtctgaatcttttatcttttttgaccttctttactctttagtcatgagctttggacagtcacaccacaaaacaatcttgaggttcaggcccggtatattatgcaagaattaatcaaactcaagtccaagctcacaaaattaacatgtatgtgtgttgtcatctaaagtaaataaaaaaaaatctgaatattgaatataaatcaacataaaaaaaaagttgattaatgatagctttaatattcaagaaagaatgttattttttgtttaaccatatctacttgagattttttatttgacatctaacaaattatttttcactgagttgattcattttgaaagataaagtgatacttttaattataattatcttctatattataattaaaatttatagtcactgagttgattcattataattaaaagactcattgcggaaccacttatgctaatatccttgggtaatactgctgactttcaaaatcaaaggaatactactaccattatactgtgaccatggagaaaatggcacaactttagaggcacagaaaacaacgtatagaagtcatccacaatgacatgcacacttcatgcctatcttgcataccaacacgtacgtctgcaaaccaaccatagtaagtcagtaacaattcctatatcgagacgctcgaaattgaacaacgggagctcttgagaatttcaaatggtcattttccctcacacaaaacagtaatgcaagggaaaagaaaaagatgtctaaaacatcggattccgaggtcaacctagtggaagattgtgggcaaaccgtcaaaagggatctttttttcaaatttattaaatgggtaaaatttgaattaataccaaaaatagataactcatagaataatttatgactaagtcataaattttatcatgactttttttattgaactcataaaaaaatatgggatttcaaattttttttttaaatatgactttaaagtcataagaatttttttcttttgcatttttttattcttaccactgtcataaattttttttacttgactttaaagtcgtaatgaattttattttattaaaatcataaattattttatgatttcattttttaaatatttttttaaaaaattataaataatatttattttaattatttaatgaattaatgtatattttcttttttaagttttatttaatattttgtattttttatattgtttttatttaatgttttctatatttttttatattgctttatttaatatattttctatattttttattaatgttaaggattatcttctatatttaatatatttttgatattgaatgactatatattattagaaaaattatatttacaagtatttgcaaatacttatactatatgaaaataataaatctaaaagaatttaaaatttctctgtaaacaaatatttgaaattttagtttgtttataatgaaaatataaattaatatataaaatatgcacccattgaaaaattttaatttgtgatgtttagaaaaataaatttaattgattaaataaataagagaaagacaattttttaaaaagagtttcaaattaaaagaaagataaaaaatattttttatgaaaatcatataaaaacttaatgttccatatattgttgtttaaaaatattaataaaagtgaataaaattaaggataatatgcaacaaaaattttggacctacattaaggatgattagatgatttaaatttttagtaaataagcaaactaatcagtttagttaaacaaaattactgcctaatttgtaattgaattgtaattactttctatttccttataatcatgatatgtaattttattataattattctgagtaccgatatgatatggatgaatgatgtttttttaatgaagataaactgtgtttaatcatatatattagttaaaatttaattatttacttgtaaaaaaaatatgtataaaaaacttcgtactccattatccagaggctatcttcgctatgcgaaggtatgggggagggatgttgtacgcaatgggagggctcgccctcgaaaaaaatatgtatatttaaaattttattttttgataatgaaaatataaactaatatataaaatatgtagtcattcaaaaaatttaattatccaagtttataaattaattttaattgatgaataaattaattatgattgtaacatgtgtctctaaacgtcatgttactataaaactgagtattagttaaaataatttcgaaaaacgatggataaataattttataaaaatattaatatattattttgcattctaattcataatagtgataaatatgttaattgataaggtatgtaagtcaattatcactgaactagtgcatcaactagcattttagttagttgtcttcggtgagttccacgtacgcagccatgttacttaattgaagaaagagttttgaggtttacaataattctatttaacttaaacagaattgtttacagaaaaaaaatacacgtaatttctaaaaacaataatgtcaaaatttggtgtctatagaacaaatttgttttgttgctaactagtgaaaagtttatgtttttttccttattgaacaggtattgcaggctttgtttacccgttggggaaactactgataaccctcttgtgaatccgtttgggccaaatagcaagagccttgaagcaactaaacttgacccaattttagtggtggctgcaggaagtttgtttaaggac

SEQ ID NO: 2955 - DNA, 2677 bp, Glycine max
  Intron number 1 from transcript Glyma19g39860.1 (locus Gly ma19g39860) derived from phytozome v7.0 (chr-ID Gm19; pos 46401741 to 46404417 reverse strand)
aagactacctcgagtgcctccaccattccaaagaggtcttttccttaaccactccctttcatttttcgaaaccctaatttctactcatatgcattcattcccctcgtttacgaaccctatcgattacgcgactttcacatcttgtctctttcattttacttagatcgacttttgtggttcagtgcattaatctgacggactgaagtttgtcctgtgtttgggatcttaaattatttgatgattcaatttactgtattgaaaggagacatctgtggaagtgtttaagctagagttgaatttgcaaattccctcttctgcttatatccacatcaaatgaagatgaatgtggcttctaagaacttctcaagaaggaaggaactggacttacacctcatttatttattgtgaaaaggaaagtcctaataataggtgaatggtaagtgattgaattggccactgttactgtaaaaagtaaaacttttcactatctgttgtagttgttgtggaatatcattctactacagcagcattaagaaaaaacaaaaaaattcttttagctctgcgcttagaattgatctaaaactagtcagatctttcttttttccccctttatatttgttgctcatctgtaaaggcatttggttgtttgagaaaacatgtccattcaataagttagagactatggacttggtaaagccttactgttatcttttttttgtgtgtgtgtgtgtgtgcttgttacctaatagcagtttaataaatcaacacggtgagttaactgaaatggagagtttcctgtgaaaggacttgcaaactattgtaatacattcaatttcttgcactgctaatttcactccatttattctgtgtctaatgtttgcctctcccgaatgaagccatcaggacatagcgagtaaagtatgggtagtgatatgtctgtattctatgcttcctgagtccattatgctccaattcaaattttgtatattttgcagttaacttatgttatattttgacctgattttaatataaaactttattggtgattttgaagatttcaacatactgtttcctttaaatcttgaaattttatttgccttttccctgcagcaatcatattttaatctacattctatttcagtctgagttccctatgaaaacaacattgggtttgtgctgactactttggattctctgatttcgtttgtgtttctcttttatgacaactatgttcattttgttgctagtgaccaatggtatttgttgcttaacagaatttggccatggattgtgaactttgaattacaactggactttcaatatttgatttgactgtaagcctttgaagtttctaaacttaatttcttctcttactttcacaacatattttatctatctattttgtagctcatacggtggttttactcaattaacaatggataatgagatatcagttgtttgttagctatttagctgaactgattggcttaaaattattcatatagtcaagatacaactctgacaatgtataatcatgtggttgacaataagatggtggttagtttctgaaattttatgctgttatcatataatgctgcttaatcacatggttagacactttgctgttcgtccactcctaataactaatctagtgtatgaatttcaaacttctggtgaaaaattacacaggttaaccatcgttctgagtcattatattcacaacactatacatagtggtatatcattaatgaaaatattaaataaaatttacaagagtgataaagttgtcccttttttttttcttgttgctattatctggttaaagcctgttgtctaatgtagtcaagtttatcatttgtatggtttgatctagtaatcaggtactgtgtattatgtatactcttgggattgaattgatttgctaatggataaaggattggacaacacagcaattcttattccatgtttggtttctaacatagccatgggacatgacaaaacaaaagatgcatcacagcaattctgagccatgggataaccttgtgtcacacacaataccattcaaaaataaaaaatacccaaccctttctctttcacagtctttgtcctccaacctttcatccctaattctccctcaaaattgtttatgctatgcattatccaccaaatagaaaatagaacaaaaagtcaaaaagttgaattgtaactcaactatttgtattttgctgtttatatagtccctcggcatcaaaagcacactcatggagtgcttattttatttatttaaaaggaaaactcttatgtttgggagcagtgaagacgttgcttttggcaagaatcagaatatggggtgaaagttgtataacttgtttgggatactaagggtaatatgggaggattgaaaattaccagtgtttagcttttagtataaagaattcctgattacatagctatcctatttataatgttttctcaatgaagcttactttggtgacagaagtatatactggtatttgagaatgccatattattaaaaattgtcagttttactttgccactgatgaaaattaacttccttcttcagatacaagattttgataggctactaaattgctgatgttgattttgtttgtttaatgcagtttcaacgacgaaaccggatttacaaggaggagca

SEQ ID NO: 2956 - DNA, 3784 bp, Glycine max
  Intron number 2 from transcript Glyma18g41280.1 (locus Gly ma18g41280) derived from phytozome v7.0 (chr-ID Gm18; pos 50076247 to 50080030)
cttgacgaggtatgttttttttttttttttcatttcggatctgagttatggtaaattaaagatttcatgtaatggggtttcatgattatataagataaaataataactaatttcatcttaattaagaaagtttaagttagctgatattattttattttttaatctcaactaaaaaataaatttatttttaaaatgaaatttttttatgattttatacctgttattttacaagaaaaaaaattgggatcgattgaatttcaaatattcaaatttaccaatatttaaattacgaagacttacttcacattttgaattgtccggaaaagattatttatctcaaagaaatttacgtaaaattttagggaaaacgaccctttcattggaattttttatcatgaataaaatggagtgattaaaaacaaaattaaaattaaataaatgaggtcgaatgattaaatagagcagagagtaattcatataatttttttgtttttgttttttttgtgtgtgtgtgaattgtgtgtttcattctgataagtctcagtggtgttacactattttagataaattttgtgcaggagtggattcttgattttagtttgtcagggttttctttctggccttaaaaattaagtcctaagttatcatcaatgtgtacttaatgattgcattaaggggtttgctagtcacttctgaactagcattccatattttggattacatgaaggaatcgcgtagtttttttttttagtttgtacgtgtgggcataggcttttatttactaagaccaattaattacctaattcattaagattttaaaaatagttaatgtaattaataataataaatatatcttaaatttatatattatttttaaaatgtcattgttaataatgtttctcttgcttgctaatataatctctttctcttttatttaattgagaatatttttaatttaaaaatacttaatacagatttagtcttttataaaagaataaataaatttaaaattttggatcttataaataggagggaaaaaggtagtatattttatttgcttaaagatgatgcctgtattcggtgagatattggtggccttggtgaacttggttgtctttttggaaaagttattgggagggaatatatgcacagcaagattgggagtgtaaagtgtctgacatgtatagaaatattttctagtaagggacgtcatccagattggtttgggtaattaatgtgcatataaagtgattgaaggaatccattggaaaagatttatactccgaaaaagtgagtatttgatatgatcttgttgttctaggattaaagaaacttacatatgacaagggtttttttttacctttatctaggattggctttagattgggattaaagtaactatgattgtgttattggggttttactctgacaacaaaactattaaaattctggatgctatagtagttgtatgtcatgtcatgatagaatataatttttcactttatgtttgacaattattagttgcagattgattctatgaaatgaaactgatcttctcacatgaaattggtactaataatttctgataggccatgcatatttagccgatacatggcttgttatgtttaattataaaagattaggatgcaaatcttatatattttacagtggatactaaatattaattttacattcattatgaattaacttttacttttcttagtaagctagctgcagtataaaattattgtaataccatgcaatgccacaaatatgcctcttctaaacaatcataatgcccgtaggcacagacgtactatgtgagcgctcagtggtcttatattgtcaaatgtagggcatcaatatgcacatgcattgtgccccaatcagttccttcagagaataaatataaccttgaaaagtgaaaaaggcgatgaataataaaatggtactatctatgtggcattagagtatatatgtgacttgtcattaagattggtggtgtatgttgtaccatttggtagttgtcatgtttgagtatgctttatgatttttctttaggtggaacctattcttgcttaagcagtcatttataccagagttcaattttttggaaggaaatacaaggcatggacatgtttttaaccccttaaatagatatttattgaagttgatataaaataaaaataaaaatccacgccttgtatttcctttcaaaagcattgaacctagtggaaaacctttgggaacatggggagagggggtggaatcaacggtggaatataaccaatacctatttggtcaggtcaattcctcaatgatatgtgtgtaaaccttgtaagcagtctgatgtgcgtaaatcaatatattggttttaatcttttgttaaaagagtaaagaaaacatgattgaaaagtgaaagaatagaagggaaatggaataagaatgttcactagttcaaatactgtattttctttataagctacaaggaaaatgtttcctgaacactgcttggtccctatatttcttttaccacagttcctggacagggattggttcctgtggaagaccaacatacatacctgtgggtccttgctcttgtgcaatgattgaattgttgtaaaatcttatgtaaattaaaatgatgtgcacaacttataactctaaatatatatatatatatatatatatataaaacatgaaaacgttacaccatgtaaactaatacaactataattatatttatacattttgaggtggaagaagttgtttacaaattataatgaaatcaagttatactgagtattatttttctttctttttagtggttttattaggcgcgcagttgttgatattcactttactccttatttgaattttatagttgtcatcatagtgattccttctaaattgatcttgctaattaaactctagttatccgttgcggttttattttgtttcttatcatttgacaatttgaactgtagcttgtttgattcattttttttctctcagtgttgtaaatttgcgcatgggaggaagattttcttacccttaatgcaccaagcacttccagcaaactcaaaacttctgaatttaaattttcctaatatataaaattgcaaagttcacagaattaaaattttactggacacaagatggggacttctacctatctcgctgttgtacaaaacacctggacatcaacccatgattatgttatggttttgaagttcaaatttattggattcaaggtatagaatgtgaggttgtgtagaaagttcaaatttatttgcttgctatttttatattcttgaatttgtttgtaaatctattaatgtaagatgctacgatgaataaggatttctgtggagtttcatgtatgactatcacaagtcttgtactccatctctatcttaagaatgtataggtttatggtaatggaacacaatcttagttctcatttttcattggatggtgcataaaattgctctattcttcccttaccgttgtgatggattatctgaaacctgaatgtatagagcccaattagatgttaaaagttggggaattctatgattaattacagaacttcattgcctaagtccttcaacattatatagttggtaattaagtagtccctgctgctactgatacaagtgcagagaatctcagtatgttacctaaccaccaaaaatttcaatatttgatcttaattatatgaaatcttctttgttaatcacaaacaggttcacaggaggtacaggcagtattatcaacagat

SEQ ID NO: 2957 - DNA, 1347 bp, Glycine max
  Intron number 1 from transcript Glyma02g34830.2 (locus Gly ma02g34830) derived from phytozome v7.0 (chr-ID Gm02; pos 39414082 to 39415428)
aattcactgccctcaaaacacaacttcatattcaggtaccaagcattatagtcatcgatagagtaaattaccctgataccacctgagatttttttcagatttcacataatatccttttttctgtctctacgctcaccccctaatgttcaaaaaacattatactaacaccattatatattacgctaacaattcttaattgtttgataaaattatatcgtcctataagagaggatgttgtaaattaaaaaaaaaagtattgtgtgcaatatgaagaaattttaaggataaataactaaattcatccctgaaagtgtaggtattgacaaattgatctgaaataaaaaaaaattaaaatttagttcttgaatatacaaaaagtataacaaattagtctaacagataatttaatgataaattggtctctaaattttgcaatttaatgtcaaattgattatctaaaaatacaactttttgtcaatttggtctttcaacattacaacttaataataaaatggtctcacaaatttaatcgcaagattgatttatcgcaccttttgtacattctgaaattaaatttatatttttcatctttagaagtcaatttatcatcgcatcacacttttggacatgaatttggctatttacccaaatttcaggaactaagtcagtgtaatttattctaatagataagaaggaggtaattaattcaatggctacacaaatgtttggaatgaagtagaaactttagtcagagagtacaagatacgtgattttttatgcactcctgacagtagcttgacagttatctgctggattgggaaagtttctttgaatattaatgaatggctagtttgcacccaacgaaaatgttttctataaactatttttgatgttttttgctcgattaaacagtgagcatagatgatgtaagtaattatagtagataaatatcctttgtacctactaataacaaaagagaaagccttcatagcagattactggctcagtatcaactatcaagtgttagtcaaacatttggattagcagaactcagagaagcaagtggtaaagctcttgaacaaatgtgtcatgagttagaaaacttattctgtaaaatgacatttaatcgctacttgttactgtgcctattttggaatacagggaactttctattttttatttcacatttatcattgtattatagtccttttcaaaatgaaacttttatcttgcatttgctgactataattttggcttaattatgcctctcacactcttctcataaggataagtgtttgaaatatcttcagtgaaagggcatatttcataaatttcaggagaagaaga

SEQ ID NO: 2958 - DNA, 986 bp, Glycine max
  Intron number 1 from transcript Glyma18g04540.1 (locus Gly ma18g04540) derived from phytozome v7.0 (chr-ID Gm18; pos 3319843 to 3320828 reverse strand)
tcattcattctattgttttgcaggttacaatctacatctatgcttctttttttttctttagcaatgcgggccacactatctgtgacacgttctgtctttccaccactatctctctgatctcatgtttagatcagaagaatcaatgataagtgaaacctaccaaaattaaattggtgatttttaacaaatttcagccaatcttacggatagggttgaaaagagagtctcaacaagagagtgtggctagcatttctctttttctttttcactacttattagattggtaattttatcttaacagaaatttatatagtaatattattgttggttaaaatttattaaaaaattacaaaattagaagtaatattagggtaaatagtcctcctgttaaatttgtgagatcattttgtgttcatggaccaatttgacaataatatatattttcaaaaatcaatttgacaataagtgacaaagtttagggaccaattttttgtcatcaaatcatcattcattcgtaggactaatttgtcacactctttgcacattcaagggattagatttgaaatttcctaccaagtgtgttaaaagaaagactatcgccggcatttcccaaatttagatgcatgtagtttgttaagggcttttgtaattgttattcaataaaaaatgaagttttgtcttcgtggactatagcattaatacaaattcttactcattagtattaaaatgaattctcaattatgatttgaaaataataccaagagcaagatcattgagcgccgatgagaatggaattgctctagcataatcagaaatcttgaatatgcaaccgaattaaacattcgaaggggaagatttgtcattctgcttgttgttactaatcttatgtggagatatttaaaaatgtccattcataaattttattcaactgtatgataatgatgctggttcaaattgtaatttttttttatttttttttgtgcagg

SEQ ID NO: 2959 - DNA, 3545 bp, Glycine max
  Intron number 2 from transcript Glyma04g23980.1 (locus Gly ma04g23980) derived from phytozome v7.0 (chr-ID Gm04; pos 27448420 to 27451964)
tggagctgcctgctccaccaggttggaagaagcaggtttgccactgtttcttctgtttctccttttctgcgttttttttttttttgcactgtttcgctttgaccagttcgttttgttgaaattccctgcttaaattaccgtaattcgttggttttgtcgtgtcacccttcttgctttggcgtggatgtggaccttttttttctcgcgatatttggtctcaaccacgcgattcccagcataagatgaattagggcttttgtggatttcgctagtctgtgtcgaattgtgtcatgttgaatgcatgtgctttgaaattcgcacgaaatgcatccagaaaaattatctactaacgagtatcaagtgtctgttagggttttgatttatttgcgaagttggtagatagtgctgcttttctttccgcactgtttgacttttaattaggactgctcaatttttcaggccatgtaggactgatgcgctttatattgaaattttacattcacatattttggcttactttagttttgtatttttttttaaatccagtaaaaaggggttattgctttgctggattgttcttgttctagcgaatgtgtttattgcattaaaattgcttgaatatggctgcctgcatattagctgctgtaggtgttatataacaggataattatttgtattttctagcaggatgggctttgttgtttgttttaccctccacaaacattcatagtgtgtatcaattgccaaataaattccttgttcataatgataaatgaatgtgtagaacagctttttagaaaactgaaaaatgtttaggttgaattgcttgaataaagtcatcattttatgttttcctagatgctttttcaaaagaggagaaaagaagaaacactacagaaatttggaaagtgtctagaatcattttatgcttaatgagggatggaggggggtggaattttttttcttgttttgcaatataaatatttgatttttaacaaataattatttaataaatgttcacttttataaaaatatttactgtagtgtgtgtgtaataataactaatatatattttataatatgtttagttgaagtcacatttatagatttactacgatagctgtttttatttgttctcattaagtttcactaatcttcattaactctcatgaacaacatatacaaactgcataaaagagtaaaagaccaatatgggatgcaagccaatcttgctaattcaataaaaaagtgtcacagttcaagttggctgtgcataaactagatcaaccagttataaacacagcagaccatatatgtatgtaaagcctgaagtagggggatcagcacccctgcctgcccctgttcttaacgttatttttatatgatgttctactacctctattatactgaactgattatctgatttttttgtagaattgatctctcatgaaatcacaatagttgttttaaatacattgcattattctgttgtgctgaaaatattttgaaaggtgtgtgctactttagatctgctcttttaagttggtgaggttggactccaagctgctgttgttaatatcacgatttagatcgtataatctcacgatcttatacgttaggagcccccttctatgctgcagattgtgacggagtgggatctcagtggcatcgcaatattccttgctcaatcgtgggatcagcagtcacctgcaagtagaaacagaaaaatgggtcgggtttaaatagttgtcagttgcactgagatcacagggtggcggagtggaacagccccccacagctcttgaggcacttgtttttggagcgcctggccctcccgctgccatttgtggcaaaaatcatggtgtcttgcagctgctcatccgtttgcaccattgccggacagccgctgtcacctccctcttgctgccactgacctcccagcactcctccatcgatttacatatgtaaaacataacatagaatataataaagtaaaaaagcatacaatataatgaattaaagaatagtcgtaatagaaaaatgtgtattatctactagtattttaggtaggggaacgtggaatcttatgatcatagttacaattgctgagttacaagtttccatccctctccttattgtatgtaggatcacaatttagcaaccttgctccaagctgctagtatctttcaattttttccaatatagcttttacaaattgacattcttctcagagtatggcttgttttatttgtcagaacctttccctagtccgttttctctaaagaggttgaaaaataaaaaagtgacagaggttagaaaaattgtgagaaatcattggcattttagtgccttgatgcaaccgaatttgtcattcataatgtttattaattatcaaatactgcaattcaggtaatagtttgtaacttcatatgcagtccatatgtgcatatcttttttttttttggtttcatggtcatggtagccttaaatatcttcatatcttgattttttttttcatgcagttatgcactattatactgagttagggataggagggatttgggttgtataaccttgcatacatggcaaggagggtaggaagggaaaaggggttgaagcaaatgataaaaggatggaaagataggagagaggacatccaatctgagttttggggcctttgggctggcaggtttttgcagacccttaaaattttgcagtgtttttagtggtttctgacatttataattgtggtttatccctatatatctgtagtaaaattagttcctacaccatttcatggactttcgcctttcccaagtattgcctgaatgaaagcttaaagagggaaagataagccttctgagttgacagggttaatttggttccatgcatgtcatttcctggagtataattataaagactgctagtttattagagccaatgatgcttgactaagcaccaattcagagttcacatggaagaatgactctgcccctgtaaaggcaagatattactttaatgatttggaaattgaaagataaagagatgtgggtgtatgtcgacatataatatacaacctaagtggcatatgtttgaaatgtagttttatcatcttttcttttcttttttgttctatataattcggtgaaactgaacatttaaacgaagagtcagggatcaagttctgtaaaaccatggaagtcactaaaatgtggttttagtatcttatgaacatatatatgagcagaaaacaataattttctcaggaggtgtttgctctttctatctttagatgttactgtaactttctatttgcaagagtatcatactaagggctataaagtgtaatagtgtgaaagtagtgaatagagctttattctaaactttacggtctactttaagaagtcaataaccaaaatcttgtatatgttattaggttatgattgctgttttgttgcttgctttttcctgtaagatgattcacaaatcatatactgtatttcattgcagttcatcccaaagaaagctggtaccccaaagaaaaa

SEQ ID NO: 2960 - DNA, 3501 bp, Glycine max
  Intron number 1 from transcript Glyma13g26890.2 (locus Gly ma13g26890) derived from phytozome v7.0 (chr-ID Gm13; pos 30073097 to 30076597 reverse strand)
agaaaaggcaagtgaaggaataggtgggtcctactttttcttaagccttttccttcttccatgttgtatttctctctctctctctcttcgtgctcgcatacgctcttctctctctttctttaatttgaaaatctttgatcaactctagacgcgcattcttcatttattacagtctgttgtaaaacccactaaaaccaaccccccctctctctctggtttcattaattttcttcttctgtgatgcccttttgatcaatccatcattccaggtctctctcttcaacttgattttactttgtccatttccggggttctattattgtcgctattattatgattattattcctttggtgggattaaggttttattcatgcgttgtgttcctttggggatttttgttcgtatttgttgtagatctgtggtgggtttggtttggaatatgatgaatttgttgtttgaggttagggttttgattgtgtgaatggatgaaacagtttgttctatttaaggtttatgtttgacgtgttctttggattgccgaggctgttccctttttctgcttggtcaattaggtggcttggattatgtggaattgtcaacgttcaaaattaagtgtcttggattgtttgtgttcatgcatgtgttgctgttggtcatggctttgctaccaagtcttttgattctttagtatgtttttcgcttgatgtgtgagtattggttttcatgggaaaacacatatcacacgacccttttggaagctgagtctagtttgtgtgttatttggtgaagttattctaatatgcttgcaagtggtttacaactttaccttttcatggttgcaactgtgcgtttcttgcgtcctaatgcactttgtttcaaaggaaaattttcttcctactaccaaatgctgagggccactgtgaaaacaaactgtttcctcttgggatttgacttgggctaaactcaaagttgtctgaaatgcttttttggatcaaatacaaggtattccttgagcgataattggagaagttagcttcaagaggtggttgtatgtcttcttaaagtgcaaaataatggagaacatgagggattcgcacaactcatgtcttttgcagttacttgtattctaaagaaattggtctgcttaatgtatatgtagacattatttatgaagggataggaattctaccactatcatatctcaaacatatcatttcctaagaaattgaatttacttgaagggtaatcagattttggtgagaactcataccatttgtagttttgattcctgagtcttaggttgtttagatcacaatttgatgccaggtaggtaggctcttttacagggatgggtgttttcaatctttgtgactagtcagtatgtttggatgcctccaagttcttcctttggacctttttcatgtgatctctttcatcaatacaagaagctagatacaaaacttggcttgttttagtagataagaattcatgttaggaagctatttttgagaagggggcaatttttaatagggtatttactttttgtcattttattcttgccttttttgactttgaaactagttcgatgacccatgtggccatgcctacaaatttccaccaatgacctgatcttgttaataaactttcttttttctttttcttctgtattgtcatgggcttgtttatttgtgcctagtcaggattgatcaaaaccaacacagctccgcatcaagttttcatttttttaataagtgcataaattcacactgtcatttcttttgatcagtttctattgagctctattacaagtattaaaggatttttttaaaatttctgccaatgtgttcttcgtcttcctgtaattttacattgacaattttttttttggttccctttgctcctagtcttatggactgaggacaacctaatatagctgtgttacatggttaaatcttttggtgaaaaagtttaatgatgtacattgcctgatacaagatgtttttttttgctcaatttgagcactgcaatcttagaaaggagttgtgtgagtcagtcaggccttgaacaattaaatgttttttaccttattttttccttagtttgtttcttaatattcatacaaatcagttatgtctcttaaaattgtagtttcaaaacctttggtggtgtatctgtcctattaatcggaattttcaatggtttccatattcaatttttacattattgattctctctattttaatctaataaacttctacagtataatatatgtaaactttacaagagatttgttgttctgatcatttggaagtgtaagtttcattttactatcatggtatatttctacttaattcatgtaagggatagcatgataaatagaagtcgaagagtaaagaaaacacaatgccaggccatcaacaaaaacctttattaaaatggtcttgcatgttgacaaaacacagtggcttcattttatccatttagctgactccaacatctagtgttagtatttttttacataataataagggtatcataaaaatggctctgaagccagaaataaagattaagtagaagaatccatttttaaaacatttaaactttttcgttaaatcatcagcatttggaatgtttttgttttgtccggcaatagtaatttttattagagaagcaccagtagtgctaaaagtatacatggttaaggatcatctcaaataaccaaccacgtacaagaacaagcctttgagtgtctcaactaccaacccaaagcccaccatacatggccatacgtccatatcccacccttaatacccacccaaagaaaatgaatcttgacttatacagagaaatcctgcatacgaatggaatgttaatgatttatgtctggtggaatgtttaatatttgaaaaatattgggcaaactgttcatattattatattctatgatattctattttatggtaatacattttgcaggataggaaataagacttcccaattggtcaattataaaagtaaagttgagaaataattaattgtaggaatgtattttaaatgtctaatgctgatgcattttggctgcttgatgtgttccgtttgctttcataagccagagtttgtaaatttgttttaaaactgagtttggggaatgccatgatgcatctttgatcctctcaatggaacatcaggagagggtgataggttcaacatagaaagatggattcatgatatagttgtcagtggtttttttgcctatagaatattacagtgttgtttgatccatttacagtcaacgtcaggtgaaaaggcttggtttattgttgttgtttttaatgaactagagatgtgaatttaatagcttacttgttctgctatgttataattttaactgtttggtgaaagtaaaaagaatcactgtagaattttagtttctgccttcctgattgattctaatattttttcccccactcacagggcagccagtagttgcttttactagc

SEQ ID NO: 2961 - DNA, 9325 bp, Glycine max
  Intron number 1 from transcript Glyma08g06980.1 (locus Gly ma08g06980) derived from phytozome v7.0 (chr-ID Gm08; pos 5006875 to 5016199 reverse strand)
aatattcaaacaccaggtaaactcaatttcttttctctttcttttacttagtaatcgatcaacattaatatctctgaattagtgcttaatatttgttttaccacttttgttttgtgtgtgtgtgtgtgttggggtattttagctgaataattaattgaatgtcaatatatgtagacatacatgcttcattgtggttcttatttatttggttggtgtggttctaatttcactctactaatatataaactaataaacacagaggtaaattaaaattaaactattaaagtacctgaaactacttaaatctgatgaaatgatgtctgggaatatatctagtttgtatcaaaacttgaacacgggggttgcagaaaactctcttgctttgatgatagtacacttcaagcagtgctaattttattttatgtattaatattaatatatcaatcctaaaaagttatcgtgatacttttaaccttaaaaactcgaagaaaaacaaataatattgttgtggagaaatgagctacttcgtgctgcaatcatcatctatttggctgcattaatttgaagacccgacaagtttcccaggagcttcactgtttttctgaattctgtctcgtgtaaaacctagtattggcttaatcatccctaattaacattatagtagtatttctcagatagatatagttcttttcggccttaattacccacttagacataaatccagaaaaacaataagttaagtgggagcttatcgtttttacgtctgcatcctccaaatttctcatctctccgacaagagattcttgtcaacttatacttataaggtgcacatttgattcaaaacatatttttgcgagcatttaattaatttttatatccagtaaactgtacttacacttaatggtgtgtttttaattcatttaatgagtttgacgataaatgtgacaacttatatcattaaatgcaccgtgttttattggcaatgcataaaaatcatattcaataaaaaatatatatactacatacggtgggatctaaattaagtaaaatttacgaacttcctcacatattttatttatattatattgtaataataatacgttattaataaaagttgaaataacgtactatgttatatgttctttattcgttccattataatgtactcatagtttcatatttgatatcctatatcttttacatttatagactgtacataccaaagactaaacatactttatctgtatcttccaggaactcaattgatggtttagtaaaaaataaattaatcttcaatcatataatttaaaataatattttaattttaaaactattttttatttctcattttttaagagttcaattatacattcatttgattaaaataagacaaccaagttcggcaacaagttatacccgtatatgacactcttgatcagcgttatgtgttgcatagtgaaggaaactagctattggatatgatgatatgattttcaataacatggtttatttggataaaattagtacataatgagattatatataagttagagtatcaatgcaagaaaacagatcatgatatatcttaaagccaaagacatactcaagagacctcagtcagcattgaagcgtgataatggaggtatcatgcctatatttatattatgtgtcctctaacaactcttgaaatcatttctgttatttgttaggagtagtgtgtgtcagtcctcctaagtacatgtattaggtggtagttatcacattttaattactcacatgttagaagtctctagaatcttaatcttgggctagagatagtagacttttaggctttgccacactaagagagtgtgttcaaaatgtgtttcttaatatttctcaaatgagtaaatagatattttggtctctgacttttggtcccttttgtaaattagtccttatttttttgaaatgtaaaaaatagtctctatctttacatccgttatgcaaataagtttttaccgttaaaatctaattttcactgttagtcatatgtctatgtgacaagtctttgtccatgtaagcaaacccatgtgacaagtgaagaagatttttgtctcacaagctaagatcaatttacgtactaacttctctcttcttcattaatgtctttaacttttctatgctactctggtctgttttcttgtgcagatataattaaaacttccatccctgatcccactcccaccatagccctaattgaattttagctacacctatcaaatcacataccttaacttcacaggcaatgttcacagtacacgcacaacaagcaataagacactaatatcccctatctttttgttcatttctcctgtaccttccaatacataaaatggactttcaattcacctattttgtaccattattttacccaagaaaattcaaattctttagatggcttagatcatccctctttttattacattgatgaacaaccaaagtaaaaccattcttcaagattgttgggtagatatgcaaattagggttctcctttcagtcccaaccccattgcctacgatataatgttcttggtttaatcatggaatgcagagatgtgtacttctcacaaattcaaacccatatacttaaacaaaggtacattatatgtttttcaactatgattatatatttgaaatcaaaacttttgttttaagttttaacccatttgacattgttagagcttgatataaataattcagtatgttctaggaaaatatgatattttatgaaacttataacttgagaactttttcttcttttgctgtccaaagtaatctcttacgctttgtagccaatgaactctgcttcattttgcaattgagaaacaatacactataagattgaattgacccctttaattagcttcgaagaaagcaagtctctttctcacatgaaaaaaattaaatttcaatgaatcaaaataaaacactcattcaattatgcatccaaggttttaaactactgcagataaggactgcattggccagagtagccaatgacagtaattgtaacacaaaactactactacaatttaaacctcaatagtaccagagtttcaaaaccgcaattgcagctgcaacattgcagtcaaggttttaaattgcattcatggttgcagtttcgccatgtcaaatatagccacaattgaggtcatgttacagttgcaaacaccccaaaaacccttgacgttgtggacagaatcatggtcgtggaccgttatttaaaaccttgattgtggttttggagaccaaaatcctcatcacaaccatctgatgcaattgcccacaattttcgtaatcgcagccagctggcaacttgacagatgattcaatttcaacaaatggagcattaggtaaaagaatcattgttaaatatggttaatttactataaatgtaagatctgtgagccaagatttttgcagtaacaaaataaaatcatatgcaggacattagtcttatcaagtcaccaccttattcttgtctcccaattctttaaattctttaattaacttatcaatagacttatgttccactttgtcactaaaattacatgcaggcacatttgttttgcagtactgtttcacagctagtagaccatcaattgtccctttagtagtcttaagattgtcattcacacctttattattacaagtttcatctgttttgtagcactgttggctccatttgggttctattttttagaaaccctaatttgaggaagaagaagcaagtggagaagaaaatatttgataactttttaaattttacatcaaagtcaagtctacgtgttacaatctgagataatttgtcacattggatagtttatgtggcactagaattgtcaacaatgtatctcattaacgacgttattttcaaatttaacgacaaagactattttgtaaaacttatgcaaaaatatggattatttttaacatttcaaaaagatagggactaatttataaaatggatcaaaagtcaaagaccaaaatgtttatttactctttctcaaaccttaaaagaaagatcaataggctctacaatattgagcctagagactttagactttttggctttgtgatgctgagagagaacaaatctttaaaaaaatatcaataaaaaaatggaggtaataatcttttgattgataatttcaacaacataattaaataggaatattttaatttagaaatatatcaattaatattttttataatgaatgtgcactaaccttaaaaatctatatatagtttagaaatggaaggagtcataagttaatactttgaaataaaaagttcatactcttcattattttactttttttcaggttaaattaaactataggttgctgaattatttttttaaattttaaatagttccatatagttttttttttttttttgcagtaaatagcgtccacatagtttagaagtctataattaggtccataaacttattaatcattcttagttagatttgtgattacatttttattgttagggtttcattaaatacaaaacctagttaaatatttttaaatagtttagggatttactaaaaattaaactaatgactgaatctctagattatttgaaaatttccaattaggttcttgtagttaacatatccttgacgaaatcttaataaaaatgtggccagggatccaatgaaaagtgatttaaaatttaggattattattacaaacctttaattgagacttattttaaaaatttattaagttgtttgagaacctacagattatttagccttttttttctgagattgtgaaaagtacttgttagtcaattaaaatgtattgccataatttgacagcacttacacagttttaattaggaaagaaatcacaaacactccttccaactgtcatcatctgcaattatttgtaaaacaaaaaaaagaaaaaagaaaatcacgatcattaatgtagaagctgttaaattgagaacaagatttgtccaattcaagactcaatacaatgcttatccgaaaaagaaaaaaacaaattatcctcaagctagttgtttcctactaaaatatctgaaatataagtgtcttcatatatctagcaagtaaaaattattgtgtttgcatcaccctcttttatacacttcgatacttttgaaatataaatctttccattatgttcaaaactttccatacttttttttcttgatggatgcaaaatgtatcgcaaaagggaggttgaattatgacctcaaaatttatagcatgaaaacttagaacctgagttatttgtatagtcttccttttgcatagaatcattatccatagccttagaagacagatcggcaactttcttaatgtccaacattaaaataactttcctaaagtcctttgagaaacttcaatttctatattttccggtattctaaactttagaagacttggtgtcttttcttcaaggcaatgcatccatggtagttaagtagagattaaaatcctgaatcaaaaaggcctattttgggaatcgcaaattgaactgtagcatgagtcataatatttatgatcaataattaaacagaatgtacaagtaacaaagacatataaaagcacaaattcgtgattaataacaaaaaacataaatctaagagcattttaacataaagaaacatatcaaaagtcaaaacacacataatatattgattctaaccttagaagcttccttatatccttacaattttaggtgacaaattcatcatgagttgtgatttgagttatcagaaattaatgattctagtttttctttttttaattttatggtcagcaaaaaaaatattagatgagacaaaaggtgccttaatccatttgtcccgtaaacctgtcattgaccttcaatcttcctttcatgtagcttcccacacaaattactgctgtttggcatatccaccattcacaaatgattctagtaaagtaacaacatgtaggagcaaaatgtgttgaaatataaacttgattttagaccttatttgtctagataagaaagtctaagttctagaagacatgctaaactaaaattgtagatgtatgctctaaaaggatctccttaaaagataattctagagtaggttatagaatattttaaaatatgagtaactttatatgtatgaagaaaattttagagagtcatttgtaaccattagattaagtatgtcagtaaattcctaaccattggtttgagaggagacactaatataaatagaagtgttgcattagagtttatatgaagtcaatatcaagtcacaaatcaagaagtcattatttgtatatttatacaaatagtctcttcctccaaaactttctaagctatcccattctcaaatatttctttcactactaaaatttcattccaacaagataacagctgagtgtaagagaccttggtaagtgaggatggtgcacaatgggatgatagtgttttatttttttggtgaatatgggatgatggtggttaatggttactaataatctcgcatggacgattatcccctaaccacctcatcttagagtgaaaggcgtgaaacccttgaatgcctctccaatattcctacctagaatcaacaattagtgttgatactattatctccaaagagtttatatgacatggcataggatgaagtaacagtggagtgcttttacgcttttgatgggatattatctcttaattgcaattagactatacatcttttgaagtgtacgtgtgtttacgtgagaaggggttagagaccatcatcttggttatgtaccaagttgcctcaagagcttttggaaggtcgatacgctattaacatgatggaagtgttctcttaatcattatggtgatcatgattataaattgtgattgcggcaatggtcacggttatgttgtgatccttgataatgcaggaaaatgcagtagatgttccaataattgcggttgtgatgcgattgtggtggataagaaaacctttatgtcaaggactgcaatttagaaccatttggtgatctgatgtacatgtcattgatgaataccatgcacaatgatgacagacactatataaccatgtcggacacatagtacgctaaaacaatgaccttgtagtttgaagagtcagagataaggcttctctgggttgtgattacggaacaagttgccaaccctaataggtgaattgaatatgatatctacatagttccataattatgtagtttcatgcatttttttaaagatataatttttggcaatcatattttttttctctggggactttctagtgaaattttttcttgtactacaactatttctggacgtagtaggagaatctaccgtggtggtgtaatgttttgtctgttgtcttcgtgttccgatgttgacagttaatcgcccaacatgtatatattgctaatttttcttcttccccagttctatgtatagcactttaattaaactagacatcacaactataatgacaagcttccagctctttactctttagtttattcaataatagcctaagagtgttcttcttttcattcttctcatcgaggttacctctcttttaatctgaagtgcacgttggcatatgcaatcaaaactcttgtcccttagatacctgtatatatggctttattccttttcgatatttacatatgtctttcttccgttatgatcctccacgagtttatagttctgtacaactttagttaggtacctgtttaacaagtaaattatagtatgtttggtatttctcccttcactgtgatgatcgagtaacccaacactaagttggtgctctatttcttttttctaaacataatcaaaatcaattcattactgatcactttgtattgtcttaatgtgatgaacactttgattttcatctagttgctaattgcttgaacttcagcaaaatcttaaagactccatatttctctagcataaatattcccttaagaaaaaagatggaatacctactttgagtgagtggtagagtccgcattggtctgtgattcgtttgaacaagtttcaatgattctttttctctccatgatttgtccaaagggaaaggattatcggtgttgattcctgcagacaacctttacaattagagcataatagttgaagttgccaaatcttcaaacttcaatgctatagacacgaatgatcccactatggcttcatgataatgttatggttctaatggataggaaagtcacgatattttctcgttttaattttggcttattttaagacttttgtctttcttgtagtgcctgtatctccctcaaagtgcaatgcatatccgtgtgttgagcgatagtagcacatcgtgaatatatcatgtagcttgatttttcccccaattagaaaactacaccttttcctttcacctcaaagaattcatcattccccagtttgacccttgattagaagctagtgtccaacctgggaaatggtatctttgtttgatgtcacgtattaattcctacaaccactatttaagagccaagtaacttcatggagaagtcttcacatgtatggaataaattttcatttttcttgttttctttcattttgttgccacaattgtttctggggtggtaattatattgggaaaaatttaagttccacatcgactaaagataaaatcacttgaaagtatataagtgaagaataatcctcactccatgaattaacttttgaggttgagttagacttaaattcaataacttcttatttggctagtgccgtgcttttgacctttctctttttattttcaattttttatattttctccatcacacataaattatcttcgttttggaactttaagaccgtatgcttgttttagttccaagggtattttttactggtacttcattatacctattcagttttatttcatggctccccaacaaacttagttatagattgggaagatgaatctagagtcatttaaacgggagtgcctatagagtcatgaacattttttgttttcatgcaatgtatcatacaccatttgacaaagatgatatcagtggttagatattaatacagtttttcttttactacacaatagcatgcattatttgtggtcgaatctagacaaatgaaaagaaatatgttggaagcctctgtggccttgcatcatatagtccatttgattacatagaatcaaatatgttttaatccttcatatttgaattctgatgaggtgattgacatgatccaggtcaggagttgattgtggctcaaggctaagctaga

SEQ ID NO: 2962 - DNA, 1180 bp, Glycine max
  Intron number 1 from transcript Glyma02g07840.1 (locus Gly ma02g07840) derived from phytozome v7.0 (chr-ID Gm02; pos 6199905 to 6201084)
actcggtacaacttcaggggtggagttaacatcaagtgagccactctacttactttcaacttttttttctttgtttttaattgacatttaagggtgtcaatttgtgaatgtgggatgtttttaaacttgagggagagtaaaatgtaagtatgcaggtgtttaatatttgaatcatggatctgatctgtgtttatgtgatttcttgtttttgtagttagtttggatccttgctttgatttggcttcttgatatgtatggcctattttagcttagcttatgaagaatctgtgaggtcctgtgtgatcaaataacattgatatgagaaaagaaagttttgtgccctgcttgtgtttgagtttagggaggataggaagtgatgggaaatagattctctgcattcacacattcatgaattagagcctttaaatgaatgttgatattttaaattaaatttatagagataaaatatgagtagtccgatctatatttaattgttatgattaactgaaggcgggaatgccggggaatctagatccgaaataatgtggaaaggaggatttggattctgaacatttaatttttcaggcactccccccatgttcagtaatttggaatcatcagatgaaaatcacatattttatttcggtacataaaatttaatacacatttaaccgtgtgatcttcatcaaatggttaaaaatttaagtactgtatgattgcatgcaaatttgactatactgaatctggttctaaggagacacagaaaagtgaactcaagtagtaccttttctaaatatagattctccttttttggtacttgtggagtgccttcttttgagaatgttttgaaagtcaattttaattggccgattctactacttagatctgtactagatattccttttgtaattagaaaattaatttaaaatttacactttgaaaaaataatattgagaaaacttatttcactttttccttcacatctttgataagtagaaaacattggttcttgaaggaatactgaaagccattttctcaattttgatttttgatttaggcatacaatgaattgtgcatattgttttatatatggattccataatttggagttaaatgtttctttccgaactaagtgattgttttattttgctttgccctccatctctattctttcacaggt

SEQ ID NO: 2963 - DNA, 2067 bp, Glycine max
  Intron number 1 from transcript Glyma12g05580.1 (locus Gly ma12g05580) derived from phytozome v7.0 (chr-ID Gm12; pos 3706269 to 3708335 reverse strand)
cgcccgaagatctcaatctcgaactcatcagatccgtaagcaaatctatctcaattctcaactttcagttcttctccttttttcttcctttcttagttagtgtttgtgtttcacgcgtgtggaaatgatgggcttaaggtaaatggattatgctgagtcagcttcaggtaggtggggtccacgagtggatctaggatacctcgacaacaaacgcacaacgttattttttttcttttcttctaactcgcaatcataccatgtcacgtgacgacgtgtctcacgtgtttttccctgttttggttgcaacttcatcgatgtggaaaatgcggctccagtcccacttccacatttttttttctttgtataatctaatatttcttatttaacagtcaaatcattcttcttccactggattgtttcattttgacttctgagataaaataatgtcttcaattatgactgcatgtccaaattaaaatggaatcccagagatgctaaatattaaatcacttatacagataaatgttggtctcacttccacaaattggatacactttttcttttcttttcttcaaacgtacttaaaaaatgagaaactttcagttttattttattttaggtttaattattcgtttaatttccgtaattgtataatcttttatgttgtaatctctaaaatataaaattgtaggaacgaaagagtatattatatgcataaaaattagaaccagtatatatgcaggacctaaagtataaaaataaaaagtaaaacttattttatggatatttatcacaattttcttaattttattttaaataccggtttctcacgcgccctaggtcgaggtgggaatactaacgaagctcttcacgttgtcatctactttgtgtttgtttgaatttaagttggaaatgctatacttacggttctataaatgtaagttgaaaataaaagttaagataatgatacttctgtaaatgtatgtttgactcaaaagtaatttgcaaaccttctgtccaaacagacactttgacttgttgatgttgtctttctcacgcgccggtttactacttgactttattaaagtgaaataaaactaattttgatggaattaattgtaaattattgaaaataattgagatgccagtataaatttaatattagcattgaatcatgtatgacgtgggaaagtgattttcgatatataacaaacgtgtccttaatttttgaaaatatttatggatagggatatgtgctgcattgttaattactatcattttatcatattgtgttgcattatttgtttgttggtctcgtgtgaccaaaattccgggttttatttttattcccataaataacttgaatctggaggatgatagagaccgtcagggttatcagcgaatcatgaatgggagacagttcactgtttgtttatttgtagtttttttctgagttgcaaatgaaggaccaccatttatattttacagccttgcaagcacgtgcataattaaaaaaaaatgaataatttgccggccttttgccatgcagggtacggtaatgaaattcatcaacaaagtattttgtttttaatcaatgtggttgaaattctgaagtactaagaataaccccatcagtattccaaaaaagaaaaaccgcatccaaaaattactcttggtagtggatttggtgatattttattgagtttagaaggtaaagcaatcagaaatgatgttatagatgactattaaaagaattatcatgaaagttgacaaatttatcataaagagcttaatagttatacactaatggcctagaacaattttatactctcaattccaatcacaaatcattgtttttataatttttaaggtaattattataaaagtcaacaaattgattatgcatgatgggttatgattggatgaaaatgttcaatgcaatagtgttttttctctatcacaaatgataatttgtgagtgattgcatgatagtgtaaaagtgatttatatatattgttggtgattgaatgtgaaacttgaattgtgagcaggcaaaagtattccatt

SEQ ID NO: 2964 - DNA, 1860 bp, Glycine max
  Intron number 5 from transcript Glyma19g00900.1 (locus Gly ma19g00900) derived from phytozome v7.0 (chr-ID Gm19; pos 575251 to 577110)
aggtcagcacattattttaatgattcagtgacttattctatgtactggtttcttgatgaaaaatactaacttctttgtgttttaccgccaaaagagtctttcatatgttttctgtgtctggatcataagctatctaggactgattgaaaaatgttggttacctttcttgtcaactccagtggctcaaggtttctttcattatcacattgtgtgatagtatagttattaattgttttgataggacctggattagatttacacagaacactgaaacagatatatgtatctcttcttctgtactgatatcagatcagtgggactggggtctagtatgtgtgtactagtatgaaaactaacatagaatgaaaagaaaactcaatgataatccatgaattctagcatcttggttctctctccaatcacaccactgattctttccttgcccccactctctctcctcttatatccacatagatcttagctgaatttcagccctccttcccactactatgccgaactggtagttggctcagctgtggtcataatgtgtcccatgcccacgtgtgtagcggtgcggtttcgggttgcggctggagcagccgctatcgcagcggagcggcgcgggttgcggagcggtttttcgcgctgctacttcgaaggaagcactggaatttccgatttgaaggtcactcttccagttcctcccacccaagcctcccccttttcctcctcctccgccaccctccgtcctcctccccctcacgcgccgccgtggcggcttcatcccctcctgcctctccaacgacgccgtctccacgcgcaacttcaaccgtggcttcaccgtgatatctcctctttttgttctcatttaatctattttagtagcagtactagtaatttttctttactcctacaaataattaattttatattgattaagaaaattaattaatgttatttaattttattaatctcaaataaaaaatacaattatttttttaaaaaaattattaaaatttgatatcataaataaaaaatcattaaaaataaaaataaaaataaataaaaaatattttaaataacataaaataaaataatttatatttaagtacattatttttttcttatatattatttagtaggaaaactaaaaacttatatgtaaccgttggtgcaagtgctacaaactcggttcctctaagcatggttatttaatttgttttggagggtattttatcattttcaataaatttttctactttatgttttgtaacttttgtttaagtaactatgttttgagttatttttctgttttgtaacatatatatatattattaattatttaacatatataaaaaaaacattagaatagcgggcggtcatcccgttatccgctatccgctatcccgctatcccacttttggggtcggcctctttgctccgctatgctggtattgacaactatgatttggacctgctttgctacctttgattatagcccaatcaatagactttgaaatcatctgattgataacatctattagaatatacaaaaaaaaggagaagaaggatctcttatcatgaagacatattggatatctatcatcattgtgtataccttcaatataaataaagaattgttccttttataagaatcttatcagttactcataatttatataaattgtttcaaattattaaggtgctgtgtcttgtcactgttttattttgtatcctatcatcttttgaacaaggatattaaaggccgtgctttttgtaggagtactgctcttaacacacacacacaaacatcattaatgatgggaaagttatatgacatggttggtttgtaggttctta

SEQ ID NO: 2965 - DNA, 2353 bp, Glycine max
  Intron number 4 from transcript Glyma15g43150.1 (locus Gly ma15g43150) derived from phytozome v7.0 (chr-ID Gm15; pos 50688305 to 50690657)
gtctgttgcgtcttctaattctacagcattggcaggtacagaactgcaattttttaataaattcttcttatatatttcatcttgtatccctcacaacagactcttcgtatgtttcattaagaattgcctaggtttaaaatgctttgatgaatgaaatcagttatttaaagagctagtgacaatctgtctgatctcgtatcaagcaatttgatatgctaccaatatatgttgcaagatagcattaaggttttgttttgaataagctcctcatttaaaatcaacttatgtacttctactgttatcgaagcccttatcatctaacttctccaaaagataatgtgcataagtatttatgaagaagtgtatctaaacaaggtcatagatttcctctacttgagtaacgatgcatagataagtccatatgcaacagcacagaactgcaaatactgatgatgttaccatacactttaaatgcactggagtatattcagttttacaaatatattgaacaatttgatagctaagcaaaaatatggtcctcacatatacactaattagagttcagagcatagtttggtcaatcagcatgtcgacaaaaaatctgtattggggtcctcagtaagatatgaaaacaactaagactaaggtagtgtttagcctaactttttttggccttttctccttaaatgtaaaatctcctctagttagcttctattatgcttttggggcttttgttcattagaaagagctatttttatctttaagaggttttctagaattagatttgactacactcttattaaagagaagtaaagtctaagaaaggtaactaatgcgtaaaaatagtgctcgcacaaagtgtatcctatgtaatagtaacagtagactaaaagttcggttattgaaccctagagaccaattgtattctcaaataatcaaaattattaaactagacaattgagataattaaaaagaagatttaagtatttttgtggtttttgattttttaaaagaaaacaaataaacgattacaaaagagagatttaagtgatagtaaagaccagaaattatgattcactcggttttcccccaattccaattctaatgaagtttctcctacatttaattaccaattttcaaagtcaaaaccaaaagcctatgatcaaggtcaaatgatgtttttttgtcttaaatcaatactctaatgatcatggatatattagtttaagtcaaaggatatgatcaattccaaggatgatcaattaaagattaacaactctattagagattattcaaacagtttgatcatgcaatttgtgtaaaacattctctaactaggtctaccaaacatacgtaaatgatcaccataatacattcgattatacaataaggaaagggtagaaaattaattaacataaaaacattgatgaatttcattaagaatagaaaaggggtacaattagatagttacatcataactctcgaataatggtgactacccactcatggttaaagaaaaattagaaaaactataagaaattagcttagatataccacaagggaagaatgacaatcatgtcttacaaccctcaaaagtgttttccaattcaaaaaatatgataaggttctttttacagattttaaaacccttatttatagcttcctaagatagcatgctggtctgaagcccactatgatcatggtaaactctaccacgaccatagtcagaaacttttgatgctgaagctctagggcgtgatcaattgactacgatcgtcatgatttgactatggccatagtgagttgattacaatcgtcatcggaatgctgacgttttttgaagaggggcgctgttatctcaccatggctgttatgcttaccgcaaccatgttggatgcattacatttgtggtcaaatcttcatgtaaaagtgtaaattttcactttttttacttaattgagcagttatacttctgctagacaaaatcaacatctaaaagtgagttgtcaagaaaatgcatgcaaatgacacaaaaattcacacaaaatatcaccccaaaaatgatttatcagtaacttaatagattatgtatctctaatgttaacttagtggatattcttaaatatagcagaatgccaacttggttcaccaagtaattgaaacctaaatacctgatttatctaatataagttttttgctatcttgatgctgaaaaacttttgcatacttgatgacttgatgtgctatatcatcactagcatgtcttttataattgtaaatatcttttattcaggaaacttgttttctaaattctgaaaagtctcaccttttattgttgccacagctttgataa

SEQ ID NO: 2966 - DNA, 6153 bp, Glycine max
  Intron number 2 from transcript Glyma08g46270.1 (locus Gly ma08g46270) derived from phytozome v7.0 (chr-ID Gm08; pos 45441923 to 45448075)
atttcgacaaaagaggcaagccacaagaggatcaggtatcggagtaagcataagattagtgagggtggtggattatagcctttaagataatctataataaaaggattaaaattaagtaattttaaatgaaaattattcatgtatagttgtaaaatttaaatttactcttccttttttttttttacatcttatacaaatacttctcttgatatatacaatatatactctgttagtatagagcaataaaagaagagaaaggaataaagggaagaaagaaaaagacacaaagtttaacgtggttcagcacacaatgtatgtgcctacgtccacggctacactaggagaactttttattacttgcacataaaagcttactaggtgtctctatatataacactaatgagacacaagttttacagaccaagcgatgtgggacaaaggaactaagatcacaaactctaacaattctcccacttggggtctaagttccaaactctagcagttccttgtaagcaatgagtccatcgactctttacctagtgtagcgccttcatcttcaattatccttgaaggccaactgaggcaatgcaaagcctcagtttgtcagttgtaacaactttagtcaacatatttgctggattctctgatcctaagatcttcaataaagataagtctctatcatttatcaactccctaataaaatggtatcttaattgaatatgcttgcatctagaatgaaagactggattcttagcaagacttatagcactttgactgtcactaaacattggagcatcatcttgttctttccctaattcattgagaaaattctttagccaaatcatctccttagctgcttttgagatagctatgtactcggcttccgtggttgagagagcaactctatcttgaagtttagacttccaactcacagcagtacctcccaaggtaaaaatgtagcctgtggtgcttttcttggtatcaaaatctcctctcaagtctgcatctgaaaatccctgtaaagtgagattgccttttgtgaaacacaaacacatctctgaagtacccttcagatatctgagtatccactttacgccttcccaatgctcctttgttggatttgataggaacctactgacaactcccactgcatgtgctatgtcaggtctggtacacacaatagcatacatcaaactcccaactgttgatgcatatggtactcttgacatgtaacatttttcttcatctgtctgcaaagattgcttctttgaaaacttcaaatgagatcccaaaggggtattcttggtcttagaatctctaaggtaaaacctgtcaagcaatttgtgtatatatttttcctgagatagcttcaagattccttctgatctgtttctaagaattctcataccaaggatttgtttagctggaccaagatccttcatttcaaagttttctgccagctgctgcttcaacttgttaatttctgtcatactagatcctacaatcaacatgtcatcaacattcacgacaaggataacataactattagtatatttcttaacatagcagcaatggtccatgtcacatcttttgaatcctgagttgctcataaactcattaaacttcttgtaccactgcctcggtgcttgtttcaagtcatataaacttttgtgaagcttgcatacaagattctccttgactggcacttcaaaaccttctggttgggtcatatagatgtcttcctctaaatccccatgcaagaatgcagttttaacatctaactgctccaagtgaagattctctgcagctaccatgctcagaataactctgatggtagtcatctttacaactagagagaagatctctgtgaaatcaattccttgtttctgctgaaaccctttcaccacaagtctcgccttgtatcttcttctaccgtcagattcttcctttagcctatagacccacctattctgtaacgctttctttccttctggcaatttagttaaagaccacgtcttattcttctgaagggatgtcatctcatctttcatcgctagctcccactcaatagtgtcattcccctgtgtagcctcactgaaacattctggctcactagcatcagttaacaacaaataatgcaatgaaggggaatacctatctggtggtactgaaattctgctagattttcttggaggagttgatggttctggttctgactcaacctctacgcctgtactctggtttctgttggctgcatcactttttgaaatttcttcaagtgttgctttctcagaaatttctgacagtttacctgcacatgtagattctgcaaaaaatttgtccttataaaataagttctcattaaaagtaacatttctgcttctgataactttcttggtttggtcatcccaaaacctgtagccatacatgtcagatccataactaataaaataacacttcctcgcctttggatccaatttatctctactattagagtctgtcagtatatatgaaacacaaccaaaaattctcaaatgtgaaagttttacctcctttccagaccatacttcttcgggcaactgataattcaaaggaactgatggtcctctattgatgagatatgctgttgtgtttattacttctgcctagaatgctttaggcaagccagattggatccgcatacaccttgctctctcgttcaaggttctattcatcctttctgcaacaccgttttgctcaggtgttcctggtattgtcttgatcattctgatcccaagttctaaacagaagtctttaaactcctgactatcatactccccgccattgtcagatttcagacttttaacctttagacctgtctgattttcaacttttgttttccaccttttaaacacagaaaacacatcagatttatttttaagaaaataaatccatacctttttggtagagtcgtcgataaaggtgacataatagcgtgagtttccaacagatttcactggggttggcccccaaacatctgtgtacaccaattctagcttttcagctttaagagtcttccctgcccttgagaaactaacctttttctgctttccaaggatacaatgttcacaagcaccaacatcaacatgcttgaggcttgatagcttaccctttgccgccataagcttcattcctttttcactcatgtgtccaagtctttgatgtcacatggttgaattattgacagcctcaataactgctaccatatcctcatctgcaatcatgtaaagagatcctcgcttctttccatgagccacaatgagattgccttttgttaccttccaagctccatctccaaaaatggtgtgatgtccctcatcatccaactgccctatagatattaaatttctctttaaggcaggaatatgtctgacattgtgcaatgtccatagggatccactggaggtcttgatgttgatatcacctcttccgacaatgtcaatagattttccatctgcaaggtaaacttttccaaatcttccagaaacatagttagacaataaatctttagagggagtagtgtggaactacgcacctgagtccatgatccatgaatcaacaggactatccaaactgcaaattaatgcatcatcaagttcatcggttgctgcatttgcggattcatcatcatcgcgcttcttgtttttgtgcaacttgttcttctttggtgccttgcactgattgctaaagtgacctctcttgtcacaattccagcaagtaacgtcactttgaaattttctctgacctttccctcttgactttgatctgccttgaccattctgacccttctaggtagtccttcccctgccttcagtattcaatgttgaattggaaacatgactagaagattctcctgaatctctcttgcgaacatcttcgcttaagatcaagtcacggatgtcactaagctttaatgtgttctcccttgtagaactactaactgcaataacagttgcagcccaattatccggtagtgatgacaatagaatcaatgcgttcacctcatcctcaaatttaatctgcactgattccaactaggcaagaataatattaaattcattaatatgatcagttacagagataccttctcccatcctgaggttgaacaaccggcgcatcaagtatactttgttggctgccgacggcttctcgtacatatctgacaacgccttcattaagcctgcagtagtcttctcgttcacgatgttgaacgcgacgttcttggttaatgtcaatctgatcacgccaagagtctgtcgatctagcaagttccattcttcttgcttcatgtcttctggcttaacccctgataagggctgatacagcttcttctgatatagataatcctctatctgcatcttccaaaagctgaaatctctgccatcgaacttctcgatcttcaccttcccctcttttaatgtcattgctcccactgcctcctctaaactgagaagactctcactaattcctttaaactatggaaatcccgtggagtaatcaaaagctcttgataccagttgttggggagattcgaggggtacatctgtggaccacgagtcaccacataaggaaacctgacaccacactctaacccaaaaccttaaggctcaggtttatgggtcttctcctcacttatatggtgctcaacctttccacttctacccaatgtgggacttcacctcacacttgtaacccaacacatctccccctcaagtgtgagtctcttccacatggtagtctccccctcgagcggaagtctttatcatccacgagtatagtcatggctacctgcggtacttgccctatccgctagccattctggccaccccgctccacctgcggaacacgctgtgccgttagccattctggccacctgcggtacttgcatactcgtctgagccagtcaccaacttgaaccatcggctctgataccagttgttagtatagagcaataaaagaagagaaaggaataaagggaagaaagaaaaagacacaaagtttaacgtggttcaacacacaatgtatgtgcctacgtccacggctacactaggagaactctttattacttgcacataaaagcttacaagaagtctctatatataacactaatgggacacaagtttttacaaaccaagcgatgtggaactaagaccacacaagttttacaaaccaagcgatgtgggacaaaggagctaagaccacaaactctagcatactcttgtatgtaggataggtttaaggcccaaacagcccaaacaaaagctttagacccttcaaaaaaaaggtcccaatttttttttgatattaatatatctcaaaaaaatatattataaaattatatttaattgatcattttatatcacaacaaatttgaaaatttaattttaaataaaacaataataattttaataaattattttataaataaataaaatatttcattcttaaatttatctcttaactcctaactccttgagcctaccttgtatatatatgaggaatattagtaacttgctcaaatactctgtgtcaaattgcgtgtcagtcgtgccaggctagcaaacatgttaagagtatcgagggcatggattttttttatggtatctctgtccaagaccatgattaattaatttcattgcatttcaaaaagtgggaattaaaatcagttatttcaaaatgattaaatatcttttttcgttgacactaatttagtgcttttttaattaaaaaaattatttcatataaaataggtatattttattttttattcttaaaatattttaaataatactttgaacattaaaaaaatgttctaataagtaaaaaaaaatattatttaaagtgttttacagataaaaaaatcaattttgtaagaattaaaacgatttttttaaagagaaaaatgaaagaaaaaacattaaattaaagaataaaaaatatattcaaatcttttaaaacatgaagataaacaccacatgaatgttacacggacaaaaagaccacttaccaattttaggtatatctatcttttctcaagttataatttgcttactatactaatttttctttatctgaccctaccctttaattgtaggtcgacgacgagtgcctcaa

SEQ ID NO: 2967 - DNA, 6678 bp, Glycine max
  Intron number 3 from transcript Glyma18g14970.2 (locus Gly ma18g14970) derived from phytozome v7.0 (chr-ID Gm18; pos 14950063 to 14956740)
tttctaggattatatctggacaacgcacggtaagtattttaacatgactaggaaatcattgatactattttgctgtttctgatttagccaacaatgtcattccttatataaataaatcatttatgtatgcattattgtgatctcacaatttgttcctagttgatatatataaatgagttgttattctgaatcttttccaatatataataacagtttatggaaattttttgatcctgtttccctttaggagatatgattttattagagtattcttactccattgtattaacttttacttactgttagggagctgtcaccagctgtaaggtagttacagttactaactgtagttagtaactgtctgggttagtttacagttgagagttagttacagttgaatctctctatataaagagataacactgttagttgtaactttgtctaatctttttcagatcaatgacaaacactattttactttctctcaaatgctatcacagtatcacagatctaggttgggatctgcaacaaattttttgggaatttcctcactttttttatctttgataatttttttatctcttcaggagatttcaatctgtttttcccctcctcctccacctatctctgccgcgctcgcgatcaggatgactactccggttactgccggtggtggcggttgtgatcctctgctaaatggtggccatgcgctgccgattcaaccttcatcggctaacacgaacttcaatcacatcattaccaagaagctcgatgctgtgaattatctcttctgggatcgtcttctccaattcattcagaatgtgcagattctggcgatgtctgcgacaattgctgatcgtgatgctggttgcgtaactgaagcttaccatgcctgggagcaacatgatcaattgttgccctcgttgcttcaatccgtcgtttctgcttcgatgctttgcaagttcataggctgcacaaattcttggtcactatgggatagaattctcaattaatttcatgctcatacaatgcgagagcgaggcagctgcgtactgatcttcgccaaatctccttgaaggtcaatctgtttttgcaatacaaaacattgttgactctcttgctgctattggtgatctgatttctgtgaaagaacacagacatcattattgatgagattgaaacagtgcttcttgcacatgaatctcgtaagaaaaatgttgcttctatcaacattgcctccatttctactgctccattgaatttcaattcagattctattcaagctaatcttgtgtaacagaatcaaaatcagcctcaaagcctaatcaaaatctgatatgaacagataaaaaataattgcttgaattttctcttcttccagtatatctctcttttgaaagaagcgttccaatttatttatccaactataagcatcagattccccatcatatatggggattttcaattttctccgtcgttctgtttttccttcactggtgtggtttttgggtgtctcttctttattgacggaacctttgggtgtgtcatcatctgaatgcttggacaaattttccatcatggcttctaggcgcgcaaaacatgtttcaagtagttgtcgttctgcaacttggttttgtcggtcctccattagcatctccaaaattctctccattgtgtctggattttcagaattagatcgagttgtcaccattgttggaaacaagcactggatcggtgctctgataccaaattgatatgaacaaataaaaatggaacagatttgaatagatgaaacataaatttttatagataatttgagatattttattacacaggttttcgagagcctgtctctccacaattcagattcttcctaattccagagtgactttcccattctggtttatttctatttatactacaggtaatggacacaattattctgaatggttgtgattgctcccaagggtcatgcccccttgattcgcatctcctgaccttgcatcccttgggcggatcataacggttggttgtgactgttcccaagggtcatgcccccttgattcgcatctcctgaccttgcaccccttgggcggatcataacggttggttgtgactgttcccaagggtcatgtctcccttgattcacatcttctgaccttgcaccctttgggtgaatcgtaactattgggtggtttacaccttttgggtaggttgtaactgttgggtggtttgcaccccttgggtgttgtgtgccctgttgctggtggtccatggttattgtgttgtgtgccctgctggtggtggtccatggttattgtgttgtgcgccctgctggtggtggtccatggttattgcttctcttgctcgctgtttgcgggtatacaccttggtgatgtgtggcttatgcttatgcttatcagaattagtactcgaattattcccaaaatgatcaaaatcaatatcaacagtcttcaatggtggctgtggtggtcgtggtggctgctttggtggctgtgcaggttgttttggtggccctggtggtcatagctctattcaatgctccatctttttaagtatgggcatgatgctggcaattgttggcatagaccatcttcctctttctatagcacaacttatcctattatgactcaacctatgcagcctatgcaagctgtgttcaaccaatgcaagttccttttggcacacagcaacattatgcacaagctccagtgcaatatgctcccatgctcaacaattttctgctcaacctgtctttccacagcagttacagcaacaagcttacttaggcactgctcaatctgtttttccacaacagttgcagcaacaaggctacccgggaaactcttcacaagcttctatgattgtcaattatcctatgacctatacttcagcactgccgcagtcagctcctccatcatctactactcctaatcaaccacaagctatgattgctggatccactaatactccatctagtagctggtttcctgattctggtgcttccctcttgtgacctcaaatgttcaaaacattcagcattgtgttccctttaagggatctgatcaggttattatagtaaatggtcaaggtttgccgattaaatctattagctcatcttcatttttatctccattcaattctaatgttactcttaatcttcataatctgttgcatgttcctaatatctctaaaactctgctaagtgtaagtcagtttgcaaaaggcaattttgtgttttttgaattccatcctaatgtttgtttggtcaaatctcatggatccgatgagatacttctcaaagcaaatctcagttctgatggtttgtacaaatttcccagcttgctgtcaagtccttccttcaatgtcaagacaagctcaattctagtttacatcattctcttgtaaattctgcctctgtaaattccattacttcaagcacttggcactctaggctaggccatcctagtgctgctgttcaaaaacttgtaatgcaactttgtaagattccatttatcaacaaaactgagcttgatttctgttgttcatgctgtcttggtaaagcacataaactacactccctcttctcacaccacttaaaatcaactcctcaaactagtgacctttggggaccagctccctttgtttcatctactgggtataactattatgttacttttgttgatgcctatactaggtatacctggatttttctgcttaaagcaaggtctgaaacactgaatattttcaaacagtttcaagcaatggttgagaaacagtttggttttcctattaaagcggttcaaacagactggggggtgggggagagtttagaccttttacagccgttagggatcattcattgggtgattttcccttgagagaaaacatagactcatggttgagcttggacttactctcttggcccaagctcttcttcctcttacctattgggatcatgctttcctaatcagtgtttttcttatcaatagactccctacttcctctcttaattttgatataccatttgtcaaattgtataaacagcagcccgattttcattttctaagggtgtttgggtgtgcttgttttccactcttaagaccttacaaccaaaataaacttcagtttagatctcaagagtgtatttttctgggatattcacctgctcacaaagggtacaagtgtctttcagcagaaggcataatttacatctctaaggatgttgtgtttaatgagtccaaatttccctaccctagtctgttttcctctacttcttcctcacactcttctttagagtcacaatttcccaccactaccatacctactgtgtctgttcctcaaccacaagcacctattcctattgttgattactcttccacacacatgtctaattctcagtccaatcaatcggctcctacttctcctagtgagattcatcctgtacctaacacaacttctattgcttctactaattcatcttcaccaaattctgatctacaagtatctcaaccggaacacagttattcatcccattgttcaaaacacacatccaatgcaaactaggtctaagtctggaatttttcagcctcgaattcatcctactcttcttcttgctcatatggagtctatgtctgctaagcaagccttgactggccctacatggttagctgccatgaaaactgagtatgatgccctcatcaacaatggtacttggactcttttttctctgcctcctacagagttcctattggttgcaaatggtttttcagaattaaagagaatcccgatgatacagtcagtaaatacaaagccagattagtggccaaagggttccatcagtagtatggaactgactatacggaaacattctcacctgtgataaggccaataacagtgagattgcttctcacccttgctgtcacttatggctggcaattgcaacagttagatgtaaataatgcttttcttaatgggattttggaagaagaggtgtacatgcagcaacctcctggttttgagtcttccaccaaatctatggtctgcaagcttaataaggccatctatggtcttaaacatgcccctagagcctggtttgataaactcaaggtgcacttctgaagtttgaatgtaagtccagcaagtgtgatccctctttatttgtctactccaaggggtcctcaacaacctatatgcttgtttatgtagatgatatcatcataacagggaataatccttccttaatcaagcaactcatctctaagctaaatacttttttctttcttaaagatcttggttctctagactatttcttgggaattgaggtaaaacatcaatctgatggatctattgttctcactcaaggaaaatacattagagacttgctggcctaaactaatatgacagaagcaaaacctatttcttcacctatggttactggatgtaagctaactaaaagtggatctgatccactcactgatccatatatgttcagatctgttgtaggtgcactatagtatgcaactataaccagaccagaaattagcttttctgtgaataaagtctgtcagttcatgaaggagcctcttgaagatcactgggctgcagttaaaaggatactatggtatcttaagggtactcttacatggggtcttcatctaaggccagcttctgcacctttctccatcaatgcattctgtgatgcagattgggcctctgatcctgatgacaggaggtccacttctggtgcttgtgtctactttggtcctaatttagtatcctggtggtcaaagaaacagtcagttgttgcccgctcaagcacagaggctgaatacagaagcttggccttagttaatgctgaagtatcctggcttcaatctctttttatgaacttcttgttcctcacaaacttcctgttattcattgtgtcaacacaagcattgtggctttggctcataaccaagtccttcatgctcgtacaaagcacatggagctagacctattttttgtgagagaaaaggttctaaataaactacttctggtagtttatgttcctgctactagtcagtatgcagatattcttaccaaagctttgtctccaagtaattttgaagtgttcagggccaagctcatactgtgtgatccttccaattcttctcggtctcacccaccatgaacttgtgtgtgtgtgtgtgcactgttggttgtaacttagtctaatctttttcagatcaatgataaacactattttactttctctcaaattctatcatgatttattggctaccgaggattaatttgttggggtcatggattttctctttcccttgctatcatttatgtaatttctaatagcaactattatgctgtttctttccaggaatttatatacatgctgatgtacttttgtgctgtcttttctaataacttgtcatttatgtaaaattacactacacatggtcatgttgttccagtgagcatgagcatgggtttatttaataattttaaatatattcagagttccttcttgactttgaacatctgcagtgaattcatcgcaagagcatgggttctcttttctatctctgtcatgactgattaaacatgaccctttttttttcagccaatctttcaaagatatccgcggcccgagaagga

SEQ ID NO: 2968 - DNA, 3027 bp, Glycine max
  Intron number 1 from transcript Glyma20g02910.1 (locus Gly ma20g02910) derived from phytozome v7.0 (chr-ID Gm20; pos 2614952 to 2617978 reverse strand)
gtgtgcctaccagggtgctgctgctcaggaacgtatgtcacattttgagtgacttatttgtattttgatatgttaattgtcaagtgccgttgattcttagtgatgttgaaatttactgaatcttgtgaattgtgattgttagtaaggattgtgttttatgtggtaatttgtgagcttgatcagttgatctgtggctgttttctctgattggttgttgtcagttgatttggaggttgctgccttagatgagctggtcttgtgtgaactttagattaggtgaagatttcgcattttttgctgttgcttcacttggttgtgatgttgtagaatgtagattatggtgtgcgtgctgtggagttttggttttaaaactagcagggggttagtttgttcttttgttgtttttgcaaaagatgaggcattgtgatgttttggtttggtgagcgatggatgtgattttaataatctatggtttcgtgcatggatttaagtttaacgctatgggctatgatatgcttagagcacttgacttatcaaaatgaacaatggtttcaagtggactaaccaaactcaaggaactgcttttgtctgtgcaaggattatgaagcttgaacaccaatttagactttcccggaaaaaaaaaaaaaactaggatgttactccatgtaaatttccacctataaattactaaggtattctttttgtcaatgtgataaagaggtcactgctggactgatcagcagccatgacgaggaaggattgaacagagtctatcttaacgactaaagaaaatagtattgccgtagccatgaccatagatttgtgtgtagtacttagctgctaaatgagctttccaacggtcaatatagccattatggaccaacttcaactataaactcccactgacaaatagctattaccctttagtttagatacttgatctagtgtgtttttagaatgtagggaaggcatctagtctatcattgcttggtgccaattaggatgagatagtgcttcacttgaggttttaggaatgcaaacagaggacaggacaggcttcaagtaaaagtgtagtattgtgtatgaggaatgaatgtgcttggcagaaagttgaagcagcatctgttgaggataaatatacatttgaattttgaagtttgtttaccaaaagaagattacgaagaatggaataggaattgtgcctctatgcttctttattgtctattggtcttttgtagtgccaaagcaattacatgaatggcagtatactctgcactccttgaacaagaaattgtttagttttaaccccaagttttctctaagcatgaaaagaagctcatgttagttggtctcaagaaattatgcttgtgaaatcttaactcttgcaacgagtagaaactagtgaaaaatcctattacataatcatcatcattctttcctttaaagattcattattcaaatataattttcactgataacatgttggcaaacattcatcctttttcgtaacagagaagcatgtctgtatgacacatattcattctttaatttttcgttgaagttgatagtgatgtactgatcagtatcttacatccttttaagtgtttgatcatcaggaatgccactgcttatgatatatttagcttgttaatttgctgatcaattagcttgagatatcttggttaatccctttttacttccactgtaaacgagtaacttgtttctcaattgccctgctctcaaagtattatgttgttaatgcagtatgaggggatgatataaattactaatttatgatgtgtttgtaaattttgagttagggatgtttgcttctttgaacttattctcattgtttcacaatgctatcataggataggatataagccattttttgtaattgtgtttttgagatgagacctgggaggggaggttcctgccataatattttgaaataattgaaatttgtcagtctctgttttatagtttcaaagttctgtttcattattttgggaagtttatggttatgaccttgataaatacccaagtcacatttaactttgtgcatgcactgaaatgtttgatatttaactttgtgcatgctctgaaatgtttgatatttaactttgtgcatgcactgaaatgtttgataaaataattctggactttttcatagtttgtgtctggacactgggttttaaaacaaattggtgtgcatcatttgtttcctctttttgcacattacaagtgctgagatttgaccactgaagtaacatgtcagattgaagtgtttatttgatcatgtttttgttgacattgattagaagaaattttctttgaagagtagagaataagcagtctgtcctaagatgaaaataaataatagttctcccaaacccaattcccacaaaaaccaaaattagaaacttgtgacgcaaccatctgttctgaagtgctttccaatcccaaaaattggaattctgcacactaatcttttctcgtgtagtaaatggttgcagctttttacattgaattgtagtttatgcaatagttatgaattccatcatgagtccaagtgctcacaagatggtgtgtttgtatcctgaaattacacttgagccttagtcttcacaagtattcataggagaagaaaataagaacgtaaaatgaattgagctttttccataggctgaaaacttatgcacctcagcttttagatagcttctataaaagttaagtgcttaagttaattttaaatttgagagaaactcaatttattttactttcttgttttcttctataagtactaatggagaagtttatccaaacaattcattttataagtgtgcatatttgcatactttgatgcctaactggttaatctatgccatgaaaagctcaacagtgattgcattagttcatcctaaaatggaattggtggtgttgtagattaattgattgcatatgactcactatatgtactttcttgttgaaggtgggtcctggtgaggtagacgacgagctagaaga

SEQ ID NO: 2969 - DNA, 1509 bp, Glycine max
  Intron number 3 from transcript Glyma14g36930.2 (locus Gly ma14g36930) derived from phytozome v7.0 (chr-ID Gm14; pos 46262028 to 46263536 reverse strand)
cccaaggtatagcctcatgttttcatttttgtcccaaatgtataactgtactggatttgttgggcattctagcaactgcaggccgaacaaaattgctaggttgcaagaaatgaattctttgtgtaaatttatttgatggtttgttttttcccccttatagaagcaacaaaattatagtaaaaacctatgaagcaccagtacttcaatttgcttcaaatatttgtatctgatgctctctgatacttaccaatacatatcttggtattgtgaagtatcaaacctttaaaaaagttatgaaaatcctatacagctacatatgaaacatagaagcattgtcccttgatgaacacaaaatagaaattgtcctctttatggataatttcaagaaagtaatgagattgatactattcctattatgataacaatgatttataatttttattttgtttttgtaacgtgcaagaattttgttcttaatttgaatttccagaattgcaattatatatttattatgttttatgaatttttatacatatctactagatatgtatgtgatatatgtaatgtatctatttataataggcaaaactattggaaaatcataaccgtactaggtgtgatggagatgaacattctaataatgaaacagtgtatgaaattgtatgcttgcaaggaatgagttctttttgtcaattattatatggttttgatatagatgttttatttgtagaagccatgacattaatagcaaaactatctggtaatcattcgtaagtagtttctcatcaactgccgtttttttggctaaatcatttttatatagtgtgattgatttataattcattttctaaatgactattacagcattcaaaacagatttgctttgattttgcctgtatgttatttcttggtcaaaattataatttagtttcatagaactttcagctttcctgatttattggtaccttgaactcaaagcaggaacaactgaccttgcttgatactttctatcttttagataccttcaatgcatgtgacagtagccaatttaatttgaaaagattttatttggcctttggggggggggaacaagtttagggctgatgataattgaaaataagtgaaaagaaatggtgagtggtttgcaaaggatatgaatattgtccttgtagcttatttacatggataattgcaccttatctacaagggttgggcatctgtatattttctctcttcactactcttaatcagtttaacattttgacctatgcaacttgatgacagtatatggcaatgacataatgatgtgcttgcaaaaacacaatgaccttatagcttacatgttaactacagggccattatctatgattctgccaacttttatcttcttactgaaataagttactctaccattagttttctatattattgtttcatctaattacttagttaatctctcatgatgaatctgcagttgtactgtcctgggaagaaagtttctggaatata

SEQ ID NO: 2970 - DNA, 6734 bp, Glycine max
  Intron number 6 from transcript Glyma03g00200.1 (locus Gly ma03g00200) derived from phytozome v7.0 (chr-ID Gm03; pos 9260 to 15993 reverse strand)
gatattgagttccaggaaaattggggacgtgtttggtattagctctagaactcgactctttaaaactaaaataaaaaacttgttttatgaccttaaaatgcacgggggttaaaaatatttactgataaagataaatttaaactataataagcttttttaaaataagtttatgcaattaaaattcaatattaaaagtattaaattcgctgtaaaactcatctaattagatattgaaaagttgagaagttttctttaatctcacgaagcttttagtatctaaaaggccgtggcatcttttaaagaagagtatagactttgttgggtatccttgtattttatctatattaggtagttttgttagtaagcttttcagaagggcagcagtgagttgtcactgtcactgcccttctctctccatcttgtactctatatatatgtcttttttgaaataaaaaagctgagagaaaaaggagggaatttctcctttagtttcaagttggtaccagagctggttccgaccgtcgtcttccgtcgccgttcgccgtcgccggccgccgtctccgacggatttttccggcgagaccaggattcggatcgcccataccttcgcatagcgaagagcctccgggcaatggggtacgaagttttaccaggattcggatcgcctcgaaaagcgtgatccacccctggaacttgcgccgccatcggacgctccacgcgccgccacacgccgcttcttcctcgcgcgttttccgacgcgtgcagctcacgcgccgccgtgccggcgtcggaagctgccccttccggtctcggcagcttcgttgtcgcctcctgggtgcgtttcaggcctcacctccttcttccggcaagttgtttggtcagctcttgtgtgttttcctctcttgtgtgttaggatttgctgtttggctcttaaatggcctcctctggacctgttttttcattctccgggaccccaaccatcaccactgcaaagctgaactggaaaaactacccttcgtggtctgcttccgtggagttgtggttccttggtcaaggacaccatgaccacttggagaaaacctcagattctgtttcagatgataaaagatctgaatgggagaagcttgattatcaattgtgtgccgtgttatggcaatcagttgagccggatatcttggaaatccttcgatcatttaaatcatgtcgttccttttggaagaaagcccaagcaatctttgcctatgatatccaaagtttgtttgatgcaaccatgaaagttacagcccttaagcaaaccagtcatgacatgatcgctcatgtgggtaaggcttcgagctgccgtggaagaactgagaaagttccttgtagctgattcattagaagaagtgaataggaaacttgacaagttctacatggttcttattttgagaagcttgcattcagactttgatcatgtgcttgatcaagtacttgctggagaccagattccatcgatggattccctcatcactaggcttctccgcgtgccttatttattgaaggatgagaatcctactaatggagtggggacgtcagccatggttgcgtctcgaggaagagggagtagccgcaacaacagaggaggtcgcagtggaaggggtggacgtcctcattgcacttattgcaagaggatgggtcacacccaagagaattgttattcgttgcatgggtttcccgacaaggtcgcacaggtctcttgttcagagaaagcagagtctagattttctgatgaggagtatcaggagtatttgaagcttaaattcgagaaacccagcaaccaagctcaatcctcatctgtaccatgtgtttcaatagcctgtatctctcaatccattgaaggttctagtccttggatactcgactcaggtgcctctgatcatatttctggtaacaaatcctccttttcatccttctcttttctaaaaatttctcaccacgttactgtagccaatggttccaaggttgtgtctcaaggaagtggtcaagtttcattatctccttctctgaaattgaattctgtgttattcattcctcagtgtccctataatttaatttcattaagtcagttaacgcgttcgttaaattgttcagtaacctttacagctaattcgtttgttattcaggaacatgggacggggcgactgattggagaaggacatgaatcacaaggactttactacttggaatccagtccacctggggcttgttttgcaatctcaaagcccaaacttttgcatgatcgtctaggtcacccaagtttaccaaaattgaagatgatggttcctagtctcaagaatcttcgagtcttagattgtgagtcttgtcaactaggaaaacatgtcaggtcgtcatttcctcaaactgtacaaagatgtaactcggctttctctaccattcattctgacatttggggaccaagtcgtgttacatcttttgattttcgatattttgtaaccttcattgatgaattctccagatgtacttgggtttatttaatgaaagacagatctgaacttttgcctatattcgtgtctttttatcatgagattgagaatcagtttggaaaaacaattaaaattttcaggagtgacaatgctaaagaatatttctctcatgatctttcttcttttttgtcttccaagggtattctacatcagtctacatgtcctcacacaccacaacaaaatggcatagcagaaaggaagaatcgtcatcttcttgaaactgcaggctccctaatgttaaattcaaatgttcctacacattattggggagatccagtgcttactgtttgtttcctaatcaataggatgcccttttcttctcttgaaaaccaaatccctcactcaatcgtcttccctcatgatccactatttcatgtctctcctaaagtgtttggttgtacttgttttgtccatgatttgtctcctggtttagacaaactctctgctaggtcagttaaatgcgtcttcttgggttattctcgtcttcaaaaaggttacaaatgttattctccgaccctgagaagatactacatgtatgcagatgtaaccttctttgaagacacaccattcttctcaccttccgaagaccattcttcatctcttcaggaagttctccctattccttctccttatcctctagatgactccgaccaaaatgtcattgttggtccctcttcctcaccggattcacctgaagttgtatcttcacctctgattacagatcaacccaggacaacgcagattggatttccagtacctgaagcttctccccatgattttcgttcttcttcaaccagtcctccgctcatggctccttccacctcttcttctcattctgacacacattggcccattgccatcaggaaaggtattcgctctactcgtaatcctcatcctatttataatttcttaagttaccatcgtctgtctccttcatatagttcctttgttttctcattggcctccattactattccttccactgtccgtgaggcacttgatcatcttggctggagacaggctatggttgatgagatgcaggctcttgaagataatggtacttgggagcttgttcctcttcctcctggtaagaccactgtgggttgtagatgggtctacactgttaaagttgggcccaatggtaaggttgatcggcttaaggctcgcttggtggctaagggctacacacaggtatatggcattgattactgtgatactttctctcctgtcgccaaactcaccactgttcgtctgtttcttgctatggctgctatccgtcactggcccctccatcagcttgatattaagaatgcctttctccatggtgatcttgaggaggatatttatatggagcaacctcctgggtttgttgctcagggggagtacggtcttgtttgtaagcttcaccgatctctctatgggttgaagcaatctcctcgcgcttggtttggtaaatttagtcatgttgtccgcatgtttggactgaaacgaagtgaagctgatcattctgtattttattgtcatacatcccctgaaaaatgtgtttatctaattgtctatgttgatgatatagtgattacagggaatgatactactaagatcacccagctaaaagagcacttattcagtcattttcagaccaaagatttgggtcctttgaagtatttccttggtattgaagtagctcaatcaggagatggtgttgtgatctctcagagaaagtatgctcttgacattttagaagaaacaggtatgcagaattgtgaacctgttgaaagtcctatggatccaaacctgaagctcatggcagatcaaagtgaagtttatcctgatcctgagagatatcggaggcttgtgggaaaactcatttaccttaccattaccagacctgatatctcctttgctgtgggagtggttagccagtttatgcagaatcctcatttggaccattggaatgctgtcatgcgtattctgagatatattaaaaaagctcctggtcaagggttattgtatgaagacaagggtaatacacaactatcgggatattgtgatgctgattgggctggttgtcccatggatagaaggtctacatcagactattgtgtcttcattggaggaaatcttatttcttggaaaagcaagaaacagacagttgtcgctcggtccagtgcagaagctgaatatcgatctatggctatggttacttgtgagctcatgtggattaaacagtttctgcaggaattgaggttttgtgaagagctgccaatgaagttgtattgtgataatcagactgttcttcatattgcctcaaacccagtttttcatgaaagaactaagcacatagaaattgattgtcatttcattcgagagaagcttctgtccaaggagattgtcactgagttcattggttctaatgatcagccagtagatattttgactaagtccttaagaggacctaaaattcagattgtatgttccaagcttggtgcatatgatttatatgctccagcttgagggggagtgttgggtatccttgtattttatctatattagatagctttgttagtaagcttttcagaagggcagcagtgagttgtcactgtcactgcccttctctctccatcttgtactctatatatatgtcttttttgaaataaaaaagctgagagaaaaaggagggaatttctcctttagtttcaagtgacttaataagtttctatacgcacaattaataactaataaacaatgccatttacttgaataaataaatgtagaagaatataaaatcataatagggtatatattttttaaataaaaattctctactaatttgatatattgtagaatattcaccgtatactttataagctgtcattaaaaaatggttaatttctcatgttgagaattatgataaattcacaaaaaataatacgaatttgcataaactctaaacaatccaaatgttttccagcaaaatttctatcaaaagataaagttcgaaattagttacataatcttttattgatttcagttaatcacaaggagttactcttcacaattttatagcaaataatgggtcgcaaaacttaaagttgtaaacagaattaaattaaatgcacagagctcattaaaaaattaccccccccccccccccccccccaccacaaaaaaaaggtgatgtatactcaaacaaaactaattaaaaaaacagtaacatgaattaattttttttgaaactcagtaacatgaattatatttatcgtgaaatgaaccaagataagaaattaaattttagtaaaacaaacaatagataaataactgttaacttgattctccaaggcacttcttaggatttatttggattgcatgattgagaccgagacacaaaccagaagagagataaagaagaaacattccaaatgtttttcagaataagtaaagactaggtcccttgttattcctttcaaccattcttaccaggattctagcattttcttgttggaggtgtttaatacttttgctaaggataaatagaacaagaaaaaaaggttaaattacttcgcaagtttctgaactatttgataatttgttattaggtctttgcactattttttttccttttcaattgagtccttgaatttatattttttaattgggttttcccctcaggaacctaagtagtccattaatgtattattatcacctctgcatgtctacactaagtattcttaccttttcatgtcagtcacgtggttgagaatattggattcaaaacctgtataaaaagaatattggcttaaagatgtaagaatactggcctggagatgtaaaaatatacggtgcaaaattgttgcaaaggtgacaatattagattccgggactaactaggtcattgtggatctgtggttaattctctatcatggcaaatagacagaaaggctcggttaaaaaataaatataagctcctgaaaaaaaattgagacaaaaagataatgatgaagaaaggggaaggaagagaagtcttgaaaaatatttggagaaaatgaagattaatttgggttggtaaaataataactaaagtttaggttggcgaagaagttagaacattgtgataaagacacactaatacttttagctttatatacatatcttacagggtggacttgggtacatctgattattttgcaattg

SEQ ID NO: 2971 - DNA, 9551 bp, Glycine max
  Intron number 4 from transcript Glyma16g14720.1 (locus Gly ma16g14720) derived from phytozome v7.0 (chr-ID Gm16; pos 15615727 to 15625277 reverse strand)
gcctaatctagaggtatggttgaatttgaacatttgataatctctgattcatagtgtatgatgccttgaacatgtttgtgagggttgattcctttgtatttatagtttatagagtttgaactttactttgtccgcttccttgtattgtttcatggagtttttaaattcttccttgtattgtttcatggagtttttaaattctcaaaaatctgtgaaatggatcaaaaccgtaattgtaagatagattaaactctatctcaaagggaagaagattttaatatactaccttaggttctatatattgcttcataattactgtgctacacaatctggatatcaattttagtagttaccttatatgagagtcttagttgttttaaggaaattttagtcgctctttccttcttggtaatacacaaaccgtatagatattaaagtttgtattgtagaaagtcatgcaaattcaagacactcagaattcagaaatgagagttgaaaactaattggaattaatgagggtctatacttgatggcttgtcagaaccccaaacccaacttttgaaacactagtttttttttcagacttcttccttgtgttgttttgttctagccattaaattgctcaaattttctgctgcccaaaattctattgttaacattgtagaatctgataaaaacctgtccagattcatgaaattaatctgaaaaagaaaattcagatatgtttagaaagtgttgaaattgctacaaatttctagaatattctatgtatgaaaatagtagaatatcctagaaatatagtgtgtatgaatatggtagaacaatctagaactataatgtgtatgaatatggtagaacaatctagaactataagtatatgaatatgatagaacaatctagaactataattgtatgtataagatagaagaatttagaactatcatgatactaatctatcatgaaaactctagaaagatgtaaagtaatgtagaaacattcatcaccattgaaaggttggtgacttgagcctataaataggcaattggtatgttgtaattgatcatccaagaaatcaatgacatagccttctttctaaaacaattctctaaaactatcaattatcaactatcatataatagactaccaacagtggtatcagagctacgttcggtcatactttgggcgtagttatatcacctatctaccattccaaaatccttccaactacttcaaaaatttcctttgtactattaactcactccaataatattttttctaagctatggataacactactcaatcgtcaactatttatgtccctatcttcaatggtgaaaattatgaatgctggcgtgttaaaatggaaacatgtttttcatctcaagatttatgggacatagaagaagaagacttcaccgttcccgcggatacttcagctcttaatgcatctcaagaaaaaagagttgaagaaaaataaacagaaaaattcaaaggcgttgttcaccttacaacaagcggtgactgatccaattttcccaagaattatgggagctaagactaccaaagaagcgtggaacacattgcaggaggagtttcaaagaagtgttaaggtatgtgtcattaaacttcaatctctaagaagagattttgaactattgaagatgaaggagtctgagacagttaaagattattattctaaagttaaagaaatatagttaatcaaatgagagcttttggggaagatattcttgagaaaattctaattactatgccccaaaagtttgatccaatcgtgacaacgattgaggaaaccaaagatttgtctactctataacgtgtggattctcttgaagcatatgagcaaagactgtataggcataaagaagatacacttgaaaatgccttccagtcaaagtttaaatttcagccccaaaacaaagaaaatggaggaaagaaaaattatggagaaacttccagaagaagagaaggttctaggaatttccttaagaacaaaacagataaaaatcctccatgcaatataagcaaaaggcaaggccacacagaaaaaaattgttggttccgtaatatgccacaatgcaaccattgcaagaagttcgggcacatagagaaaaattgtcgcaacaaaaataggcatcaagttaatatcacagaggagcatgatcaaaaacaatgtatgttatatgtcactcaagactcaataaaagaaaagagaggaagttggtacttggatagtggatgtagcaatcacatggccaaggatgagactattttcaaaagcattgacgagtctgtcaaagtcaaagtttgactggggaatggaagtgtggttgaatcaaaaggaaaaggcattgtcatggtggagacagataaaggtacgcgactcatccatgatgtcttactagtttctagcctaaaagaaaatcttctaagcattggccaaatgatggagagaggctacacacttcactttgaaggaggtgtatgcaaaatcttagacaacaaaaataaaaggtctgagataacccaagtaaagatgaataagagcaatagaagcttccctctaaatttaaaatatgcaacaaacattgccatgaaggtacaagttgatgattcatggctatggcatcgaagatttggccacttcaacaaacatgccttgaagttgttatatgagaagaacatgatgagagatcttccaagcataaaggagaacaatgaagtgtgtgaaggatgtctccttggtaagcaacaccaatttcctttctcaacaagcggagcatggagagcgaaagatctattggagctgatacatacagacgtctgtggaccaatgaggacgccatcacatcagaacaacaggtacttcatactcttcattgatgacttctctaaaatggcatgggtatattttctaaaagaaaaatcaaaagtctttggagtattcaaaaagttcaaggcccttgctgaaaatcaaagtggaaaatggataaaagtactaagaagtgatcgcggcaaagagtacacctctcgcgagtttgaaagattttgtgaggatgaaggcattgaacgacaacttacagtcgcatattctccttaacaaaatggagtgtccgagagaaagaattgacagttatggaaatggctagatcgatgctcaaggagaagggactacctaacacattctgggctgaagcagtctacactgctgtttacatactcaacagatgcccaactaagtctgtaaaagacaagactccaattgaagcttggaacgggaagaagccattagcaaagcacctaagggtctttggatctatatgctacattcatattccagacgtgaagaggcacaagcttgaagacaagatcatacgaggtctcttccttgggtatagcaatatctctaagggctactgtgtctacaacttgcaaactaagaaactcgttatcagtcgagatgttgaagttgatgagtacgcttcttggaattgggatgaagaaaaagtggagaaaaacgttcttatacccgatcaactacctcaagaaaaagctgaggaagaagacccaggtgaaccaccttcacctccaccacaacaacaagatcaagaactatcatcaccagagtctactccaagacgagtaagatctttggtggacatatatgaaatctgtaacttggccatacttgaacctgaaagctttgaagaagcgtcaaagcaggaagtgtgagtcaaggcaatggaagaagagatacagatgatcgagaaaaacaacacatgggagttagtaaatcgtccccatggaaaagatatcattggggttaagagggtctataagacaaagctcaaccctgatggcaccatacaaaaacacaaggcgaggctagtaactaagggttactcacagcaatccggaattgactacgatgagacatttgcaccaatagctcatcgtgataccataagagctttaatagctcttgcatcacaaaaaggatggagtatccatcaactagatgtcaaatccgccttccttaacgacgcacttgaagaagagatctatgtggaatagccacaaggattcgtgtctgaaggcaaagaaagcaaagtgttaagactaagaaaagcactctacggtttgaagcaaacaccagcatgatatagcagaatcgatcagtatttcatggattgaggattcaggaggagcaagagtgagcctacactttacatcaagtctcaagctacacggcctgacataatgtatactacaagtcttctatcaagattcatgcaaagcccaagtcaaatacactttggagcaggaaaaagaattttgaggtatctacaaggaacaaaagagttcggtatatggtatactaccgaaaccaactcagaattacttggctacaccgacagtgattgggcaagttcggcagatgacatgaagagtacctctagctatgctttctcactaggatcgggaatgttctcttaggcgtcgaagaagcaagctacagtagcacaatcaacagtagaagcagagtacgtctgaagcaacgagtcaagctatatggcttcgtaggatacttgaagacatgggagaaaaacaagatgagcctactaaaatcaactgcgacaacaaatcaacaattgcaatggcgaagaatccagttcatcacagcagaacaaaacacatagcaatcaagtattactttatcagagaagctgaagcaactaaagagatcaaactcgactactgcagaacaaaagatcaaattgcatacatattcacgaaggcgttgccgagaccaagatttgaagaattacgagctatgttcagagtcacagaaatttgcatcaaggaggagtgttgaaattgctacaaatttctagaatattctatgtatgaaaatagtagaatatcctagaactatagtgtgtatgaatatggtagaacaatctagaactataatgtgtacgaatatggtagaacaatctaaaactataagtgtatgaatatggtagaacaatctagaactataagtgtatgtataagatagaagaatctaaaactatcatgatactaatctatcatgaaaactctagaaagacctaaagtaatgtagaaacattcaccaccattgagaggttggtgacttgagcctataaataagcaattggtatgttgtaattgatcatccaagaaatcaatgacatagccttctttctaaaacaattctctaaaactatcaactatcaactatcaactatcatctaataaactaccaacagaaagttctgtatctttatggttttatttccttatttctctcttgatttgtagtgggtgatttgtttctctatttatttccatatttgtagcagaattagtcatctgattctgcgtaaataccctatatatcattcttcagaactgtgaggaatgaaatctctaaacctagaacattgatatcaattctttcaccttgtcagcttctaaaccttgaaatctttaacctcagatcctttaatcttagaacaatgatttactgctgaattagatcatgtgctgttaagaatgagtttaattttgatctattgtcagattgaaattttttccgcaatcatcgaattttgtgctgacactgacacatcactaagtttgactgtttcaattttcaagtagttgttttcatgatcaaactcatttaaatatttaataatgtgtcaatatttgatttgatctgcacacaattgttgcattgacagtggatcaaaatctaacctataaaatatataggaagaataagatgtatttattatttagaatggtcattgtgactactgcattcaaaagtttggtcttaaatattttgtcttcccttaatttgaaggaccatgacatgatagccaattgtttagcacaatacctaatccatttgtttcaaattcgatcattgaaatattttgcatcccttatgttctctgaatgtaataaatttaatttctctctaaatctatagctccttgttagaagtaatgcatgagcttccacctaacagcttatgcttttaggagagttggtatttgatgtggtgatagaacctctgacatcaagtggattttaggaattcaattcttgccgcaccatttcttctaattaataaaagaaaagagttttggttctaggttgcgtgggtctatgtattgtacatactttacgcttaatcgactatttttattgttagaatatatgaaaatatccattatccaatattatcttgatcatcttagatcatctcatagtattagtttccctatttccttattttatgatttgtttcctatttagttagaattatgattagcataaaattagggttagtgctctaggtttgtttgatgaacatatcatcagacagtgatacatcactttatatcaaattaatatcaatttcatggtattttgtctctattttttgtattttctccctctataaaactacataatttcagcacatatcataactttggaaggggagcataaacttatgctggttattaagggaagtgtactcaccaacatataaggttatccagggatgtagacaaatttgaacttttgcctgcctcctttattactaaaccagaatatgaacctaaatcaaatttgttataaacattgagttaataataatttgaagattcatccttttatgtattactaatcagagaaaacaagttgctcccttgtcccttcatacataaatttgttcattttcctgttgccaaacaatatgtcagcgcttggactgactgcttgctggatcttgacatttatctactgaaaaacatttacggagggtgcatcatggttccatattgtacatatgaattcctttcactttttggtaattgcacttaatatgatgatgtggagcattaattaggattatcatgtcttttcatttaaatcttgatttatttcagtttatctggtttcttgatcactttttgatttcagattcttattttattaattagaataatttttagataagatcctattattaggattctctttatttttattttatcaattaggataattgttagggatatctttgtagcctattaaaaggccagacttgattgaaatttaatcaatgagaaacaaaaaaatatgaaattataaatataaatttctaactgtacgtaccttgtgaaaaaaaaaaaattattgtagagttagctattccatcttttttagaaattatgttcaaataagcaaatatatcgtggtgcagcggtaaagttgtgccttggtgacttgttggtcatgggttcaaatccggaaacagcctttttagcctctgggcaatggggtacgaagtttttttttttaagcaaatatatcgtggttgcagaagtctataacaatattcagaaaaaacttgtgttagtttaggaagggttgatgagtctgcttctcactctcactaaaacttgtgttggcttaggaggggatctatcaaggacgagtatacttcttgctttccctataagttgaaatgagtcttccgtgtctaggcccatgactcgatcctatgcaaaggttcataacatatgattcagtttgcagattcatggatcccaagcaggaaaatataattttggatggaaagaattgaatttcacttctgcaaaaataggaccctcaaatcctgtaataggaattctttgatgatccaaatttaagcttcagaatcatgagagtaatatgcggttaacaggatttgatttgtgtgctgggagttaaagcatagctaagccaatgcaactgaaagaggaggtgttttatagggttgagttgtaatcctagaaagctcttctgccataaaacttagctgcaagagggacgttggtttcttaaggttttgttatatttgtttttaggttcttggatatatagcatacaaaatatgccctatggattactagtatcaaggaaaattaggaaagtaaagtgtgttatgagatgttgattgacaagaatgctaaattcaagatcttatgaaagacaagtggaatcttttggatgtcgcagttgcagtttcgtcatgattgacaagaacgttaaattgcggacaaatgcgactgatgtggctgcaattgcattcatggtattgaagttgagagagtgaaagaatgagagaatttgataaagtgatttggattttggagaactgaaaaattacgttctgattgagcttctggttatgttgaagtatttatagcacagaagctggggatctaatctagttccatctgtgacagttgtaagttgtacctgtcttacaacaatctaaccaaaataaagagagaatacagcttggccgaaaactaaacaatcaagctaaaggagaaatagtattctcttacacccctcaagctcaatgaggcagagaaaccaaaggaggctcagagtgtgaagaaaagagatatcagcccattggtcaaccccttactttggttcacatgacaccctaccacctcaatgagattgtattatttttaccttgaaaggtgctaatactttctctctaatgtattcattcttgattgtgtcttgtatgatcactcatccaccttgacattcttgtctctacaacacttagtttatgccttgttgacactttgctgctggacattctgtaacttaagcattgtgggtcttatgattatgtagtaaaattttccttaatattgagggacactttttgaatgtgagtaattcttgaaacatttctccatttcttccacttagcttgaatcctatgactttgatctctctctatatccatcaatccttttttaaaatttgaatttcaatgtttacgatttttttttccagtcttttgtatcttttttctgtgacatgaatttttgcagcggtaactggtaatagaacttttgcttttcattcgttgcagttcctgtttggtctttaggaacaaattcctcttccgaataatatgaaagtagagaattgaatgtatttatctccatattgtttgtaacaagtccattctttatgaagttttaattgtatgtgtgcactgtcctttgcaaagggtgagattgtttgtgatttttttaattttgttcctagcctattgttgaatatcaaatacaggtcaatttccatgaaatttgcaaaaactatttagatatagtaaacaaatgctttccggctatcttgcttcttttcttttatattatatgtttgaaatatttgatttttgttgtggaattatttagatggttcttacactatgtaattccaaagtgaaacttcaaactttgtcactgttttcctgaactaactttcatttcctctgatatattgcatagttatattagtaccatcaaatagttggattcgctgattatgatgagacattcctttgaaaatgaatattatatcaattactgccatttcttatttttttactcttaaaaatggatagg

SEQ ID NO: 2972 - DNA, 632 bp, Glycine max
  Intron number 9 from transcript Glyma04g32990.1 (locus Gly ma04g32990) derived from phytozome v7.0 (chr-ID Gm04; pos 38377519 to 38378150)
aatctgttggatccaaaactgacaaaatccacttggtaatcttctaaatgaatattcttagtatttgatttttgaaaattgtgtgggagatgatttgacgggttttattggtagtctttccttttggaagtgcaatcattatgatttgtaattgtacttcacaacaaaggttgctggtgttaaaggattcattgttttaaaattggaatttagtaccattgtttgtatgcttagaagaaaaaaaaagtatgcttagtaatttgttcataaaagaagtaattttcattgtggtctgacttgagtgattaggtaatctctctttaactgtgaaggaatcaaatgcactctttcctatagttttgttatgtcaagaaaaatattgaacataaagtattgagcatggatgactatcttggaaaattttctttaatgttattattattgtcttccattttctggaattaaaattcaaatactgcaaaagtgcagtgtacatttttttggctgttaaagcatttattcaaaatcatcgagttgatgttcattttgtattttcctagtatctaataaataggttattcgaatgattaattgtagattgaccttaggagggccaataatactgaaattat

SEQ ID NO: 2973 - DNA, 581 bp, Glycine max
  Intron number 4 from transcript Glyma07g35030.1 (locus Gly ma07g35030) derived from phytozome v7.0 (chr-ID Gm07; pos 40165110 to 40165690 reverse strand)
tcttcgcctttatttgagagctagcctacattcatgtatgtcaagttgtcctaatatccatcctacctgactcatttgtattttagaatcaattgtttgtatattttcacaaatttaatcgtgtagaatattgcacccagcaaattgttattaaatgtatttgatgtttggtgttaatgttatctgtttctgtagttaggagacatgcagtgtcaaattgcattttgacagtgcatcaagctgtcatgcagggcaattagggaataagctgttttttattttgaaaaacagtgagtttgcctgggtacataaacttaagatatggcatttggataaattttgagtcgaagagtttatggaggtttgctccttttttttggtggatttgttagttttggcaagagtataattcttgattttccaatgcaagatattaatcttactatttccttgagagagaatctttcagtctcagtgttcaacatatatttcagttgaaaaattatctgtcctttcaattttgatatctgattttaacaagaatattgcttttgtgattgcataggggtttatttgaaggc

SEQ ID NO: 2974 - DNA, 1748 bp, Glycine max
  Intron number 1 from transcript Glyma17g24440.1 (locus Gly ma17g24440) derived from phytozome v7.0 (chr-ID Gm17; pos 24850637 to 24852384)
ggtatgttgtaacatgctatgaccatatagattgtacgccccttaactggttgctgtaatttcttgtttgtcggacatgtggagttttcatttgacatagaaaaaagggccagtggagctgttctgaattacatggtattgattactaaactgaaatctgtctaatagttctaaaagagttcttaacagaactgaagaagataaaagataaagagagaaggaactttagaatcagaagttgttattatgattgggtaactgatttctgttacgaagagaagtatttatagagttctggaacaattagttattactaactaaccttctaactagctgagtaactaactcagtgactaacatagttaagtgagtgtgcagttgaatactgcacctccctttgtactactctaatacacggtttacactcaaatatctctctattttctcttattttacaactactataaataaaagtcaaatgcctattcttatccctaattatctgttgtatcaaggagacctgctaaaagatgagtgttatgggacaaccaaatgcaccaaagtggtgcaacataggttgcaatttgttaacacagatttagcctctttagttggaccagaatgatgaaagttattcataaaaaaatgtctggggacctaaggcacaaccaacattcaacaagaaatccaaagaattccattgagaaacagtagcagggtaagaatggattttgagcagtcaaaaatgcgcatcaaaggaaagggccttatgtagcctaccatcctgcaacacgtcatcaatattgattctactaagcattgtagttcaaataaaagacttgaccttggagggagctttgaacttccgaagggttttatcaagatggaaagtagctctatgcaatgaatgagttaggaaatgaaaaaggatttgcgcagaatcactccagaatagtgaagagactaatttctgttatccgtcataattatttcttacttttacaaaaaaaaaaaaaaaagaatgatgtgaaagtagaacagataagggggaagggacaaaaaatttaagggacgtacttgcaatttctttgcctttgtatagcatttctgagcagaaccgaagtagactacctgaatcataggttcattatattacattcaccccagtttatatctaatattggtcatctataagaggaatagtaatctccctgtttattttcctcaccattcattgattcacacccacaagtgagcatatgttaagtttccccataagtaattccacctttatgctgatttcaaagaacgttttgctaagttatgacttatgacatggcacacattttttgcattcatcgagactttaatcatctgttggattgatatttatatgattacacttacgattagtttctccatattatttgactgtctttatatatgcttaactatttgatcaagaattggtagccacggaatctaattgttgtatttaaatatcatatttcttgtgttaagtttgaaatactatcaaagtacctcttgtgttggtgctagctttgtttgtcagaaatgtgtacttcgatttaaccaagatacttgtttgtaaattgtcattgaaagtttaaaatcatactttcatacacaatgaacattctaacatcagatactcatgtttggtgcttctaacctgaaaatactatatgcttgcttataatcttgcagacaactaaaccttgaagaga

SEQ ID NO: 2975 - DNA, 1844 bp, Glycine max
  Intron number 3 from transcript Glyma12g30560.1 (locus Gly ma12g30560) derived from phytozome v7.0 (chr-ID Gm12; pos 34193851 to 34195694 reverse strand)
gctcgtgacattttaggtactacacttcttccctgtatcattaacacggtagttaagaaaggatttaactatatgtaatgctaatatataagatttgttgtatatatatactgagttattttttaattggacaataagttataactaaaaattatcttgagatacaatcataatattatttgttaatatactttaactaaaaaataagtatgtgttaacaaatatactctcgtatttttatagttggagtacattatcaagatgctataatttatactttttttatttacctaaaaaaattcaattatttggtaaaaatacatattttagtagttttttataacattcaaataaaaatataaattcaagatttaaagttgaaaacttgtaactcttaaaagaaaaattagcaacttgtatggtaaagcgagaatcgggagtcggttggaagcaaagccaaacaaaagtagactattaatcattgtttgaggagaaacgtttgaaatattggtttattgcatcaattgttgaccgttgaccgttgaccgttgactgttaaccattacccctactccatgcattgaaatccttctctttttgccacatatattggagtaggaaaaaatccatctacattaaaatgaagaatgttaattagatgttatgaggaagatagcaaagagacagagagagagagatcgagagagatttttttttttttaggttaaatgctgaatattattgatgcactcgaaaagcagaaattacatcatttgcagttatttggtccacttgatatgaaagtgagagataaagaaaaatgaatgaagttggtctcccctttaaatatacttcttaggcctaataatttgtactactaatgtcctgtgatgttttaatcagcaaaactctcgaattttgtacagttgaaagaagcagctgaatattgacttatatgcacccaacaaaagcgaagtcatttaatttgttgctgaaaaaagtaatacagtcgcacaaactcttagatatacattatagtattatttactttctaatcacaggctcattgttagttatatttataccttaattatgttacccatgaaacaaatgctaaagggacaagtgtcgtataataagaattttccatgtttggcaccacaagcatcggtcactactaaaccactcgatagactgttagaatccatagtatttgaaatctcagatgagttctatacaaacatcacagtcctcactcctcatctcactagcttattgatctgaaatttttgttactatagtttagtcagttctaggaccaaataaccaattcatgttgactaattaatgtgttcagaactgatgtataaaattattaaggttaaattagtttattgatcatttaatttatttttttatgtttgatttagttttttgtttttttaggtttaatttgtttttctgatttttaaaattgatttgatttattcatttaattttttttcaatttgattctctaatttttaaaatctatttaatttagtctcatcctttaaattaatttaattggtattgtcgtctaaatttgatcctaccatcttaatacatattttatgattaaataattttaagcatttacaaaatacaattttttaatattattggtccaatttaaacaataaaattaaattaaattaattttaaaaattaaataatcaaattaaattaaaaaattaaagaatcaaatcaaacttaaaaaattaattaaaagaccaatagattaatttaatctattattaaccttggaaggtccacgttgggctcggtttttggtggggccaatt

SEQ ID NO: 2976 - DNA, 1292 bp, Glycine max
  Intron number 17 from transcript Glyma15g33060.1 (locus Gl yma15g33060) derived from phytozome v7.0 (chr-ID Gm15; pos 36686863 to 36688154 reverse strand)
ttactgagagtgcgtttgaatattaactgaggaaagtaatttatcagagaatttaaatttttgtaatttagaattcattgtttggatgctttttatgaagaatttaaaattttggaattttaaaacagaattttaaacaactaaaaatttggaattttaatttccttctaaaaggtgagaaattgaaattctcttcttacagtcttcttcaagaaacaccgtctgaactcttaaaatatcgatcgggtgtgagcatagagaaacacgtataactaacacaccaacaatatcttctcttttttttcattcattttttcatccccatgatttttatttttttatccaaacataaaattttgaaaataaaagaatttcaattgaagtatttgaaattcttagaatttaaaatttctcagaattttcaatttctccatccaaacacactctgaggggatttcttggtgagctggatttggaaagttatatgtgggcttatattggattcatatttggggtttagttggatgcattatgattgttctcttattttatgtttgcaaatgttgcagtgttgtgatggtggatgaggatcatgaaagaacactctcaactgatattctgtttggattagtgaaggtgggcagaaaattcttgtgacgagctaaatttgcatgccttatttataattctagcagattgagagttgagacaattaaattctattccttgaacaattagcagtttgattgtgatattcaagacactttgggcatatatttgattgagtctggtgcaagtgtttttctatacatgtaagaaatctgacatggtgttgattgcatggatttcttttctatattgttgtgcaattattttatttggttactggtcaatctgtaactcatcaatgcatggtctttgctcatcatatttgaatttatttgatgagcatgttcaggttaaatgaataaataatgttatttgtagttgttcattataatatcctcccgtgtacttactcacacactctatttttgcagtaaaaaattattttggtccttggaagtatatagtgttgtcacattagttcctgaactacaaaaatttcaaataagtcccataaatttctagttgtttaagtccttaaacttaaccacatactatcatttttgtccctaaacatatgttaatatcatcacttgagttgcacattttttttgaattttggattattgtgtttgatgaattaaactttcagggacttatttgaatttccttagttttaaggtaaa

SEQ ID NO: 2977 - DNA, 7297 bp, Glycine max
  Intron number 7 from transcript Glyma14g15210.1 (locus Gly ma14g15210) derived from phytozome v7.0 (chr-ID Gm14; pos 16072887 to 16080183)
atcataaacaattttcttcaggtatataaaactgagatcttttgatttgttaactttattttttctataaattattctacttgttttagttttgtatttacattcatttacttaaagaaaaaatgtgttttttcttcttctttagtttcatacacatccttttgattgtcaattttattttcaaatgttacaatcttttggttttaattccttattttcctggtcaatagcatggactatagatcaagctattaggactcttttacacccctccctgaattttcctattaaagaccataatttgatatgttttcatttttagtgaagacaaaagctattaaatctcagcttcatcagctatcttttaccatgttatctgaatgtgttcaaagcaaggatacacttggccttttagttatttgctacttgacatatgtattttttgagatttgcagaggtgcatcttaaaaagactagaagagaatataaatttggaaaataattctcgaaaacatcttgttgatgtattacaaataggattttttacatcggttatttgacaatttctacaataatttttaattgtcttcaaaaccgtcctcttacaaagttaacacttttcacaacgatttttaaaccgtcttaaaaactcgatctctatatcggtttgtgtaaaaactgtcttagaatatttttttattttaaaaattaaaaaaaattaaggattctaagacggccgacttaagaagtagactttctatgatgattttttaaagaatcatcttagaatgtatattttttaagataatttttagatatttatttttttctttttttaatgtttattaccatgtaattaaaagttattaatttttataataattatttaaaaaaataaaaataaaatttaattaaaatgttctactaataaattacatatatatttttttactatttaccatgtaattaaaagttgttaatttttataataatcattttaaaaaaatcacatttaaaatgatttctaaaacaatgaacatttgaaggtggatatggtggaagacctgcgtgtgttatccaaaaggatatataaaaccaaatatactacatttattgacttcatattaatacaaacacaaaatggtcttaagattcttatgttaatgtataaattattgacatggtgaccagaaaaaaaaaaaagtgaaagacttgctggttctataatcccgagcatgatgttctattaatgattgtgcaatcatattatcatatttatgttattgtttgtgcgtagaatggtaagcaaacacaaataacgcactcaaataattttgactagtgacttgcattgctatagtataccccagaccaaactgacttatgtctcaatattagaggttcgatcttcacttcaacaataaacacaacaataaacacattttaccactcaaggagtgtgaatatgagcaaaagagaacttagcatattaagaagttaaaggtaagccatttttgacatgcttgaacagaatatgttggaactaagacaaaactcatttataaattacaatctcatagagaaccaatacgaaaatccatgagcatccaaatatgcaaaatagataagctgtaactatatcactctctagtctccagtaagtttgaaattagttttccatctattcattttcaacaagggaacattttgccaaacaaagaccctataaatgtataatgtgccacatttcaagttcattaataatttatgggctactcaaatggatcatacatgtaagtagtgaaaatcataaattaagctcataccagcatattcatgaagctgagtaatacatattacaaaatgtagcttaattagtaggaaaataagctgcaatttcattctgaagatctttttaccgacaacctaattaggagaatgctgaagcactctaagggacagcttcctataagaaaaagactcaaataaaaacaaaccgacaaatgctaaccaaattaataggtaatgaaaagaatggtttaggaaggagacacaaatgcttcctcattttcataattaaggattgccaaatgacaacttcattattcttcagaataactaagccgtgactgagaactaagagtagataaaaccaaaaaaaaaacaccaaggaaagaagctgaattctgaaaacatcaacacttctaacttcaagacaaagttgttcccactgttctggtgtagtaaaaagatgacctttacacatcctttacctgttacctttatagcttcctgccaagtcaactaagtggatataaccacgaagactattccctgatgcaagctctctttcttgaacatgaactgtcaagcagctgcaattatagcattacaagctagtaccaattaatattgtgatggaaaacatacatggtaaaaaaatggaccaaaatgtcttatagtctctaacacaacatataggttaaatttcaaaccaataatcacacacaagcataaaaaatatctctagcagtagacaacattaaaaaaaatttaaattcaaccaataaaaatcctcatcaacaacagcataaggtggcatatgtaatttgacaatctcatagaaaccaattcgtagaatctgaaacaaacaaagtactaagaccactaatagcatgttcaaagaatataatgactcaaaggcctatgaattgttataaaaaaagatcaatgaatatatggttacaccctgtatctttatttcaaaaggttcaactacaaaatctttcttctcttgcaaaactaaattagagtgacacgtaaaaaatttcttctcttctccttctgtttgttctctacatgaagtatttacttagtcaacgattcgtgcaaatatactcataattttagagaccaaaaatcacctgtaagagaagaagttccatgctagatatatctttatcatgacatagtgaactgataagatgatcaagatatcttctccagccaattgagcccccaacaatatttgtcacttatgtaattttagtatgaaagaagaacataatcaataaatttgttcatgaattctgaccaaagcagccattttattaagttatttgatgtaaaagagaacatctaaacatataataataataataaaagaaacattttgtactatatgttatgaagcagagccaaaagtgataactaaaccaaactaaagttcaagtatctactatttaattatctttctaaactccatagtaaaagaataacataagcagtattcccatgtaacataccgccatttgtgacaaatgttcaaaaactatccttatacatgccatactaagagataccaaattataatgagtagcaaattataaagctggttataaatttagcttcatatcttaaaataattccagtgataaaatcacaaaacacaaccaaggataaggcattaccatggttttgttggatgtagatccacagactttactctttaatctttgcacaagctttcactgttcaaatattacaaaaacaaatcagtttgagcagccagaaagttataaaagtctgccatgcttggtggcagagaaatctaaatcacataaaatctcgctgacaagctaatcaaacttggccttctcaaacttcctatgtactccatgagtaagacatagataaatccaaggcatttggaccattttgcaaagtcacaattattggaaacatgaaaaaaaaagctccaataaatgtgtatctcaattcacttgcacgtccaaaaattgtttaacagtattataacaaggaaaataaaacataccaaaaccaatgacattatgaaccactaacacaattggaactgctcagcacatggagttgaataataattttaaaaaataatttacgcttaaatactttgtactttagtctttcagaaactgtcaagaaactaccaaaactttgaactagtctttcccaacaatgattgcatactaggaagtcaagtactacccattactactctagagcaatcaaaaacatttcaagcaacaggaaccacctcaatatcatttgccaatacagctggaggctacttgtattcttcctcctttggagtgtggatcgtgacaagatcaggaaagggagttttaggactctgattccctttaggatcccaatcaagcatgatcttaaccttgataccaagagcaccctataggaaaatgaagaaaaacctattagcatttagcaatattaatccatgaagaaagaaaatgagccaacaacatgaaaatctatcaggtggctatgaagaaaaaaaaaatcaaacctatcttagtagcacgtgtctcactactgagtcaatataatccttgactggttgtccaaaagaaatcatgtatccatccttgaatttcatggacttggctctcagagctctcagttttccactagtaatgacctactcaggtcaaacaacaataacaaccaaaccattacatgatgcaatacaatattaggagtccataaacaaacctcgcatcctttggccccactttccatcacaaattctaaaacaccatagcaagccctgcaataaatagtttaagatacatagagattataattttgccatagggatgcagaagaactatattcacacaaatagacaaggaaaatttaaaaacaccgaggccataaaagcacattagtaaagtaaaatatcaaaacatgcagaagaattgtattcacacaaatagataagtaagatatgttcaaaaagacatatcttacttatctttgccaaaaaaactacagtattttataacaattgatgtagtttcttttcacttttcttggctattttctttttaagattctacttgctccaactattatatacgacaacatatttcttccaattggatccgttcaagtttcaaactataatatagcttatccatataaaaaaggaggaactagaaaacggatcgctaatttagtatgaaaagggacttgaaggttttgtatatgatttattgattttgttttaaatcacacaaatatagtattatagaattaagaaagataacaatacatatcggtgacaaatatttcaagcttgaggaaatcccacgcagcctctttggatttggtaatagtaacaaaatcagattcaaagaaaacgcaagtaatgcctgcacaataacaagaaacacagaggaatcagactaaatccctaaacacgaaaagaaaagaaagagattgtcgattgcaaagaccgatttataaaaactgtgaatctaattatgacaggtttttagcattgtgaatctgaatcgacgatgagcggcacgacataatttggcacagtgctccaaaagctagcactggactctagtgacgatgaccgtggcagtgatgttcacaatacacacgatcgaggaggtgggaggggatagtgtatttaaaactttggatgtcagatctacagattctttggccaaatctgcggattctctgacttgtggtggagttggatcagtgtgagagtgagagagctacgtgagagattgagagagcacgtgtgaaaggtaatgaaagtgtaaatgcgaaggaatttcaaatatgatttctcaaaaatcgtcgttgaacactaactttcaaagacgattttataaaaccatcagttgaatagtttcaattatttataaaaatgccacatttatggtgacaacggttttaaaaaatcgtctttgaattagtgtcgttgaaggtgatttttgtaaaagtgacagtgaagtactacatattagaagatcatgattggtaaaaaatttttacatgactactaactagtattgatgtataagatattttaggggttgcttggtttggtcgttttatgaaaatagaaaatagtaccaaaaatatgaaaacattctcattgaaaatattttggaaataaactctaaaattgaaaatgaaataaaggtgttttctaaaaaatgaaaacacagtgcacaacatgtaattttaacaacaatacaacttttgcctttctcttttgaaactctgaagtattgtactggcagcaacaaggggctagaaatgcaaagggaaaagggcccttatgcgtgaaaatgccactgtgtgtgggtggtggctgtgctatgtgaaagaaaggtccgatgagggtgggtaactgaggtttgtggtgaagacaatgatcaattaatggtggagaaactacgcacaagggtgaaggagatgggatcatgagtcatgattgatcgatgaagtttcgaggtggtgacggtgttggttaatgcgtaggatttaataaggatgattttagtgtgcaggtgaggagggatggagttttcatgttccagattcaaagattttggaaaataaaaaatagacaattaaaacaaacatattttctaaatcttgaagatgtgaaaatgaaaataggaaatgaaaatagaaaatacttgatcaaacgaagcgtccccttattgtgttatatggagaatagtttctgtagagtttcaagccaaaagataaggtgcatgcacattgggaattgaatttttgtatcactaagatttaggtggtttaaatgcaaagtgaaagattaattgcattttactaaatgaaccttagttgaataaatgcattagaagttgtttttgttttaacttccaagagaacttatttattatagttggtggcaatcttcactataaatagataagagatttagtggaaaaacaacacatgaagagagagtgtgtgagaagaaagattgtgaaacaaagtcactttgttgagagaaaagtgtctttgtgtgagggtgttatcgtttcttgtaaccattgagtggggtactcgagtttgtagaatgatatactatttggaatgggttacaatcttgtaatcatttttgttatagtaaaatactttttgagacgattctgtgaacgtaggcaagaagtgtcgaatcacgttaaattcttgtgtttgttatttttttctacggtgtaatctttgttatgttcttaagatcctttgtgagtgtgagtaatcttatttgtgggagcgttgattttccaacagtgggcattgatttcccaacaatttctaagtgtgaaagtgagattgtatgaatgtcattagaatcacaaatcatcttttgaagccatcaaactacttgtttcccatggaggagatcatctaagttattttgatatgctttattctttggtatagaatttac

SEQ ID NO: 2978 - DNA, 4580 bp, Glycine max
  Intron number 6 from transcript Glyma03g01080.2 (locus Gly ma03g01080) derived from phytozome v7.0 (chr-ID Gm03; pos 801424 to 806003 reverse strand)
gcaagaagaaattcggaggtatgtctctcatccgcacaagttagtacatgatgtaaagacaggcgttgaggtgccagacctaaattatgttctggaggggaatattggaccccttattgcagctcatattaatagcagagtcatgtcataaggtcagaatccatgttccttaggccaccacgttctcattttgcaattgtttagcaagatagacttattattttcaccttttcaatcctgcaaaattctcagggcttacttcaatcccttgatttcatgagccaaaaacaaaaaaacaaaaaagagtatcaattcatcaatttttgcctgtattgatagatatgttgatgagttgaatgccaacagcattatattctaaacatttttttttatttgctttggcatcaaactctgccaatgtttcttcatagtcaatccctagccctggttaaggaggagggttgtttaggccctcggcaaccaacgtaaaactcacggttatacctatcatggatcattcatgagagatttttgtaaatgccaggccgttaccaaaaagtatcatgctgtatcacctgaatatagtgtcaaatgagcagggactgctacatcggtgctctcggatgtagtgtaaaatgagcaagggtcctctaatttttctggatgaatatgggtaaagaagttcagatgatcagatttgctacttggaatattggtatcatgacaggtaagtctatggaagtggtggcttcggagaaggattaacattatgtgcctacaagagactaaatgggttggagaaaaagcgaaggtgatggatatcactggttttaagctatagtacacgaagaggaaaaaatgaagtaggtattatggtggacaaggtttggaaagaaagcatggtggatgcaaaaagaattggagacaaaatcttagccataaaattaatgagggcataggaaaagttttgggaagacttagaggggttggttcaaggcattccacaatagaagataattttcttatgtgaggatctaaatggacatgttggtagtcagaaaaggcattttacaaatgcacatggttttggagatctaaatgagaaaggatagacaattttttacttctccatggcttttgaccttctgttatatccttcatgtttttggatgaaacaatttcgaacagttttccatcatatcatttgcgaaaaagttttagaaatcacatacacactgttcaatttcctcttctagcgtgttccatctttttcaggattcaatgtgacaataacaacaaatcctatcagcttttctcacgattaagatgttggggaatccttacaaataaagttggatctaattatgagtttggagagggagaaaaaaagagtctaaaacattatgaaattttatgtaaatgttgcttacctgaattggctttaggaatagttttacttgaacattccatcctaccacaagggattggtgttaaaacaaatttatgttaaatttattaaagtaaaattagtatgttgattctttaattttaaggttggttttgatttcatccttcaactttcatttctttataataaattatacttgtacaacaaaatatacaactaagagagagaaaaagaaaaaggaaaataaatttaaatttgaaatgtaataaatgatacggtaaataagagagattcacacacaatattagagaagtaatatagatataataatttgtataatattatattgtgtgtttatctcttctacactatcatttattacgtttcaagtttaattttatctttctttctctttcttggttgtatatacttcctttgtattttttttataagatattttaaactaatttacaccctttaagaagatttaaatatgtttttggtctttttaagttttttttttcatttttattctctaataattgtaagtttgtgtttttcaattttggttcttattttttttattcatttttagttatctaagtatgcacctttttaattttaaatcctttttttttcatttttatctcttatatgggtggaagtaggtcgaattgcccattgggacctatgacctagttcatttaaagcttgggttggctcgactcatttaacaaaaaggtcatgttcaagtttttttaaaattttttttagttaaataagtcaggtcataagtgtttaaaaaatcataagcctaatgggttaacctacttagaaacaatagttttttttaataaaaatactattattaatatgatatataatattattattttaatgaaaataaaaaattatttttgttgtttgacaatttaaatcattttaatatttgaaataagttaattcctataagcataggttgatagtaggaataaagattatttttttgtggggcttaagaggctttagtagtttgtcacatgtaacatttgtagccaagttttgaccatatcttgtggtgtaaaattaccttattatttttaatgaaaatctttgattttgttaaagaatattttttttttacactttttaatatgaataagcctttaaataaacttatgggtccaatcaacttatataaagattatgcatatccaagcctaaaaggtaaactcttgatgggtaataggcccacgcttgggctatagaaatataaaaagtgttgttaggtgcacccaacatttttgctggtgcacctagcacttgtagtgaaaaggcagtaatacccctgacttattttttaaaaattaacgcgagactctctctcccaccccgcctgcgttttcgcttcttcttcctgcggttttcttctcttcttcctcacagcctttccgcttcttcttcctgcattttcgtattgttgttgctcacgtcaccgacgtttctatttgttgttgtcgttaagaggaggttgtgggaagaggttcttcttcttcttcgttgaggagcttgccaccattgttgccgtgaataggaggttgacgtggtgcattgaggaggcttccgcaaagagcaacgccgccgtccaccatcgagggagcttcgtcaccgtccactgtcgaggtaagcgctgtgaccatgtcgtttccaccattgttgtcggcgatagggtagattgttgatctgaaagtggagatgtgagtgttacggatcaacttgattcgtaaactgctcgaagaaagtttacggatcaagttgatccgtaagcatcttccagatcaacttgatccgtatgatacttacggatcaacttgatccgtgaactttcttcgaaaagttcccaaactagcaatgtcacctacttggtaaaccatgaccgttaaacaaagttatgtgtcttcttaaaagtttcacataacttgtttgttttaattttgactgtttatgagaaaatatttttccatttatgataagatataatagttaatatttatttcccacattctcaaataaaaatgattcttccactaaatacatctttctctatctctctttctctttatgagtgtatatgtatgtaattaacatacatttagtaatgacaatccaaagtaattattcacatttagcctttatttttatataaaaaacaagaaaagtttaaaattttaaattatttattaaaccttgagtttaaaaccaaaatgtgtttccaactaagtttctaattatacttttaaggagggtatagaaataagtgagtgtgccatgtaaaaaaaaacacaacttcttaagatgatggaacacaaactcttgtgttacatatgcttttgtgccttctattttcacaaccatttcttgcaattagatcatttccaagttgaaagagttgaaactcaatcagaaacacatttcgattttaaactcaaggtttgagtgtgaatagtttgtggaatccctcaactcttgagaaacaatgatgaataactatttgtacaaaatttgactaaatattttgttcgaataatagtttgacatgggcagctcatgagaacaaggacgagtacaaaaacaacacttggtcaccattggtttccatgagcacctagagtagttcattcgaagtggcaaataacatctttcttcaattcacactactttgcggtaaacgccaacatctggaataggaatcaccctcttgttgaggcttactcttaatcacacacaacacgtgcctcaatcacattcttataagaagctattcttttttctacaatacttacacagttacattattttctcaatattagagcagaatgagtctaagcttatgcctctcccatttcccatccccctccttgttacctttttgcctctcctcgttcctgacttatatcctaacatataattatcctaaaattaaactaatattatgcattttaacttgatctaaaccttctagttaaagtgaaattaaagatgctttggtaaaatgagatgagactagtacttgcctagtgttgttatgtaagcttttagtttataacaacaatgttcttaataatggtttgatgcagtgtatcttggctttcttgcatttcaggttaagtgc

SEQ ID NO: 2979 - DNA, 2265 bp, Glycine max
  Intron number 1 from transcript Glyma06g09400.1 (locus Gly ma06g09400) derived from phytozome v7.0 (chr-ID Gm06; pos 6929808 to 6932072 reverse strand)
ggctcttcgtctcgccgtcttctccaacactacaagtaactacttccactctttcctcattttactcaaacaaacacgtaaagttgcttacatagatcattcattcactttcatcgattagtaatttagatcttcacttcttccgaggttagatattgtcggttgtgtttgcttgggtgggtactgcactgctactccacttgttgttgctcactgtttcagcagcgtctgaaacggggcttgtgttgtgtcattcgatttactttcagaaatgagttttcttagtcagacaatcgaaaacgttagatccaatgcatgacaatgagatcttctagatcccaatgcaccggatattgttattcatcttttatttattttttatttttttttagctttcacaaggaaatgtcgttgttcctccttttgcgtctcacaagctatcagaatgtttccagaatagcttctacatcaattatgttttcagttcccaatttccccttttttttcatgttaactgtgtataatgtatgtatgcatcacgcaaccgcttcaggattttcttaaaatactgaagccttctttagcacaataaaagtgcaggagatgatattagaaaattttgtttcagttgtgttgtgagatcatatgacaaggtgtgatgttccaatcagggtagaattatatggcaggcattgaattttataattatagacttatagttggtaggggggcctaattgtatttttactctccatattttattctgtgtgattttaatttttctagttttaattgctcatatttgatcctagtaattttaattgtttaaatgaagtctctcatttcaaagtttcatctaataattaacaaaaatataacagaattgtgatacatcattgatttgtatagatttgtaaaggaaatatctaaaaaactttcacactatatataaaaaatggtttctattctattttataatttttattttttaaaaacattttatacattttttttttacaaatgatatgttacccttacacatgggttatatttctgataatgatgggatgaaattgtagaacgataaatttaatttgaacaattgaaaaattatgaagactaaatgtgagcaatttaaattagggaaactaaaattgcacatgaagtatgtggaaaaaaaaatgtaattaagcctgaatattgatctaaatgccaacatgtattattatatcgacggaaatctggtttggctaagtggttaacccagtagcaactaaatctttttgcgggagtgtcaataagaaagcataggatgagtttgacttgtctcataacaacaaacaacgtatatgcaagttggattttgattgtatggatgagataaggaaatttagcttgctaggaagaaagaaaacagtgaaaatctgttttatgagtcttctggataaatccattggagattgtctatcaacgtaaaggatgatttcaaaacataggaggagataaaggaaacaagtcaataagtaattaagtattttgattatttttaaattctgaggtatttcatgtagggatttaagatctttgacccattaaatactgttatcattcttgctaactgcatcttttatgtttgcataagcttttagagccctggttttaacctgaatcagctttgaacatcattgatcttgacaatgtaatgttgcataagcttttagagccctggttttatcctgaatcagctttgaacatcattgatcttgacaatgtaatgttgcaatttgtgtacatgcttttcccaaggctatatgctatcctttcctaaatcatcttgaaagttgttcccaatgtactcaatcaaagtaattgtatatttggaatttgaatccttttatctgcattaaccctcttgcagaaagcaccgcatgcttacgatgtgatgacacagctaatcaaaacaaactaagcgctcatcctttaagtttggttgaatctttacttcaagtaatgcctacgaatggcagagcaggctttgttttcatccttttcaaatgatatgatatagctttgttgcacttgtgatgagaatacatttttcagcatattaaattcaacaatattcatatcacaatgcattagcaaagttgttttgctgaatttgtttaagctttatattaattataatttcaaacactatcttaatgtgaatttcagaatgatcagaattgatatgtttattaattgttgtagtgactgaagttc

SEQ ID NO: 2980 - DNA, 8687 bp, Glycine max
  Intron number 3 from transcript Glyma11g25250.1 (locus Gly ma11g25250) derived from phytozome v7.0 (chr-ID Gm11; pos 23346959 to 23355645)
acaaagtatattgttgaagattaatatagaaaaatgtagatgtataattggtggtccattatctagagagttctacacctatggagatgttgtagtgtgtagaaacttcttgatggatgtagaaaaatatcttattatctaaagtcatagaagcacctagaacattatagagatggatgatagatgatagatgagtctagaagactctagctaggactaagtagtatagaagtgtgtagaaatcatgtatgtaacctatataaaggcataagttgtagcaagccatggaatgtaagaaaagaagctaataaacacaattcaagttaaggtgtcaattttctgaaatatcatcctcttcctactcccatcatttatatcatacatttctaccatatccttccatagaaaaaaggcataaccacgtcccatatcctaacaatggcatcagagcagtgttgatcctatggcctttgctacatcacctagcccaccaaccttcaactataaccaaaccttagttcccattattggagcatccaaatgcaaactctattcatctcacaagacttgtgggatgttatagagaatggctatccagtcccagaaagccaaaaagaatttgctatgtggacagcagcaaagcaaaaggagtacaagcaatagcaacatgatgctaaggctctacaattcatccgacaaggagttagtagagagatctttccaagaatcatgcaagcaaaaaatgcaaaggaggcatgggagactctaaaaaatgaatttaaaggcacagacaagataatttctattaaacttcaatctttgtggaaggattttgatacattaataatgcgggaagataaatctatagaatctttcttctctcgtgtctctaatatcttcaatcaaaatagaagttacggggacacgattgaagacaagaaaataatactaaaaatattaagaagtcttcccgtaaaatatgatcatattgtggctgccatagaagaatcaaaagatttatctaaactcactctagtagaattaatgggctctttagaagctcatgaagctagaatgaaaagatttgagcagccactagagcaagcattccaatctaaaattaatatctctaaaaatgatggagaaaagaaaaataaccacggtaaatttcctcaaaaaagaggaggagcatttactaatcgtggtaaaagaagtggaaagcaatggagcaataatgcttcaagctcctattgcaaattatgcaagaaaaataatcatgatacaaatgattgtcggtacaaatgcaaaaagtgcaaaaggcaactacactacgaaaaagattatttttacgaaaaaaagaagaagcaaattttctataaaataaagaatcccttgatcatactttgtactccgctttatcttctcaagaatcaagggatgtatggtatgctgatagtggttgttcaaaccacatgacaaaaaacaaaaagttgctttgtgcaattagatgagacaataaaattcaaagttacacttggtgatggaaatgttcaaaaagttgaaggaaaaggcaccattgctgttaaaactcaaaatggtagcaaaaaatatatccatgatgttttttatgtgccaggtcttactcaaaatcttctaagtgttggtcaacttattcataaaaattataaagtcatctttgatgatgataaatgtaatatcattcataaaagaaagggccaaattatttctatcaaaatggctcctaataaagtatttcctctatttatgccatttgggcaaaacaatgcattgaaatgtgagaatatggatgagtccatactgtagcacttgaggtatggtcatctaaactttaatgacctcaaattattaaaacaaaaaaaaaatggtgcttgggcttccttttatttcatctaaccttaaagcttgtgaaggctgcatttatggcaagatgcacaagttaccatttccaaaaacatcttggagagctaaagcttcacttcaattggtgcatgctgatatctagggaccatcaagtacccccagctttggtggaagaagatattttctcctcttcgttgatgactacactcgaatgacgtgggtgtacttcatccaacaaaaattcaatgcattatcttgcttcaaggagttcaagaccctagtggaaaagcaaagtgggcattccctcaaaatcttgagaatagatcgcgggggagaattcaatgggcacatattcatcaatttttgcaatgatcatggcatcaagaaggagttgattgtttgtcacactccacaacagaatggtgtcgctaaaagaaaaatagaaccattgtggaaatggctcgatcgatgctacaacacaagaacctgccaaagaatctataggcggaagctgttagcacagcagtatacatcctcaaccgttctccaactaaagcagtcttaaatatgacaccatatgaagcatggttcaatagaaaaccaacagttgatcattttaaagtttttggatgtgttgcttattcgcacattccaaaggagaaccgacaaaagcttgatgaaaaaggagaaaagtgcatctttgtcggctatagtgaccaatctaaaggttaccgattattcaaaccagattcaaagcagctagctgatcatttcaagagatgtcatctttgacgaaggagcaagctagcaatggagtactgaagtcaatgagacgcaagaagtaactaatccaagcccgtgtgtaacgactcgcctcgtcgctacggtatccacactctaatattcgataatttcaatttttataaaaagaactcccttaatttttgcttatgaaaatagaagtgattttgtcacaacataaattcatccaacaacacgccattacttaagtgaatatgcataattacatagaaacaataatttggtacatgtcatacacataacgaaaattaaatctgctcatatatacaattaaaatcacagttttacatctttaactcaacaaaataaaacttaaaaaccaactacggaggagttgattacaaaacacaactctctcccaaaataacgccaacgtcatcacgtcggctcggcggctcctcactagaatcttactccctgcaccctaccactgtcattttgctcccacgaacaaggttcgtgatcatcacaggtaccaaccacatgatacaaaattgcaagggtgagttcattataaaaaaaaccaataccaattccaaataaccacagttagcaaggaacatgggcaaacatgatgagcatacacaacaatcattattcaacactcatatccaacaaatattcatcatccacatccaacaattactcatcatccattcatggacccaatcaagactgcacagaatgatgcatgcacctaactcaacacttagatgcaatgtggtacataccaacaacaaccaaacctcaggaaatagcctaagcgtgtccacacgacactctcacttagggaactgtgttgagtttatcgagaccacccggttgtgcacgtaacagcccccctcccataggtgatcagcctgggagcccaaaggtgttccctaccaggtggcagccccctagtacaaagtacacttggccacagttactctatttcatgtgtcatatgagctatgatcacggccaaaagcaagtgccaaagaccatggaccaattaaagcgcctaagcatcccctcagaaatgcttagattctctaaccacgctagttacccacatctgggccatccgacaaggtcagtgcactctaccccccatgacatacactccatacgacgtatgatcgtggccaaaagctagtgccaaagaccctggaaggtcagtgcacagtgccccccataaacatacacaacatccaacgtatgaacgtgaccaaaagctagtgccaaagaccctggaaggtcagtgcacagtgccccccacaaacatacacaacatccaacatatgaacatggccaaaatctagtgccaaagaccctgaaaggtcaatgcacagtgccccccacgaacatacacaacatgcacatgccaatgcatttccaacatcaatcaacattccatttccatgtcattcacaacataaatatcatctcatctcaatgacgttatcaacaacaacaacaacctcattttatattcacatattcaccaataataacaattcatgttgacatggtcattattaacaacgtcatctcaaatcaatatcatcataattatcattatcatcacatatcaattaaaatccttaatagcgacatcaacaacaaatcgcatttcgcacacacacacacacacacacacacatacacacacacacacccacacacacacacacacacacacacacacacacacacacacacacacacacacacacacacacacacacacacatatatatatatatatatatatatatatatatatatatatatatatatatatatatatatatatatttctttcatgtctgagattcacactcacagatcttcaaacaaccacaacaatatcattcatcacaatacatacatacatatatatatatatatatatatatatatatatcgcatcccattagttaaaacataattttctttgaagaaaaatcagcatgcaacagggataggcagatatcctcatagctaggttccctgaccctagctatggtgttaaaacggtaaattttataataaactcccctcacctatcgtgagctacgccgtggattcctcgtcgcgtcacttgaatattccttttcatccttgctcgtcgattccatgcaagcctctaccatgccaaaacgaaggagacttaatatggatttcagaaaacaaagctaataacagtgctctgggtcaaacacccacatcactacatgaaagagctgagagcatttcgggttttacaaaggaacatcatttggaaattccgaccacaccaatgtgaccggggttcagtgtaggttacgaaaataacatgcatttcatgaaaggataatgtttacaaagtctctttctctaaggtttttcaaaggaagcataagacatgcaatggcggttccaaagtcaaaaaagatgcaaagacaagatgaaactaacaagaaacaagcgtagaaccgtggttacctcaaaataaaacgaaaggttagactagggtttcgttctctaccgataccgcgagccaagttggaagattccgcttcggttgaagagttcctctcggtgtgggtctcaacggagaacaatggcggtttgtggtggctaatggtggctgtgggtgatagagaaagtgcttgggacgttagaaatgactttggaataaagaaaggagaagaaatggcgtttttcctaagctacacgaaagcaaaggctgaaatgcttaaataagaaatgcactcgagaacggaagcttcgagcatactccagacatcttctcaaagatcccaacggtcagatcgtggacaagtgtcttgtgaagctaaagaccaaatttcgagaagatccaacggttaacaaaggctggacagtgtttttaccgagacagcttcatgtagcttcctcaataagcttccccgtggcttctttgagaagctttctcaagaggcttctttgagaagctagatccttatctactcacacccttctattaactaaattaacctccttgaaaataattacggataaaaataatacaacaaataatcaaacatcaagcataattactaataatatatatatatatatatatatatatatatatatatatatatatatatatatatatatatatatatacagcaccagcaagaagaagtagaagaagtcccacactgtgcacactgccaccatcaccaacacaacatgaccaacagccaaagtatgcaaaagttggagaagtcccacaacaacaacttcaaagatcaggaaggccacacaaatcgaatccaaagtatgcaaaagttggattttttgcctgtgaacctccaaattttgaggaagcatcgaaagaagaagtttggagaaaagtcatggacgaggaaatcaaaatgatagagaaaaatcatacatgggagctcatgcaaaaactagaagacaaggagatcgttggcctgaaatgggtttacaagattaaataatgaggatggaacaatccagaaaaacaaagcacgacttgtcgctaaaggctattcacaactgcaagagttgatttcaatgagacatttgctcctattgtgcgcatggaaacaatcagaactgtactagccttagctgcacagttgaagctacaagtctaccagctagatgtaaaatcagctttcttgaatggagagattgaagaagaagtctatgttgagcaaccacaaggatacaaagttcaaggagaagaagacaaagtatatcgcttgaaaaaggcgcattatggcctcaaacaagaaatcaagtaataacaattgaatattaaaaaaatctaatatacaccaagaaaatatcatatcaatatatactaacaggataatagaatttcataacaatagatattacactcaatttagcgtaagaattattcaatttgaaagaatcatgaattaacattttataaaaacaacccaaaataccccaaaattgatcctctagagatctctatacatgttccttctaatccccaagcgtgagtaactcatcccttacctcgatgtagtcgctcaaacgttctccattagcaattgtggtgtctctggtgctctctagagctcctcctctggttgctctgatagggttcttgtgcgtcagaaaaagaagaaaggaacagaagtgttttgtaaaagctgttctaggtaaacatttggtttatatagtggaaatttatgacctaattacttttacttatttatttattaatttattaattttattttataggaaaacttaaaaaaacacggctgcaagattgcaaaccacttgccacacctatggcgatgaacgataagctttcaaaagataatgggcaaaacaaagctgatgcaacaatttatagaagcctagtcggttcgctaatctacttaaccaactcaaggccagacattgtacatgcagttagcatcgtgtctagattcatgagtaacctaagcaaagcacactttgcaacagccaagagaatcctaagatatgtcaaaggcacaaaggattttggcattttgtatgaggcagatagagactttaacttgacaggttatacagatagcgactgggctggaagcacagatgataaaaaaagcacaagtggatatgtgtttcttctaggcaacaaagaaatatcatgggcatcaaagaagcaaacgacagttgctctatcatcagcagaagcaaaatacatggctgcaacaagcgctgcgtgtgaagcgacatggctcagaaaaaatctacaagacgtacaacaagactccaacagttattcattgtgataatatgtcagctattgcaatgactaagaatccagtattccacagtcgtacaaagcacattgagattagataccacttcatcagagagcttgtggaacatggagaaatcaaaatggagttctgcaagactgaagaacaattagcagacatcttcaccaagccaattgcaacagagaagttcatcaaattcagagacatgcttggagttcaagacttttctagattaagggggagtgttgaagattaatctagaaaagtgtaaatgtataattggtggtccattatctagagagttctacacctatggagatgttgtagtgtgtagaaacttcttgatgggtgtagaagaatatcttattatctaaagtcatagaagcacctagaacattatagagatggatgatagatgatagatgagtctagaagactctaggactaagtagtatagaagtgtgtagaaatcatctatttaacctatataaaggcataagttgtagcaagtcatggaatgtaagaaaagaagctaataagcacaattcaagttaaggtgtcaattttctgaaaactcattctcttcctactcccatcatttctatcatacatttctaccatatcctttcatagaaaaaaggtataaccacgtcccatatcctaacatatataagccttcttaccttttggtttcttagtttgaaaattggttatgttaatgagtagctcccttagactatatgggaatttttaattgtcttaaactaaaaagaaattgtaattgggtttttgatcttgtaatttcttttatgagaagcgttatactctttaatacacttttatagacgcactcttttctattggttaaattcattaaataggatgcaggatccataaatttgtgtgatttgctatagatttcaaccaataaaaaggactgtgttactaacattttttttattattaagtttctgaaattagtttataatagcatgaaattgtcagaaaatgataatttgtggtggctttaaaaatcttaagagctcaattacaaatattttacaagatcaaggacacaattactatttttttagtttagggacctaaataaaaactcctaaatagttgagggaattaaattaaccttgaatgaagagaaagaggcag

SEQ ID NO: 2981 - DNA, 1990 bp, Glycine max
  Intron number 2 from transcript Glyma08g36610.1 (locus Gly ma08g36610) derived from phytozome v7.0 (chr-ID Gm08; pos 34772768 to 34774757)
tgactgtgtgggctcaattatatatagttcgtttctttttaattataatatttttttttattaatctatgtcggttataaaaaatagttaattatattgaatctatcaattatttgtactattattttaaaattattattttctatctctatatatttaattattttttattaatatttaaagagagaataattaaataaaaatatgtaaaaataataattaatacatctacaaatttttttaaaaaaaatcttataagaagacaaataaatttctaaaaaaagagaagtgaatagttaagaattagaacattggattgaagaccttgcaaatcgcaagaaaaccaccataacatagattatgaaaaatttgtttaaacttttaaaaaaagttattcgcaaaataaaataacttttataaaaagtgattttataagaagtagataagaattgtttcttagaaaaacttaaaaaaattagacaaacacaagtaaaaagtaaaaggaatcttattttattaaattctttttaagcttaaataaattgaccctatattatgataggactcttttaatcatattataagaattaaaaatattaataatttagttagtaattttaaatttgttaatactttttcttttgtcaaatctactgttaaatttgtttaaaatattaataattcttttgaggatttggttttcttaaataatttctatctaactaattaatgcatttgcacttagtggaattttgtatattctttaaaaaaaaaaaaaaagaggaattttgtataaggaaatgtgtatttgattaagtgttaaactcatggaaaaacatggaaaaaaaagagggctgcatccaaacgggcccttattctaagacataaaaactaaaacaatacgagaaagaagtttttttcaacgcgtttagtgaaactgatattcaaaacacacctaaaacaattaatgtatgatctatgatgtagacaatttaaaagaagttctgtaaaaaaaaaaaaatagtcatgtttattttgtagtaaactaaattgatgattctggtctctgtttcacgcgcgagaacagaatcctggtaagtaaatcatattgataacttctataaacataacaaacatttcctttgtccttttacaatttttattttcatacacctatttcaagttctctagaatctagaaagcatgcaactaaatatttttgaagttcgtacctattatcctttcatagctttgaagattttatattccctttaaacacaattttgtcactaagcaaattattgcacaagtaaccatcatttgagaaatcctgccttcttatcaaaagaaagatgagatacgagaaccaaaagtttaaagaactaataaaccgggattcctctaccacgtgttaatcatcctttcaatttctaggacccataacatgttattcatctaatcgttcctggttaattaagtttctaaacttatttaaaattcaatttttaatcgttaaacaaaaatttgacagatgaatgtttttttaacttttttgaaatttgacttttaatctctaataaatttgactaattaaggtccctcaattttttcataaagatttttaatctataaacttttataataatttgatttttaatttctaaaatcttattaattaaataaataaaaataacggcttcaaacttttgtttagagattaaaatttttttttttcttcaaaacttttgtttagagattaaaaattaaattttttttctaaaactttagagacctcgaatggtcaaacaaaaatttaggaaataaaaatcttaatagaaaaaggttaaagaaccttgatcagtcaatcttttgtttaggaattaaaaatcaaattttaaaaaaaaaattagagactaaaaacttagttaatcattttcttttattccttttgtcttaattcctttttattttttcttctgatgcagtcagg

SEQ ID NO: 2982 - DNA, 1402 bp, Glycine max
  Intron number 2 from transcript Glyma17g35800.1 (locus Gly ma17g35800) derived from phytozome v7.0 (chr-ID Gm17; pos 39804984 to 39806385)
gttacaagcctcctaaaaggcctttaacaaataaggttagttcaacaatactttttatctcgctgtttgtgtgtgtgtgggcatttatttatttatattttcaggtttttagttattttttgaatgtgatgtagagctggtgcatggattgtgtaaacttttatgtgaaaataaagttgacatttctttaattatcaattgtttttatttttttttcctgatacaatgacttttattttcctatttcatcaaatgtaagcagacttcacctttaatttgcatgcgatgttgttatgagtttattgcccagctgaatattggtttctatttggattttagaatttattctaactctttgatgtaaactagtgttggattggacattcagttattatggtttttagttgttctaggggcctgacatggggtaatctcttattattctttatgaggatttgaaacttgcaaggctgattaatctttggagttcctatagatgaaaaatatgctcttttgatatggactttagctatgcttatttgctgagcatatgcttttttttcctgatgcttacttggaactactctaatatttatgttctcttttcatttgccttcaaatcaatttgggatgatttcagtttgtgaagtttggaactaatcactggctctccgtggctgtataatagcagctctctttatgatgtatttggaattgctatttgggtgattgtttattctgttatatttttagaaacatatctccgaatggattcatagaagatcgtatgtgacgcaatctttatgtctatactgaaattctatcataggaggcttatgcttttgtaattggtatcatgttggtagctttgctggcaatattgagttgttctatgtatttctggaatgtagctaagatagtaatttttttaagatcttgaatacttgatatgaggattgagttaattattgtttttttaaagaataactaacttgtgtgctcaacttgtaagttgtaactcactgtcttctctctctctctctatctatctgtctatattagcaatttgttttttctgtctgtcagcagccactgcttaaaatatcaaattctatcaagatatgttttcaaaattcaaatttaccagtctctttctgtatttaatttattataactagaattttccatgtagattttttttccgattattgtgtagaatctctaaagttactgttatttttcaaaaggacataattaccgtattcttttaaaggaaaacttatgacttaaatctgtaagcataatgttccatgctaattcttgtacaatgcgatctgagattcatcatattattgtattttgtcaatttttaaattttatgcttaatatctgcaggaaattg

SEQ ID NO: 2983 - DNA, 1795 bp, Glycine max
  Intron number 1 from transcript Glyma12g02410.1 (locus Gly ma12g02410) derived from phytozome v7.0 (chr-ID Gm12; pos 1524151 to 1525945 reverse strand)
ctatcgtccattacaggtctatatttctctcccttcctaagtaacgcaactttttttcctcccttttgctccttagtatgttatacaactagctacttgagcaggcctatagattgcaataatcatattaatttgtttagttatttttattggatatatttacattctatcgagattatatcaaatattctgacaaattattactttatataacacattaattatttcaattttttttacaaccatatacgagagatagtaagataagagagggaagtcagaattaagagggtcatgatagaaacagatagagagaaaataatagcataaaatattataaaaaaacttatatattataaagataaatttctcatcaataaaaaacttttatcaattaggtaaaatacaaggaatatttcagctttaacataaggggtattcaaggttggtttaagttggatttaactaaatcttttattcaattcgttcaaaattatattggttgagttgaatttatgtgattttgttgttaaatttaaactgaatcaatctagtcacaaataaattgacttgggttgagtaagtcaggtctaagcttttatagttattttaagtgtcctaaagaataattttttttcttaccaatttttacatattctatagttaattattgtatatttaattaaaaataaatgcacattctaaagatattgaattttatcaacgttgcatacttgtactaaacaataaattaatatttgtaatttaaaatatatgtatatataaataataaattaaaaaaaaatgtcagcacaacatattgagttcacgagttcaaaaataaaaattattactcaatttggtatatgaacgagtttggacgaattgcattaaatttgacctaaacattcaaaatctaaatctatactcgtaattaaacaccggcccatacttttacatctgtagcttacaacaatttctttttataaatgatgatttatatgatgtcatttgtagttttttattaaggatttcatgatgtcgttttaagtatttcataatatatagacttgttatgtgtgtgtcaccacacaaacatacatttttttaaaaaaaaaaccttaaggactttgatgatgtggttttaagtattctttaacatgtatgtatccaaaaaaatattttcttataaacatgcaaacttattttttttagtgtaatttaaaatcttgtaatagtgtgtgtgaccatataaatcatagattgatggtgaaaattaaaagttagttagaagctatatgaccatttaaaaaaaacatgcacatttttttttacagcatgcacaattttttaatcactcaaatacaatgatctacctttataattttcattttttacaataattcttattcgattttctccacagtcacgcacagctataagttgccaaaactcttgtgtcatcaattaactttttaatcatgtctacaaaattgggtgtgtaatgagaaaatatttgattataatagtcaaaattaaatgttatcatttaaccatttaaaaaattgcatgtcttaaaaaaggttgtattgtaatctttgacctcacaatacgatcaatattaattatctattttactttcacgagagaagctccctcgatctgttaatatatgcgatacacataaccttatcatatattttattccttgaaatattaatgactttatcatctcagaatgacttaactattacttaaatatattatgcagttgcacaatccataggagtttgct

SEQ ID NO: 2984 - DNA, 992 bp, Glycine max
  Intron number 22 from transcript Glyma07g34330.1 (locus Gl yma07g34330) derived from phytozome v7.0 (chr-ID Gm07; pos 39230563 to 39231554)
gaaaggtcacatgatttatcttatgacttagatttgactgaaaatatatgtttccattaattagttgataaaatttataaggcagagatgaacttgttcttggtttccttttctcacaaacttggctgatctttgcactgtggggattcaaatcattttaaaaactgaattttataatggattgtgttcactagaacttgagaccggatttatattatgatcatgaattcttgaactgttaaccatgtattgatagctctgcttggtgtaagtattgtgaatgtcaaagaatcaactgaagattttgggacaatttatccaagtctattttgacatcattattttattatagaactgggttttaatgtaaaactttatcatagaaaacaacagttataaggagaaggaaaatggaagacaatggagagatgcaagattcagagggatgtccctaattactttggaatggttataaaagttagacctctatttagataaatgctatgactgaacaatggcctttattcccttcacttttggtgcctctatacaaaaaactaattactttggggtttgctatgcttagtagaaatactatattatattttttttgcataattataaaaaattgatatattcaccttgctctcactacttgatggtgagaatttgtggattttaatgtaaaaattcataaatgtgcttagtttataaatatgcatcccaaatggatctgcctaatatatatacaaggcgtaaattcttttaatagataagctcatgagcatgatagcagatagctcatttgcaactacaaaaataactttctggttagctatgttactgtgtgagttctttacttcttttttgccacactaaaatttgtttcatatacatattggaataatttatttatggttgcttttaacttgcattaaaaatttcatttttttttctggggtagattttaattgaggttgatcatctacaag

SEQ ID NO: 2985 - DNA, 1792 bp, Glycine max
  Intron number 8 from transcript Glyma10g44350.1 (locus Gly ma10g44350) derived from phytozome v7.0 (chr-ID Gm10; pos 50763525 to 50765316 reverse strand)
gattttttgggcttttcatcaattggttttgggtagctttgatgtttgggtggatgggaagaaaaatgagggtatctttaagctttttagtttaaaatttattatggagaaccaaggtagtcaacattggaattttaccccttaaatcggaatgggggtaaaaatctaaatcgaattgtaagatttaaaaaattcatatacatgtagtaatatgcatataaattcatatacatgtactaatatgcttataaattcatatacatgcattggtagttaaaaacttaacaactccaaaacacatgtacacaacaatctgtattcataaatcatattcataatccatattccataatgtcatgcatcatattcataagtcttaacccataaaatagtatagtagaaaacttaacagttccaaaacagaagtacacagcacatcaagttttgacaagttacaacttacaaggcataaaacttaaccaccagaagaacataatagagaacatagaataaatggtggccggcacagagaatagaacttcaaacagtgatgcttggtggtgcctggctcagacgttggaagaagagcagtggttagggataggggtcaggtttcaataacacagatgcttcatgaagaaaaagcagcttagggctcacagtcgcacaagatgaacaagctttgaactgtgttcattctgttgaatcaaattgggtgaaactaggtcaaaaacctttcaaatgggtcagttttgtgaaattggaaaattgcacaatttttttgcgatttaggacttgaacccttgtatccaaacaccatattgggcatcagacaaattcagttcgagccgggtaaaccactttgggcaacaaagcttttcctacttagttttaaatcaattgcattcctaggaactctaatatgagattactgattaagctagaatagttatatgccgactgatctacgtgctcagtagtgcaagaattgatgtttgattataattaaaattttaactaatggttaattagtataataacaaatttaatgctcttgtttatttctagtgattttgcgattatgattttttggggtgataaccataaagaagataagttaccaacttaaatagtatagagcatgtacaatataactgactttgcattgtgtgggtaaaatgatattgtgatggaaagctatgacagcataatacaaggaaccagtcttgtgtttcaagattttattgaattattatacaattgaccttataggatgatatattgacaattatcgtgccactgaccattcaattattgcaacagaaaggtggctttagtcacatcattgttctacccaaagctaaaaaaagtacaaatagacaatagtgctgtaatttggcctttacatgcgtctctgatgcaaaatgacaaccattctggtgtggtctttttaagcagtaataattaataaatttcacttgacgatgtagatccttttctttttctaaatttaagcattctggagttataaggttgacttggtggttgaaagaaggagggagggagaggtcatgggttcaaattactcccactaaaaaaaaaactaataaatctaacaattaacatttgttgttaaataaaaatgccttttcatttatcatgaaaacacagggattaatgtaatgttgttggcttgttgctgtgtgacactcctttttcattttactaatttagtcctttatacaatgttctgtcagaggtagcagtgctaaagccgaagaccattcactgg

SEQ ID NO: 2986 - DNA, 6866 bp, Glycine max
  Intron number 9 from transcript Glyma10g10480.1 (locus Gly ma10g10480) derived from phytozome v7.0 (chr-ID Gm10; pos 10244495 to 10251360 reverse strand)
aggagtaaaagagaaacttaacagaaagtaaaagcggaaattaaatgcacagcgaaaagtaaaagagtagggaagaaggaaacaaacacacaagagtttttatactggttcggcaacaacccgtgcctacatccagtccccaagcgacctgcggtccttgagatttctttcaaccttgtaaaaatccttttacaagcaaagatccacaagggatgtaccctcccttgttctctttgaacctagtggatgtaccctccactagaactgatccacaagagatgtaccctctcttgttctcagtcaaacccaagtagatgtaccctctacttataccacaaaggatgtacgctccaatgtgttaagacaaagatctcagactgttaaacctttgatactttgtgaatggggatacaaaagaattctcagacggttagtcctttgaacacttttgtataagggaacgggaagaatcaaaataattctcagactgtgtcgttttgaattctttgacaagggagaagggagacacaaaagaattcaggcggttagtcctttgttctttttggaaaagggagaaaagagacacaaaaagaattcaggcggttagtccttggcgaattctttttggcaaagggagaagagaatgaaaagatgaatagcacaagttttcaaggttcagaaaaccagaaaactttggaaagcttttggtacaaagaagaagaagaagttcaaagagattcaaggcttgtaaaggattgattggaaaagtaaagtatgttgaaaaaaaaatcaaagccttgcttttatagactcttcatgtctggccaagaagaccattaagaagagttataacttttagaaaaacttaaaaccaatttgaaaaagtcaaaaaccttttgaagagttacatcttttgatttattcagaaacaaacactggtaatcgattaccaaattagtgtaattgattacacaaagcttttgtgtgaaaggatgtgactcttcacatttgaatttgaatttcaacgttcaaaggcactgataatcgatttccaaaacattgtaatcgattacagctttttgaaaagaattggaacgttgtaaattcaatttgaaaacttttccaaaataatttttgctactggtaatcgattacaacaatctggtaatcgattaccagagagtaaaaactctttggtaaaaggttttgtcaaaaaatcatgtgctattcaaagttttgaaaaactttttaatacttatcttgattgagtcttctcttcattcttgaatcttgagtcttgaatcttgatcttgattcttgagatttttgaacctagaatcttgattcttgtctctagactttcttcttgagtcttgaactcttcttgattcttatcttgaactcttgaattgttcttgattgatctttgagctttttgtcgacacctttgtcatcatcttttgttatcatcattgttatcatcaaaacacctttgaatcatctttgattcaccatgaagctttgcttctacaatctccccctttttgatgatgacaacttctgaaatcaagaaacacacacacactttttcctagttgatcactctcataaattctccccctttgtttttgaatttatgcttatcttaaaattacattgattactcatgtgagttcttgatttaatctcatttctctccccctttggcatcaacaaaaagccaaagtgcgtaacaaatttgaaataactaaacatccatacaacattcattgagaaactaacaaccaatccatgaagcaagaatcatgaagcaacaatcataaatagattaactataaaacccatatagtcaaacaacaaacttactcaaccataccatgcaaataaggaaatagtaaattgttcaaataccatagtaatatagagatttattttgataaaacacttacatctattagtcctaattctcttctaatgttatagaaggtatctttacttagtggttttgtaaagatgtctgcaagttgatttttagtatctacaaactctaaaacaacatcaccttttagaacatgatctctaataaaatgatgcctaatttctatatgcttggttctagagtgaagaactggatttttagatatgtttatggcacttgtgttgtcacatttaatgggaatgtgatctaatactattccatagtcagatagttgttgcttcatccacaaaatctgttcacaacaactaccagcagaaatgtattctgcttctgttgtggataatgctacactattttgtttcttgctattctaagaaacaagtgcagaccctatgaattgacatgtatcactagttcttttcctatctgtttttgatctagcaaaatatgaatctgagtatcctactaggttgcataaaaaattcttagggtaccataatcctaaactaattgttcctaatagatatcttatgattctttttactgccatttaatgtgaaaactttggatctgattgaaatcttgcacacatgcatacactaaacataatatctagcctacttccagataagtaaagtagagatccaatcatacctctgtattgctttggatcaactggttgaccagattcatctttgtcaagataacaacttgtattcataggagtagccaagtgttttgagttttccattccaaatctcttaatgagttctttgcaatactttgcttgattgacaaagatcccatcatttgtttgtttgatttgtagtccaagaaagtaatttaactcacccatcatggacatttcaaactcactttgaatatcaatagaaaactccttgcacaaagattcattagtagatccaaaaattatatcatcaacataaatttgtactaacaatatatcattatccttcttttttatgaataaggtggtatctaccttccctctattaaaattcttttctaataggaatttacttaatctttcataccaagccctaggtgcttgttttaagccataaagtgccttctttaatctatagacatggtctagtttttgtgagtcttcaaacccaggaggttgttccacgtatacctcctcctgaattagaccatttaagaaagcactcttgacatccatttgatataatttaaaattcataacggatgcatatgctaataacatcctaatggcttctaatctagctacaggtgcaaaagtttcttcatagtctataccttcttcttggttatatccttttgctacaagtctagctttatttctaattactataccattttcatccaatttatttctaaatacccacttagttcgtatgattggataatctgaaggtttttctactaattcccatacatcatttctttcaaattgatttaattcttcttgcatggctactatccaatgatcatctataatagcttctttaaagtttttaggttctattaatgaaacaaatgccatattattgcataaatctttaagagagtgtatagttgttaccccttttgagatatcaccaatgatgttgtcaagaggatgatttcttgaagttttccattctttaggaagattatcattttcttgtgctgtgtcatcttgatcatccttgtcttcatcatctctctttcttttcagatttctttcttcattttgagtatcttccaaagtatctacaatatcatcaacaaactcctttcttggagaagaaatattagtttcatcaaaagtaacatgtatagattcctcaattgtcatggttcttttgttgtatattctaaatgctttactatgtaaggaatacccaaggaagataccctcatctgccttggcatcaaactttcctagactttctttaccattatttagaacaaaacatttacatccaaaaacatgtaaatgtgcaatgtttggttttctattgttgaaaagttcatatggggttttcttaagaataggtctaattaaggctctgttcataatataacatgcggtgttaactgcttctgcccaaaagtattttggaagaggtgtgtcatttaaaagagttctagcaatttcttctagcgctctattttttctttctactactccattttgttggggtatccttggtgcagaaaagttgtgttctatgccatactcatcacaaaacatttcaaaatcattgttttcaaattcacctccatgatcacttttgatggagataattttgagattatttttgttttgaatgactttggcaagtcttctaaatgcatgaaatgcatcattcttatgactaagaaataaagttcaagtatatctagaataatcatcaacaattactaatgcatagtaacttccaccaaaactcatgaccctagatggtccaaacaaatccatgtgtaataattgcaatggttgagtggtggaaacaatatttctagatttaaaggatacttttgtttgtttacctttttggcatgcatcacataacttatcttttttgaattttaatctaggcaatccaataactagatcttttgaaattaatctatttatatgatccatgttaatatgagcaattctcttatgccataaccatggatcacaatctttacttaaaaaacatctatcatttacagatttttgttttagatcaatcatgtaaacattattttctctaaaacctatatgttctatatctttgtcatgctcatgcttaataacacatttttcagaatcaaaagatactttatatcctttatcacataattgactaacacttaataaactatgcttcaaaccttctacaagtaacacattttcaataggagtagaagaactcgtacctattttaccgactccaataattttacccttgttgttgtctccgtatgtaacatgtccacttttcttgggggaaatagttgtgaatttggatacgtcacccgtcatgtgcttggaacatccactgtctatgtaccatttcttccttacagaatcttctttgttattctcatcagattttgtcatgagacacaagttgacttggtcttcatcatgatctttgagtaacatgttcctgaaaatttttttgaaagacaaagaatctaaagtggccattaatcttgaagttgttagactttctacaagaaaccagctctgataccacttgttggatcgagtggcctcagaataattaagaaggggggggggttgaattaattattcctaaacctttactaattaaaaattactcttctaaggcttttactaaattgttaagagaatgaggagtagaagagaaacttaacagaaagtaaaagcgaaaattaaatgcacagcggaaagtaaaaaagtagggaagaaggaaacaaacacacaagagtttttatactggttcggcaacaacccgtgcctacatccagtccccaagcgacttgcggtccttgagatttctttcaaccttgtaaaaatccttttacaagcaaagatccacaagagatgtaccctcccttgttctctttgaacctagtggatgtaccctccactagaactgatccacaagagatgtaccctctcttgttctcagtcaaatccaagtagatgtactctctacttgtaccacaaaggatgtaccctccaatgtgttaagacaaagatctcaggctgttaaacctttgatactttgtgaatggggatacaaaagaattctcaggcggttagtgctttgaacacttttgtataagggaatgggaagaatcaaaagaattctcagactgtgtcgttttgaattctttgacaagggagaagggagacacaaaagaattcaggtggttagtcctttgttcttttggaaaagggagaagagagacacaaaaagaattcaggcggttagtccttggcgaattctttttggcaaagggagaagagaatgaaaagatgaatagcacaagttttcaaggtttagaaaaccagaaaactttggaaagcttttggtacaaagaagaagaagaagttcaaagagattcaaggcttgtaaaggattgattggaaaagtaaagtatgttgaaaaacaaatcaaagcctttcttttatagactcttcatgtctggccaagaagaccattaagaagagttataacttttagaaaaacttaaaaccaatttgaaaaagtcaaaaaccttttgaagagttacatcttttgatttattcagaaacaaacactggtaatcgattaccaaattaatgtaatcgattacacaaagcttttgtgtgaaaggatgtgactctttacatttgaatttgaatttcaacgttcaaaggcactgataattgattgtcaaaacattgtaatcgattatagctttttgaaaagaattggaacgttgtaaattcaatttgaaaactttttcaaaataatttttgctactggtaatcgattacaacaatctggtaatcgattaccagagagtaaaaactctttggtaaaaggttttgtcaaaaactcatgcgctattcaaagttttgaaaaactttttaatacttatcttgattgagtcttctcttcattcttgaatcttgagtcttgaatcttgatcttgattcttgagatttttgaaccttgaatcttgattcttgtctctagactttcttcttgagtcttaaactcttcttgattcttatcttgaactcttgaattgttcttgattgatctttgagcgttttgtcatcacctttgtcatcatcttttgttatcatcattgttatcatcaaaacacctttgaatcatctttgattcaccatgaagctttgcttctacaacaaagaattaattgaaacttaccttggttgttt

SEQ ID NO: 2987 - DNA, 2896 bp, Glycine max
  Intron number 3 from transcript Glyma05g31760.4 (locus Gly ma05g31760) derived from phytozome v7.0 (chr-ID Gm05; pos 36829630 to 36832525)
agggagaaggcgagttctttgaggcagagaaagaggtgggattatcaatttttggattttgttgatgttctccctgttattcttacttgcttctgcatgctgatctctgcattcttttttctgatgatgcaggaaaagagtgtgttgccccagcagaagaaagatgaccagaaaactgtggacgctgcagtgttaaaagccattgagagtgtgccagacttgaagtcctatttgggtgccaggttttctctgaaggccggggtgaaaccacatgagctagtcttctagaggaaagaggggtgttactcttgtttttgatatcgtgtttgtttattgatgctggttcttatagttgccctcttataacattcttgttagcagacaaatgaagaacctaaaattttgttagtcaaattgtgacgcgtgctctttacattttgttgattgtgtgaattttagatattgtgtggacctttagcatgccaaatgaaaaaaaaattggaaacagatatacatgtggcaaggctggtgaatggtacttgtaaagaaccgtggtagtagtaaaatgggtatgaacaattatcatgcaaaattttctgaacttatcaaatttgcctcacggatttttttcagttcacgtctttcataatctgaagggtcaattttgttagtgtttttagaaaatgaatactacgtattattgtattagtgtaaacatttgacttgtgtatgctatttttaacagaatatcttagtttgcaccttgagtgctttcgtaatatttatgtgaaatgacatttataatctaattaatagcaaaaggttttgcatattacataatgatgttccactcaatagaacgaatgacgatttacaaatttagagaatattttttgtttcattaattttacgtactaaagtgactcctttgccaaattcaagaccctagtttgaggtttacatggaaattttttcataatacattcataaaattttaagataataaaaaaatcgacaatgactaggatgagccttcccgagtatttttttttttttttttgcccttggctcctttttagaattttctattgacttgcagttaagtagttatgcttttggaaaactttaatattcatgtttagactaaatttgaaaaaataatcctttattttttaaaggctgataaacgtgaagtattatttcttcattgataaattgaatatgcatttaatatatactaaaaaagtagaaataaaaatgaaaactttttctttttgaatttgaatgaaatgaaatttacacttaaaagataaaagtatgatatgtgtgtgagacagaaaaaaaatcatgttttttcatttaaaccataggtaaaagattcgatcttgtttgaatcggaaatcatgcacaataggactaactctctcatctataaaaaaatcaaaactatgaccctacttatagaaaatcaaatcatttaaatagtttgatggcacgtgtcaatttaaacaaattaaattttaattagtaaaatgaagattggcatattaaaaaattaatggacacgtattagactgggcttggaaccacagacgtaagccaacatttcgtgggtctggagcatggatccttcgagtcgggtcaaggcccgttagatagggtttatacagagcatgtgtatgtctgattttcctttgcgcattgaacgaaaattagggtttgtagtgtagcaggaagaagcagcaatggcgccgaagataacacgtaaggttagcagaaaccctgaattgataaggggaatcggaaagtactcgaggtcgcagatgtaccacaagaggggcatttgggctatcaaggccaaaaacggtggcgttttacctcgccacgaccctaaacccaagcctgaagctcctgctgaaaaaccacccaaattttaccctgctgatgatatcaagaagccccttgtcaacaagcacaaaccgaaaccagctaagctcaggtgcattttcacttcaatcccatcctcactttaatttgtttttatttttgtgttttaatttattttgacttattttatgatgatgctagtgaattgatttgggatctggtgagtgaaatgtatgttattgctaattgataaaatgaatttgaattttttttaataaaatttctttggattaatggcatttttttattatttatatgtggagcctatgtcgtttgattttgtgtctggtgtgtgttcagggctagcattactcccgggacagtgttgattcttcttgccggtagatttaagggaaagagggtagtctttttgaagcagcttccttctgggttgcttcttgtgactggtgagttttgtcattaattatgttactttagcatgttgttaatttgttatgctttgactgttgttatcatcaattgaatttatatgttagtcattgttgaagtcgttgtttgacattgattttttgatacatattgatctcaaattttaatagcactagactctgcttttctgaaatgtactctctgctccacccatttctggtctggcttatgtttctcacttgcaacgtcaggtcctttcaagattaatggagttcctttgagacgtgtcaatcagtcgtatgttattggcacatcaaccaaagtagatgtgtctgctgttaatgttgaccagtttgatgacaaatactttgcaaaggaagcccagaagaagaagaagaagggagagggcgagttctttgaggcagaaaaggaggtgggattgtctattttcttattttgttgaagttcttgttattcttagttgcttctgcgtgctgatctgtctttttcttcttctttataatgcaggaaaagagtgtgttgccccagcagaagaaag

SEQ ID NO: 2988 - DNA, 815 bp, Glycine max
  Intron number 1 from transcript Glyma07g18180.1 (locus Gly ma07g18180) derived from phytozome v7.0 (chr-ID Gm07; pos 17954187 to 17955001 reverse strand)
gcaaacatctcatcacaatccaaaagttcgtagaggtatatttatttttttataatatattgtaattatctaattgcctttaaatgtacttattagtgtcattaatcctctacataactatagaacaaattctgtatgttttaaaccgataaaatcttcaaaaatattattcttgataagctgagttgaacaaaatttttcagcttaatagagattagcttattaagctattaaccttaaaagttagaggcctgtttatactagtgcacttgctactaacatgtgatcatgtggagggaatgtgactgattgaattacgtagataattctagctatttattacaattgtaatgtattttgtgttcatataattaatggaacttttttatgaattcaaataacaatgaaccttggtttggagctgaaacaccaagccaaaaccttggttttggtttagttttaaatttttgaggaatgatagctcaagttggttcgagtttaagcttgaagcctaaaaatcagtaccatggatgctgtgtcaatattagtcattatttccaaatctgtcaaaaataaaattaagcagccattaattatattatttggatcttatgaaagttaatctaatggcatgtcttgattgatttaatgtcttggcttggtttctattcctaatatactcttagtctttttgaattgtaatgtcacagattaatgtcattgcgttatttaatccagttaagcattcaaattttcatttaaatttgataatcctcatatttaatactctttcttttccaccctttaaattacag

SEQ ID NO: 2989 - DNA, 2731 bp, Glycine max
  Intron number 2 from transcript Glyma13g39080.1 (locus Gly ma13g39080) derived from phytozome v7.0 (chr-ID Gm13; pos 39808731 to 39811461 reverse strand)
agatttctaaggctgaagaaaccgttaaggagaaggtcttgtgtttatgcttaaattcaattcaattaaatctctctgttgatataatcagtggcttgagttgcttgatgtagcatctgtttctgtgttgtgttgttatttgggtcatttgtctgcagttttgattcatgatgcttttttatcctgcaccttgcattaggttacattttgattataaacgagtaaagaaaatttcccagaataccgagagaggtgttgatgaagattataacaaagatggtttcagtttatatgcttgctgtcacgggtattatatatttgtttagttgagtacttgagtgtgtatgtgcttgcttatatcagttatatgttagctttgaccgtttcatttcattatgctgtacatgatttttacggtctcagtaggccagcttacagtgcacaaccatgttccttggtggcatgaaggacagtgtggtgttcacttttcgagaattgctttatgtactcttgttgactaactccccccctctggctccttaaagaattaagaataaaaccctgaaaacttagttgagatagtatgtgtgtctagattttataaatttcttgaaatcaagataagtgatctgggtttggtagcatgtagggaacctttaattaaaataacatatgtaaaatgcttcttttcacttttattattaataataacaatgagggagtgctatccagttatagggagctggaagctaagaacagattatatgtatgaagacaaatgcagaaaggaagtagtatagagaaagagagggataacagaatactttccatgagcaccctctcacttccatccatttacttggcacctcttgcttcactcaaaatccctgtggttggtgttagctgctttcctttgtgatgttcttttcaattcctgaaatcttggacctacagccagcagtctttccttgctaactaactatgattccacatgtgtcttgatttctgtcatcttttgcatatggctaaatttttgtataagttttatttggattcatcaggagtgcttaggttctgttccatataattcttttgaagtaaaacaagtcatcgttgtgtgacagaaagttttttgcttagttttatcctgtatgccctttctgtgatttgttcccaacttccaaggttatcattctgtcttaaagatttgcatgtttttactttatacaattatcactggaaataattaattctaattagttgaacagacaatcttttgatcacatagctttggcatctcattgtctcagacaatctacattcagatcatttatcatttgagggaatattggctttatagagctatatgccaattaaaaagttgtctcactgtgggaacagtgatacatgtatgaacttggttttgaatgcctaattttaaaaaactaatgcaattgtagaagttttttagttagtggtgaatggagcatcacattcattgggacattgcaacccatccattgaatgctctaatgttgatcaattgttatgtgaaaggattattataaagtaagcttgggaactgtaattaatttctactaagtactaaagacatttaatgtgacacaagaaatgagatagtttggttgtggcttatctacgttgtgcataactagtgttatatttacataccccgtctacaatttttccccatttatcatgttataattgctctataatagagattaagaagtgatgagtattatttactgagaaaaatggagctaagctccctacagcagagaaatcaactagaaaccacaagaaaaaaaatccaaaaacagtatatgtaggtgcttattctgacacatgccctggaaaaaactgttcttcacacagaagacacttcccccaatgctcaactttgatcttgcacccattgagcgagcttcatcgacgtccctaggtctcctgaactatgaagtcagacttccactcagtttgtcatccagacagcccagacatgaataagcacctctttgtcagcttatcgaagtggattgatgagctcaaactgctcctgtactcattcacggattttgtttgcttcaaactcattaatacttcatgagtactgaaattgataaacagtgatctcttgaaagtgatccatgagatgcactcagttcttgtcccccccattaaaaccagtttagcatcatcccctccaaacaaaccgcaactgctgccaccttctcatcatctggaatttgattaatctcaatacccctcagcctggtatatccaataaaagaacaaatgtccgcaactgtcactcagtggttcactccaccttgctcaaccttgcaataaaatattctccttccttgtcctatctcctcagtcttatatcctgaatgccacctgttccattcagttatgatttctccctctatctatctggtaactacattcccatttttcccatttctgttatcctcatcatttgccacattcctctcatctcccacagaacaaatattaccattgggcatttggttttgaattccctctatgcttataaatgaattatgtgcctatcccagaagtttaacagaattgtccaataggaccatatgctattttagtcagttatttactgatgtttttcgtgaaatggatgttccttgctgcagattattttagtgcaagagaagaatattcgaaggct

SEQ ID NO: 2990 - DNA, 6469 bp, Glycine max
  Intron number 4 from transcript Glyma11g16220.1 (locus Gly ma11g16220) derived from phytozome v7.0 (chr-ID Gm11; pos 11952944 to 11959412)
tagattttcaatttcttggtctcggattttccccggtatgttttattactaatgaattttaaatctgttttctatatagttagttgttttataaatgaatttccatgtccatgagtcatgaatcctgaaagtttgtctgtttctctgtatcatcattacccagtcagtagctaatatagttaactttttgttccaaatatccacaagtgttgactaaaggattacttacagcttgagagggagggactggctgggaaggagcatgttatatgcccttgcgtaagactgagtcacaggtctagaaaaaaaagactccttgcgatctataatgaaagcaaagagcagacttttccttgattgaaccactcctaaactaacaccgaaaattttcttaggaaaaggaaataatttttgatgattcttattctagtaatagtgccttttaaaggctgtatatcaattaaagatcgtaactggtaggatctcaactaggtccccaaaaataactatgaactaaagtgaatggactatattttcttataatttatatgattgaggagaataagaggaatgccgatgctttactagttgacaaacttcacacgaaaacatatttggattttatttttaaaaatatcaggaaataaatgtttcaagtaccccttaacttaaatgaccaagcctacaatgccataccattatttttttcgttttcatgaacaaaactgaattgagacaattaccctgagttttatccttaaaaataacgtcatcctcaaagagatagatattagactaagaaagttacagatgaaaaactttgtattctcctgtgcagaattttgcattaaatagtgctcatacaatttgatttttacatctgtgcattaaataaccaatctgcaataaatgctatcctacagctgggataactaattaaggagataattacagctgtataatcatgtaaggtttattgttttgaatgaccaacaaatctgtgtcaataataacaaatattttgcaatttgtgccaattaataactaatatctgctaatcaatttcattgacatcccccctcaaattaatgctggtaagtctaaaagcattaatttgctgactaggaaattatggcattgacgtgtcaaggattttgtgagaatctcagcgagttgaacagatgtagaaacatgaggcaaggtgataactcgatggtcatacgcgtctcggattgagtgacaatcaacctctatgtgcttcgttctttcatggtaaacaagatttgtggcaatttgaatggcacttgtattgttagcatgcagtggagttcgttttgcttgtgaaaaatcaagctttgaaaggagaccatgtagccaaataatctcagagcatgcaacagacatggcgtgatattttacttcagtgggtgctataatacggtgtactggtgaaagatacaaatgccgaggaaattgtatgaatctgcttatcgtgtggacaactaatgagatatgttgtctggtgatggttaagtaaataagacttccaactagcttacaatagaaagttgggtcttgtagaaggtcaccttcatctcgtcacaatttcagattaatttccattggagtgtcaacaagagcagaattagtgagaccaactaatcgaattagatcttgaatatatttgtgctgattgacaaaaatgcctttctgttgaaagtgtacttctaatctcaagaaataagtgagttagccaaggtctttcatgtggaaagttgaatgcaaaagtctcttgatcgtacaaatagcctcttgatctaatccggtgaccacaatattgtccatataaaccagaagtatgacaattccttttaagctcctttgaatgaaaatgacggatcatacctgctttgtatgaaggaaaaaccaagcagtgttgtgtgaaacttttcaaaccatatacttggtgcttgtttcaatccatataaagaacacttcagtttgttaacagcattaggcaaaggtgaaggcataccggtagaaagtttgatgtaaattttctctttgaggtcactatggaggaatgcgtttttaacatccatttggtgtatttgccaagattcagatgcagtaatggcaagaatagtgcgcatagtagtcattttgaccacaggtgcaaaggtctcctcataattaaggccaaattcttgatcatttccaagaacaaccagcctgaccttctatcggttgattgatccattcaaatgaacctttatattgaatacaaatttgatgccaaggggtttgacagaagaaggacaagttacaacatcccatgtctgattttcttctagtgcttgtagttttgtttcaatagcttctctctagcatttctgctccgtggcctgtctataagaaggaataggaacaaatgctatagttgctgtcaatgataaaggggaagaaaaatcatacatttctggtggtttactaacgcgagtattgcgatgtaaaggagttggtgctggatgaagcatcggatcagcagctagagattgatcgggagggggccttggaggtatggatggtggatttggtggaacagcctgacgtctttgatacaccaataaaggttgcggtgctgattttcctacagaattgttaggaaacaatagcaaaacagaagtggatgtagaagagggagtgtcttggttagttggaaaaaaatgtatcttcttgaaagatgacatttctacttttctagaaactcgaagcctatgtagattaggattataacacacaagtcctttatggtgggcaaaataaccaagaaaaactcatttaacaaattgagctatgagcttggtgtgttcttgtgggggaaggtggacataacaagtataaccaaaagtgcgtaggttggaataaatgggtttgtgaccatataacttgaagaaaggagaatcattgtttaatgattaagcagacataataaggcggacagcagtggagagagtctcacaccaaaatcgaggtggcacaaaagattccaacaaaagggtacatggacatcatcaataagatgacgatttttccttttagctaccccattctattggggtgtggaaggacatgacctttgaggtaaaatgccatttgtctgcaagaaataaatgatatgtatattccccccccccggttgtcggaatgcaaaattttaatcttgaaagaaaattgggtccgaacataggcatgaaattttttgaaaacagagaatgcttcatctttggagcgcaaaaaatagacccaagtgaaacgactatagtcatcaattaaagtgataaagtatttgtaattatcatgggatataaccattgcaatcccttatagatcactatgagtcatatcaaaaggctgatttatcttttgatttatgaattggaaatggtagaattttacttttcccaagtttgcaagagttgcaatcaaattgaacaacactaagagatgggaaaatttgattaccaagaacaccagatttcagtaagtcatgaagtacataggagtttgggtgaccaaggcgcttatgccatatttgaaaattaacaatagttaaattacaagaatccaaagggggaaaagaacattgaggctgagataaataaagaggaaaaagacgttcgactttaggccccttcgtgatcatcttccctgatcgttggccctacacaagacaaccagattttgagaatgtaaatttgcaatcattgtcaactagttgaccaacaaaaataagattactagtgagatcaagggaaacaaaacaattggttaaagaggaggaaatgtcaccaatagctgtgattggtagactgtttccatcagtagtatgaatttgaaggttactagaatatcttgtgacatttttaagggattcagcactgttggtcatgtgattggatgcaccggagtcaaaataccacgaagtacaagaagaaaaaggttttcctgaaagtcctaaagtagaaaatgcagaaattatcatttgttggaccatttcaggggtcattggttgcgtagaggcaaagcatgttgatttgcagaaccaccagcagtagaaggaccagctgcaacagtaaaggctgtttcagttttccttggtggtcttatggggcattctttaatgatatggctgtcttttttgcagtaattgcaaaactttttaggacagtgtgaagcaaaatgtccaagttctttgcaacagaaggtttggacatcactcaggtctcaacgtttaggttttccttgtgcagcatatgcaactggaaaaaagcgagatttttgttgttccatggatgcttgagttaggagacgttgttcttcatgaagaagctcattgagacatgtatccaaggatgggataggagctctattcatgagattggaccgaataccctcaaagtcaaatatcaatttcataagaaattgatctctttttgtagtctcatgaactttttgcactgcaatttgactttcatttgacaaatgttcatagacaatgtcagtgtattcaacctaacgattcatgaactgagaataaaattcagaaattgagagactatcttgttgaaatatggcaatttcatgttccagctggaaccttctagcaatattattctggctataaatcttcttgagataagcccacatcttgccattggtcggagattgagaacaatatgaggatcaacagagcctatgatccatgccatgacatgggcgtccttgacttcccacacagtatattcgttcagctggttttctttgttaggagcagaattggtgccgtcaacatgacctccaaggttcttacctttgacaaatatctgaaactggaatgcccagatagaatggttctttccattaaaggcaaatgaataagacatcatacttgtcactagacatatggctaagggaaaaaaaaaggtaatcacaagggagaaatcacaaaaggaacaaggagcaagaactggatagtcttgcaaaaccaagaggctaggaattttgaacggaactatgataggattgcaacctagactaatatcatattaggccaagaaagttatgaaaaactgtgtcttctcctgtggagaattttgcattaaatagtgctcatacaatttgatttctacatgtgtgcattaaatagccaatttgcaataaatgctatcctacagctgggataactaattaaggagataattacagctgtataatcatgtaatatctgttgttttgaatgaccaacaaatctgtgtcaataataacaaatattctgcaatttgtgccaattaataactaatattctgctaatcaattccattgacaatagagtccatcaacctctttagctgccaatcatcctccccaagctcaactcctgaaatttgccagtagaggaatcaaaaatagcaaaacagtgtagatcatgtgtcaatttactaatggaaaaaatgttacatgacaaatttgggacatgaaggacattgcaaagagttagagatttagatttaggaatggaaccaacatcagctatagtggaaaaggtaccatcagcaactctaatcttttcatgacctgcacagggactataagtggagaacaattatgaacaatttgtcctgggggctatactgtgaagtaataagtcatgacatcttggtctccttgtccggactgccaaagtcgagtcttgagataaaaaatctgagatgagttctctaagtcagaatagcaattgcggactgcttctcttacatctttagctgttgggagaaataaatatgggttcccaattgttggctccattgaatttatcagctaagcgatggtgagagttttctgatttccatttttgtagagaatggtcgttctttcctggttgaggagtgtctccagttaagttgtctagtttaccttttctgtcgagggctagcttcatagattgagcccactcaatctagtttcttccattcagcttttggattataagctgtaaactgaacctgaggacagagcatcgaccacagatgatagtggtgcaacttcggtgcctctagaatgcacaaaagacatgctggctgaacacagggtcaaagttgaagctttgataccatgtaattttaggagaagaaaatgatatttcttattgttaaagaaatttctctcttttgttaaataaaaccaactctttctgagcctgttatatcatacttatagtaatatattttacttgttttgcagtgcatataaatgatagagattctttggatttatcattttattgtattgcacataaatacctttctgaaaatgatatttgacctgttttttctagtgcatataatataaatgatagggattctttggatttatcattttattgtattgtgatggtttttgggtatag

SEQ ID NO: 2991 - DNA, 3339 bp, Glycine max
  Intron number 2 from transcript Glyma14g08960.2 (locus Gly ma14g08960) derived from phytozome v7.0 (chr-ID Gm14; pos 6965735 to 6969073)
tatttgtatcctcttttaacacaattctccaacaggtagaccacaactcttcatcctaatttataactctaagtgaatttcctaatcccaatttgtttggtaatttgatcttattctaatgcatttgtatctatgtttttgttttttttcaaatactctgtaaagttccactatgagaatgtcaagctttattcttgaatattttatatcgttttcattagaaaatctccatgttttttttttgtttttgtttttatgtatatgtttttctcttttctgatgagttatgcactattctgaagtttgttctgattcttctttaatttatatgtgacacatactatattctatgtgatttataccaagttgagtttcttggaataaattatggatatcagcaactcagatttgatggccaaattaaagtagtaaggatggcttttgatggtggcagttcttatacatatttcccgaaagagatacttggattttttgtttttgaaagtctttacatttatctatctctataaatgcaaaaacctacaaaagtaaaaagattcaagtatgccaccatacgagacataaaaaaaaaaaattggtaatttgatctgattcaatttggtatgtataagacttaggataagattaaattaccaaatttttttccgggtctggtattcaacaccgcaaattcaatattatatatctattggtgatttggtgtaacctaatgaagtttttggcttaggacattttcaagatcttcagacactaatactattttacccatatttgttacatctcttggttttcacgtaacaactttaaaaacaagaacggaggtagtgaacttcatatttgatactttatgtttattttttttaggctaattaaatgttactttttgtcttttatattaatagaaaagtgtgatatatctgttaatgtcagttaggatgataacataacatgttaattgaaatgacaatgttttaaataattttattttgatcttttatatttttaaatgattttattttgatacttttaagttttttaaaaaaaatccattttggtcctatcagttactaacgaatataattgagaacattttaccaaaattgtcacaaagattttgtcttagacacatacaataacttaaggaaacactttcctaaacaaatgttgtggaggttttgatcacaaaggatttagtcataataattacatataatgctagagtctaatgaatctaattgaagtcattctagcaaaattgtcacaaaggttttgtcattctaccaaaactatcacaaaggttgatgttgtaatgtaataattgttttcatttttcagcatcattaattaacttacttatgtgtgggtatgcagatgactaatgtgtctaacttcaaattgatctttacatgcacataagtcaattagtaatgctaaaaaattgtaaacaataaatatattatagcatccaacccatctaaatagaaacaattttggtagaatgtcttcagctatattcactagactatgacatcatatatacttcctttgaactcatatataagtaaaaataactaatttcacaataattaagaaaattaattgatattatttaattttactaatctcaagttaaaaataagattatttataaaatgttcttcattgaaacttgttatcaagaataaaagaatcattaaaaataaaattagaattaaattaaaaatattttaaaaataataacattaaataggataaaattagtttgctcatatttaagttcaacatataatattatttttttttcttatatatgagtctaaaaaaggaaattgttatgatcaaaatgtatcatttcacaaatttgatcaaccagaataaaaccatcttaagaacttaaaactgaaatagaaacatttaaaaatacaaaaaagtaaaataaaactatttaaaatgatattatttcaattaacatgacacaccattattccaatcaactttaataaacacatccaaacttttatgttaacatgtttaatctttcaagaaaaaaaaattatataattattccttcacggttcattatatataataaattaattagcatttaaaataattatcataaattcattgtattgatgagccagacactatcatttcattttaaacatttaactcaaatataaaatactaacataatatacaggagcaaaagtaacgtttttggtaggtcgcgagcgagcatcttcgagttgcatttcgcagtgtgtgtgagaagaagagaaaaatggagaaaatgatgcgactgagaccactgttccgatcactgagttgcagatcttatcatgccttcccattcatcaaccatgtcgttcttcgaccttctcttatctctcgctctcccaatcctcttccttctccttcacactcaggtactctttttctgttctattaggttttgctttctgatcacttttatcactgatccggcgtcgttcgcgatttcccctgcaacactcgatccaattaatctgatttcatcacgtctctgattgattgaatcaatattcaatgtacttgaatctgacgattttaagaacaagaagctagtcttcatttctgtttattttttgctaaaataacgtttcttcgttattgttttcgtaacttcgattggtatctaactccacagctgaatcaatctattgctattgcttttgtattctggtttcaaaattggtgttgtgcggacgataattttcgtgttgttgttagcgtcacggttctctttaataatgaaactcgttgttcacaccacaatttcaaaaccttgaaagaaaaataaaaaatactagtatgttgtatgtggttcattctggacttgcttcgtagtttactttagccttgtttggataaatttctcaacaaacacttacaggaaaagaaaataagaaggtaaaatgaattaagcttctctcagagttaaaattggctttcggagaagctagatgagagagcttctatgaattagcctgcgtaagctaattttagcttaacagagaaacttaattcatttaagctacttattttcttgttctaaaatgcttatagggaaatttacccaaacaggatttatgttgattatatgatttttgagctggggtcttgtacctgaggatcgatgttatatgctgaattagtttttgcatgaaaaaacatgcacagaatgcatgtctcctttctcgatgggtttagggagcatgcgattctatagtgaagatttgacccatgtgcccaatattaaggaccctgcactttaca

SEQ ID NO: 2992 - DNA, 6585 bp, Glycine max
  Intron number 5 from transcript Glyma13g07560.1 (locus Gly ma13g07560) derived from phytozome v7.0 (chr-ID Gm13; pos 7754937 to 7761521)
ggccttatctttattcaacacaatccattttggaggtaacaatgttgtcattgcctgctacatagtgcattttattattaatttctcacttgttttatagtattgtccatatgtggaagctgttaatattacctttactgttgtgcttcccttcaacatagaggttttataattttaacctttgttcaatcttcatttggtcatccagaaataaataaaatatatgctgtttcttccttttgtttatgttattcatcccacttgcatgaaatccagcttgggctatattaaatgccttatgattgggttttatcttgaaggctactattaatcaattttgtatttttagtgttagaaagctttgtaatgatgataataggtaattggatactttgtttgcgccacaagtgacaaatatgacacaatcaagaagactgtatgattgtgttctccaatctatcttgtaggatcatatgatcttgactttaagtgggtatgttcctgattatgccacatggttgtggcatgtgtgtgacttgtggtatcaaagaactattctaaataattattttgttttctgatttgcatttgaaattctagatatttattatttagtaatagtatttgtcctttgtgcagtccactgagtagtcagtatactaattaataatcatcttggttcagttaatgatgcagtccaagttgcatgtgtacaaaaatagtaagagttggacctaagttattgaacaagtaacacaaaagccttgtatatgtctataagaagggatgtttcttttcattttggagcataaatgaagtatgtatatgtcattaggtgaatctttcaaacaaaggagcagatttataaaatttatcgttgaaggaagtgattggacgatactgtctgtatcgtccagtctagtcctctatgttggaatctatcttctctccgatggagcatccaatcatgtctaacaatgtatcacctagtctgtttagttagttagaaagtgctaaaacccatacattgtaatttcattttgttctcatcttcaataacaacgccaccccttttcttcacgtgttattattgttggttttcttcttccctaatctgaatttgtatttctcagtcttaaaccctacaaattggtatctagagctttggttcagatcagttctatatctgttttgtggtgggtcttaatcatcaaagatcaaccattatgtttttgttcgtgttgagtcttcaagattagatcaagaagatggtcaacacaatcaagattgagaaattcgcagggaagaacaacttcaacctttggtgcatcaagatgcgtgctttattgaaagaacaagggatctgtgaacctctctctggccaaccgatgaagattgataagtccatttttgagcaacaagaagaaaaagcgcattcactaatacttttgtcgttgtttgataaagttctttattaagtttttgaaggaaaaaccgcttctacgttatggctcaagttgaagaaactcttcatgatgaaattaatttgcaacaagttattgttgaaacgacatctgtttgacctccgtgaaggaagttacgcctttgaaagatcatctggacgagttaaactctgtcttgttggagcttagtggcattgatgccaaattagaagatgtagatcttgcaatgattttgttagcctctctccccccttcatacaagaattttgtttattctctaagtgttggaaaggattgcattatgcttgagaaagtcaattccaatctttattcaagagagcttcgacacaaagcttttggaaatggtgatgatgcctttgcctctggattatcattaacaaattctgcaaaaaggaccgaaaaagaagaaagacaaaggattcaagaagggcaaagttgatttaaaggatatttgtaattactacaaagaatctggtcattggaagaaagattgtcctaagaaaatcaaggaagattctattgcagccattgttcaaagtgatttctcattagaagatgatttggtactctcggttgttgatcaacaacaacatcactttgaacaatgagtattggacttaggttgttcttatgatatgagtccacaccgaaattggtttgtgataaatgagaagaaatctggttgtaatgttctgatgggtggcaatgctccttgcaagacagttgggataggttctatacaaatcaaaatgcatgatgaaattgttagaaccttaaccaatgtttgccatgttccggagcttaagaagaatctaatctatgtgggagccatggattcaaaaggttttacttgttgtgttgaaggtggagtgatgcaaatcaaggggaaaggtaggtatggtataatgaagagaaccaagcaaggaaatttgtatatcttgcaaggttccactgtgatagactttcaactgtttcacaagttggaagtcctgtgtccaatgataattctctgtggcacatgcgtttaggccacataagtgaagagaccggaaattttgagcaaacaaagactacttgaaaatcacaaggtgaaatctcttcaattttgtgtgcactactatgtttatgggaagcaacacatgacaaaatttccaaagatagtgaacactacaaaggccacattggactgtgtccattctgattgtcgggggccttcgagagttccatccctatgagaagcaaggcacttcttctttatcatcgatgattactcaaggatgacatgagtattcatgatgaagcatatatctgaagccttcaaatgttcattgaacaccactcatgcagaatcaaacaagaaagtaagtcaagcgtttggggacagacaatggcttgaaattctgttccgcagaattcaatgaattctgtaaggaagaagacattgctagacaacacattgttcgacatacttctcaacaaaatggagtagctgaaagaatgaataggaccttattggaaagggctagatgtgtgctatcaaactcagggttgaatagaggtttttgagttgaggcagtcagcacaacatactacttggtgaatcgctctccatccactgccatagattttaaaacccctattgagatatggtctaataaactggctgattactcaatgctaaaagtgtttggatgtccaacatactatcatgtaaatgaaggtaagttagagcctagagctaagaagtgtgtctttatgggatttggaaatggagttaaaaggattccaaatctggtcttcgtcaaaaagaaaggtcattatgagtagagatatcacttttgatgaactctctatactgcattctaagtctgtggaagattcaagcaagacaactaatgtcactaagcaggtggagtttgagagcaccacaataaaaaaatttagtgatcaggagcactttaaagcgcttgatgatattgaaaaatatcatcaggcacaaccccaacaacatcaatctgaatcaatggataagtttgactagacgagttagaaccttacgaggaagcctaagactaatgctgttaggaagtctcataggcaaatcaaagcactagaaagatatggctttgatgatagcgtctcctatggactacaacgagattttttctccaatcgtcagacacacgtccattcatgttttactagctcttgttgcaactatggatattgagctagaccaacttgatgtgaaaacaacttttctccatggaaattggaggaagatattctgatgaaacaaccaggaggttttaaggtgcaaagaaaggaagattctgtctgtaggttgaaaaggtctctctatgggctgaaacaatctccaagacagtggcacaagagattcgattagttcatcacctctcatgggtacaacaaaagtccatacaattaatgtgtttatcatagtaaggtggatgatggtgcatacatctatcataaactgaagccactacttagtagtgaatttgagatgaaagatatgggagcaactaaaaagattttggacgtgaaaacctggagggattgtgctcaaaataagctcttcttaggtcagaaggaatacattcagaaagtgttgaatcactttgggatggcaacaacaaaaccagtatttactcttttgacatcgtccattcatctctctgaactcaatactactcaattagaatcagaaaaggaatacatgtcttgtgttccttatgctagtgtagttggaagtctaatgtatgccatggtatgtacaagaccagatttagcacaagctatcagtgtagtgagtaagtatatgggtaaacctgggaaggaatattgacaaatagttaaacgaatattaaggtacattaagggtacaactgatattggactcatccactaaggagacacatcttttgcacttgctggttattcagattctgactatgctgcagatttggatgcaaggcgatttgtgacaggttatgctttcacaattggcaattcccttgttagttggaaagctacacttcagcccatagttgctttgtcaacaatagagggagaatatatggctttggcagaagcaatgaaggaagaaatctggtttaagggtcttatcagtgatcttgggttttcacaggataaagttatcattttctgcgacagtctgagtgcaatctgcttagccaaagatcaagtccatcatgaaaggactaaacacattgacgttcgatatcatttcatttgtactgagaagaggattgaagtccaaaaagttgatacaagagaaaacccagattgaagtccgatatcgtgaagcctgttcctagaagcaaatttatgcattgcctggatctgctcaatgtagatcgctggaaataactctgtatatctgattcagaattgttaatgaaccaaggtggatattgttgaaggaggtgactgggcgacattgtctgtagcgtccagtctaatcctctatgctggaatctgtcttttgtcctatggagcatccaatcatgtctaacaatgtatcgtccagtctgtttagttagttagatggttcagttaacaagttctgtttgtaactgatttttgttatttctgtttcagtttgttatactcctatataagggagttaatcagaagggttaagcgtgacgctgtgacgagtgtgctaaaatccacacattgtaatttcattgttctgacttcaataatagtgataccccttttcttcgcgtgttatgattgtccattttcttcttccctaatctgaatttgtatttctcagtcttaaacccaatatttatagattataatctctacattgaacacttaatcctcaaatgcataactcatatctggctatgcctccaattttgtgtaaggtattataggagtttggagctaccaaatcaagttatcatcctcttttgtgttgagtctgctagatagttgacaagacagttgtttgatgaacattgaatttgtcctcccactgggatcacaagatttttttctcttctgattatcatgattttgggaaaatgagttgaatgtttattttgttgctatttttttctcttctgattaacattgaattcgtatttctggcaatgaactatctttttgggcttgaggtttattttgttggagcaaattgctagaattttcagccactggtctttggatgtaatttttctttcggataagaatcatgtttataagagattagtattttactctctaagtgttttttacttagttttctgttagacagttgtaaggttagttttctgttagatagttgtaaggttagttttctgttagacagttgtaagtacaactatcaacagctttatcattctgttatgcaactgcctatatctactgcttcattccccaacctatagttgggttgaatcctcatcaatacagaaacattttcctctctctctttctctcttctccctaaatctctttaatgtgatactttttcttgcttccttgtggctcatgcccctcctttttaaagttgtgtttctgttatacgaggtcatataatagtttctttgaatttttatttgtttattattgttcccttttcattgctgttgggaggattcctgatcctcctgctctgtatgtagatgcagtgatagtttaaacatcattatgcatcatggttgttaataaaataatgttttctgcttccttcattgtattctttattggaaaacttgcaactacttactaaatgattaaaaactataatttcgtttcaacaagttattcaatttagtgaaagaatttcactatcattcctgaatgccaggcattctaatgttgctttgtcttacctttcttccaaaattaaaacttgtgttcctttaatgtagatatggaagtagtataagtttaaacctagccgtagagattgatacattaaattaaacaatagagatgccttcttaaaactattttctgatcctctcaaaacccttcttatttgtatgtggcacttgtaacaggtcctctcccgtcttgctccatttgaaaggggaat

SEQ ID NO: 2993 - DNA, 2310 bp, Glycine max
  Intron number 2 from transcript Glyma05g35520.2 (locus Gly ma05g35520) derived from phytozome v7.0 (chr-ID Gm05; pos 39531370 to 39533679 reverse strand)
gaaactacgttctctaaaagcgaagagaagagtgagtgagtgctctaaacttaccatgctcttatacctgcattgttgtgaacgttacttgtatttgggttaaattaattagctttcatttttggcaatttgattctttccccatatggttggccattacacgtggcaagattttagtcattgtctcgttgacatgctaaactcttgttttcttccttcttttttagcttttttttttcgctgtttttaaaagataaagaatttgatcagtctagggctgtgaaaaaaaaaagcagttaaaaaaaaaactgaccaaaccactttatagaagcccttctgttagaaccaaactgtttctataaaatagtccagatcatgatcaattttttaaaaaaatggtttgattttttttatcgtatcggtttggttatccttttaaactcatttatgattcagtttttataaaaaaaaaaatgtgactcaaaccaaatcattttaataaaacgattcagttcggtttattttatattttttccaaaacagtttggtttattttttccacaccaatggctaacaccacaacattttgtattctgtggcctctaaggggctttttaaatgtctccctgaggggcagatccataatccagaatcattcttgtggccaaacgtgaattagttttggctcgcatcatcaactcaaaaaatgagtttaactcaaaaaacgataaatttagtggaattgaataactttccatcaataagtttttagtattgaaaaaaactttaagtcttaccttcattacagataaaatcaagataaaatatataagtaagaaacaattcttttttatgagttaatttttaagattgaattagactcaaactcatatttttaagatttggtttgattttttttttaaaaaaaaaatgttttgaatggtgatcattaggggtgttcaaaaaatccatttgtataaaacttatctataaccaattatatccaaaccactttcaatccattttaatggactggtcttatatccaaatccatttttttaattttaaaactaatccaattatttgaatatgaattggatactttattggatcttcaacttttaaagcatccctttgtagataaccttggttgagtttggttaaaaatagtttttttttacatcgattaaggctattttgatcgacattgactgttgctaattttcaacagacatgggccataatttttttggttgacattaattaatgatctttgttagttgacattggttgagactattttttcgaacaatgtttaggttttttatcaaaaatatccttgacctatgttgacaaaaaaaacctaacccacgccagcaaaaaaatagcttcaatcaaagtcagtcaataaaatcctacttgatgttgaacaaaaaaatagtccttacctatttcagccaaaaaacatcactgatcgacataggctaaaaaatttctaactgacttcgaccgaaaaatagcatctatcgacgtcgatcgaaaaaattccttaccaatgttaattgaaaatagtctcatctaacatcaattgaaaacccctggcctatgttggcaaaaaaatagcctcagccgatgtcaggcaaaaaacatcactaaccaattgtccaaaaatttctatttgaccttgatccaaaaataatttcgaccttagccgaaatatatccctaatcgatgttcgctaaaataatcttaagcgaagtcaataaaaaataaccatgaacaaagttagctaacaaccttagtccaagtaggtcaaaaattgatttatgatttaaaactaacatggtcatgaagtataaactggttttaaaattattttaaaccagtttcaaaaaaattcaaactactgttatccaattaagcgaatacaaattctaaatccattccatttaattgaatttggatcggatacggattgaataactttcggtaaatgagtctttggttttatttattttgtaaaaaaagttttgaatggtggtcctatatattattggtttctcaaaaattagtatataggttgagtatcatctgtaaagagtatttcaataatatatagtagtcggtggaggtcttttagttgctgttttaagaggttacgtcttaaaactgtctagatagtttcgtgttagtttggttgtgctttctaatttttattaaagagagtttgtttggttactggatagatgttgacccgtgacagtttggaaaataatgttgcagtgtgctggacaacacaaaagagtacat

SEQ ID NO: 2994 - DNA, 626 bp, Glycine max
  Intron number 2 from transcript Glyma18g47100.1 (locus Gly ma18g47100) derived from phytozome v7.0 (chr-ID Gm18; pos 56743924 to 56744549 reverse strand)
gatcctgtcatcaattggtaagattatgtccttgtccttgatttcaaaaaatattttttaaataattatattcttgttccgcgaggtaatttttaatgccgcgtgaagatttttatactttgaatcacaatccaaatccatcgcaagtatcattttaaacatattcattataagtatttacttgttccatgattttaaagatattttttattatgtaaattctgcaaatatatatatatatatatatatatatatattatttcgtaaatcttgaatattttgaaaatggcataagcatatcgttttttctttctttcagaaagaattatataaatagaaggttaattcttgctaatacacatttgatcaaaatagttttactaatttcaagaatgtttttaaccttgctcagattagatcctttcaaattttctattaaaaatatacttaagaaaaagtttttctaacttatgaaagtctaaaaaataatatttcttcaggggtctctttccttaacactaacacttgcctaccaaaaaaaaaaaaaaacttaacactaacagtactattgagagcttcttcttcttcagggtttcaaactttcttcacagtcttcagcattgcat

SEQ ID NO: 2995 - DNA, 1849 bp, Glycine max
  Intron number 15 from transcript Glyma08g11670.1 (locus Gl yma08g11670) derived from phytozome v7.0 (chr-ID Gm08; pos 8509528 to 8511376)
gacctatcaggtatgtatttaatatttaaaccctaaattgatccaaaagaactgtaatttattagctggtttttagaggaaaatactattagatgtagtagactacagatatattctgtaaatctgtacagttagtaaaaatacagtaaatacacaagccaaatgcacgtgttttctctttctctcatttcctacatggtaccttctggaatctggacatattacaattggtcttcttctgaattcaaatgaccatctagcaaacattttctagggtgagtcaattagttagtccatacatagtgtaagtactaggtgtacataagctgtttaggtatactccagttgcattctcttcgtaaataaaccagtgtagttagtataaatattgtaagtacttaagccaaacatttgtgtattttcattcaataggttctctcattctctctattgtgtgtgtgtgtgtgtgtgtgtgtgtgtgtgttctgtgatatggattcttatttctggtattttggctctttaacctttaaaataattagggtaagcaacaaagaacacatttcagtttattgtaataaaaaataaaccacttatgtagaagcaaataagaactgcaaaaggatgagtgcagtaattattgattatatgtaatccaatcagggtttggttttgctatttgggaattcatgctttagatgtttaggtcttagtgtcttacaatatctataagcaaatgagaaaggaatttttttctcaatatgcttgagtgttttttccacccagcagattgggcttatttatattcaagagtatttcaaagacaattaacgcccaaacaatttaccagagaacaatgaagataccactacttcctaagatgcattgaacctagctataccagaaaaattctgatggcaggcagaaaaattgctgtaagagttctgatagtgggcagaaaagtcatcgtaaattctgacaatcactggaaatgttgctggacaattctagaatttttggatgtctgacagcttcaagagcccaatcagacggagaccattttttttgcagaaacaccccctccccccagattaggatctttaataccatgtgagaaaatggggggaaaaaatctcaatgtgcttgagtttgttttctttccagcagaatgaacttatttatgttcaagagtattacaaagataattaataccaaaacaatttacaagagaatagttaagatatcactacttcctttttattttaaaggaggcatccactacttcctaagatgcattgaacctacgtataccaagtacctaggctacttgctaaaataaacataaaaaatgctcttatctcctaaaatattcctaattccaacaatatcttaccttagtataaattggattgagattctatgttcctgtatgaaataggcttttgaatcttaagtttgggttacatgcccttgtaggaataggttgtttaagttgcttatttgagatttttttatgtcaaccttgacatggtaattaaaagatataaatttgaaaggaaaaaaaaatcttggttttgattctttgttcaacatcagttggtctagttctgccttcactccaaagaaacttaaaatgctgctttaatggcgtgttttcttggtgtgtctcagcttcattatatttattctaagtttatttgcttgttctataattttcatcttcatgtcatcactttctatacttgtgggattgtacttttcttagtccgaggaatttgaaaatactaactccactttattcatttgtatcccaggttgggcttcagggtgagtttttaaaattttacag

SEQ ID NO: 2996 - DNA, 1833 bp, Glycine max
  Intron number 12 from transcript Glyma10g36040.2 (locus Gl yma10g36040) derived from phytozome v7.0 (chr-ID Gm10; pos 44218431 to 44220263 reverse strand)
gctcacaggtaactgaatttcttgcaaaagattctttaatattgattaagctatgagaaacatgaatctcctgccggaaaacaatttcattaatcttaatgtctaacatggaaatactgatggagttgtagcatggctagcttgatatagagagaattcctgatcctcctaaatccttaacacatttagattagaccaattagaaagatcaaagagaaatgtcagggaaaaataatgctgttagctcaaggggacataactccattttgatgtctaatgaagatacttttgtcatgactacatttagttgaaccccacaaattattaaaaaagagttactaaggtacaaggataagacactatggttgagatttttaaaagaaaactaaattttttttaggaaaaaggggaaaatacaattagcagaggatatatatcctctaaaatggaagggttaagttactgctgaaaattagaacaatacagtatgtagttattgttaattgtaacacaagctgaaaggtttccatagcacttcctttttaatctcgtaaaagcaaaatcactggttctaaagaaattgtcaaatggaaaatgaactgatccatcgttgactaaagcatccctttgcctttctagctacctcattgtcaaaagaacaatcataatcttttttctgaacttcagtagcacacatgacatagcatgattcaattggtggttagcattgtctaggctctaaacttgaaacacgcctttacggattatcaatgttaatcttattctgtttcctctaaatcaaagataatatccctataaactgtaattaatactagaatcagaatatcaattatgattttcaaaaatatcctttcttgtggctaagcacattcttgatgtgttcattacatggctaattgtttgaattggtgccgtttcatttgtgtccttatttacttgttgcttgatgacttgtttttcttaggcttaattgtacttttaattttttggtcaacaagtccctcatttttgtttttatattgctaaaaaacaagtccttcaacatttttgattgctacaatcaagttcattagtcaactttcttctacatacaacacttgagttcacatttttttcatcaaaatctccacaaactgaacccattgaaccattttaaaatctcattcaaaatctaccaatcaaaacatcatattaaccctaagttgaaaaagtcctagattttcccttttcaatatattaagctcacaccctacaaaatctttcaaatttcaacaaaaatttactttctgaaccttttaaataattttctatttcaaattcatccaagacctctaatttaagtgaaaaacaaggatttgagggttttgtgtaaagaaaaagtgataaaaggattttgattgtagcaattaaaatattgagggactaacaacaacaacaacaatagtcttatttcattaggtaaggtcaactacatgaatcaaaacaaggtcgttaggtaatgttgatttgtcgatggtcttaacatagccctccctttttactgaggcttcggaacaaaaaattagtgagggacaaaaattgcacactagacaaaaaatgcaattaagtatattttcttattatctaaaactcatattgtgatgtgaaatttgacagctaaatcaagctttagataggttggcacgaggtcattagttggcatagctaaatcatgtagtattactctttatgttgttaactggaggtttactctttccttcatttgtcaaattgtgtcttttaatcagttctctgaagcatttggaaagtttt

SEQ ID NO: 2997 - DNA, 2810 bp, Glycine max
  Intron number 4 from transcript Glyma01g27440.1 (locus Gly ma01g27440) derived from phytozome v7.0 (chr-ID Gm01; pos 36689587 to 36692396)
acagtaacattacaattttgtggaaagaggcacaggtattaattttgttttctgcatttcatgagttgttatcttcttttttattgatgcaatttaaattgcctcctatattaatactatttgatcatatggtactgttagagattccatcaatgtttcgagtctttttatattgcatgttctttcagtaaaagtttaagttgaaagaattgaaatcaaacttttatataataatacttctaatataagctccaatctccctttttatatggtaaacaggtaaacataaaagaggaaataaggaatctatataaaaatattataaatatcaagatgcagagatatatcttttcatatcccaaaatatctacaatatttataacaacccctcaagtttgtgaatggatatcaatcattcccaacttgtcaatcagttcctgaaatcttgttgtaaggagtcctatggggaacacaactaccaattggagcccgataggaatatgtgctgtgactataatatccaatttctctttgatgaacttcctatctattccttttgctttattttgtcttgttggactgtataactggcaatactgctagtaactgaattgttatcataaagcaaccttctaggtccttattattttactttgaggtcattaagaataatcttcatccataaccccttgcaaatatcatggctcaaaattctgctcttgcacaagattaagcaactacattttgcttttgctccttcatgttactagattaatttcttcttagaaacatgtaccatctagagctggaccttctatcttccatgaatccaacatagtcagcatctttatatatctttgtggacaatctaccctctttcttgaacaacaatcctttcctagacttgcattcaaatattggaagactctattaactacctgcaggtgcctttcatgggaatcatgcataaattggctgccacaataacaacataagtgttgtttggtataatatgtgacaaataaataagcttcccatccaatcattatgcagcaatatttaaaaaagcataaaacgtgtttttgattcttattaaatgtaacacctccatttaatcacaccagaatgagagagatccaatgatgtgcaaatatgagactatatagttgaagatgcatgacataaaaaaattaattagtactacctataccaataagacacttatacttttgggtagtttatcacttaagaacttcatagttaaacatgtttggcttggagcaattatgaggtgtgaccttctatgaagattttctaaaagcgtgtgaattaagacaaaggacactgaatagtcttgtattattttgtggggactgtcattgattctaaaagtatcaagacacagattgttgaggtatcagaaaaggctacctgtggagggtattgattggtgaagagttttaatcaacaaggaaatggagtgaagtgtcgtaaagtgtgagccattgagacgttaataatcaagagctttacaaacgacattagaccagacctttcttccagtacgatgcggctcgaggataaaccaggtggaagctggtggacatgtaacaccacaatcgaatcacgctagaatgagagggatctaaagttgtgcatgtatgaatttatacaattgaggatgacttaaaggatctaattggtactacctatcccaacatatgcatctacttttcggaagtttatcacttaaaaacttcatagttatgtgtgtttggtttgaagcaattatgaaatgagtaatcttctaggaagttttccagaaaacatgtgagtgaggacaaaacacgtagatatgatttgtgttgatttatggggatagtcattgatcttgaaagtgacagcagttgagtcaagtatcaccatgtgaagtgtcatagaacgtgagtagttgagacatcaataataaagcgcgttacaattggtaaaaaaatcatttgttattagcttttttcaaatcaactaatgacaaatgaaaaaaattataagggaacaaacacaaaatttaataatttataagggtcataaaaagtgtgaaagatcaaaaataaaattattgttttattagagaaccaatgtaaaaaataaattatcaagaaacaaacataaaatttactaatttatcaaaaatttaaaatatattttaacctaaaaaaatcattatacattagcacatcataaaaaaactcaattttcttcataataattgtatcaataaaactttgatacaaccacaaaaaaaactttatccggcccctatgtatccgtgaaaccttgataaattaaaaaaaaaatcattaaactgatcattggaaatcaaaattcagtttcttagagattgtctaatcaaataatatggttattatgaatttacatgattgctctttctgaactccaaagttcatatagagcttatgaccacctacctcttgtgcaaatacttaatataataaaatcaaagaaagggttaggtaagagttcaaaagcttactgattaaagaagtcataaaatgctcataaccaactttcaataatttgagtgatatatatacataaatgtaacattgggtggaagacttcaaaagcagcaataaagctaaactaatatatattggcactaaaaatttgactatatgagtataaatatttcacttcctacatgtaatgttcatgacacattgtatttgcttccctatatttttttagttttatctctaatttttctctatggtatttgtttattgcagttg

SEQ ID NO: 2998 - DNA, 1121 bp, Glycine max
  Intron number 1 from transcript Glyma07g02290.1 (locus Gly ma07g02290) derived from phytozome v7.0 (chr-ID Gm07; pos 1580909 to 1582029 reverse strand)
tctgggaccgtcaaactctcgtcagagagcaccaggtatatcttacttacccttctgctctgccaacttcgagatttcgatctgtgattcttttgttcttttccctccagtgatgtggggatcattttgccactacttgtacggaaattctgtgttgttgtgttttgagatcgatcgagattgttgttgttgttgattacttatgatgaccgtcttcaatttgtatatagcaaagaaatctatgtgggacactgccatactgtctgtctgacatcttatattgatctaagtagatgcaagctttcatatttaattcctgcataacttgcaactaggaattactgttagttatagaatactgtaatgacagatggtgattatttggcataactaggatctgctgttttgacttgattttagtttacagctttgttttcagtgtaattttctttgtaaagcgaggatgatattttttatttttggatttttggtattataacttatctgtctgctaaatacaggttgaaatttctgagctgcggaaagaagtgactggtttgcaaaatttggtaagagactatcaaatgctttaatcttttgggtgtgctgcttcttcttctgctgctgcatctagtccagtctttagttctcaggaagcatttcattttattttgcaaagaataaacacaagcaatgagttaggctgtgcatatcttgcatttcctacatgaatcctgcttcaatctgataagaaccttgggaaaacctcaccacaatagctaacttttgtagttggagatcccaaggccttatagaccccacactagattcccattcttccattgtggtactcaagtcccataacttgcaatccgatcctaacaaaatcctccggtgtgaatgtgaattatcattccgcattcaatattgcataaagctaaatcctcacctctggctgttagctagtaaatcctttcattgcagctgttttacggacaatggttcttatttgatgaatgcaatattgtgttatgaaaccttttttcactaatcttcttgggagctaagcaattagatttctttcagttggacgatttaaataacaaacaaggtggtacctc

SEQ ID NO: 2999 - DNA, 2643 bp, Glycine max
  Intron number 1 from transcript Glyma02g06550.1 (locus Gly ma02g06550) derived from phytozome v7.0 (chr-ID Gm02; pos 5217440 to 5220082 reverse strand)
aaaataggtcaggctctttctttctcctctctctctctctctctctctctctctactttttttcttcttctgtgaatttactaaataccaattgctccaagatccgtgtttgaaatttgtgctttgcttaattagtatactattcttctatttatgtatctcttactcttccaattttccgtagcgtgatttcttgctctttctgcttctagtacttcgtttgcttttgtttttattctttaattagtttattctttcgttcttaagagctagctggtaaatagaaaataaatactagataaaatcctttggtgaatgataaaatatttcgatggaatctgaattgttttgtttataattattgcttgctgaggaaagcaacttttttgtgtatgtctgtgtgtctgtggcattctctaaaagaaaatcaaggttattaaaaggacttgcttggtgctaatgcttattatgctttctgcgattttcaccaattttaccaagacttatctttgatatatggggttaaaagttttggtttgatttagtttggtttgtggatctaaaagtggaagggaattaccatgtagtgtaaaaatataacatcatctcatggataagatcctaggcgtaaaggggaatttttgcctttgtttgagtaggtttagtgaagattaaaatatgacttttaaaaaataaataattatatagctgagagggacatttcatatatatatatttgtcctgaactgtgctgtttccatttcactctgttctgaaaagaataatagattgatccagaaaaacgaagagcattgcgatgatgtcaaggtggatgggtgataatataatataataaaatactggttttaatttgtgccatctaacaaagctgtagccaagaattgcaattgcacatattggatttgaataagactcattaagtgacctaaaacacgattgtcacttgatacataataaccttatattataattctggacacagtagtctatagtgtgctatagcagagatttggaatggagtggccctggactgctgtgagattccgatagtggagtggtattcaatagtagccattgtggccacaatagtggcttttcgtgtgctatagaggtgctatcatgatataattttcaaaaaccatttttacccgtggagtactgttgttcagggttttgttgggtacatattccgcatgttacctccttttgtcctttgttccttctcacattgaaacttttctttttagacttcctagattgcattctgctcatttctatctaattttattctttttctattaatttcacaaaaatattttattttttgacttaattactatgttcttattgctcctaggttgatggtgtgtgtgtaaactgacttattatttatcatgcatttgtttaattttgggtatttagttttgttttgattatttatgtgtgtagtatatatatttgtagttcgtattataacatttaaaatagaggtcattctgatatttccagtgttggccactacgcatcgctatccaggattgataaagataactatgattctagattcacataactgaagattgcacttatgaatatacaaacacacataaatatataaatatatgcataacagaataatgttatccttctgtctattgctttctgctgcattcaaggtattaatcgtgggcatctggacatatttatcttgtctcgtcttttgtgctttctttcatgtgaactggaaccgaaatcatcaaatgtattgcatgcaaggatacaagttcattatctcttgtccattggttaaagtatggttatgcattaaggactcagtattgcaggaaatgtattaaagtcttctttttattaaagcaaaaatgtggagctttgtttcttgaattttgaagttaagcttcctctatactgtttgtagtcaaaaaatattatgcagtatgtactatttactcaagagcataactcgatggctcaactgctcttgtatttttgaagatgcttgatcctaagattgaatccctgacccctaggtcactctacctcactttggcttaccgttcccctccccaaacaccccttttgttaccaccaaagaaaaatgttaaataagatttgttctttactatttatccagtgtaacaatttttttgctagttaatggttgaatccatctaagttatcatcatctcaagatattcagctaagttacaagagcatcaattttccaacttagaaatggctgcttgggtttggctagaagagagaactggtaaacaagtagatggaaataaataaataaaatccaaatttcatcaattgaagactaggctggtcaaccccttgatgtaaatttcttccatttgtaaaagcaatgcttaattacttatttctttggtgaatgaagcacatggaataatattttaaactcatttactttataattttgcagtagatttgatagttgctactatttagtctaacaagtgtattggcatgtaatatatatttttgtattccttgtgttttctgacatgtgaatctattcaacctgatcttatgacctccacagatatcagcaattgatcaaaggtcattttgtttttg

SEQ ID NO: 3000 - DNA, 7009 bp, Glycine max
  Intron number 3 from transcript Glyma07g39550.1 (locus Gly ma07g39550) derived from phytozome v7.0 (chr-ID Gm07; pos 44011643 to 44018651 reverse strand)
gaattcaaaaacgaggaagctactggcccaggtgtattaagggagtggtttcttctggtatgccaagcaatattcaatccacaaaatgctcttttcgtagcttgcccaaatgatcgaaggagatttttccctaatcctggtaagtttctcctggaattctgattgattttttttttttcaatacctctgctgtttgctatgtatttggaatgctattgagtggaaaatgtttgaccaaggcttgcatttttcttatatgaaaatacttgtacaatatttacaaaataatcttcattaggattataaaacatgttgaggcttaatatgatcttgtttttccaaaatgatcctagtgttaacacccacacagtttagattaagttcatgttatttatttatgaatcttattagtttttcataaattaaatattctgctattttcaaaatccttggatgatttccattggcttgtaatgtaggcccactatgcttcaatttatttggctttgcaggggactatactttagtgtggacattgacgtagacactaaacatgacacaacatagctaatgtcttaaaaaaatataggacaggacagcacacatacaacacagacaaaggtactgaagcaaagaaagaaactttacatatattgacttggaaaaatcttatgattgagtgccaacacaagtgttgtggaagactttggaaaacaaggtgttcacatgaattatatttgggctatacaagacatgtattatggggtaactactagtgtgagtctaagaggcaagactaatgattttcctttagggatagaactacatcaaggcttagccttaagtctttaattgtttaatctggtcttgcatgtgcttttactagggacataaaaaagactatccctaattgcatgttttttgtggatgatatagtttttcttgaggaatcaaggggagtagtcaatcttaaactttggagacagacattgaaaacaaagggttttcacttaagtaggagtaagatggagtatatgcattcaattatagtaagagatgagaaatatgacttggaggtataaatgagagaagatgtcatgtgtttctaagtttaagtatttgggataatactacaaaatgatggagaaattaatgagaatgccacacgtaggatacaagcaagatggttaaaatgtagaaatgcattgggggttaaacttaaaggcaaattttatcatacatctatacaattaacttggtagtgaatgttagactttatggcaaaaatgagaatgttaagatgaatgtgtggtcatacacgaaaagacaacctatgaaatgattatgtacgaagttagagcttggtgtagccccaattgaaggaaaaatgacaaaaaattgattaaggtggtttggacatgtagaaaggaggcatcggaggaacattggaacttggaagtagattgcatgagtcttagtcctatgaagaggagaaggagaccaagaagaacattggaactcggaagtttttgagagggatcttatggtaaataatatctttgaaaccttggtctttaaccaaactagatgatgttgtgtgatccatgtaatcgatctcatctagtgcaataaggtgttgctattgttgtagtatctatgcttccttttatcacctttgggagtatgatgcaatcgctctttgcttgcctattactcaaaaattcacatatttgattatcacatgtaaatacataggtcaaagggttttcaaactaacatattcaaatttacattatgtaacctgtccaaccatgaatgctttagttctaaacctgtgttcccagctagttgcatggttggtgttaaatatttttttatgtttctgtatatcctgtattagttgcaatcattattatagcatgtctggataattgattttagcttatactttgtgtacttgtttgtagcatctaaggtacatcctctgcaccttgagtacttcagcttcgctggtcgagttattgcattagctttgatgcataaggtgcaagttggtattgcttttgatcgtgcgtttttcttgcaattggcgggaaactatattgctataaaagatataagggatgcagatccttatctgtatactagctgcaagcaaatattggatatggatgctgatttgattgattcagatgcattaggactgacatttgttagggaggtggaggaattaggacagaggaaagtggttgagctctgccctggtggaaaaaatcttgcagttaatagtaagaacagggacaagtatgttgatcttcttatacaggatcacttcgtaacatccatatctgagcaggtatcacattttgcgaaaggttttgcagatattctctcaaactcaaagctccagcagtacttcttccaaagtttagaccttgaagaccttgatacgatgttgcatgggagtgttgccatgttttcgttgtaggatatttctcgatcttcttttttgcttcacacgtgttctctttctttttaatgctgatttattaactattggaccgttagaagaccttaagccgttacctaacttaaggggtttgagaataacaataattttagcttataggttaggaaatggtagattttttgagttttgttgccagtgttagcaataacttaaaaatttatgaatgacccacttgcaggtgagtataggaaccaattaaattcaatcacaattggcaaatgattcagtatcttaggtatattaatcgagatttgattcttacacatatgaacaaaagttttctagatgcgtaaactcttaacatagtcatcaaaattgtataagccaaacattttgatccctaaatatttcaaagcatcccaatatttcttctcaactatacaaaatctttttgtttagtcatttttggttgtatttattgtcattccttactaagaatttaacatgatgtaaaatgaataaagatttcaacctttagaaacagaatttataaatttaatctttaggctttaaaatattaaattaaaaataatttaggaaaataatatatcaatttttaatattttttatcatcaatgtgaaatattcactattgatgattaattttcatggaaaatctaattttagtggcatgttaatgcttagtatatgatccatgagttttataaaataatatatgaaaaatgttatatggaagataattatatagaagtgtatgagaaaataagttgaaattaaatagagaaaaagaaacaaaggagaaaagtagaattttacttatatatgtagttgatgatataaaagaaagagagagaaaaagtttatctattttttttgtttttgtattctctgattttaatttaatgtaatttatccttattttactttttctttggtcaagcaaatgataaatgatgattatttataacaacaaacaagggaccgtcattcaaacaacaatacatgagtcgatataaactactgacatttctctttgattcagacgtataaaaaaaaattacaattatacagctatgaataaaggctattattaggtgagatgagatgagagtgtgaacgcgtaaccactgggaccgaaccggaaggtggcgtacgcgcgttggagaaaaaaagtgcagaaccgagtttatgaagaaacaccgacggaatgaatgtgctctcgatctgacaagtgataagtgagaagaattcgaattcctcatcatttttttttcttcaaaattcaatccattcttttcttcataatattaccgacactgctttcctttccgaataatgctccttgtcgttggagtgtgcacccattacacatcctttccttttttaaacctagtaaccaacctatacatactgcacatcttatattttcagtggcagcaaacttcaaatatagaaatattaaagggtataatacacaatattagatgtaaatgaatactaaaaatttaagcagagcagagttgtttgcttcagtgtgttccttcattgcacattctttttttttttcaagccagggccaaacaatgagtcattgagcaccctacataattatctctctttattggaatcaaggattaaggaattttctcttcttacgaaacatttgtgtccagattctaagacggggttgtgtgtttgctccaagacaaacaacgattttaagtttgggataaatatacgacaaaatataaatttgtgtttcaaatactggaaaaaaaaaacaagtaaaaataatactgaaaaaatagaaaagataataaaaaagcaaaagagttaaaaaagaaagatgcattgtttcatgttttatttgtcaaagattgctgtggataagtgcgtgcgagaagcagtcaaggaatgataatagtgttttgatctaacatgcccataatttcaggtacttggcctagttccaaagactttctcgcttaagtccctaaccccataatcatcctaagtgttatcctaggtgttatacgaaaatttcattagaagagaaaaaagataccattcatattcactttgtgtacctgactcgattctttcaaggtaagatctcaaattaaaatttatatatataatgaaatgcaaaaacgagcttaaaataaatataaacatgtaagttatgttgatttgaaggacataagtgcgacaaaataacttaatgcctataattatgtgaaattctttttataagtttttttacatataatgtaaaaaattaaaagtcatatactcgtatatcatgtatcatgtacaattttattatttcttaatcgatcattcttttttaaaaaaattattattatttattttcatttggttgtgccaataaataaaaaagtgtaaaatttacacttttttatttctttcctctattattcttcttttaacagcatatttcattttattttttcacttttttcatctcttttcgctatattttcttgagatttcactgctttaatattgtgtttgattaccagggataaaaagaaatgaatgaaaaagtgaaataaagtacaagagaataaaaaaagttatttagttgaagtgaaataaaatataaaataaaaaaatatttatattaaagttggttgatagataaaaataataaaagttgacttttatccaaaaattacttcattgttatttctttatgtacatttcatctcatttgtactatatttattgttttgtaaaattataattttttaggataaataattcttttttatctctaaatatgcaatttgtagataagtttatccttaaaagattaaaatcaaaatttaatccatgaaatatacaaatgcgataaattgatttgactgttaatgtttgtctagcctaagtagaatagaaagacgaatttgtcacataactgattgtcaacatgactatactgaatatattagacgaaagtgtcagtaagttaccattattaaacctaaatgtcaataattttttattgcacgaaaatgacagtaatttttttggagaaaaatgccagtaacttttttttggatcaaaatgtcaatgcgtttacattagatcaaaatgttaataaattactattattggaccaaaatatcagtaattttccatttcatttcaaatctaaatatcagtatgtttctatcgaaataatttgtcagactccaaaatttgtttcatttaagagtaaaatataattttaagataaattttcattattttttatcgttacatgcataacattacaataataacttaaaaaaatattttgacaaacataataataaacataatattgattaacaaccataatttgtgtgtcacaatagaaattatctaagataaatattctaccaatttaccaaaataaacatgataacattgtactaattattacaaatttatacaaattataataattaattacaatctactacaaataaaaaataaacatgtatcatattttactttttcatatcttgacgactcaatagtcctaatatatatgagatatacttatttttatttataataaattataattaattattataatttaaataaaattgtaataattgatacatttatatttttatatttaaaaaaacttttaaatcgattttattttcatcaaataattttacttttatatttttacttgtatttgagtttcttttcacatatttaatttttttttctcacccttacaccgcaaccaaatatagtataaaagaagtgttaagatagaaaaaagtgaaaggaaacgtttgaacggctttagtaaaaagattatttgtttattttattcttttaacctaagaataaaataaaatagagaaagtctgacagcttctatgctaagaatactgtatggagcataggcattctctctcctcgagtgaataaatataatatattaatgttataatctttatgatataacctttttcctgcaaaaattccaaataagcatccgctgcttccgaaaggcagaaggccccaccatcaccttattcgtgaaaggagaagcgtgagactcaccgttggatagttccaaccatttgcgcctcggcacagcggaacacgacaccgtttcgcagggaattaaaaaaacacacacactcgtatgtaataaagcaacaactacaagggaattagaacacgcctaaacaaaaacccaaactctctctcggggctcgcctcagcttcacagcaccacgcgcacacccttccgatgccttcttcgcctcttctctgatccactcgccgcgcccacggcgcctcctaaatgtctgtcatcgacacccccgccgttcaccaccgcagcgggggcgccaccgatcaccgtcacccgtccaagcgcaaattcgacgatgaagacgacgaggatttctcggacttagtctgcgtgaggatgcggaaagacgaggccaaggcggtgaattcctggtccgcctcctcctc

SEQ ID NO: 3001 - DNA, 466 bp, Glycine max
  Intron number 3 from transcript Glyma20g02570.1 (locus Gly ma20g02570) derived from phytozome v7.0 (chr-ID Gm20; pos 2141904 to 2142369)
attttcgccaaagcaacaggtacctaattattttaaagctggagcagtttaactaatcttgaaaattgaatcatttcccttttcatcactaatccataatagtgaaattaaaaaatttcaaatatgtacatgttatgagattattttatgtcatctttctgctaaggaaaaactgattctatatttttttttttataatggaattgattctttgtaaaaaaaattgctgagtatttttataatttgttattattattatgaaaggataagttttctgaggaagctattagctgataaataaacatagcctgaagtaaactgtaattgtgcaaatgaatttaatctgattgatgtctctccagtgtatctatcttttggctattggtaggtagtatgatttcccacaatcctaaggataaggtctctaacaagtatttaaccatatgaaattaggttgcaggaaaca

SEQ ID NO: 3002 - DNA, 2807 bp, Glycine max
  Intron number 1 from transcript Glyma07g13470.1 (locus Gly ma07g13470) derived from phytozome v7.0 (chr-ID Gm07; pos 12226799 to 12229605 reverse strand)
tcttgccctacgcttctcaattggccgcaaaagaggtcactttttttttttttgccttttgttaattttctttatttgcttgttttctttgaatctgtggaagattttgtttttgatttggtttgtggtttttttgtttctgcattgatctagttgatgtagggtttgaggtgaacggggttggtcttagggttatttagttgatggaaatgaatatattaaccctaattttggttatttatttgtcttcgagatccttggagtttgaaaattgcgttgattcccgattgttaagattttaagtgtgtgtgtgtgtctgacgaggttttaaattgtggtactcgtggtctctgatgttgtaagtaattgcggacaaatgcagccgatgtagccacaattatgcggtccgtgactgtaaaaagcttgatgttgtggctgaaattactactgcggacctttgttaagccttggtctgtgatgttgtgaaaatgagggtgttgatgtttttatcttttgaaggggaaattggaaaataatgcagacaattgatgaatggtttatttttgcgattgaaataaaaaaaaaaggtgaatttaggatcctcttcatcagcttgcttgtgagagtgctgcttggtgccagattatttgggatcttatgctccatttttgggtggttttggtctgttctttgggcacattttcttgctgtttattatggtttgttcagattttgttcacttgtttcaatgattgtgaattgaaattgatatatttttttatccttttctagtgctttcagggttttcttttggtgcataaaattatattttgcaaaaaaaagtaggtatttgattttattttttttatgatttttataagcaaaataagtggtattggttttttacataagcattgtggttacttatgctgtcatcgattgtgtggatcccatttcccttgctatataatctagaatttattttttacaaaattctatgtgggaatggtattgtttctggattttaggattcttggatcaaataatgcagtagaactatgtgtttttccttggtacattcccttgtttgtttaataaggaattgttactaatctagataatgggatctagctttttcgtcatcaccctgtttgatctcaaatacttttcctttcttcagttatccaaacaaatttataaataaagaagaatgttgcctcagttctaaacaaagtataatcaagcttaacattttccaataaaccataagcatagagatgcaaaatttgaatgggtaaccctgttatttttcacatataagtatcacacattaccttgtgttgatttcaagatctttatatcaggaaatgagtgctgagactatatacattattattgctttttggccttagcagcatctcttcttgggactgaatcttgaaattctatctagcattgaacattttttatataaagctgacatcttgattcaattttgctattcctagctttaatttttcctttttgaatgtgttttgttttggatacccataaaacttgaaaccatcataatgtgctttacaacccctgtcataatatatttccaaaccatccattttattagcaagaggcatgttttaatatttttctttttgtgtctttagcatttcttttacctcaaaagaaaaaggaaagaagatttttaccaattttttatctcaaaaaatcttgcttttgaatactgcaaagacatgatgcactgactatttgctgttagagtaaattttgtaaagtaacagtatcataaaaatattatgccatgataacattcacgggcatccttttattgaaggagttttttgatgatgctgtttcatggcaccatagttttcaagtttatccttgcaacacaaaattctgactgtttgatgcttattcctacaagtgcattttttgaatctatgcaaatgccatcaatagaagcagtctttattccaaagcactccattattttttgaaaaagtttttttgttatctttagagtagatattttgtggtttggatatcaaacagatgcttttaagcatgccagctgtgcagctgaattttgaggtgtctgattaaactgggtgtgactcgtctaattgaattaatggaagcctgccactttaagacttaagacagccagtcatgctgttgaattcagtggttcacattgccgtatgagatagtgttagtagtttgtaatatatgtgatatgtgattgcatttaggtgattacaaaagtgtgcttgcagtgacattgatagtccaggaagaaaaaggatcaaataaacagtgaaatcagaattattggtaaatgtaattttctactctccaccatgtgcatgtggtttgctggtataatctgattatgagtgaattaatatgccagtctcaattccttatccttgtaactgttatcataaagcagcatatttattttgtggagctgaaagctctgctgcatttggttgagagaagctttatgcacatacaaattattttagtattaaaccatgtgcacatcgattggactgaatatttttatactacagtgccacagtatcagaaaagaatgttgatgtctatcagaagtggaaacttcaaattcgttgcattgcagttatcttcattattgacacatttggttatctgttttattttcttgtgctgcaacatctccagcctcaccaatgtcatccaatcaaagttttggatattagtaagacaaaatcccttaattgatttttgtgcaacaggttgat

SEQ ID NO: 3003 - DNA, 6293 bp, Glycine max
  Intron number 4 from transcript Glyma11g08860.1 (locus Gly ma11g08860) derived from phytozome v7.0 (chr-ID Gm11; pos 6257438 to 6263730 reverse strand)
tgcgtgttttcctttggggagctcgtcctactgaggtaagcttatttatgcatgtagattctattcttttggcggtgttgaatatttgttttattctatgtatggttacttagctagcttacttttcagaggagacaacaaggttaggttaggtcagtatgtgtaagttgtctctctcttctctttgtaccctttatatatgccattcaaaagcaattaatgagatgagagagagtgagaaaatttcctcacttattcaaatcttcaacttggcatcagagctgagttctccgacatcgttcgctaccgctaacgttcgttgcctccatcgccggccgccaccgtcttcggctactttttcttccggcgaacccagggttgggtgtgccttgaagagcgcgactttctcctggaagtcgcgccgccaccgtctcgcgctaattctggcgtgtgaagtccacgtgccattgtccagtcatcgggagcttactggacttgtcctggcagcctcgccgtcctctcctgagcaagtttcaggccttgtctttcgtttttggcgagtccttgtgttagcccttgtgtttttctcttctttttcgttagggttttcgttttttgatcagaaatagcctcctttggacttgttttctctttctctggaacaccaaccatcacaattgcaaagctcaactggaagaattatttattttggtctgtttcagtggagctttggtttctaggccaagggtaccatgaccacttagagaaaggtgttgatgttgtcctaaatgataaacgacctgaatgagaaaagcttgactatcaattgtgtaatgtgttatggcaatcagttgagccagatattttggatccttagatcgtttaaaacatgtcgctctttttggaagaagacccaagagatctttgccaatgatattcaaagcttgtttgatgcaaccatgaaggtttcagcccttaaacaaactagccatgacatgattgcacatgtaggtaaggctcgggctccagtgaaagagttgaaaaggttccttgtgggtaattcatttatctcaccattactcccatttattgatgaagcttgcacacaagaccatactccccctgagcaacaaacccaggaggttgcttcatataaatatcctcctcaagatcactatggaggaagacatttttaatataaagctgatgaagagaccaatgatgcatgacaatcatagcaagaaacagacgaacaatagtgattttggctacaggagaaaaagtatcacaataatcaagaccatatatttgtttgtagcctttagctaccgagcgatccttaagtcgatcaacctcaccattgggcccaactttaacagtatagacctatctataacccacaagtgttttgccaggaggaagaggaacaagtttccaagtatcattattttcaagagcctgcatttcatcaatcatagcttgttgtcagccaagatgatcaagtgcctcatggacattggaaggaatagtaagggaagataatgagaaaacaaaagaaacatatgaaggagacaaatgatgatagcttaagaaattataaataagataaggattacgagtagaacaagtatctttcttgatgacaatggaccaatctgagtcagaatgatgagaagaagtggaaggagaagaaggatctataggttgaggattggttgaagacggatgaggatcacgagaagaagcttcaggcattatagatccaacttgccttgtcctgtgttgatatgtaatgagaggtggaggaacaactttaggtgaatttggtggagaagatggaacaaccctgacattttggtctgagttacctagaggacaaggagaaggaattcgaagtacaacctggagagaagaggaatgatccatggaagggtgagaagaagggtgtgtctttaaagaaggttacatccgtagatatgtaatattgttttgtggttggagagtagcacttgtaacctttttgaaaatgagaataacccaaaaagacacatttgattgatctagcaaaaagtttgtctaaaccaggagaaagatcatggacaaaacaagtacaaccaaatactttaggagaaatatgaaataatgggtcatgaggaaaaataattgaatgaggaatttgattttcaagagaagaagacattttgttaattaagaaataagcagtaagcactgcatctccctaatggtgtgtaggaacattggaatttaatttaacattaggaaacgtgcaatttcaagaagatgatgattcttcctttttgctataccattttgttatggtgtttgaggacacatggactgatgcagaataccttttgaagataagaaggaagagatatcatgagagaaatactctttagcattatcacttctgaaaatcttaattgttttgccaaattgattctcaatctcattatagaatgacatgagtataggcaaaagtttagatctgtctttcattaaataaactcaagtacatctggagaattcatcaataaaggttacaaaatatcgaaaatcaaaagatgtaacacgacttggtccccaaaaatcaaaatgaatggtagagaaagtcgagttacatctttgtacagtttgaggaaataatgacctaacacgttttcctaattgacaagactcacattctaagactctaagattcttaagactaggaaccgtcattttcagttttggtagacttggatgacccagacaatcatgcacaagtttgggttttgaagttgcaaaataggacacaggaaaactggattctaagtagtaaaatcttcgtgattcacgtccttctccaattaatcgacccatcccatgttcttgaataataaatgatttagcagtaaaggtgttaacttgttggcaagtgtatcaaatttgtcacaagtagtaaagtactcggaagtccgagtgtcgaattcaaagggattttgtttgtacttagattaatgcaaatccaatttaaaaacaatagatcaataatttaaaataaagataagaaaatataagagataagataaagatttaaaagaaaggataaaagatttaaagataaaaatggaagatagagaaaataaaatatttaaattaagatatgataaagataaaagaaaataggagataaaagataagataagtaaaagataaaaataaaagataaaaataaaataaaatcagaattgggacttggcctgccttgtttgcctaggatgtatgagtttacttgccttgattcctcacgatgacaagcctattttatttatctatttttcaaattcttttgcaaagatccaacaaataaaatgcatgatgtatgaattttagatgtttgcaagaatgcatggacataaaattatcattcctaggaatgactttcctatgaaatcctttgtttttgttttagtagttactcttacgagcgtctaatctataaaaccaatgcatgcatatcttctttaaatcttatttagaagttatgttgctcctgagcgtctaatccctaatagaatataaagataaataatgcaagataaaagccaaaaagataatagaatagaaaacacctttgcattgataaatagtgagtacatcatacatcgcttggcttttaggcctgccaggccttaactaggggtttagctattcatgatcattgagggctttacaatgaatgaggtataagaattgagatgagataagaggggtgaaagaaagagagtaaatgaaacccctaggagagggggttttgtggtctctttctcctccttggcttcactgttggaatggaatggacttgggcctaatgttaaaaatcttgctcagtgatattttttttgatattttttggatttattttgcttttaatcatatcttcctgagacttcttgatattttggatattttcttgatctttttctcttttaatctctcattttcatatttgcaagtcataagtaagaaaattatcaaatcttaatatttaagccaaagataactgctaaataaacatttttaaagatatttttattatcaaaataactcatatttagccgttataaaaaggttgtaatttaatgagcgagtcaactgacttaatgagattagattgtatggacattgaggaacaaataaaacataattcaatttcaatgagggagataatgaaacttgagcacttccttgagacgcaactttggagccattagctacagtaacaaggtgcggaatttttggaaaagaaatggatgaaaatgaagacttattatcagagatattatcagaggcacctgagtcaagtatccaagaactaggattttcaatggattgagaaatacaggttgttgaaaaacctggtacagatgaagattgtgcttggttgttgggcttctcggatttgagctttaaatactcctgatactcttcatcagagaacctagactccgatttctctgacttagacacctgtgctactttgtcaggaaagtcatgcaatgaataacagttttccttagtgtgacccatcctcttgcaataggtgcaatgaggacgtccacctcttccactgcggcctcctctgttattgcggcctcttcctctcccacaaggtgccaccatagttaaagtttctgcagcatcagtaagagtttcatccttcaatacatgaggcacgcgaataaatctagtgatgagggaatccattgatggaacttgatctccagcaaggacttgatcacacacatgatcaaagtctgagtgtaggctcctcaagatgagaaacatataaaacttgtccagtttcctattaacctcttccaggctcctctctatgggttgaagcaatctcctcgagcttgatttggtaaatttagtcatgttgttcaactttttgggttgaaataaagtgaagctgatcattctattttttattgtcatacatcccctagaaagtgtgtttatctaatggtctatgttgatgatatagtgatcacaggaaatgatgctactaagattgtccagttaaaagagcacttattcagtcatttccagaccaaagacttgggatatctgaagtatttccttggtattgaggtgtctcaatcaggagatggtgttgtgatttctcaaaggaagtatgttttggatattctggaagaaacaggcatgcaaaattatagacttattgatagtcctatggacccaaatctgaagctcatggcagatcagagatgtctatcttgacctcgagaggtataagagacttgtgaaaaaactcatttatctcaccattacaagacctaatatctcctttgctattggattagttagccaattcatgcaaaattctcatgttgatcattggaatgctgccatgcgtattcttagatatgctaagagagttcctggacaaggattattgtatgaggacaagggtaatacacaactatcggggtattgtgatgcagactgggctggttgtcctatggataggagattcacattaggttattgtgtcttcattggagggaatattatctcttggaagagcaagaagcaaactgttgttgctcggtccagtgcagaagctgaatatcgatctatgactatagttacatgtgagcttatgtggattaaacaatttctccaagaattgagattttgtgaagttgtgcaaatgaggttatactgtgataatcagactgctctccacattgcttcaaatccaatctttcatgagaggactaagcacatcgagattgattgtcatttcattcgggagaaactattgtccaaggagattgtcattgagttcattaattctaatgatcagccaatagatattttgactaagtccttaagaggacctaggattctgtctatatgttccaagcttggtgcatatgatttatatgttccagcttgagggagagtgttgaatatttgttttattctatgtatggttacttagctagcttacttgtcagaggagacagcagggttaggtcaggtcagtatgtgtaagctgtctctctcttctctttgtaccctatatatatgccattcaaaagcaattaataagatgagagagagtgagagaaaatttcctcacttattcaaatcttcaactggcgggataacgttaatgttgtaaatgggaaggtaaatgacttaactattttttttctttgttggatagaaattgcctccatatccgttaccaacac

SEQ ID NO: 3004 - DNA, 2037 bp, Glycine max
  Intron number 2 from transcript Glyma19g25980.1 (locus Gly ma19g25980) derived from phytozome v7.0 (chr-ID Gm19; pos 32320355 to 32322391)
ttttggcacttgctaccagagacgttataggcttggtaagcaatattattaatttaacataaaccccaaaagtaaaatcaattaaatggattaatttaaagttaaaaacaatagaataataactaataagagtttattttttatgtttaccgtgtgctggaagaattttactccatccgttgtccaattctgtagcaatgcatcatcaagttttcttttttgttaagaatatttacacattctttcatattctctcctcaacacttaccctggtattaaatgaaatgttatgttatccttacgtaatgatagagattttgcccaatagtagaagaaatttttggaaaaagtaaacaaaaattattgtaaatgttattaaattcggccctatccacatctaactcaatcaggatattattagtaattaattagtcattatcaaactggttaaaccacgttataatagtagtatttaagtatgtaataatatatataatgctaaaaattaatttgtttttctgctaaatattacactattatctataaaattggtccaaacataaaattgcatataaatatttttatattatcaactaattaaaaattaagaaatatataatttttcaaaataattattacaaaaattaataattttaccatatatgataaaggaaaattttgattttgatccccaaaatattttgaaatttagatttaattctataaaatcaatgcatttcattaatttaaagttaaaaataatatatattaataaataaagttaaaaataatatgaatttaatttttatgtatgcactatcatttaatcatgtgctacacgaatttgactacatccgttgtgcaattgtgtagcaatacatccttaagttgtctttttgttaataatttcatgctctttcatattctctcttcaacacttactctgcatgatattaaaagaaaaatttatgttacccttcgtaatgataagagattttgcacagtagtagaagaaatgttttaaaaagtaaaaaaagaaattatattatgagtattattaaattcggtcagatcaacatctaactcaaacagcatattattagtaattaattaagtcattttcaaactgtcaaatggttaaaccacgttatgtgtgtatatatatatatatatatatatatatatatatatatatatatatatatatatatatataatgctaaaaattcattcttttttctggtgagtggctgctaaatattacgctattatttgtacaaattgattcaaccataaaactacatataaggttttttaaattatcatctaattaaaaataatcaagaaatataattttttaaaataattattacaaaaatcagtatttttattatatataataaaagtaaaatatgattttagttcctcaaaatatcttaaatttagttttaatactttataatttaacatatttttaatctctgcatttaacaaaagtgatgtaatttaagtccctctcgttagatttttgttagaaacgtgtttttttttaaaaaaaaatggaaggagttaaaatatattaatttttataggaacaaactctaaattcaatatatatatatactttggaccgtttgtttaaaattaaaataagtatcctataaaaaaaatgattgtttcacaaacagataaaatttgcttattgaactaagtaaaaaaaattaaaacaaatatataaaataaaaactacttatctattttaaaaaatacttattttaacaaataaatcgaaacaaatccacccaatattacatgatgatatataattgaataccagttcaataatatactttataaaaacagtctactctgattccaataattatttactttttgatgtggacaaataaataatgacactatttaatttttacatgtggacaatacattaattttaaattcaaggtggtgacattcatttatttatttacaactatctcagcttggaggtccttcattcaacgtagagcttggacg

SEQ ID NO: 3005 - DNA, 699 bp, Glycine max
  Intron number 1 from transcript Glyma08g27190.1 (locus Gly ma08g27190) derived from phytozome v7.0 (chr-ID Gm08; pos 21494247 to 21494945 reverse strand)
ctctgccacctacgttcagcacaggcctacttcaggtattctgtgatatacttgtttctgttcagcattttgaaagttatataatcgtgttagcaaggttttaaattacggttgcagtcgcagttttgtcatgtttcttgatagtgtgaaaaattactgacaaatgtagccaatgaaatcataatcacagacactaaaataaaccttttaaaaaaaaaaaaacttgaccttgtagtcaaatttaaaaccttgggtgtgagtattacttttagttttgttatatttttaatttttttagtagattttgggataagcttgattaattgagaaaatttgattggcatgcatatcaaaattaaggcaagtatgctaaagttatggttaagcaaacaaatcaatttatcttaaataacatagaaagtgtttttattatataaaaagctcagtttatttagttttggtttttttaaataattaaaagtatttaatacaaaatattaaatgattcataatcagaccttaaaattaaaagaattgggtgtacgtacaaaatttctcagatatctcttatgtaatgagatagagaaattttgttggcttgctgattcaattgcttctcgtcatgtccggagtatgtgtgaaaatttttgtctgaattaccatttttttttatatcagaattcgctttcttctacagta

SEQ ID NO: 3006 - DNA, 1581 bp, Glycine max
  Intron number 1 from transcript Glyma10g41370.1 (locus Gly ma10g41370) derived from phytozome v7.0 (chr-ID Gm10; pos 48458040 to 48459620)
tttctctatcaggggtcactggtttcagtcttcttgtaagctcctacttgctttccactactttttttttcatttcttccaaagttgctccatatatagctaatttatttgatttccttattactattaggttttaatatcattttacttataaagtactacatcatattctttttgagtctttataactatttacttactgtatgtatgggaaattaaaaatagggcattttattgagtatacaagataaaaataaaacctttttatgaacaaaaagaccggctatcgccaccattgctgatttgttgctgtaaacgatgtgatgaccaattagaacgtataccaatatttttaatgattcgacgtgacactctcagttgtactacttttcaaacgggcacgtcactttgaactttgaaccaaaaaagatatgcactctgtaattctgtatatgtaaaacacccattttcacatttcaattgtatgattttattacgtcatatcatccgtcttataaaaagtattaataatatattttaaatttatttataattagaaggggagctcactaaataaaaaataaggcttacaaattttcataatttcaaacaataataaaaatgtatttccagcatttcttttatcactactattgtcttctattcctttgtctctgacgctataccagaatgtccgccgaagactcgttgcactacgccgaccagaagcaccatcacaatgcggtcttctattgcatatataataaaagttactcaccttttggatagattcatgcatataggttggatcgagtggaaagaaataaaaatatataaatttaaattaaagtaaaatataaaaataagttttatattattttactgtttatttatcttatttttttaagttctttttctttcaaacaaacacacccttaacttttttttaagagagcttgtaaaaaaaaactcataacatgtttctaacatcttttttagaaaaataatttatgctatgaaaatatattatcacttttacaaaaatagtttaatgtattttctcttttaattatggaaataacatatacataagtaattacataataagtatttattcatcaaattcttaattaagaggaaaaaagaagcaacacgcgtatagtttctaccatccgtacctacgaagaaaacaaaaataaacgagatcaacgaagcactagctgctatatatttaaactacgatattatataacctactctggtgaagatctggatactatgcacaaggttttgggttctaaccttgttgctaccaatctaccattgtacacattaaaaaacctgtgatattaaattattggcaaggttccaattcactcactctagaaggcaaacaaaataagatgcttatcctgttattactaaatgctttttctgataatggtgatattactaaatgcttgcatttagtgactagtttatcttctttataaactatttcaagcgtgttatgctgctaaaaattaccattatttcctttccttgtaacttggtgcattgataatttgcatatgctgatag

SEQ ID NO: 3007 - DNA, 5241 bp, Glycine max
  Intron number 2 from transcript Glyma17g29670.2 (locus Gly ma17g29670) derived from phytozome v7.0 (chr-ID Gm17; pos 32405760 to 32411000)
ttctttcaggtatggcattcctcttccatagatcattgatcttgcacttgtgccttcttctttaagtatgatatggatgttttgtttagaaagtttttcaattatttttctcattttgtttgtaaattttttgcattctactacttgtatctttgggttcttcatagtaggcttctgcagatatagccgcagtagtcttttgataggcactagtttgagaatgggaccataagtaatttacagaacagaagaatatattataggccctgctctgtctttctattgctatttgaagctatgaatacaaatgagacgagcaccttttacagataagagatttattggtgggcaagactgatttctttggtacaacatagacaatttatgatccctattctgcggactggtttattttgagcagataatctgctggcaatttgtgttgtggagatgaatggtggatggaatctggattatttcctattattcatgacccgtgggtggaaattcatttggattacaatgaaaatatcaagggaatgaacaatttctgttgataaatagcttgtaaagttgttggagataactatcaagccatttctttgataaccattggaaaattcagtaccattgcatttcacttctcattttatatatgaatcttaatgctttgtgaaaatttcagttttcatgtgttagatatctttgaattttgcactagttgtttgtcataactgtggagtaagaaaatcttgtatttggttggtttatagaatagcttaaaattatagctatgttgggtatgtatggactatttcatttagtaagcttggcgttttaagtttacactcttatagagctaggctagaagctaggtattaacagcaaaacaaatataggaagttattgagtaatctcctccaagtccaaccacaaattaggtatgcctgctttgatgtacctctcagagagcaatccttctattttctcaagtcttgtactctggcctccttctcttcttaaggcctatgcaaggctcaatgtgacactctctatccggacatatatataattaagaaaaacatataaaaatttggaatttaattaaatcaattttattcaaatcacttaaacaaattcatgtaggtaaaaggatcacattcactttactgttaccaaataaaacttattaaaaacatctccgactcaaaacaaggttgtccaaaactccaaagaatgaactaaagattcatcatatgaaacaaaatgataaaaactaaatgtccagaacttcatgcaattaatacaaaacccgatgtcccaatattacatcctatcagaacattgtgttccagcatcctctagcatgaaatttttcatagtcatccatctaaccatctgttcccacgaacacaaataacatacagagagtgagttattgctttcttaactaagagagaaacaagacaacatagatatacatatcatataagtcattccaccacttatcgcgtaacatcacatctcaccactacatgtctcacacattttcacatcattcacgtactcaaggatcaaaacacaatatcacttaaccaatcaatatcaattaatacacaagcgttatgcaacaaatatattaagactcaatcttgtatgtaatgtggtaccatgtcagtgaaaaatctcgttggacgtccaagagtacatgataagacagatcacacactggtaagtaaagtcattctcactaggtaaaatcatagggagaccagtcagggtcactctgttttgcgagaacgctccaaccatatgggatcatcataggctttaaggaacattcaaaccaagtgtatttacccccaaggcctatactcggaagagtccgtcagggcctctctctctcaattcaggtttaacccaaaaaatattttagtacgtagactctatctatgaactgtataaaatacatgactcctcaattgttctcaaaataattttaactcgtcgcacctcaaagtgatgaaacttgttaggttcccacagtggatctcatcacaatactcgtcgcccttaaatggtcttatagtcatgtgattgtacggtttataactcacaactcaatgcacacatctcaatacacatgtatgatctcacaatttaatacatacttaacttgtcacttacacatagttcatcacattttcataatcccaagacaacacgttatcacacctcatgcattatatacatgtcacacaataataatattaatatgttatgttcatatgattaaacccttcaaacaatttcacataatcatatcaaaatcaaaagaatcaaaatcataggtcaaaaacatgaaaacacaaagaacactcaactttatcaaccaattcgcatcagggcattaattggtccgtcaaatacaacaatcttgtaattataatcataaaggaagaatcacaatacaataaatatcccaaaataaatctcaatttgatcctctaaggatctctacacatgtttattctaattgcgataaacttatcttttacctctaaatgggctcacgtgtgtattccggcagtgatagcggcgtctctagcgattccctaagattcctcaagcttttcctttggttgttctattagggtttccaagcattagagagaagaaggattgaaatctccatttcacttctccgtgcatgggacatttctcttaccacagacatcatttcgcaaatcccaatggtggagatgtgcaaaaatgagttccgaacccggtgttcaaatttcacgacggtccaacggttaacgagttcaaaattgtagttttactgagacatgtgtgggtgtatgcaggaaaaaaaaagctacatatgagggacatttctctctccacagacattattttgcaaataccaatggtggggatgtgcgaaaatgagttccgaacctgatgttcaaatatcacgatgatccaatggttaacgagtctaggatcgtagttttattgaaacaggtttgagtgtatgcgaaaaaaaaagctacgtgcaagagacatttctctcaccacaaacattattttgcaaatcccaacggtggggatgtgtgaaaatgagtttcgaacctagtgttcaaatttcacgacgatcaacagttaacgagtccgggatcgtagttttactggggcaggtttgagtgtatgcgagaaaaaaagagggttttggctgagggtgaagggaagacggatttgagagaaagaaacagtgtagagacgtatcgtaaatgtaaaaaatgacctaatatgtctctatttataactagggtactctaacctattatttattctatttttctttattttattattttataaaaatgaattctattttacttcctatcaaatgaataaattaaacatcctttttattttttaagaacatatatttattttatttaccttaaaaccattattttaattaataaaaccatttctccttatttatttaatgtaaaaatttcattattttcttaaaactctatttatttttaaataaaatattttttaatctattttacgaaaaaataggatgttaaactaaaggcacttcaggaaggtaaataactacattattgccttgctgttaaacttggggttagtgataacatgtatgtatgtgtttttaatgctcataaacatgtacactgcttgcaatgacatggctactgctagaagggtctttgacaagattgatgatcttgtgttgttgtgtataatgcaatcatcccgatctattttcagaatagccggcccaatgaggcctttgctttgttcagacaattgcaggagagcggcctcaagccaaccaatgtcaccctgcttgttgcacttttgctgtgtgctttgctagggtcattgaacttagggatgtggattcatgagcatgtcaggaagaatgggtttatcagtatgttaaggaaaatactgcacatgctaaatgtgggagtttggatgatgcagtttctgtgttcagggacatgcttacgagagacacacatgcacggtcagcagcgattgttgcttatgcgacacatgggcatggcttccaagccatatcaatgctggaagaaatgaaggaaaaagtgcagcctgatgagataactattttaggtatattgtactgcatgccctctattgtgctgaacaaccaagtttctcattctgttctttcctaagcaacaattgttttctcttccactccgggtctctggttgcacatgtttagttcatgatatcacgtttgccaaagacaggttagttgcaaaaccacccaaatgcttattccttggttattcccattgcaaaaaggttattgggccttattcttctgatctctagcattattttgtctcaattgatgtcactttctttaagacctgccctttcctttcttctgctaattgtctaccaattgaatccttcttttagggctcatctttgtcaccaccaattgctcttgcacctatcactatccctccatacccacttgaggttcagcctttctgattccccccacccttcctgacatagagattgattgtcacttcattcgaggaaaggtccttgcagaaaaactatgattgattttgtcagttccatagattagcttactgacaacatcaaattccccaaagtgaatatatttataattataacaagcttggtgcatatgatttgtatgatccagagaggcagtgttagatgtaacacatctaacacatgttgcacataataaaattagttttagcacatgtccatattaagatttgattgtataatattactgtaccccactcgtgaatataaatacaatgttttgttgacacacaattatcaaacctaatagtattgaatctatgatggaaactctgggaggcttaggccttaggggcggagtagtagcttctagcatctgtgagtttctattttattttatatgtactttggctattttttccctctctttttgtaatggaaatttgagcattgttctatacctgttcccataaggccagaccgcaagaataccaggatctatttagtaaaatatcaatttcaatgcttgccattctgtaatctggatataaataccaagtgcaattccttttgagtgtgatggagatatgctgcttcctttatatttgaattgcactcgttaccaaatgcagggtc

SEQ ID NO: 3008 - DNA, 6772 bp, Glycine max
  Intron number 2 from transcript Glyma19g33640.1 (locus Gly ma19g33640) derived from phytozome v7.0 (chr-ID Gm19; pos 41221233 to 41228004)
gtatttgtttgcttctttggagccgccccacaaatgtatgtattcaagtccatgtctcatttgattgagttgctattgacatgcatattgtgttcttgtttgataaggaattgaatggacatgaagttgctattggtatgcatatggtgttcttgtttgataaggaattgaatggacatgacaaaatttcaaaacctggttgcttgaaatgatttagtagaaatctgatatcgttaatacttaatactacgttgtttgacctagggatattgtaaggtgtaattgtagtattcttgttcatatgtcattgatttggtgtttgctggaatgttattagagattgtggtgttagtaagtgattttccttctatattctttctattacactttgatgaggcctgtatagatattaaaatatccatacatcaggatgtctattttttaagcaagctaaaactgaatggtttcaataattgtagtccacttgtgatgataatgcttattgatgacatgcttgcatttttcagttagcttgtcctttatggcatgtatatattatggttgtaagttgtaaccatatttaaaagattttgttgtgtgataaattttctctgaagtttgagtaggtaatagtaggtatgaggtttgtgcatatgtgaggtttcacctttagggtatgattcttctagtgagaaattgagaatcagaccatacatttgtgacaattgtagtagtgtctattttacccttttagttcttatgagcagagaacggataaaaaaaatgaatgctaatggcttttatcttagttactcttagttttcgggtatttgattgtggtttgtggcatattgcagcaaagtgaattatgttgccaacacacttgtgtttggcccatattctgcatacttgattttggatagtgttgataaaaaatacttcttcaagtgtgtggttaccataattggtttgtttggtttatattataaaaaatttaaaggcctttctataaaatatacacccaaagtgattttctaccagagaagcaacaagatggtgcttgtcaatagccaaaatcatgctggcatgacctgatatgattcatgtgccaaatttgctaaatatgttggcattgatttcaaggcacatttttgatgcgtcaaatctttctaattcaaatatggaattaaacatgctccaatatgagcatgcactcttcacttcatgtgctctctgcattccacatataagtacaaatgtacaattctatgtcgctgatctttcaattggctcagtttgatccatgctctctctcatgaagcatgactttatattgtaaaaaaattaagtgaaaatattcactcccctgtaatttctatctgggatatcagctataagattccaccttgtcactagaggttcatgtaataactttgtcttttatctcatttttgtcatctctctctatataaaaaccatccagcctccgccacgtgttgcttgcatatgcaatctgagcccactgttttttttcttctcattttctctcatggtggtgcatagcatgggcctctgctctagttatcattattttcctagacgtcaagactcttcttggtgtcggagcatcaaaagtaacaaaataacctggaagcttactttattttcattctgtgggacattgtatagaaaaaattatatatgtggattatagtccaggcaaatattatccttgtggaattttagttgcatgaagcctagaacactacccaattaaatataatttcactcggacagaattttgcaaataggattttaaaacataacagtgattttctctgaatcaattcttgcaaaagtgactctttaaagtctgaaatctcaaaatatagccaaacaaatgctgtcaatatcctgcaaaaattctatataaaaatgtgatatatgatgttagttggtatgacttataattagagagtactgcttttggcgattttattggatagaaatgttttatatactggatcccaagttaggctttgtgattgtgaatgcttgtatcccaaatgttttggtttctgcttggtcctctgttttctttttgtctgtaataattttccttcttctgttccacatgctggatgattcttgatttagttaatcttttgctctttatcctattccaagggacagaatgtagttcaatgaattttatgtttgattgtttatttttattaacttttcatcctcaaatattttttcttgctatgttctccctatcatccttcctttagctttgtcaatatctattctcatgcatattaaaactacgtaagaatttttttgtggttctttattaagttaatatcccaggaagttataaactggttaaacatgcagtgagaacataacgatgaagcaatcttagtgtatgtgcacctctgatatgaaaattatagaaaagaaggatatctgaatgttgtctcccaggtccacacatgtattttttataattacacattacacaatagagtacaaaaggaatttgtcataaatacaaatcaaatccctaattacttatcttacaaatattaacatgtaaaatgatatttaacaaaatattgtgatttcatgttgatatatctccataacttagataagaatttcacatctcatttcaatcagtggtcttcaaatcttaaagatggttttcttcggacatgaacataaggaaataggatacagttctgttttattacctgactgtagtatttatcagtttgtgtaatcactaggtctgctagtgagccagctacgaattgcatttctaaagtttgtactgttatagtacctctggtactcattaatgaatatattatatttttggctgataaaaaaaaaatgttgatatatctccattattgtgttacagtgctagttcataaagtaggctttaagttttatcttgtgttgagatcctcgtgacctattgtgttgtgtattttaaagatgagaattattaatgttatttgggattggtatttctcttttaattgttttaacttttaaatattaaataagatttaaatgttaaaggctctggaataattgttctgttttttattaggggaaaactgcctgtatatatacaagatgtacaattttatcctataattaaggaaaattggtaactacaaatatggtgtcagatttctactcaatgatattgacaaatatgaataaggaaagaatatacaaacaataactaaggaaacaaatgaagacaatatctcttcaaatcagagaagatattgtaacactccccttcaagctggtgagtgaatgttcttcaatcccaggtttctaattatctccttaaacatctaagttgagaggccttttagtaatttcatctgctatttgatcttctgatcgaatacttcggagatcaagtatgccatctactaacttctcttttgtaaaatgtatatcaaatattaacctctgcatgctttgtgtaatcatgctgaaccaaattatgtgcaatgctgattgctgacttgttgtcgcaatcttcatttacttctctcaattcgcaaatcatccacaattatctgtaaccgcaataacccgcaaatatctagacccatagttctgaactctgcttttgcacttgatcttgctatcacgtcttgtttcttctccatgttgccaaattatcccactgaaggtacagtaccctgtgtagaatgttgattaactagagatcctccatagtctccatagtcagcagtgtacagatactgcataattctttggactgcttttttaagtcatgttccttctggctcccttgcttttgagtgtatccttttgccactaaccttgccttatatcattgctatacccatctgacctgccttcgtatatgcttcaaggcttcttgtactatccctaaactataatgtgtgcttaaggttagcaagaaggaattgcatctgtctataatattgtggtaagatacataatgggatatggagtgtttggtgcaacttctttttccttttgttacagagttacggcaatgggtagatcaagtttagagttttgctcaacaggtaaagagaattcctccttacctggagtagaggtttcaacaaaaaaagaggactaaatttgggttccataactgacgattctctatgagcttcagtaggagttggatccaatgattgagcatgctgttgaatagagctgaacttttctctcctcaagttcaccatgaatgaatagtgattctttgggcttttggacatgctctgttttctgagtatgtaggatagtactccgttagtttgggtgaataggagttgtttgagaagcagatggaacattggagagaggaaggttaagaataaagtgtagataactaagttgtttaacatcatggaaattctccccttggcgatgtgaagaatattgttggagagattacaaaatgtaatatccttagaaacagaattttctggttggaggacggatacacttacggctgatggacattgaaatatcctaaaagtgcacacttgagagcataatgatcaagtttgctgccacaatgctgtttaatagaaaaaccacttgttgagggactgaaccttcaactttatgcaaagttgaaggttccatttcctttttctgggctgtagggttagcttcattcttcctctgttttatctggtttaatttccctggtgtcccttggtttgttgcaataagtacaccataaattgtcttggttcagggttttacttggttttggtctggaccatgttcatttattctcctctatgcagtagtgagagctaaatcagtgttggattgagaggcataggtatttttccagcatcacagtatggtgtctttcttttccatggacaagtggaaaggtctcattcaggtttggtgaagactcttgcaagaatctggacatgaacttgatcgaactccatgcttagaccagccaagaattcaaaagctcaagctcttcctctcatttaaagaagagtttgattgacttctttttgtttcattccagattctggtatagcttcgtctcctgccccaaaccattcttgcatgaaatactctgtaacagaaaggttgccttgtttggtatgaacaatcctcgtcttaactcagataatagcaactcttgagcttgcctatctgttttgatgtctcaagtaacttaaaattctgagatacctcaatctgcattgagttcagcaactgggttgtgatgagagtaactttatgccctatgtttttgaatttctcacctttactctaaggaggtggattgtcacagagacgaagaagcctccacttcccatttagagtcagcaccaatattgtccaatgttataaataatttttgccttccagttgtgcagcaatctccaatttttccaactctgaaattgggctatctgttttggaggggttctaacttcttagagaatggactgtggcagcgatggaggccttgggtttaagaaaaaggaaggacagttgcaccagagcttatgtaaaggctctgataagttgcacgataaaggttattttcccatatttgattagaggcattctcctataattaaaaagagaattgatatgtagaattaaggtggcaaatttctacctacttgatgatagatgacaaaaatcaaatagggaaagaatatacagaattgcagataatattagggtaataaatgcagacaatatctcatgataccagagaagattgttaggaagtcccacattgcttgcctcaattcttgggatgtagcttatatatctgttggacaacttcagttaatgccaattggttttaagctgaaatttaacaaagatgaatcaactagaatggttatgataaaatcagggttttaaatagcatgctacagtggtgtagcagtgctgactggcccctatctgccataggggctgccatagcggagcaattgtagcagcagccatgatggacaaaatagcatccataacagcactatttgttgattccagtaaagccctttgaacagagatatcatggttcttttgggattctaattttcaaaaatgaaatctatagttgtaaacttgtaatagtatttaaaattataaagaagacttggatttagaagatgatgattattcctatctaggaagcttgaatttgacttttgttggtatttacttgtatgttttgtttaagacacctatgactatattgttaattatgcatgtcatttattttcagaattttgtttatcatttttgagaatttatatgtatatagtatacatgatataaactatataacaaaattcaaaatattggctatcctaccatctgttatctcactatagcatttggataaaacaaggtgtggtgtgacttaatattgattaaatcctacattcatacttaattaggggaggaagtgattaacaccaacttaaagggggaaggataataaatgaggtgttgaaattttaatttctatttcattgattgaatgtgaatggtttgcatgaattatatttttaagctaactgtaagacttttcataactgtttagcaatgtggagtctctctcttaacatttagttattcccccatgtgcaagccttaattttatttaccttgcaaattgtcttggtttgaaatgccatttggttttgcagagctttctgcaatcctgccg

SEQ ID NO: 3009 - DNA, 666 bp, Glycine max
  Intron number 1 from transcript Glyma03g23890.1 (locus Gly ma03g23890) derived from phytozome v7.0 (chr-ID Gm03; pos 30556895 to 30557560)
gccctcccaatagtcgtgcttacactcctggctctgtaagtcatgctttttttttttttttttttttgcaaattatataatttgattgtttaaaaaattattttgcttttgttgttttgattttggaaatatataatttttgaaaggtgaacctggtttttgtttttgtaaatcatgaattaacctttgaaatgtgaacttggttagttggatgcatgctgatgatttcggagactattttgtataattgaaaggttttaatgaatatgagtactgaatactttgagaattcgaaggaattgatgcttattaggaagtgggttttatttgtagtttgtgtgattattatttgggtttaattaccatgttcagcatcaataaatcagaattcatggtagatattatgaattttaaggtaataattaattacaatgaaagtcaacaaacttatcgcatatactaactgtgatcagatgacactgtaaaatcctttacattgcccgtacatgcactatttcctcttattaatttagtttttgattttactttttcaattgagattgagattgaagttaatcaaagaatgtgtaacattgaaagtgcatttgaagcatctatatatgcagctagtgataattgttgagtgattgcagccattaataggat

SEQ ID NO: 3010 - DNA, 4777 bp, Glycine max
  Intron number 1 from transcript Glyma13g14190.1 (locus Gly ma13g14190) derived from phytozome v7.0 (chr-ID Gm13; pos 17854987 to 17859763)
ggaactggtgaaaagaggcattcttccattcaaaggtgcacgctgtctctttgttatttgatttccattcctcgacatataatatttatgtttgttttacctcttttttaacgggattgtaaaatttgttctaattaaaaatggcgttaagcaaccctaacccatcttatttctgcaattaatacgtggaatcaatcataataccataatacgtaagccaattgcaccaatcacataagataggttatgtaatctcattttcagttagaataaattagataacttctttttaaaatatttgcggcactctaggacagagattttgctcttttaaaaaataatagaatatcttttttaatgtcattttttttcaaaattaatacaacatggcatctttaaaactactagtattttttaatacaccatttcatgaataacatatatatggggaataccacctcaataactacatctttgcaataatttaatgtttagatatatatgtatttttttttatcagtcaaaaactgaaattgctcttcgtgcacgtacgttgcatgttaaatttcggtgagtttgaagaaataaaatctgggattttgggaagaatgataatgtttgtgagatttttttaattgatttgaaatattttcttttaaaaaataaattgagacctgttttggaaaataaaagttgaaggagaagaaggtaggttaaagactattagatgattcagaaaaggattttcaatgtttgatttatttatgtttttactttaattatcatcagaaaattgaaatttaattttgaaacaaaaatactaatgattgttaagtcacaatcgtgttatcaaagatttaataaacacataattacttaaccgaaaataggaatctaaaataatttttttaaaatatttagaagcatacgaaaagaaaatttttattagaaatcaaacttaaaattcgactatatattaggaatacatacctatttaagtcttttagttgaattgactataagaaaaaaaaatataagttccaagttagtcttcgcatacaaattctaaatcttccggagttctataattgtttctaaccactattatattcaaagtgtctacttgtttaattctcaaataaattaaaaacaacttaaaatgtttatataaaaatataactttcgttatcggaaaaaaaatataagtctcaaacaaataaataattaaagtcgcataacaaaaaaaaaattaagaatttaattgtcatgcactattaatgttttaaaaaaattaacaattaactaattattcttaaactgtaatttcaattatcaggatattttactttaaaaaatatattattaaatttattatgtaagaaagtttgccactagatcacattggaaaaaaaaaaactttagaatgtaatgatacatctttttctctctcaaattttaataaatgcaaatttaaaataaattaaagtaatatcacatattttgacataaaccataaaatacacatgttcattgtgtttatatgtaagagaaccaatatatgggagcaacctgcatttgattttttttacaaaattcttttgaatcatagagtttcaaattacgagtgaaattaatatatgctccaacgaattagaagcactcgtggaccgtggtcttgttcaacaaaatgaaacacatgatcactgaaatcataataataatgcaatagaaattaggaacgtaccaatagtggaaggtgtccatttgcggtgagccccactaattgatgcaccgtacccttcaggtttcccatataattaagtagtcgcttgcacacagggatagatggagagggtctgacctccatccttaatatatatatatatatatatatatatatatatatatatatatatatatatatatatatatatatatatatatatatatatatatatatatatatatatatatatatatatatatatatatatattaatataaaattatgtaaaattaattatttttattattattattattataatgattaagatgataattaaaataaaattatataaaattaattatgtgtttgttgtttttatgataatcaataaaattattatcatttgaaataaaaattaattttaattttagtgtaaaaataataaatagttttttttaatttattaactattaaaagttagatattctaaaggaatgaaatttttttaaccccctttaatcgctttcttgatccgtccctacttgcacaggttccgtaacacggttgctcaatgctcaccaattaacatgccctcaagtttctcttttgctaagtccgtgttcatgttacatactttatgtggaaagaattaataacttaacctgtatcaaaataaatcaataattcaccgaaaatatatcaataaaagagtaatgttttagtatataattaacgtacattttttatacaattaattaaataaaatattaaatatgatatttaaaaatattattctattaattatgagctttcagttatatgatcttaaataaaaatattaaacatgataatttataattgtaaaaataataatattaaataaattttgattaatttttttttaaataaattaatttaatcatgtaatagaaaataaagaattttttttcgtgaataataacaagctattgaatctatgacatgtaaattattcaaacactttattattgtaactcgatcgaagtgggtactattcatctccttttttattttttaagtgtattttttaatttaaatttgactttgaatttttcaaattttttaaaaaaatcataaaacatataaataaaacctttaaattttatttaatcataagaataaaaccaatctgcagcaaatatctttagattatttgaaaacattgggaacaaacaatttctttataatttgggtgacaaaaaaaatataaaaatgttctccattttgatattttactattatttaattttttttttgcattggaaaagcatgtataagaattttttgattctataatgacaaaattttcactttatttcctaaaaaaatttacaaaattattcggcaatagtatgattgcaaaaatattaaataattttagaatttgttttaatcttaattaaaaataattaaaattttatactacctccatttctgaatttaagactctttaattttttaaatttgtttgtctctctttttccatgttgtcttttaggttatataatttttgacaaaaatactcttaattatattacaataaatgttataaattagtaataagataaattcattctcttttattaggattagaaaagaagactaacacacattaattaattatttatgtaaaatgtaactaagtgaaaaaagtgaaatgatgaggctcgtaattttaaggataatttttaaaaatataatataatttttttaaaaaatttaatgtgattatctaattaataaactttcttaaaggatgttagtagttaaaagaatccggtatacaaaaaagaagatagtattaaattccgtaatgttaatattttattttaacaacaaaaataaataaataaatttagaataaaaaattatataaaaaagtataatgttaatagtttttgttaaaaataattaaaatacgaaaataaatatacataaaaagtacctttagattaggtttctatttcatcagatcgggtgatgaagaaacaggtataaaaaaaatataaaaataagttttctttaaatttacttcttaccattctttaaaacttgatacattaaaaattagcttggccatatttttctctaaatttataaattttgatttaatttattagttttatttttagtctatgaaaactaaaatacaaattttacttttagttcttaaaactcctcaaatactaccatatacttagtttcgatttttttttaaaaaacatgtattttaaaacatgtatttttttatatctatttattcatcgcccaccttaatgagactaaaactacaacttgttaaatataaggattatgaaaaattaataaataaactaattttaaaaaatgttttgaaggaacaacatattcattaagagcattatttgacatcgttgtctaacatactcaatactgccatatatttagtttccatttaaataaaaaaaacatgtattttgaatattttttagttaaatatatctataagagaaattttaattataaattgcttttaataaaaaatgtattaatctaacaaatatacactattttttttttattttggtgagcaattctcgttatatataacttatggaaaattatatgggaggttaccaaaatataagccataaggtatataagtgaacaataataatagaaaagggtgtcacataagtgtcttccttgtgatcagaacctatctaacactagtaatggaggcaaatatagatatatagccaagtacatattatgtaggatgaacaaataccggtaaaaaacaattctcgttatatcaaaatgaaattatgtatattaattagttgcttcgacagacacgttgttaattgatttttttgttttaatttttcatcatcattatgttgttaagtgattccttttcatgagtgtttctctcgaagtaaattatatgcttatattacatttttatctttctggtacataaatgttaaagttatcttgtgtaacttatatttgtcaattttttag

SEQ ID NO: 3011 - DNA, 9956 bp, Glycine max
  Intron number 4 from transcript Glyma04g10430.1 (locus Gly ma04g10430) derived from phytozome v7.0 (chr-ID Gm04; pos 8672563 to 8682518 reverse strand)
tatttgtggtcaattctttcggatctgggtttcaggtacgccttgcaacattaattgcaatgaatttagtgtacctttcaaaatctgtaaatggcatttataaccagtatctttttagttattttttttcttcattgctgatttcttaatagtcgcttcatcttgtatgatttcaaatggcattacgcgagttccaaatttatgtttgctttctatcttttataggatttcaaaatctattacttttgtttgtcccctaacaaatagcaaatggtaatggttagaatacttggattattgcagtcttatgaatcttattattttggagttattagtagggctgtcttagagtgtaggtttgggcctaactcaatcccaaaagctagctcatagggtgagggttgcccctcacttatatactctatcttggccttatctctagccaatgtgggacttgggctttttctaatacactccctcacggccaacacttttgggcttgatgcatggataacatgatgatggccctttgaatggatctaggaaaggctctgataagagaatttgagagagaagaggagattgacattgagaaaatcaatattattcaactcaactgtaactaattacaaagatgaatatatagttggataactgccaactgacctaactgttaactaacctaagttagttggcagctgttacaaagttgttaggcactaattgactaaattatcaactgataacaggctaaaactgagtaatgtgtactctcttatactcccccacaagctcacgaggtgttggaagaatgtcttttaactactctaagcttgaacctgaatgaaagaaatgaagaaggggatagagcctttgatgcaatccaagccatggacgcttggttcagattgttccggatgcaaattcaagaaccaccattgttgatcttccaagaactcaagaacagaaaaatagaaaatatggataagatgagaagatgaacggaacgatgccacgatccacggagaattgataagctgaaggagaattcaccacaaaggaatagcttccttgataagaatcaatttgattttcagccaaaaaccaaagaaaaggctaagctctttctaagcacaaacttaatttcaattatatcaaaagtttctacaatttagagtttttgagtatttatagaactagcttaagaggataactaagcctctaataaggcctatttacatcaagctcaagcccattacacaaataaacaaaaattaggaattttcgtaaattcacactaaaggtgtgcgctaagccatacagctcacgctaagcccagtttctcctcgggttagaattgggctaagtcagacagctcgcgctaagccactaaaggtgtgcgctaaggcagacagctcgcgctaagcccacttaaggtgtgcgctaagccagacagctcacactaagtctaacagcacgcgctaagcccaggtgtgttgttcaacaatcttcaatgtgttattcagctccttgtgattttctccctccttttctttgatgagtaatccatccttgatcctcttggccatacttcttatagaagcttgactctagatcttgtcattggccccttcaactcatgaagtgtttctaggtccttgtgctctttggatagccctctattagcattggtcagaatatcagccagttgatctatggcaggaacatgaacaacattgagttgtttggtgagaagtttctctcagacaaaaaataaatccagctccatatgcttggtttttgagtgaaaaacaggattatgagctaatgaaacaattctggtgttgtcacacaaaataataggagtagtgtaagctacttggagttcagaaagaagagactgaatccaagtaacttctgctgcaatacgagccatgcttctatattttgcctcagtacttgaccttgcaacaactgattgcttcttagaccaccaagagatgagtttaggtccaagaaaaatagcagctccagaagtagacctcctacctccagaatcagaggcccaatctgcatcacaataggcatgaagaggaaagggatgcctaagagaagcagactgaaagtgtagccccaagaaatagtacccttaagataccttgaaatccttttctcagccaaccagtgttgctcagaaggtttagacatgaactgacagaccttgttgacagagaaactaatctctggtcttgtaatagtagcatactgcaaagcaccaactatggacctatataaggtaggatcagaaaaatcttcagaaccaaactttgtcaatttacaacccctaaccataggagaagagataggatttgattcatccattttagtcttggccaagagatctctgatatactttgattgagttaaaataagagaaccatcattctgtctttgaacttcaataccccaaaaaaagtccaagtcaccaagttatttgagggagaaaacagaattcagttttgaaacaagagaatgaatcaaagtggtgttcttacccgtgatagtgatatcaccaacataaactaagatgtagacaacaaactgattctcagaaaaaacaaagagagaaggatcatgtttgcttgaagaaaacttgaagctgcgaagagtagcttttagtttgtcaaaccaggctctaggagcctgcgttaggccataaatagctttatgtattctgcatacttgagtcttattggaagacacaaatccaggaggttgagtcatgtaaacctcgtcctcaagaatgcctttaagaaaggcattgttgacatcaagctgttgaaggggccagttgtgagaaatagcaagagaaagaatcaacctaacagtcacatgtttgattacaggagaaaaggtctccttataatcaaatcccaactgttggtgaaaagccttagctacaagcctagctttatacttgttgactgagccatccggattttcctttactgtaaacacgcacttacacccaattgttgttctagtaggagggagatcatccaaagtctaagtaccattccttttaaagcatcatattcagattgcatagttgagtaccaagaaggatcagcatgagcagctttggttgatttgggttcaagatgagcaagttaaagagtaggattaactcagaatatgacccctcagatgaggatgtggctaaccaagaccaaatggtagaactgaacttgggcctaaaatatactgggcctcaatcagaattgaaagtttacaagaggacaagaaaatccaaagggggaactgggcctggtgtggtagaaggagaaaaagaaaccaatgaagacaccaacctttgtaaagacacttggattactgatgctagaccaacaaactttttaaggccagattctcctactctggatggaggaagtggcctaaaagaagttgctacatgagatgcttatgcgaaaggggcaaatactgaaggttcaacttcaagctcaatattcaagagcccaagaagctgtgaagtaatgattgaggctgcaagtactggggaattggctaaaaacatgggaatcagttttgggaaggaagaatgaaatgttgtccagaatggttattttagatggaagagacaaatctgaacttgagaagccaggaaaaagggtgggtgatcaatgaaggtagttacctataatattagaggttgagagggggggggggggggggtggaattaaatgggagcagtaaagaaattggtggtgaaggagcaagtggatatgctatgcctacaggaaactaagaaggaaatggtggacaaaactgtgtgtcaggctttgtgcgtatgaagtaaatcatcttgtgttagagaagaaggttattggtagcggatttatttcactagaaggaacttggaaaggtgatggtgaaaaaatcactattgtaaatatatactccccttgcgatgtaaatttgaaaagaaacttgtggggtcagattaaccagctaagaagtgcaagttagaacaaattgtggtgcatagtcgatgatttcaactgtgtaaggagacaatcagaacgagtgggggctagccaaagagagcaaggaggggggatcatgacagaatttaatgactggatagtggacctagaagttgaggatatgccgagtgttggtcacaaatacacttggtataggctaaaatctggttggatagggttcttgtgtctgttgaatggttttctaaatggagtggaagtattcaattcatattggataggaactactcagaccactattcaattcatgttggatagggtttttgtggctgttcggaggaagaggcatcccatttattttttcattgcttgaaaatacaacccatatggtgggaaactatggcttgggtgaacattaaaagtgtgttcccgacaaatctgatacatcatttcctccaacactcatatgtacaggtggatggtataaggattaagaggtggcgaagctggtagatggctgtagtttggtcaatttggcagatgcgaaatagtattatattctccaatgcatccttcaatgtcaacaagctgttagaggatgccatgttcttaatctggtcgtggctaagaaacttggagaaagattttaatattcatttttatcaatggtcgagtcaaatccggcaaggttttttgtatcagtagtgggtggtttcgattgcatttctagcagatttattacttatgtagccataatatggttcctaaacaaactatattagtttttctatggaaccatgtgtatggtaacctacctatgtacttagtacctctggtacttctttctcattaatatatattctattatctttgctgataaaaaaaaaaaaaaactattcaattctgctgaaatcaatcattgctgactggggtccaaagcctttcaagactctagactgcctggtttcaagataaaacttttaggaagacagtttgggaatgttggagagagagctcagtacaagggtggggaggctttgtattaaaagaaaaattgaagttgctgaaacagagattaaaagtgtggagctaagagcagtttggggatattcagcagaagttaaagagggcagagcaaaaactcaattagctggaaaagaaaggggaggatagagacctaactgaggaggaaatcaaactgaggaaggaattggaggaggaagtttgggtggcagcgcactcaaaagagtccattatgagtcaaaaagcaagaattaagtagttaaaagaggggtattgcaactctagatactatcacatgattgtcaattggaaatggcgcaaaaacatgttgagggggatttttattgatggttgttgggtagaggagccgaatagagtaagggaggaagtcaaatagttctttttgagaaggtttgaagaatcatcatttgagagaccaaggctggatggtgtagaattcaagaccattaatcaggaggcaaatgcaaaattggtggccagatttgaggaggatgaggtaagggcaacggtgtgagaatgtgggagctctaagagcccaagacctaatggactaaattttaagttcattaaggaattttggaacataatgaaaatagatgttttgcgtttctcggacgaatttcatgcaaatggacactttccaaaaggtagtaatgcatctttcttggctttgattccaagggtacatgatccacaaaatttaaacgagtataaacctatttctcttataggttgtatctacaagattgtggcaaaaatcctaactagaagactcaagatgggtaccatcattgatgaatgacaaagtgcctttatagaggagagacatctcttgcaaaacgtggtgattgttaatgatgctattgatgaagcaaaaaggggtgtgggatcttgcgtcttttaaccgagcactactcggtaagtggcgttggaacctgtttcatcatactggcgaattatgggggatggataagggtagggtaagggaagctattttcatctttatcctacctttattaagatcatctatgtgaaggaagctatttccatctttaataagatcatctttatcctactgaaaaccagaaggagtggggatggggtaggtccccaaagatcagtaaagataagatcaaagggttttgcatagacagtatgagaaagagaagaaggaagactatgtgactttccaatacaacagtgattacaaaaatctgttggttctttattaatatttgcaatattacaaagtcaaaatacaatttttatagcagcaacactaggctgaccaagcctagagtgccatgttgcaaaagaagtagcactactagaagctgtatttataacattcttacctacagcagctttattggatgaacagattcaaaatcagtcactagtgattgtatttacaataggactttgtacagaagctttaacagaattgcaaacatttgaaggaagcttgcacttgggcatagaatcaggaagttgagggaactgatagagaccatcgctccccacaaatccttttcgtagaacaaatttagcatcctgtgatttaacaagacaaaatgatgagtgaaactcaaaaaaacacattattatctttgcaaaactgactgacactaatgagattcttagtaaatagtaatacaaggagcaaataataaattaccaagagtaagagaaaactgaggattgaggggggaggaaaaggtggaaacacctgaggagttaatggtgaggccctgaccaatatccaatagtgatttggtcaggcccctcaaaaggtgtcacttgctgtatgttctgtgacattactagtcacatgatgggaagcaccagaatcaggataccaagtctgagtctgaatgggagcagatgatgaaatggtcagataaatctgaggattaggctgctgtttagaagattgctaattagtctgctgtggctgcagatacacataccgaggttgagcatatgccaaaagtggctgctgaggtgatgcaagcacacactgaatgggttgagcatactgaacttgctgagaagtctaagcattggaagctgaagtagattgagtaggagcaagtgaagctggtggaggaagagtaggaacataattctcctctagtctgtgatagcagtaagaaacaccatggccaaatttgtgacagatttgacattgtacgtcaacaaacctacctctaccaccaccacggcctgaaccacaaccaccacggttgttctggccaaaattccgaccaccacgacaactgaaaatttgatttccactgtaatcatttgcagaattgtcctcagaagaggtctgagtggtcaaattaacttgagcttaagagttggtgttcattgactgtggatgaacaaaattatcaagagaagaacttccaagagttgagattaacagatcctaaaccttgagtaagattatcagaaactatagcttgcttatgagatcgatcaatgcacacttcactcgcgagcaacaatgtttcaacttcatcaacagtacacagatcaaaatgattagtaactagaaaaatagatgattcatactcatcaggaaaacctttgagaattaggtcaagatgttcagaattggaaacagtttcaccaatggaagtcgactcattaacaagcgtctgaacatgcaaaagataatccgaaatagatcgattatcaagggatagatttcgaagctcattacgaactagacaaaccttagctggcgtgagggattgaaaatgtgattgaatccgatcccaaagtttccatgacgattggcatcctatgactcacgaaagaatgtccccggagatgttggattgcaaacaggcaagaagaattggtcttgttcgtaccaaatgctatacttatgtggaattttcagattaacgatgtagccttcaagatgatgactacgaataacaggttcaaccttgttgaatccaaagaagataattctttgcgttcaacttctgagaaatggaatgtgcagagttcttcgaagaagcattcgaagaactcaccaaccgagttggctgaggcggtggggaggaaggaggagaaaccggagaaggaattgatgtggaaaccatgaacagaagtttaggttttgacctaagcactcaataccataagagttgagagaattttagagaggaggagattgagattgagaaaatcaatattattcaacccaaatgtaactaatttcaaagatgaatatatagttggataactgccaactaacctaactgttacaaagctgttaggcactaactgactaaactatcaactgataacagactaactagtaactacaggagttagaatatcagataacagacagaaacaaaaaagaaacagttagtaatgtatactctcttatagggtgtaggggctatacttgtactggttgtactacatgtgaacttgcccttaaatattagtataaataaagtatctggtaaatatttatatttcaacatcactgattttcagagtcctattaattaaatattctttttctttcttcatcaaaaccctataatggtgaaataacatgaaggactaaaatttgtctccatagagaagaaatatattgcaagttctagatatttgaattcactatctgatttgtagatcttgccaccaaaacattgaatattagttgctactatttgcttctatatatgatgaagtagacatggacaaataagtaagtgtgccgattcttttattttaaagttttgggactctgcttggcctgcctgctttcctgcttttttcatctattttctgtacattaggcatatggattttcactacaggggtgtttgtggattgtgttagatcaaaagaaaagtcttttgattcactccaaagttttcttgttttaccatcaaataagttttgtttaaaactcaaatccgaactgatccaatttaattaaaagtggtttggattggatcaagcttttggttttttaaggaggcagtaaataaatcacagaatacacaataaatttgataaaaactaattcaaagtattaaaaaatctcatcttataaatcagaacatgtattgatgtcacatctttcataatatataaattgtaagttcagattataattgttagtcaaaacaatattaaacctataaacacacaaattcagttttttggtttggataagatggattttaaatatggaacaaaatattgatccaatccaatggaaaagttggttttccttttttcctgttcaatgtttactgtttgtattcaattggattggtttatgaacatctctagcttagatctaaacagaaactagatcctgacagcttttgttagttggcagtgcatttttttaagcatttgcataagtgtttgggataatttatgaaaactaactactcataagctgttttcaacttatgacaataacctttctagagtagctcatgaaaacaggttacaaatcatggaaacagtttattcctatttcttctttgattataaaaacaacttatacatgaatatttacataataataaataattattcattaagtccttaattaagttgtttactcaaacagatctttaactgaggtatgtcaagcacctgggttgggggtgggggaaggggcataggtgctacgagtttgttggcaaggcaatttttctaaaggtagcataacattggccaaagtcctggatagtttctcttgttggcatttcaagtttgataatgtttgttataaaattattacttaaggagttattgaaaggtatacttatggcttgcatctgatatatattgtaggctcttttcgtacttctgtctctacctatactttc

SEQ ID NO: 3012 - DNA, 3268 bp, Glycine max
  Intron number 7 from transcript Glyma14g39100.1 (locus Gly ma14g39100) derived from phytozome v7.0 (chr-ID Gm14; pos 48217981 to 48221248 reverse strand)
tatcaatcgacctgttgagatttataaggaaggtaagtcatgtcttgtagagaaaccttctttgtaacttttaaatttattgctttccatgactgtctttttttccctgtgtgggaagttgcatatggtaaagtgaatagtcatcatgttgtcaatggtgtccgggcaaaaagcagccataattttgtgaaggtggagtggtgggcaatagggaaagaaagataatcatgctagaaaaagggcttaaatgcaattttggtcctcctattttgctcaatctgcaattttagtccttccattttaaaataaagacatttggtcactttgtttttgaaaaatctgcgaatttagttcccatatttcaaaatagagacatttggtctttctattttagaaaattcacaaatttgatcccccatattttaaaaaatcaacaattttggtccaatcttcaattttatctacactttatttcttttatttcttacattataattaattaaattatttttttatgataccttaaatgaatgtgttgggtctaggattcaattggatcaaaataaaagaaataaagtgtagacaaaattgagaatttgactaaaattgaaaattttgtaaaattaggaggaccaaatgtctctattttgaaatagaggactaaaataacggatttttaaaacaggaaccaaatgtctctattttaaaatggagggaccaaaattgtggattgagcaaaatagagggaccaaaattgcatttaagcctagaaaaaaataataaacccataaaaactgaataaaaggacctagtattttatatcaggagctatacacataatagcaaatttttataggaaaaaacaattaatcattaaggacaatttaacaatagtgcagcaaaggctcaaacttaaatatgaatggactaaaatggaaaagaacagagaaccacagctgaggattagcccacttgatgtgtccttgagaattgagtagaataaaaaaccgaagaaatcaggtttgaaaaaaatgagttaagtaggagtataaaaattgaaaaatgtttatccgaaaaatgaattgaagtgtaattagctgaaacaaaaaagaatacaggacacactgtattagatagcacatataaagcatagaaaataaggaaagtatacaataaatatactatgaagagtaataagatgaataaagcatactgaggcttgggaaactctccatgcatggatgttttcatggtggtagcaccaagagatgccatgccatgcagccttggtggctgtcatttacaacatatttatctggtgtattaccttacctgacagttctcatcttcggtgagaaaagattttgttagcatttagcaatagttggtggctgtcatttgggctatctgttttttatccaacactagaagtttgaagggctattttgcattaattttttccttttctttccttgttctctgttctcttgttttagaggatatgttgtccttatggtcttttcttcactttcgtaactagttcgttgtttataatatcattaaagaatacctgaaatgtgatatatatggtatttgcaacttagagcatatattaacctatatatcattttcagtcatattaactgtaatttcaattcatttaaccttattagttaatgaaatcttaggattagattattcacccataataactctttccccctgtattttggcagtttaaatcacttgtcaggtgttttgggtcatttagtattagtgatttatagaagtcattaatctttctttcatagggttgtgtgatcaattgggcttgtgattataccacgtctctgttcacattattttgtgctttctatttcgattgaattcggctgtgtatcttgaccacataattataattgtccttttttctgttttatgctcttttctgcaacattatttttcatctacaaatgaatatttgcaagttatggcattattatttgaagagagcaaaaaatctcatggattaaacaaagaatatatcctcttagaagataacatgaaaaagagaaagcaaagagaagataataacactcaaatatgcagtgcttcagtttccttgattatcaatccaagcaattccctaataacctatcttgtgtcgtagatgatataatggaagaaatttgtttataattattgtgtttgttaaccaagctgctgcaaacataacatacatccacacaaacttctttttatttgctattataacagtgttttactgcaatgctgtgtgtctttgagatcacactaagcctttatttatataagcaaataggataagtattgattacataggatcatctaataagagttataaggattaaatccctaattactatcaaatcatatctaatcgtaaacaagagaataatatgtaatcttacagctaccataacaattaatgatttattaaaatctgacaattatttacttcccaagtagcagcagtggtaaagctcctgtggtcactggattattaggggcaaataaacctcctaaagtgtatgacacctttatcgagtggcggaggctacataatggaaaccataaaattaaaatgagcgtgcattttttttaaagtgaactgctcattttaaaatacattatgaatggggctttaaattcactataaatttatttaagtccttctatatttactaataaatgagcgagtaagttgaaaaattgtgacatataaaaggactaaaaacatatttaagttttttgttaacattatatcttctgtcatgattgtagttattttcattttattacatgacttacctattattgatgaatgatttctgtctgtctctttttgggcatgagagttgatatttaaataaatttatacttaatgcactctggagataaacatgcattagtttagaaagcatggatacgatatgggacaagaatataatacaacagacatgtgacaaattttaacaattgtaggataccatatggatgtaacaatatataatacaatataattaatgtgtatggcatgggtatggctactattttaaagtgtccgtgcttcctttgctattcctttgtctctgcttatatcgcttttgactctgcttaaacggcttatgattaatagaaatgatttaattgttagcatcatctttactttcctacaactgaaggagatgcaaacatctgttgcgtgcaggtaaatactttagcttaa

SEQ ID NO: 3013 - DNA, 1081 bp, Glycine max
  Intron number 2 from transcript Glyma08g06380.1 (locus Gly ma08g06380) derived from phytozome v7.0 (chr-ID Gm08; pos 4525202 to 4526282)
gcattgtcgaacccgtccgcaacattttcaggaaggtgatatcacaacaaaatactcatttggcccctgtttcatacttctgcattatgagattgtattttacattttttttatgaaattgttgattaattttaaaagaataccaccaaacccgaacactgaactgttaactagttgctttttgaatttgataggagagccactataattgtgctctaccttgcttaaatttaattgatcggtttttagctgtcctgtcagttttttattttattttttatcagtacttgtcctgtttcagtgatgcttgataagacagctcctcttaaaccctttactttttatgattcattttatcaatttagaaaaagtttatttctagaaaaatattacattaaaactacagaaataatatttatatatgttatattgaaaaacattattttttatttattaacctatgcccttctaaataagatgtgtatttcggatatttagggaatttttaaaaaaaattggagaggagggaagcgagtttcatttaactttttcaaaatccaattaattttccttttttttaatttttttctcctgtaaagtatttaatgagaaaaaaatatgcacacagattagtttcaatttcaatttcaagccattcccctatatctttatctaccgagattgatcagtgttaacagttaaccataaagtgttgggttgaccaaacttatcttacatgtacaatgagtacagagaaaacatatgggcaggtgggtgcatgtattttcgctggtgattttgtcacgccaatatgctatattttccctgaaacaacagagcacacatttatgagattgtgccacgtgataaaatgaataagatatttcggtggatgaagaattgctagtagccactaggaaatacatattctggtaaatagattgccagcattgatatttgcttaatgctatgttctttactggtggtgctgataaaaaaaaaaatgttctttactggtggaggtggaggcaatgcaattaaacgttttccttgttaattgttatcctccacacagaaaaag

SEQ ID NO: 3014 - DNA, 1101 bp, Glycine max
  Intron number 14 from transcript Glyma08g25030.1 (locus Gl yma08g25030) derived from phytozome v7.0 (chr-ID Gm08; pos 19263366 to 19264466)
catatctttctgtactgaaggtacatcatctctaatttattttccatgtttggtagtaatacattaaaactcccattgcaatatctataactagcccttttagttcttagaatttgataatacaggcatggtggacttttaaagtattgatttggtcatgttcaataccctatattctgctgcttttattagagttcaaatggtttatcatttctggtgccgattctgttttctctagcatagatacacttaggatggctggtctgcagtaatatcatcagcatcagcaatcagtatttaaatcaccctatagttctgatgcatggaaacctgattttatgcaactttcagggtgacttgcaatgattgatggagattaggaatattttgttactgtttaaattaaactgattagtgtttatgaaagtgtgtgatgcgactatactgttactcagtctagggaaatgattgggttgactgtgacataaagccaacacaatcttaagaaaataagaaaagtagataaagattggaaaaatttatgatttgcacctaaaggaagcatcagtttctcagaattgatagggaattgtaacattatgactaattatgtatcacacgcacaaaaaagatctatcatgtttgttcttttcttcgtgcaattgcattcttaatgtcaatagcaaagtcagtcaacacattcagagattcacttgtgtaaaagcacctaggaaagtttttcatgttaaatttgtattcccccctcaaccccagcctcccaccccaatggaatatgctgtatttctttatgaccaggttttatagatgaactcatttttcttttgtccatgattctttccctttccatataaaaggacgtgatgcttgttattaggataagccaaggtgccattattccttaaaatgcacagaaaatatcaataatatatcataagattgattttgatggctttgggcatggattgttattttcacaattcaagtgattttgatatgaaccaactctaaggaaactgttaactatgatattccagtctccggaggcttatattctttgtgcttttgtgcaggcacttttgc

SEQ ID NO: 3015 - DNA, 1667 bp, Glycine max
  Intron number 2 from transcript Glyma04g43160.1 (locus Gly ma04g43160) derived from phytozome v7.0 (chr-ID Gm04; pos 48770329 to 48771995)
agtcccgccccagaccagcgctatcatcaccagtaactaattatcctgagttattagatcaatattttctttatctttttttatgatgttgcgatttttaggatatttaaagtttctcgtaatttggaacgtgttgtggttgtgtggtggcgaaaattgaatacatggtgggtgcctttcacgagtttttccttccttaggtagcttttagcctttgggggattacaaaggcttggccacaccgtactgtttttggattaagaaaatactttcttttatcgttgattacataagtgtcacattctatgtactttattttcacttttcagctgatttgtattcacaaatatgaaacaaagttaaaatgagaccgcaattttacaagagtcaatatacaatttcgtccttaagcctggcaacctacgttgatttattccttcaaaacttttgtgtatataacttaattcccgaatctagcaatgccatcacaaatttagtcctcaaatttggtcaattgcatgaaggaagaactgattcattatgaaatttatagatttggagttaaattgtatacattctaactacatatacaatttcatccttaaaagtggcaaaatgtgttgatttggtaattgaaagtttacatgtagataacaatgtaattctggaatctgtctattttatgacaaattttagcactcaaatttggtcaacttcacaaaagaagactcttttgtcttcaagttgacaaatttgagaaataaattattgtatacatgcaaattcttaggtactaaatcaacaaaggttgccacttttgaagaaaactatgtatttactcataatatggtaagggaggcattgagggaaagaggctgatttttaaaggcggctgaaaatgttatcattattaaattattggaaacttcgtacatctcagctccaaaatattggcctcatttcattccttgtattcttcacttaagggttgtctcctttacaagctaagtagtgtctggcttatgtgtttagcacaaatttgagttttttctttttcttttctttaggcatgtattacagttatttagggctttttgtaagttgtagatatagaccctttgaaatttgtaatctatataatctttaggttttattatattctttagttaagttgctggtaaacatactcaaagttaacacgattcatagtggcaacatcgtgacaagatatattatctctgtatcctcaatcaactcagctgttgctgttatgtcctcttagatcttaaattacagtgcaaatgagatcttctctcttccaaaatacaaaaagttccaatggattgagatttaattggggctgattgacaaattagttactagtactgacttggtgagcccatcatatgttgtgacctttggcatttactgttgcactactaaaagtgtagtactgttcattgagaaggaaaagaaatatgggaaaggtaaccaaccaatactattaacttagattaatccagtgaatgaagaattacaaaatttaagagtattgttgtttatgtatattattggctgtcaacctttcattatgaaagcctatcttgttttagtaatattcatcttagatctgctacattcatatttattcctttgtatgcatgcag

SEQ ID NO: 3016 - DNA, 4249 bp, Glycine max
  Intron number 2 from transcript Glyma04g38130.2 (locus Gly ma04g38130) derived from phytozome v7.0 (chr-ID Gm04; pos 44527120 to 44531368)
caaacgttaaaaaaggctacagatctttgattcaggtttgaacgaatcatttgtattgtatgatacgatgatgatgatgatcgtgtctgctccacaaggcttgaaacttaaaattggttttaagcgtaaatgcaatgcccaaaaagttattctagaatactcctacaaactgaaagtgaaatggatactcatgattttgttgttaatatttcgttattaatctatgttgttgatgttaacgaatccgatatctgggtatagattttatctgtgtgggtaaggataaatatataatacaagcagaaaaaggttggtagtgaacaaattctattggcaattaaatcagctaaagacccagtaatcgtcctaatatgaataaacactaattatcctagtcctcaaaacattcacgtaaaagcggcttgtgagcaagtaataatacctctgttgggtgggtcaagcgtctcaggctgagagtgctgttctgaaaacaaggcagaactagaatcgaaccagactgtgctctgtggccagtgaatgttatattaccaggaaagggcacaggggtgagaaagaataatagaagatgatgagggatacattattgaaccacttggttgaataaggttgcatcagtgaagtgtcaatgttccatttggctgtgtgagagaatcaaaattggaattgaagattttcaattttgtcaaagggttccatcacagaggaaacaaaagtcccttgtctctttggtgtatctatcttataataatatgcactgttctggtttttctattctgttgcttggctacttgtaactaaacaattttaaggaagaagttgattggaaggcagaagaaaatgttactttttagtttttactggctaatgtaagctgtcagcatttgctgcaatatttgggtgctttggcactgtaggcaagtgatgatgtgctttacccttccttaacccatcacgtattttgtcctttgctatattcctgtagctaactctccttaagcaaagaatgcttggaatagatggacaaccaaaaactactacaatctcttttttgtatttctctcactgtatagtgtatagtgtatactgccaacaggccacaatatttcctttgttgcttagtgtataaggttatgtctcttctctttctgatcctgagaatgtttattccacgtgtcacaacctgaccggccatgcttttggtaaagaggtttgtactggatcttgttaatgacgaaagcatagtcaagtttcaaagtcattccttcctcatatatattggtttcttttctctttgttagaactaacatgtcttttgtattttgtttttgtacttttaaattactttatgcttgtactgtcctttcttgtcttttctttttctctgccgtatccgtttgttcatagggtgcagtctgcacccctttcttctcttgtactcgacgaccacgtgtcaatatatataaaagtcttttggctgactgttaggactcaagctttaccaaaatagaactaagtctcaagtctcttcaaatatatctgacacttattagcccgttgttattttgttcacttcttcttctccgctgtttataaagagaacacataattgttaacatataaaatacaattgttttctgctattgcaggaagcagaaatgaaattttagttttatttttcttttccatctgttttctgaaactttgagggtctttttttaaaaattttatatgataaaccctttaggttttttttaaatatcaaaacttctgcgtcatgcactgattctattactaaatccatttgtccaatggacaagtacaagtctaatggatcctaatattgtaatattaaaagccttagaatctatacatttcatcaagtttgtcaaaactcattcaaaaatctcatgaaagtttgagaggacatgaaaacatggtgtcctcttgacctaatgcggggacatgatatgtaaattatacctttcataactctcctcggaatagccagttcatggggctgttggaatatcatgggtctgggcagggactataacgaatgcagttatttggagttacaaaggtgtggttggggcacatattgtgttttcgggcttgtgatttttggtggctattgttttggttttgaattccatttatttcttgcaagggtggcttgttttggttttggcgtttcatataacaagtttgtatggtcctggaatatgggtatctaatccttatgaactaactagaagaatgcaatctgtaaatactgcatagggtgtggaaggttttaatcctttattccttttgttctggggagaatagcttctcatcatatttagcaagaacattgggcatattagccgcgggggggtggttatgccacatttttaatgttgggaatttgtaatcttctagtgaacaaaaacaggtagtagtagatgtataatatcgtactataaaaattaaaaaggaccataaagctctttgttcagctggtacctacctggcttggaattgtgacactgattagatatcaaaccaccgaacttaacaatagctaatcatactgtcaataatttcttaatatttgaatgcacaaacaagctactagcaccacatcagaagtgaagtgcaaggagctcgcagaagccaaacatcctaaacatgggaactattttacactttgtgctcgtctggatcactaactcaatggaatattcacttttagcttgaattgtatttcatgttagatggtgttctactttttcattccccactttcttagggacaccaagagggagactagcctctttcatatcctgttatagcactttgtgacctggaacttggtgcttgaaattatgtataaaaggttgaatatattgaattggcagctctatatgttgtgaaagcttgccctgatttgaacagttacttttatttttttacaagatttttttttgctatactgctatagcaatctgatttgtggaaattcaatacagggcatatttttcccacttttctgcttttaaaaccaatgtctaaaactgattttggagaaaaaatagttttaaaatccatgaatttttaaactgtgttttgaattttggggttcaaacacatttttaaaaccatcaattttggtgctcaaacacgtttttaaaattaatgactacctagaaactgtaattctcttgttaaataatctagttaattccctgagggggcatttcttctttccaaaggggatgcaattatgtatgtctttgtttgccaaggaccacggcaaggggaacttgataaatgctattgctctttctcaaacaaaatagaaggctacttacattagtcgatcaggattaagtttgagttaatttgcttttattgcttcttatgctaattttttgctcaatagtaatttatgtactatttgagtatgcttgttatagatttttgctgaagattcaacttgcatttgacctgaaaagtgaatttggactgaatgagcctgtgatatgtagactgaatttttattctttttgggtcatgtattgcgagttctggtcttttggggactgagttcaaaactgaggtagtcaacatatagtgctgccaattcaaactatccatgaatatgaggtagtcactctatctgagtcataggtgatcattctttaactcatgagtaattatcctatattcctattagttaagaagtcaaaatgggtactgtctggtggttacgtttccaaaagtatttatgaataaaggttggatgtgcatacaaagttccctttggagtttggagatataaacttgctcctttaactttttttgcatatttcctacagttatcatattgagtacctagttagtgtatctgaataacgatgccttaatgttcctattttgttttcaattagtagtgcggatgtttgtgctgttcagttctgattgtttcttagtaagttcccattcacattcagtaactgcttttgcatcttcggctttttgcttgcaatcccttctcgagatttttccttcattaatattgtaattataaatgcagttggaatatataaattacgatttaaaacaatacaaaacacaacatacttgagatcatataagtttgtcaacccaaatattagttattgagattaacattatttcatatttcttagttgaaagcagattgaaggggagtaaaacaggaaca

SEQ ID NO: 3017 - DNA, 2857 bp, Glycine max
  Intron number 1 from transcript Glyma16g12160.1 (locus Gly ma16g12160) derived from phytozome v7.0 (chr-ID Gm16; pos 12975009 to 12977865 reverse strand)
gcagtaagttttaagttttgtttctttctttctattttgtaatttttcattttgttatggtttggttgtgtttcatgtgtctgtgattgctgtgaaaattgtggagaagggtaagagaatctaaccttagtttcaatctcctacattattatgttttgtgttttgctgtgttaggtggaggttcttttttccgtcctttacatgttatctcttttgttcatcttctgaagctttgatatggttgaccaaaattagaggctttcgttttttggtcaacgctttgtctctaatcaaccattagcagcttcatctttctgcatcttggaaacatggagcaatccaattaggatcttattatgaagagttttcttttgatatttttgtcagctagtttcataaatcatgctgtgtgttaacagtttggcttagcgttgtgaatactgaatagaggcttgttttggtttcatagatttctgacttattctttgtaaggtgtggatcatgtaacaacacataaaatttctagttggatgtgttgtgacttgttgacttagttttggttgaatcaaaatatgagaaattaagcagctaattgaattgtagctatgagtttgttcttttgctatagaaatgactttgatgaactgcgttgttcacataggaatttgttgcatttgtttcctactgttttcttttttggactataaggaattgattatgcatatgggttttggtttctaaatggtactgaatgttgaacagttaagtgcaaacaacagtcaatagtaaaaatgtcacttccatgattgcaggatggatagcttcctgctgtgtcaaaaatagtcctaattggtataagtaattaagtgttacagcctaattgtatttttctcttaaatttaaatttgagtgatcagttcctcaaagatgttcatgcgctaaatatagagtttggtctacatgttgttactaacaagtgacagttttaatattttaccttacagggatgaaaaaacaggataagctacttgtaaacagctttgtccaatcttttttctgatagttacctggtgtacagaataatgatattttgatagatctcattgaaatatatctgaattctctcaagtttggtgtggtatgttaacaagttccgaatactgatcatatgacttattaagggaattaaaatgtcattaattgtggtttttattgtcgaataccatacgttttttgcttgagtttagtaaaaagagaaagaaaaaaaaaaatttgatttatttagaaagagggaaatacattaaaacttgcgttgatgttgatgattgatgaatactaaattttccacttacagcagttctgtcatttcacatgttcagcatgataaagccccattaacaaaataatgtttgggaataagttgttttttggtacaggaagacatttttcttaagaactaggaacttttgcctttgataattgaaggaaaagcattctccttgagtccttgaacataattttatgacaggctacaaaacatgtttgtataacttatgagtccataaacacttaaattgataaaaaaattacagtgataatgtttcattatttataactaagaaagcaaatttgcacatatacaagtacaagtgacttactttatttgtttgatggtaaattatctcattgttgttcccaacatgtttctcatcacaaagcatttaggtttggagttacttttaatgtgcaaatcaaaccaaggtttttctgacaattttgtactgaaaaggaaaaaattggaaaattttgttaatcagggattacaatttgcagtcaacaatcacttatttcatgttaatacactgctatttatgaagataactatgtagatgtatcatgattaggtaagattactaacctacaaaacttgggaaacttttgcaacaaatttcccaatggtctttctgttgttttttcagcagaaacacatctaaaatcatgttgccaaaatggccgtacatgaaatccaccattacatacacattccttcatgggtggaggaacaccatatggccttggcattgtttttatctagaaagatgcactaatttacactctgtttggacaaggaatgaaggaaatagcattaaaaaaaaaatagaagagaagaaaaacaatgagaaaaggtagatttttaaagaagaaagaaaacttgggttctttctctgcttgtttgattttctatttctctcttgactatttctttcctgctaacatctcaagatccaaaccgagcattagtgtattcatgcactagtgcattgtattggttagaaatataaaattgtcataagttggtcttattgggaagattcttgtgtaaattcttctgatattaagattcagagccacagttttctctttggaagtgattttgttttatgttgaatattgtaatctgttttcaatttgatatattctgtcctagaatcttttggactatgatccttttaatttaggggttgagaagaagaatctttgagattttattcttttattccttgatactggtagatttggtgtgatctatagcagcttccagaaagtgtaacagttatctggtggggctgaaatcattggttatcaattttctaggccctgatctgaaagtagtaaaatgtattcccatatgcaatgaaacaaaagcagcaatactgctgttttttttcctttattgttatttgctttattaatgactctgattcttgattgagttggaataggagatttattaacatttgaaacttgtatttattgaaatcacttttcaatgtgtcaatttggcagcaacgttctc

SEQ ID NO: 3018 - DNA, 2732 bp, Glycine max
  Intron number 1 from transcript Glyma07g15100.1 (locus Gly ma07g15100) derived from phytozome v7.0 (chr-ID Gm07; pos 14945230 to 14947961)
tgcaagttcagcgcggatcgtaactctagatccaggtcagtgtgccagcaaccacttttcttcttgttaaagtatagtagtagtatggtgcattttcttttagagtgcgtttgtacagaggatagaggattttaattgaggaaagtaatttatcaaattttggatgtttttttacgaggaatttaaaattttgtaattttaaaacagaattttaaataactaaaaatctgaaattttaattttcttctaaaaggtgaaaaattgaaattctcttcttacaatcttttccaagaatacgtataactaacatacaaatcatatttttttttcatcctcataattttaaccttttttatccaaacacaaaattttgaaaataaaagaattttaattgaagtatttaaaattcttaaaatttaaaatttctcaaaattcaaaattttaaatttctccatccaaacacactcttagttttgaataactctatctactattctcacttccaagtaataagatcttaatttgtctctcatgcataacaaagtgattggaatttatttttttatactaaaaatgagtcattcagattttcagataaaaattaatctttaacaaaatcataaatattctgtacgtaccctgtaaaaaaagtaactcttacttcctcaatctgccactccatctttttcaccttttattcatttacattcttttttctaaaaaatataatatatgctactttctacgtagtatggcagagagacagaggctacacatctgaaataatgaatttacttttgattcaattttttctttttggaaattcgtgttttgattaaatatcagggcattaaattttgaatttaattaccatgttttgagagagagtgtatagtttttttttttttgtttttttttttacatttaccaaacttatatacaatttctttcattatgcatatatttttggtattgttcttctattgatttgaagttttatttttttattattaaacttttactgtaaaaattcgaattataattggaaaactacacaaaaataattaataaaccccgtgtaagttttgactttttttttatcagtagttttgacttatttacgttctcatttaagcatttattgttatatatagaaaatttgttgatttttataatataacttttaaaattatatttagaatatgaatctttaattttaatttttaattgatgtatttaaaagtatttacattttattccgttcaattaattggtattttattacttaggattgaatatatatgtttttaggcaatgtttagttgtcttaaaaaaggtaatgtttagtttcctttgagtcatttatttttcaaaatgtgttacatatagtactagtcttcgtccttgtacaaaattcgacatctattagtcttttatttatagaataagaacaacataggatgcatgcattttcattaataagagattaaaagaagaagatgtatttctagaaattaaaaataaattttaccttgtttatttgtgactataaaaatataagtatgagctgtgacaagatggtgggaatcttttaaataatatagacagctcatatataatagatgaaatgtaaatttatgtactaattaaataccaaagttttgtgaagcaagaatttattggtgtgggttggcaaagttactggtggggctaatatgtttggttaattatagttatgaaataaggtgaggttagacatgtgggctggcttgtcgatgtcatcctttggagttggtacctaaccatcagcacatgcttagtcaactctcacctcaccttatccagctcacaattccttttcatgacgtcgtgccttagttgttatccttttctgcccattttcatttgcttattgctatcatcaccccccactttgtcctttctgtttctcgtgaaacaaacattcaaaacgccaatggtaccacacgaaagtttcattttcatggctgcaaatccactcttggaaaaaaaaaacttccctccacacttcaatctccacgttcctatctcctgctcacaacattattccaccaatttggtagtttcctgattattcattctttcagttactttgtctttaattagcatttttttttaataaaactttcataagataaaacgtgtaaaatcatcggctgataatctaatttaatttaatcatagagaattagggggaatcaacaaatactcaaaaatgttttgacaagttcaaattaagctatctttgcatgtgctggtatctagctgcataccctggtttttggtcaaacagactggccgagattttcgaaactgtgaaacttaactgccctggattccctcccatgtgctagtatctgcctgcagtcgcaatatctcatatattttattattctaccacgtttgacatttttcattaggtatactaactgaattaatgaatgatttttttttttttttatcatatgctttccaaatatttaattatacctcttatctctgacatactttcattcgcttcacatattcttatacgataggtatttgatactgatattagtggttacttcactgatatgtatctataaagtatccgagtctttaaaaaggttatgaaaattctaatacgactaaatatgagatgatatagaagtatgtgtaaaatagaaacataaaagcattattgttccttg

SEQ ID NO: 3019 - DNA, 2585 bp, Glycine max
  Intron number 1 from transcript Glyma01g39110.1 (locus Gly ma01g39110) derived from phytozome v7.0 (chr-ID Gm01; pos 51086523 to 51089107)
actcgttgccgtcgccatcggaaccttcatcgttggtgagaaactgctctatcactctctccatgttcatttctagtttcaggaatttaccttcactctgcttatagattctggaaacgtctaaacgatgcgtttcgcatcattacggtaacgtgctgctctgaaattcgattcaaataatgaaggagaaccagagttcatgaatgtgtgtgtgacatacgctagatatgccattgcattcgtttccgactcttcgtttgtacttatctttttttttttttaaaaaaaatcttccctgaacccatttcatactttctgatagataaatttaaaaagatttaataattaatttggtctacgtacagtgtacttgttcgcgttttgctattttcactctacacgtcaaaattgtaagttttagcgacgaataaatttagtgcgttttggtctttgctttaaacatcattactgacgttgctgttaacttaagaccgctgcaattttttttttggaggtgtaaaattgtcaattttttttggcgattgttaaactactagaaatttcttccataataaatattttctttttggcagttttacaccccagaagaattttgcggcggtgtttcaactgatggcagggatcaaaatgtattaaatttgcttgtccaggactaaaacttacaatttttacgtgtagggtcaaaacaggaaagtgtggacaaatataaggaccgagttaataatgaaatctttcagaaattaaacaaagtcatgttcctagtttggacagtttctgaacttcataaattgtaaagctattgtctaattgcaatgttgaaggaaaataaaggttataaagataactgcacaatatccaatctcaaactctttgggttgtccaatagtactgttaaattttacacgacaatgaaatagaatgggaggagaaataacaagtttgcacctcaacattggagaatttaaatgagagctttcataaaagtgaagtgcttaaattgattttaacttagaagtccaattcattttatcttcttattttttttccacttatacacaaaaactactgtttggttcagtttaacaggttttgtgtgtgtgtgtgtgtcttataagtgagagagctttcatgatagttaagtgcataagttgttttgaacttataagagaagctcaatttattttacctttttaattatttttaataagtgtttatagagaagtttatctaaacatgaccttagataaaaaaccacagtttgcttcatttaactagttttctcaactcaatggatgtagcttagtttgcaacacacattgagtttgtggagaaagacttgagtttgatcccacagaatacactcttggggaggagagagggttgaggaactttaactgggactaagcctcgaatcaggattagtcttatagccgacccaaaggaccgaagcttgtagggatatcttggggtcccaccagggagctaaaagtccctaattacggtggtggctgaacaaaaagaaaactggttttctcaacttgattcagtttttaaaatctagaccaaagtagtagcttccatcccaatgcacttgcttaatgcttagctgtttttggctttgctaggctctgcattctttctcttttgttgcaaaggaataaaaaactaaagcagagattgcttcacttgattttatgttgacccaaaagcatgtagttatgagcaggatgatgttcacaagcagtatggtttgccctgtctagtaaatgcatcaaagttattcagacagactgttatcctaaattgaacttaatacatggatttgaatacataaatcaaattcttaccagacgagctggtacaattcattcatctaatcatatctaaagcattatcttcagtccttctccttaaagctacctgcggtattctagctctacttgttaactgaatctatccatgctgccagatgatgattccatatgttactctatctaattctaaataaaaaatattgagaatgtttgcatatcgctccttaccttgagttcttgtcacgtgtaattgcatttcttactccttctttactcatagctgcgcttgtttctattttctaaaacagagaacaaacacgtgaaaagcaatgcatcatgagcaaacatgagctattgtcttgatggacgaattagttagtttattcgtaaataaacctaaaacactgatatccaatttgatgcttcaaagtcattgttcactaaaaagtccatccagaataagaaagacctaagtacataactttgtaaaatgtaaaccaccacaatggcaatgcctggtaaacattgcttaacttactcttgaatctttcatttctgaaggaatgtactaataaaatcaatcctccttgttgatccattacatctgagtcattggtttcgtgcactttgcgcttttgtgaatttaccgtgcggagtagatttacctttttttctgctgcattatttcatttttgacgtatttttggtaaggtgttcctaactggtttgtttccatgtgcgcagaatttg

SEQ ID NO: 3020 - DNA, 1143 bp, Glycine max
  Intron number 1 from transcript Glyma08g39340.1 (locus Gly ma08g39340) derived from phytozome v7.0 (chr-ID Gm08; pos 38859282 to 38860424)
acacaaaggtaaactctttttgtaccttattacactcagcaaatggttttgatgtgaattctgctaacaagtttaacatgcaagactaagaattttcagtttatcatagaattcagggaattgcaaaggtatgatgaaatttactaggaaagtaaaggggagaatttttaaagatgttcgtggttataattttttctctctaaaatattatattattcagaattcctatgagaactttagggagtgcacttttagacagcttttaaattactttggtgctcacagactcacagtagtgctcatgtaattacaaaggttacaaataagtatagcggggtcccaattataataatgtagcaattacataaatcttcaaaactataatattgagattacaattataaattttcaaattacaattaaggttattacataagtaatattgggtcttggaaagggtaaggttagaatttttcttttactaacttgaaatgatctgggttcagccaaccaagttaatggtaattggtaaaatcataggccattagggcggtaaagaattttttttcttctgtctcttctgtttgggatgttgcttatgccattaaagaaagtttaccgtgaccatagactaagagcaaaacatgtagtgaaaaatacagaaaagtgaagacacaagaacaagccaaaggggtgggacccacttgaaaaaatgattctcgttacgacagttaagtcacactttctacaacaatttttagtttatagaacacaaaacggtggttagctatgtttttccaaataggacgaacctagtctggaatcagtcatctcagctccacctagtatttaatatagtacttttttttaacctagagaaaatttattttaattttgaaattattaattaggcaaataaattatgttttcaaactcaatacattatatacacacacatgttaaaaaattgtactatcattcaatcaaaaatcatcacaaaacggtggttggtagttggtattgtatttttttattatacttattattgtttttttatggaatttggtactgtacttgaagcatctatagtaattgaaatgcaatgcaggcatttcaagaggcttgggctgaagcttgtaaagt

SEQ ID NO: 3021 - DNA, 2915 bp, Glycine max
  Intron number 1 from transcript Glyma19g19260.1 (locus Gly ma19g19260) derived from phytozome v7.0 (chr-ID Gm19; pos 23258714 to 23261628 reverse strand)
ggcgatcaggtttgaatcttgcaatttctgagatcatttttttttcttctttgaaggtaaatttgatgaactggggttgttaatttgtgttgagagatggtcgcaaataaaacaaatggtttttctaatcccactatttattgaacaatttctacgagattttttgtggtataattggttttgttaatatatttcttttggaaaaatatatttacacagacccttgtacactcaagttttttgttcgcaggaaaaaaaggatgtctggataaatatctttattcgatatatataaactgacataattataatcattagacaagtgaataatgtaccagtgacagtatgtatgatataaattacttgctcccatggtcattgtcatcgtcatcatcatttgttgcttttgttgtacttctcagattaggatcaaaaccattttaactttaatgaaaggattaattgttgccacgactatgctaatgctaaagtgaaaattacttttataagattcaccaaaaataaatgttttaagagtgaaatgccttgtgaattctgtttttgaaaaatcatatttttatttcctattgtgtaacaattattaaaagtgtgcatcaaaattcattaacaattcaaattaagatccctgtattatgtgatatacatgtgtacttactggctcaatcaaaattttaggtgaattctgcagaattgtaagaataactcagaagcggggatgtaaattagacaatagtcaaaacatcaacatcctaatgaagaaacaaaagtaagaaagaacttgtcctcagaagtcaggactgaatgtagggaattggcttctaatagcaaaatcatcctcctgcaaaggttgtagttaactgggtctcttaacttgttgtctggggttgagagagacaatacccattttggtgatctctatgcctcaaaggaatgggtctttgactatcggttgagagatacttttagtgtaaacaaaaaaagaataaaaatcctcccaagtggtttcttccactgatttcccttactgaatgattcactcttgttccacctttcacatagccaagatttgttcctgtataactgaatcctcaaactctacatctgtacccataggcagtgtaggtgttagcgttattggtttatttctaacttctaatggctctcttgagtcagacacatgaaaaatagaatgaattcaagaattctcagaagttgcaacttgtaagaaactgctctggccttggcaatgacttgaaagggaccaaaatatctaggagctaacttctatttatacttctagtcatagtttgttgcttatgaggtctgagttttaagtaagtccattccccaacctcaaaattaagacacatcccttctatgtttatttgtagttttctttcatttgttcttggcctttgtcaaatggaattgcaactgccttagagtttcatctttatccattaagactctagagatcctacctccaatctggactagaataagcactgttactattactatgccttttgattctattttcccaaagctcctgtctcatccatacgtaagttagggtatgtatggagcagacactgattggaccttgtcccaacagaaaatagcattatcaaaagcatcttttgggaggtaatccttcaggtttttcgaacacttcttgaactttattaaaaataacttgcaactcctctacttgagcttgtgacaattcatgttggtcatccctcatcccggttttatctcgcttgcaacactgcaccatatattttgaaaggctatcttggccaattatactctgtaaagatgtatcgacttttgccaaccctgtagttccactccattcccctttagttgcaacttgcaatatcatagttatttagcattgtttccaaaggttgtttagagtttagacagttggtagagggtagtgtaaggcacagaaaatggaattgagagagaggttgaatcaaatcaaacaaaagaagatgagaaaacatctctcagttgtttgtgtttatttttctaaacacttattttgaaaacaatgctaaaaacttatagattttgattggaaaattgatttctgaacagtgaaattgttttagaaaacagttattaaaactaaatgagaagggaataaaacaagtccttgttgtctcccaatttgttgtcacttcccctagtgttcttagccatgcaatgccaagaattgaatccagtcaacaccaaagcatcaatgacacaagaatacatgcccattgccacgtcaaggcggaacactctcatgtagtaaccatcacccaacaccttattcttaaccctcattctatgtcctgcatatgcaaccctaatacagtgatgatgaactttggtgaaattaaattatgggttgcaacaccctccattcaacacaacaatctcctctcacattctcatgtccactctttccttctagaataaactctccatatatttggtccatggcataattaatccagcaccttgccatttcctttttgggcttatcttttccaactctatcaatatcactctgcatctaagctttagttcttcataaggaaaaacacaatatcaattgatacatatgggccaactctatagctgtgaaaaatttgagaaaattgagtgtaacactaaaattattgttgaaaacaaattgttttctttcatcttgaattgaagatgaggagtgtgatttgcatagggaattgtattaataaagcccatctagttaaattcagaatcttgcttctcattgaaaagtctcacgtacatgcttttcaatcaattggtctgaagattaatctcgtattgatgcagaagctgaagactcgtgtcataaaaaaaaactgcaa

SEQ ID NO: 3022 - DNA, 2240 bp, Glycine max
  Intron number 3 from transcript Glyma09g22260.1 (locus Gly ma09g22260) derived from phytozome v7.0 (chr-ID Gm09; pos 27433396 to 27435635)
gagaggtgatgaatctcatttctgtttcaagatactcattattgatgtatgagcatgcttttaaatactaaatactatcataatcattagtatcgtggtgttcaggaaaattgtcagaggaccatttagtttaacataaaagcatatgcttttagaggcctgataatgtctttgataacttgctattcttattcatgaatcatgatatcttgtaacttggacattatagatacttgcaataacactttctatctcttgttgaaaaggggaaaataatgattgtttttcagctccattacatgtactgaaattttaactacaatattttgaggcaatggtggttaggcgggtaaccactatgtcaacctagagttgcataccaaaaaaataaattgactgaaaaattgtttcaattaagggcctaggaatggttctcataattctgatagatataatttcaattatcaacggtgtatgcattccatttgatgtagaactgaagtttaccatttccttgtctttctttaattatgcttggttttattgagttgcatcctagttttttttcccgtaacatttccatttaaagtaaagtttttgatttaagatattctccctgtttaaatatacttttagattttgttaaatcattttgtgactaatatgtgatttagcagtaacaaatttatgtaaaaaaattatgttcagtcttgaaggaaataatgaggattgtcttgtcttaagcatgattttttcattgagatcttatattttatttgaaaatgcttttgatatgtaactgtttgtgacatccatccactagcataggctctttccatcagcatgaattgccaatacttccatgcataaactatagcattgttgataactttagtatgaagtatggttctgtattttagttatttagatgaggtaaaaaactgcgaatctcaaaacagataatttgcaggctattgtgtgccaaacagcctcatgaaagagttagatggtttcacacaagtacttaactttgggaaatataaattggagggacttaattgaagtatactagtgatgctttgctatatggcttcatctgttgtgaattctgtgctttgacaatcttattgtccttaaaatgtataaatttaatgtaatgcttatatgtgtaatgtttgttgtatgaattttcctcttaatatggtataactattgttttttatcttttgattcatttgtgttgtgggcttttgataatcactttttttaatccatgttgcatatgtgattgacaaatgataatattgaatttgacactaatgttcatgagtcattattaattcaaggaatccattatgttaaacttggaagattttctttgctaatattgtcttgttattcttttgatttgatattttattatgttaaatagcatgtcttataaacggtcattcagtttataaccttaattctgttttaattgtaaatgtgttggtgacactcaataggaagcgataaaaaggccttaggagttgatgaaaaaggacatttggagaaaattctcaaatctgaaattattctgagtgaacagaagtgttgatttggaattccaaaatttcatgaacatttcaattctctcatccagagccaaccatgtagcttgttggtggtgatagaaagaaatagatgcataaattatatgtagttgtttatcaaggggatcacactagtaaatctcattgccttgttcccttggtttagaaaatcaacaagttaaatatggtgctcatgatttcatttccgtagcatcatatgcgtaactatttttttggttgcttctgcttttatatacagatagaatattgatggcatttcttcacctgcattcttttcagtatttcattattcttatttatatgatatgatatgattaattctcatggaaagtcaaattaattttctcatatttgtagatttgtccaattacctgttacttgttatttaaattcttctagtttcctgtataatattctgcagtcttattctattttattggaatgtatttcatagtgtatttatttcttttatttgcttaaatgtgcatgaaaggtatgcaactatttttataacatctacttaagctattttacatttaatgagattttatcctgaattggtaaatttgtcactaaatgctgtctataggatattgcatcctctattcagaagggaagtttgga

SEQ ID NO: 3023 - DNA, 5412 bp, Glycine max
  Intron number 3 from transcript Glyma06g40850.1 (locus Gly ma06g40850) derived from phytozome v7.0 (chr-ID Gm06; pos 44059096 to 44064507)
tgtcaagagaggtaccattgtctaatcaggtgagaattgtatatactatctttcattttctatttttttactgttccccatttttctgcaaaattgccgtgaagttttcttattgttcgtttaagcagcattactgatgttgattacaactcttgaaacaataagtcattctagagggaatagaataatgcagatagtctagtaaaagttataggatatagcttaccatttctattttcttaaaaccagcaggtaaataaactgattcatggtttagtggttcaactatggccagattattgtcaaactggaattaatttttaacatatgtgaattttatgctgtttttgacattaatattttttttgtattgacattaaacatgaaattttaatattctaagctactatatttttaaagctataggattaaaaaatactcctttttcctggtctgatgctttcaagatccaaaacatactgctccttaagttgcttttaaagggtggatgaatgaactggcatagaaaacttactgcaaatgcaatattaacgtccatgacccaccctaggtatgtgaccctaatatttgtttaaggttaagttaattgtaggtttctgaactattttagggattttaaataagttcctgtacttttaaaagtctgtaattagatttagaaccctaaacatgtaaattatttctaattggatccttggcaacattttcattagggttcgtttaagtataggaacctaattgaaaatttcaaattattcagggatcaggttgatagtttacttatttaataggttcttgaactaatattttttttaattagatccatctaacaaatatttaacaagaacttggaaaattatttaaagatgcaatccctagatttatacttactacttagagttctaaaatagtaaaatatgccttctcaagttatgggccaataactaattttcccaagcttttgagttatgggagttgggtgtctaagagtccaaataaaaaaattcctaggagtgggtagaaccccctactctccttagagaagaactctatctctaactctagaaaattgttccaaaggtgttgtttatgtggaggagaaaataagtgattctaaagtttctccagaatctcaaaaagaattgctgagtatggaaaatagagtacaaaatggaggaaaatgagaaagggagggaaacgaacagggggtggcaaggaagaaaggagaatgttggggtgcctacatctttgtttatttatttcaataaaatggttcatttcaatatgattgctctctgtatttgtgtttctgttgctaaatcaattgagtttgtacttcaagtacaattcggaatatataggaaaactgtgtaagagaaactgaatcagttcaattgtaacagaattagagcagaacagtgggcctgttaacttgatctgttggttaacaagtgctagcatacagatgaaaaagcacatgctgcacactctttgttttaacaactcacagtatactagttaaagttaaactatcagagctgattagccctagatttagaatcctttttgttagaattagtgatagaatcaattagtagctgattagccttagaatcagcaatcacatttatttgtatttatatggtatcagagctgtgtgatcttgttaagacacaaattcagaaattctatatggtatcaaagcagactagggtttgataccctctgtagtgtgcctttttttttttggggggtgcactgtatccgtatccattgcgagccacttttggctgttgccgccaccccttttctctggtgctacccctggatctggactgcctccttctggcgaccaccatgccacctgcgactctgccattgtgtgcatggctctcatttaccggaaaaaaatgtttttcttctttttaaaaaaaaaattaaaaagaaaaagtgtgaaatgcctttaacctgaccccgatctaatcgaaataaagggttattaaaccctaaagagaacctatgacaaagaagtttccaaattctatgagtaacattttctttgtttttttcagttactttttgttttaaaaatcatttttttattctttaattttttttttggtttatttgattattctttttaatactgaccaaaatctcttcttcctccctctttctatttttttaatttcttttttgttttgttattgtgtttatttttagtactagcacaacggtaaaggctgcgtacaatgaccctccccaatatctttgcatagtgagaagcctccgggcactcgggtacgttagcttttttgttttatcatcatacaactgttatgttttcagatttttttttgcttgcttcctttttctgtttttttaatttcttttttgttttgttattctttaaatttcatgttttcagattttctctcctttattcctatgtagagattgcttcctcgttcttttttatcagatttttgttaatttctttgttgttaaactattgaattctgaatttgtgatcatgtcttcaaaattcaaatatgttttaactttctattttagtgttttaataattctgtactgttgtacattactaatttagtgctgtttttttagtgtaagtagtgctctttgatcattttatttgatcattctgttctgttcaatgttcagccctattctacaattgctgaagcatccacacatgattcaagggccacctctagaatagatcctgttggaaatactgtcatcaacttgatgaaggggatacaaacgcaactgcttgtaattactgtagaaaagccacaaagggagaataacgagagccacaacacttgatggggaagcagggcaatgttgttgcttgcctgaagtgcccaaaggatgtaagtaaagagctttggcgatatgtagcaaataaaaagaacgtaggcactagtgctactgtggcaaatagagattttgatttttctcccattggatatgataaaagtgaagatgagtttgaagactctatcagtgccgtcactgctacaaacaaaaagaatgtcactaaaaaaggggccaatggacatgttttgtaagaatccaaaaaattcaatcaatcataaaaataagttgatgaagcaattagcataagagagtcacgtgacaaggaagtaaaggagaggttgcatcaatatattgttcacctttggtaccaaattgggttgtcgttgaatgaaatcttcactgtatgccaactccctctttaagagtggaactctaatatcatgatacctaagaatatggacaaatgttgtccatattgaccaattgctgcaaccatatcatgaaagctcttcaacttaatgaggttgaatgacaacccaaattggtaccaaatgcaagcaatatattgatgcaccctctcctgtgtttccttgtcacatgactcttattttagtttgcttcatcaacttctttgatgggttgaatatggacaacactgcagttgtggaaaaaggctgaacaatactgacactaaacagacaatgaaaaaagcactaaattagtaatgtacaacactgcagtatattgaaacaaagagttaaagaaagaggaagcaatctctgcagaggaaaaaaattggaaaacatgaaatttaaagaataataaattaaaaaaaccaaagaaagagcaagctaagcaaataaaaaatctgaaaacattacagttatataacaaagaaattttaaaaaatagaggaagtaagaagagatgttggtcagtattaaaaggaatagtaaaagtatctatagaattaaaataatcaatttttaaaacaaaaacgtaactaaaagaactgggaaaatgtttctcaacagagatggcggtcgccgaaaaaggtctccagtgaagtcgttgccagtgtagaagtcaccgtggagggagaggtagcagcagcatcgccccaagagagaatttagaaactgctctgtcgcgggttctcttgagggttcaataaccctttttctttttaaaaaaaaaagctttctgcaattggtgccatgcctggaacggacgccatgcgtctggggtggccatagcacctccaaagtatggtgttttatcaaaatactcccccaccacagtgtcatggctactatttgataacactggttgggattgaggaagaggattagagacttccttctatgtttggattatgtttttatcattttgttattttgaactcttaaatgagtttgttaggtgttggttattatgaactcgtgaaatttgtcatgttttctaggaaaatgcataccattgtcattggtatctactattttttagtatctatatctgctgtgtttttagttttttatttatattactgtatatgtgattttttatatgtctgttttgtcatatatatatatatatatatagatagatagacacacacacacgccttggattctgccatttgctgccatgccatccgtcatatgtatatggtggattttgggctctccaccattaagaacactgctttagggtttatttgagattaccggcttctagattctccctcttcttactcgtaatttatatactttccacacacagctgtttatgttgtcattgccgtcatatagattaaatttcattatttacattttattcatttacacttgtagctcaaggtatcctgacttttggttaaacatttagatttgttgatggttgttaaatgttaggtaatagtattaattcagcaaagatgcatgatttgcactgataacacttaacaagtagttcaaaagatcaatttttaaattttttctattccaaagactttctagagtttgaacctaactcaaccccaaaacttaacttgtagtttccagagttgacactatctctaaccgatgtggaatttggatttttttttccaatacatcccctcatgtccaacaacactcttgggattggtgtgtggataacatggtggacgatctttttaatggatttaggatagactttgataccatcttaaaatgtgggtttggatctaactcaaccccataaagctagctcatatggtgaggattgtctcccacatcttgacactatctctagccgatgtggaacttgggtttttcccagtattcataatcttaaagttgtgataaaactcaagccatgtgcactacatgttacaatctggaatttctatgacgaatgcaacctactgttcttggtgctgatatgcattttggagtgtaattcatctgtaaatatcaatttggccatatatgtacatttaaactatgttatagtttgtgaatttagattttaaccagcttattatactcctgaatcaggttt

SEQ ID NO: 3024 - DNA, 1469 bp, Glycine max
  Intron number 3 from transcript Glyma19g42960.1 (locus Gly ma19g42960) derived from phytozome v7.0 (chr-ID Gm19; pos 48778386 to 48779854 reverse strand)
cctggtcgtacagaggtaacaattcacatatctcatcttgttggcttgtatgatttttcttcattttcctgattttcagtgtcacaagtatcttaggtaattctgtgaatctgtgtcttatagtacgtatgcctttgtgaagatagagaggtgctagttattagaaggatattaatagtaattttgcttcagttatctctatgaaaatgaaatgtggatcaataactaccaaattgcattgtctacaatgtataaatactctgtttatagaaaatgttcctttttaattggtatactaccactggatcttacgtttagttctaatatctcttgcatagtttgtcgaaatttcaaatttgcatggcatagtttgattcaatgatatatccaattgcatttatttgatggttataagaaatcacaaatagattttttctaagtctttacttgcataggtggaacaattgcacaagatatacaaactatgtggttcaccttccgatgagtattggaagaagtcaaatttgcctaatgctaccttgtttaaaccactagagccatacaagagacgcataagagagacatttaaagattttccaccttctgctctacctctcatcgatacacttcttgcaattgatcctgtagaacggaaaactgcctcagatgctttaagaagtgaggtgggcttttcaaaattccagatcttcttgtcattaaaatactggtgtggtactctcagattttgtactgccttgttattggttttattatttcatagtcaaaccactttgattgttctattgatggtgcattgtgcatatggattttccttgatgtctaaaacacacacttgaagctctgttttgtgacatgtatgaataacctgcgtattgagctacatgaagccctataattctcttgatgtggaacctgttttcatcaggctatatgatccttaacaaaaattatagctaatgaatcttttgatcttgacaataaatcttctgagtgcttgtctcttcagcttcttgttttggatatcttatcctaaccatgtgcttgaatgtaataacctgctactataagaaaatatttcattaaatctggaatattttctagagttgatattcctctcttaagctgtgtctatcttaaccataagaatcctatcttggagtagattcaacaatttgctttatcgtgttttcttttggaattaaacttaaattaaattcctgcatggaatggatgacttgtcttagatcttcatgataaagtatgtagatggtctaaaatgaatgtaatataggtatatatgcataatagctaagaattgataaagtgaaattaccttaaatctgatttaggtgttattgttgagttttgataatctttttaaaatcaaactcatacatttgccttgtttgtctgctcctacatcctgcagttctttaccacagaacctt

SEQ ID NO: 3025 - DNA, 2987 bp, Glycine max
  Intron number 2 from transcript Glyma18g16490.1 (locus Gly ma18g16490) derived from phytozome v7.0 (chr-ID Gm18; pos 17148095 to 17151081)
gaaccatagcttttgcatcctttggtaccctttcggtaaggagttatctctgtggctgcctcagtcatattttacggttacattttcagtataaaagaaaaatcaattgaacaatttttttaagataaatttaatagaacttgctaattacagtcacttgtgttttgtaggtttaatactttaactgtaagagaaagagaaatacatgtgcactaaatctataataaaacaacgaataataaacatattcacatttcctgaactaatttgtcaatattgtttaaatatatctctaattgaaaagtaacgttttaaaaaaattaaaatcattttaaaaaaactataaaaatataattttcacgttttttttaagttataaaaactaactttaaaagaaaaactaaaaacaaacatatattttaaaaatttaattaaagaaaatattagattattagacttttaatattatattgtggtcatgtcttctatttggtcttgtttattatcttttcaggaatttgatcccactaattgttttttacacaattttagtttatctaccaatttgacacttaatatttaacagaaattctaacgtaacacaacactacacatccacatcggtgcatctatttcaatactctatagttatatcgacatttctatgttacattttcttttttgtatgtttgtattgggatcgaatctatcatacgaactgagaattccgattctattacatactataagagtcaagttaatgaataaactaattaaaagtgagcaattaaaataaggaaaaaatttgatacaatttttgtagctgttatttatgctatttttcaatcgaaaattgagttttacaatttgcataactctttaatgcaaatttctattacacatatcattaaggtaaaattaaacttcatttttgaatagataacaatacaaaaagtacagtatatgaatttatccttaaattaaaaggaaaaaaatgaagagaccaaatgaaaaataaaataaaattcaattgtaagaaaataaaaagtgtaacgaaacctatctatatataataacatattcatcatcgactaataattaggtaatttactcaaattgatcatgtaaataaatttctccagcagatgatcatgcatggttaccaatcggctgccactgagaaaagaaaacacccatgagctactgtgttagcattaaatgtttacatgtgacatgatttcgctatatcggtatcctactgttttcaactcaagcagtcggacttggacataatacgtcggtggaattaatagcaggtggtagatgctaaatatataatacaatgatccgaaattatttattatatttaatatttctattttttaaagttcataattaattttattatctaaattttttaaaagcatctaatattgtatacaatcgattttatttcttttatattttatttttaatatatgcgcatctttaaaaaaacatcacaagatattaaaggaaaggtatttttgttgtttcaattttgattcaatttaaattaaatatattaaatttgatttttttatgatttgacttaatcaattatttaagtttcgtttttattcttttcagatacaaataaaatatatagtaacatacataaattttataaaatatcttataactataataaaaaattatcaaaattattaaatctcatcttaagagacaatataattctataaagacctagttgctttaattcaattagtttaacagttaatgaattgttataaaaaatttaatactaaaatttgactcctgtttttcaaaaagagagagaaaaggaggaaaaatcactgtcgattcactgtccacactaacacggccaagtggagaatgcatatgcattagtcaagtgtttacatatttcttcaaataataacgaaaagttaatttaaagacaagaatgttgcaatttttattttctaaagagatagataatggtcttgaaaaagacacaatccagattgaagatgaaattgacagaattaaatagagccgaccacttcaatcccatcaagaggaagaaaaaaaatactaaattttcaattgtagaatatatacagctctactaacctgtgattttcttcaaatagtaagcatgcacctattttgtcttctatttgaatttctttcactgtatttgttttctatatttctttatttattttttattacattaattgtcatatttatcaatttctttctttttttctctcaatttcaattacttctacttatatatcccaaaaaatagatgtacaagtatcaacaccttggtctttatttctttttggcgttagatctcctccaatactgaaaatttcagataaaaaagaggtacacacaaaatggtagtgttaacctttttttagcatttaaccacttattgtgtatctctcattaaaaaatttcaatgctgaaaaagactcacactctttatttatgttattttgacataaaaactattttctctttaagaaattagatagaatgcattaataatattttttacagtattattttatcataaataattatatatgataatagagatgaatttgcattgataagtttgagtgtaatggttctcacgatttttaaattttttcttaatatgatatatacatgtataattataagttatttccataatttgaaatgcagggagaagtaattattttacaatataagtattttttttctataaatctatatacacatgaatatttttttctcaacttaaaacttttgaatcaatgattgcaagataagattgttgatttcataataatcgccataaaagatatatggttttcaattgatagatatgtgaaaatacatatgaaaattaagctatactttataattaaattttctattgtcaaatagggtttgatcgtggtgagtttaacatcgtggttacc

SEQ ID NO: 3026 - DNA, 346 bp, Glycine max
  Intron number 5 from transcript Glyma19g31090.1 (locus Gly ma19g31090) derived from phytozome v7.0 (chr-ID Gm19; pos 38833152 to 38833497 reverse strand)
gacaaaagagaatttaccaaggcagtgattgcaaggtatggtaaatccggtttactttgaaagaatgttttcgtttcattttctgttttcatacaaacttgtcaccttctacagaaaacaattgaaaaaaatctttttttataagcaaaattgaataatattcaagtccaatttggtgcacaaccatttattttgttatctctatttcctatacaaatcttcaaaaacaagaaacaaattgaaaataaggtgacagttttataattacagatgaaaacatagaatgctttcttaatatcttctttcttatacctgactctgatttatttgtgtacagttttatttt

SEQ ID NO: 3027 - DNA, 1414 bp, Glycine max
  Intron number 3 from transcript Glyma05g27070.1 (locus Gly ma05g27070) derived from phytozome v7.0 (chr-ID Gm05; pos 32965950 to 32967363 reverse strand)
tttcgcggcggttggcgaagacgcggaattggacggtaggattgataatgattatgatgatgacaaagtttatgtgatcgcttgattgatgtgcaatttgattttgtttgagcattcaatgatttttctttgtgttttattggacttggattcttgttttacctgatggattgatgttgttaggtttgaggaatttcatggtcggaaaagagaaaataaagattcaatggtctgaaattgatattggcttgctgatgtcagaagatgtgatacaaacttttcaaattcaacaacatttactgtcagaaatccggctaaataaatgtgaaactaatttggattctcttttgttttttccctcttattggtgttcagttttgtgctatttctgaattttgataatgatttgtggcatgtggcattgatgacaccaaatggtgaaaggaaaattttatgaaggattgaattcaaatctattttgatggaggatgcaaaaatggatccaattgtttgataattcctgttcttattcatgttcttattactatttactactaaaggatgcattttccttacattttgttaaatttgttatgcactggtttagatagccatctcttaaaagtttattgtatgccaacaaattgtattcacttatgccaaacatgttatgaggtttttgttgtctgtttttctcaattctcataaattattagaggatcaagcagtgatctgatgtccagccttcctttttattcttgtgccactattggaccctatgtagaattcctaaagtggtgtttggtaattttggtgtgttttctgatttcattttctgttgatatgctttcaattaaaaaaatgccaccttatttttttcctgttattaaacttttgtgaagggaatcttgaaaaacatttttttgattcccctagtagttaatttctagattcttccttgtgttggagggaatagggttccatgaaacaaaatcaccattatttttttctttaaaaattcttggttaaaaagtaaaaacatggtagtttctcattcatgtaacagaattcctgaataccaacattgtgttggttattgcttaagatgttttcattatttatatgccaactgaactgagcatctaatattactcatgattcctcaggtcatattgtctaaggattatatataaagaatttatgcctagtcctctgcaatgtctcaatttaatgagtctcaactattttattataaaatgtattttagcatcagttgctagctcaatttcccttgtctagcccataattgtataatgtgtatatgtagatgtagataacaacatatgcttttgtttcactaccctgcatcttgttcacaggtggcattgaaaacactgatagtcatccataggtt

SEQ ID NO: 3028 - DNA, 2876 bp, Glycine max
  Intron number 1 from transcript Glyma05g25640.1 (locus Gly ma05g25640) derived from phytozome v7.0 (chr-ID Gm05; pos 31693084 to 31695959)
cgaaggaataagtttatcctataactctctttcaggtaatgtatttaaacattttttatggggcatctacaaataatgactgtagttttcacttcattctttgtccattctgtattggttcctcaaacattgcaacttgcaacttgcaacatgcatgctaggttagtggatgaattttagttccaagatcctccaaaagccagcagatgacagctctgtccttacttagtatattatcttattgctctctcaaaaatggctttttacaccaatagcaacaaattttcaatctctaatattataggttatttttgcatattattttttttcttctatttcttttttatttttttcatttttgtatcatctcatttatcactttttattatttgtttatttaaattttctttgtatttctaagttcgtttgacccatacactctaaaaaagaaaaaaaaaatagacacttatggtcatcattaatatttatataacatataaataagtattattaattttttcttatatattaaaaaattaaaattcatgctgtataaaaataataaaaattaattgaaatcatgaacacataataatcatgaactacccaataatttatccttaaaaatgagatgtatgtttaccattttcctattatttattcatggtgagtctagcctccaaaatgacggatcttattaatgacagagtttcataggagtggaggcagccctagcctccaaaaattttgtcttttgccttcaatataacaacaaaaccttatatcttattagataaagctagttacatattaatcacacaacatcattcatgatggttaaaaattttttggacaagatccgccactaatctcgatcatggtgcttccttgcaacatgaagtcatgggttcaatttttaaaagaaaaaaattatttgattgcgatttgcgaagtaacattgcatggtacattcatctactctgcctagaccctattaaatggaaggtcttggtcccataatttggtttggttttgttttcgcacgttctctctacccttgttttttatccaagagtcaattgctttaacaatttatagtatatggaactttctctctacatgcatcaatgactttttttttctcactcgttttgtttgcgaaaataaaggaggcattccaagtgagattggtgaacttccacaattagaaataatgtatcttggagataatccacttggtggctccataccatcaacaatcttcaataactcaatgctgcaagatattgaacttggctccagcaatttatctggaagtcttccatcaaatttgtgccaaggacttccaaatatccaaatactttacttaggtttcaaccagttatcgggtaaattgccatatatgtggaatgagtgcaaagtgttgacagatgtggaattatcacagaacaggttcggcagaggaagcatacctgctgacattggaaacttacctgtgctaaactccatttatcttgatgagaacaacttggaaggtatggggatccttgtatatatcttcatttaattctttgctttacaattatatataatagaagacatatgcattcaatattattaagtttcaatcctgttaataaaaatcccacatattgaatggtaaaagtctcactctttattattaactaaaaatttattagaaattataaaattgtagaaatgttactttaatttttcttaatgaatctcactaatagctttatagttttaataattttagtcaatagtgcgacagaaataattaattaaaaatgttactaatactcctcttttattcaatctaataattatattttccctattttttctttgtaattttacattttcagataaattaaagagtagatatattttttattttctaaaaaatatcaaacatgtgagcagaggcgaagcttcttacaaaaatattttatatatgcatatataattattaaaaaatatataaataattttagttgatattaataatattttttataatttttttaaaatattctttaaatttatttattattcaattatttataatattttaagtattttaaaaacatatataaatactaataaagttgtttatttttcaattatcaatgattttaagtcattgaaagatcatgaagacttttgatttgcaaatttttagtcattgaatgatcacacaattttaattttcaacttaacttttagttattgaaagagcataaagaagataatcttaagctatttcctttattataattattattatgatccatgtagtcgaccccacctagtgggataaggcgttgttgtattattattatcatagataattttatgtttcttttacggttagataattttatgttaatattacacttttaagtttttgtttttttataacttcaactcttgttggtttattaacacatatacattaactatttcactaattaattgatttttttataatattaaactatttttttcaattttcaaacatatttttctatgacttttatatcctcatgttggtataatatgaacctgaagatttttcttgtgaacttttatgcaatttttttttaaaaaaaaatgtgattcttttagaaaaatttccacaaattttgctataaccgtccactttatttgaaccagccaatcctaaaagataatgcattttgaaatttattatgacatataaaaatcaagacaaatttgttcaataagacgtcaacaattatttaacagaatactatttctatcaagcattctaatttgatccatataattttataggagaaatcccattatctctttttaacatatcttcc

SEQ ID NO: 3029 - DNA, 1542 bp, Glycine max
  Intron number 9 from transcript Glyma16g07810.1 (locus Gly ma16g07810) derived from phytozome v7.0 (chr-ID Gm16; pos 7072190 to 7073731 reverse strand)
aggtattccctattttctactacaatatgattctgctaattttatttatttatttttaattctaaaaggatactttaaaatgagacattttcgttaaactgagagagaacagaagagagaaaatcaaagaagaaagaaactgatattattgatctgtaaaagttagttagagttagttacaattgaggtatatatagacctctgcactgctgaactaaccataactgattctaactaatcaacagaatctaactgcctgatcctagtgaggtgcagttagaagagactaacagccctgtactgctgactaacattagatgggtgttgctagcaaaagccaacagcccttacaatagctatctaacattagatgggtgctgttagcaacagctaacagcccttacaatcattatccaaaactgtttaaaaacctttcttaacacttctgcatgttatcttctcttgttcctgtgctgattgtcactcttccaatcttcgcactccagttaccatcgactggggattccaattccagctaccaccatttggtaatcaatttattgttgagctgtcttacttttatggatttaactcctaatttcaaaagataaaatatggacttataacttgatttaaagattaatgaattagattttagtagattcatatttaatataaatgtgcatgtgttttatcagaatctgaagctttgacttaatccttggtttcaactccacacattatctttggattttaaaatagccaaaatctcaatattattgacttaattcctgtaaaatgtttgctattgacaatgtgttcatactgtactgtcctttctgttctgagtgtactgttgcttgcttatgtattatacttctgattttatgcccctaatccttatacactccctctaatcagttaactaattcataagaattaaggataacattaaatatgtccaatatttatattatttttttcaaaattacccttaacattaatgaaacgcataaaaacattaatggatattgttctaattttttgttgatacaatctttcactgccatgattttaattaagggtatttatgtaaaaaatagttaatgctaaatatattttagaatgtttcttataaaaaggaacaaaactttggtcttaaaagaggatacggagggagcataaataatgtcatgagcataaagacatgaatgaaacgttgaaacagtagcatgatgtcagctgaaaaaggttttatatatttatttactgatatatttcaggcttaaagagggtctcgtttttagttttaatgttatataaaaaaaatcgttttaatctctgcatttcaacaaaaatatggtgtcactcatcaaggattaaaagtacctaacttttaattttaagacctaaaaataaatgaaattttaataaaagattaaaagaaaaagtcatattttaaccaatattttatattttgtcaatgtaatagcgcaaaatttttgcgatgatgagcctctggttttcttccctgcaggtggc

SEQ ID NO: 3030 - DNA, 6749 bp, Glycine max
  Intron number 1 from transcript Glyma08g25840.1 (locus Gly ma08g25840) derived from phytozome v7.0 (chr-ID Gm08; pos 20256659 to 20263407 reverse strand)
gggagtaagttttcattttaaaaatgggaggttatatgacatttgaagattttgcatcattgaaatcagaatcaatttcttgtttgttggtttgatccctcccatgaagaggattagattttatcccgtgttcctaaggcttctaacagaaagtggagggtttggtggatagcagcaatagtttctatttggtattataggaacgacatgatttttaacaatcaacagttctctatttcaaagctggtggatatcgctatttttagaacttggtcctggttgaggggatgggaaaagggctttgctgttccttttcaacaatggtcctcatccatgtctcttgccttcacctagtaagggaagggtggctggatcttgtattgtttcctgttggggaggtttttgtaggctttattcattagcctaagcctatggcttacttttgtatctccgtagtacctctggtactattctattataatatatgatatttttggccgttcaaaaaaaaaaaaatataactgtcatataggttgaaattttattgtgacacctaattcaggattaacaaatttttggtgtgacacagtgatatggccacaaattaggattatcatatctaaattttaaattatttagtttatctttttttatcttttcctctcttataagattttatatcagaattatgattttagattagatttttattttatttattaggataattagattagatctttttagttaggattctctttatttatattttatcaatcttagaacatgtgtttgaacctaattcaaccccaaaaggtaactcatagggtgaatgtcgctctcaacttatatactctatcttgacactatctctagccaatttgagacttgggtttttcccaataattaactaggatcaattaggataattgttagagtagaaaatactgaatattattcattatcaactgtgcagggattcctcctttttataaaggagaattacatttggtgatttcctaaaatatggaaactaaatcctaaattagggaaataaaatataacaataatgaattacctaagataggctaaattaaaaaaaggaaacacaataattactagttaaacagggaaacaaaataagtacagaatcaaacttatttacaggaatatttcagggaatcaaatagagattttatcctctttggcaccctgtcaacattccccatcaagctagcttgaagatatctttcacagacagcttgctggttatgttgttgaagagtttcttgggtaatccttttgttaagatgtctgctgattggtctggagtgggagcataagtaatacagatctgttccctttctatcttctctctgataaagtgtttgtcatcttctacatgcttggtcctatcatgcaggactgggttgtgtgcaatagatattgcagacttgttgtcacaatacaattttattggtggggaattgaaaaccttcaattcttgtagaattttttcctcccacaacacctcacaaatgccatgagccactgctctaaactgagcttctgcactgcttcttgccacaacactttttttcttctctagctaaccaaatttcctccaacaaaggggcaatagcctgatgttgatcttcagtctgttatacttccagcctaatctgcatcagcgtaggcttctacctgaaggtgcccacatgtttatagagtagccccttcccaagtgaccccttcaagtatcttaggatcccgaaagctgccttcagatgttcaggtcctggtgcatgcataaacttacttaccatgcttacagcaaaagttatatcaggatgcatgtgggatagatatagtcttcccaccaattgctgatatcttcctttgtccaccatatcctcagtttcagctggttgcagttttatgttgggcaccattggtgtttcagcagctttgcatccaagtaatcctgtttcttttaaaagatccagaatatacttttgctggttcataaaaatactttccttagatcttgcaaattcaattccaaggaagtattttaatgggccaagctccttgatttcaaaagctttggcaagtttctcctgcaaacctttgaactccaagctatcatcacctatgaggataatatcatccacatatacaattaaaatagcaatcttattgtttgttgaatgttaatagaacagtgtgtgatcagcttggctttggatataaccaagcccttttaccacagttccaaactgctcaaaccatgttcttggagattgcttcagcccatatagtgacttctttaatctacacaccttatttcttccaaattctcttcctcaaatctggggggaagactcataaacagttcttcctcaagttctccattcaaaaaaacattttttatatccagttgatgtaaaggccaattgagattggcagcaagggatagaagaatccatataaaattaagtttagcaaccggaacaaaagtctcctgataatttactccttatgtttgggtaaatccctttgctactaatctagccttgtacctttttacacttccatctgcgttgcacttaatggtaaaaacccacttacacccgacttgtgttttttttatcatggagtaggtttacaatctcccaagttccattcttcttaagtgcatccaactcctctaagactgctaatttctcgttaggatcatctagtgcttcctcaatgtttctaggcacaaacaaatttgtaattttagaggtgaaggcttggtgattttgtaaaaggttttggtaggaaacatttggaaatgagatggtttgtgctgggtttgactggtttttgggtgcaggctctagttcctttcttaagggctatgggcaaattagtattagaagtgggaatttcagtattacctggaagttcttgaggtatttctgctaggccatcttctgggatttctgcaatggctcatgagaagacattctatttatgagataggctgctgttaagacagcatccccccataagtactttggaacattactttcaacatgatggcacccgctacttcaaggagatgtttattttttcttttagcgttgccattttgttgaggagtatttgggcatgtcaattgatgttgaatttattttgaagaaattcattgagactcgttttaaaatattcagtgctgttgtcacttctcacaatggagatttttgtgtcaaattgtgtttctaccatttgtgaaaaatatttaaatatattagaaacatcagatttttcgtgcataaggtagtccaacacatttgagtgtgatcatcggtaaaggttacaaaccaccttttccaaattgggttgtaatttatgatggaccccatacatcactatgggtcaaatgaaaaggtttagatacataagactgagaggagtaaggagttctatgacttttggcaagaacacaactttaacattcaaaaaaagaacaatcaacgtttttcaataaatttggaaacaaatacctaagatattgaaagctaggatgtcctagtctactatgccaaagcattatttggtcccttacagaggtggaactaataccactaagaccttgagctactttattcccgaaagcatcctcgaaatagtagagaccatccatcattttagcactgccaatcatcttcccggaagtctgatcctgaaaagtattgttagtgttaaaaaacttcacattacaattagaatccttgcaaattttactaacagagagaaggttacaggataattttggtacatgtagcacattttttaagtcaatgtgtttagataacatactactcccttctcctgcaattgctgaaaaaactaccatctgcaattctaatctttttatttctagaacaaggagaataagttttaattaaagaagaaaggctggtcatgtgatcagaagtacctgaatcaatgatccatgatgcacacatatttgaggtgcagataagagagttggaggtactaaaattacctgtttgtgccatagaaccactaggaatactagataatgtactagattttaacaaccttatgagttcatcaacttgttccttacacaaggaggtcttttttgcctcatgagctgtaggaccagatttaggcccaaattttttactgccctttagatgtgctggactgccactaattttccaacatgtttcttaggtgtgatgctgtttgttgcagtagtcacaccagagattggaggagctcttccgaatggttgaactcttacaagtagtggcttctacagccaaagcattggtctcaggacgtgaatccactttcatctttcccatcatcacactcctgcgagtttcctctcttctactgcaaaaatttcacctaatggaggcaaagttgctctcccaatgattctaccatgaacttcatctagctcctcattgagaccagcaagaaactgaattgctcttccttcttccactgtctgctgatggtgtttggcatcctcggctgacttccacttgtaagtgttgaagtagtggaagtatcttgtcacattgtcacctccttgccggatttctctagcttgtaaggtgagttcataaatctgagatttattcccaagatccaaatacatttctatgacactatcccacaattctttggctgtggaatagcacatataattactactgatgtcttcctcttccacggatatacatctggacagattggaaccattggaaatagtttgacccattaagtcaaaaagaggtgatttgaacagaatgagaatcaccccaaaaacaaccctctgctcctgttttgcaggttgggaattttgatcatcattggtgactgaggaaccgtcagccatggctacatattagagtggtgaggagatcatgctctgataccaagtagaaaatacgaaatattattcattatcaactgtgcagggattcctcctttttataaaggagaattacattaggtgatttcctaaaatatggaaactaaatcctaattaaggaaataaaatataacaataatgaattacctaaaataggctaaattaaaaaaggaaatataataattacttgttaaacagggaaacaaaataagtacagaatcaaacttatttatagaaatatttcagggaatccaatagagattttatcctcttttgataccctgtcaacagttagttatgttcttatcaattaggattctctttatttttattttatcaattaggacaattgttaggatatctttgtagcctatataaagggcagacttgattgaaatttagtcaatgagaaatattctgaaaaacttgtgttagtttaggatgggctctgtcaaggacgagtctgctactctgcttattgctttcactatagattgaaggaagtcttttgtgtctagacccgtgacacgatcctatgctaaggcccataacacacgtagatagaggcataaaaaaactgatttatgagttataacagacaacaagtcagcttttctaacataaataataggcttaaatatgtttagtcccttaaatttggggcatttttggttttggtccgtcaaataaaaaattgttctttttagtccctcaaattcgtgaaatgcaatttttagtccctcaacttcatgactgaaaatttgctttttttagttcctcaaatttcctccgagggacctaaaacaacattatgtgaatttgagggactaaaaagagaaatttttaaattgggggaccaaaatctaaagtgactcaatgggactaaaaacatatttaagcctaaataatacctaccaattcaagacaaacctgaaaactagaatcttaggtaccctctatacatgcctgatgtcctgaggaagccgcatgatcaaaaactttcatggaagcatgcatgtgttagttttcttcctttaccatagctgattaccactgaagataattaacattggactatgtatacttctgatatctagggttatgttcagcaaaacgaaattatggtcatacttgcagggaaaatggaagggtttatgtctgtacaacattatgactgcagtgatagctagggtagtgtcctataattgagtgtgtcttgtcttctgtcgaagattttttaatggattttcttgtattctcaagtttattttgtttttctttgttaaacctagaagatagaacttggtattttcttatatcgtgaggattgtcatatgatctgtttggtttattttattttaaatggtatttcatatgtagttgttgctataagttactcctggagattgttatgaaccttagcgtaggatagggttacgggcctagacatgaaagacttctttcgacctatagtgagagcaagaagcagactcacccttgactgaggccctcttaaactaacacgttttagttagagtgagaagcagactcatccttaaccgagcccctcctaaaataacacaagttttctgaatattttcttcttgattaaatttcaattcattctgccatttaaataggctacaaagatatcctaacaattatcctatatattaagaattttttcatatatatatttatatatattttttttcttgttagttatctctattttcatctattattaggaaggaaaaaactggtgtagaccgtgtatccctca

SEQ ID NO: 3031 - DNA, 5686 bp, Glycine max
  Intron number 11 from transcript Glyma19g35730.1 (locus Gl yma19g35730) derived from phytozome v7.0 (chr-ID Gm19; pos 43218426 to 43224111 reverse strand)
tccaaatccaagataaaacgacggactcctgcttggtaagatttcagaattccttaatctaaagtttacgttttgtcacccacaaagggcacacatcgtttgaaacattaattagatgattgtttattttttatttccactgttgccgttgttagttgtttatttctatgctttgctatggcatggtcaattgagagcattacccgtttgaatccaaaccacattaattgagcattttcatatgctcaggtcacttttaatgatgctacttgcatttgtttagaaactggtggcgtatgcctttgaaaaggactccctcgtgacgtataatttgttttgttgtttaatgatataatccaacgagcattttatattgagtgatgttatgatgggtaatgtcctttgtatttaagatcgaaggggagtctccgtgaagaaagcgataaagtgagagagagaaagttaactgaatatattctgcttgctttatttcatatcaaagggagtatttaaagctaatgattagtgctgtctagaatattctagcatatgcatggtatgtgctacgtgacaaatacggttactaacagcaagcaatattaatattcctaatgtaatattcattcatgctagttaagatatcatgtaatccttccagaagcttggtttatggatattcctcttgggccgaagctggtgatctgcatgatctgcatgatctgcatcgtggttcgtatcaatacccccgtctggaaaatgcaccttgtcctcaaggtggaaagtagcgttcaatgtatcccatgtttcccaagtggtttcttcctggggtaacccgtgccactggaccaaaaccagtaatgaaggtggagctttggtgtcatcccattttgactcgaggatgcgtaggggtacgatcaatgggtgattgtctttggcgttaggtggtagagggtctggtacgtggttgatagggccatggtgaggcttgaggagggagcagtggaaaacatcatggattttggaggaagggggaagggccaatcgataagctactgtgcctacgggttcaacgatcgggaagggaccatagtagcgcttcgaaagtttgttgaaagtggtcccggatatggaagtttggcgatatgggcgtagtttgaggtaaacccactcaccaaccttgtacgtgacgtcgcagcgcttgtgatctgcctgtgtcttcatgtgtagctgggccttgcgaaggcgcgtggtgagaagatcccagagttcctgacgtgtagaaagctcgtggtcaactactttgacctgagacgtccctggaacataggtactgattgaaggcggtggtttcccataggtagcttcgaagggtgtcatgcctgtggaggaatggacggacgtattatagcaccattctgcaagggaaaggtacattaaccaccgaggagtgtcatggacaaagcaacgtagatactgctccaacgtgcgattgagaacttcggtctgcccgtcggttttaggatgatacgaagtgctcatgcatagttgtgtgcctgcaatggtgaagagttcgcgccaaaatcgtccaatgaagatgggatcacggtccgagatgaggctgcggggaaaaccgtggagtttgcagaccatattgaggaagagagtggcaaccttatgggcggaataagctggcttcagggcgccaaagtgagcccctttggtgaaacgatcgaccacaacaaggatagtggtgtaaccatgcgaagggggaaggctcgtgataaagtcaagagttagatcttcccatggagaggagggtatcgggattggttggagtaaacctcctgggcgtttgggctcgtatttaataagctggcacgtggtacatttgtgcacaaagtctcgaacgtcatggcgcatgttgggctaatgaaagctagcttgaagacgatgaagggtcttagcgaaacccatacgcccaccaagtggggaggtgtggaactccgagatgagggagtgacgaaaggggtgatgttggtcaaggcatatcctgttctgaaaatataggagtccatcatggaacctataatcaatctgtgagtcaagcaaagatgtcaactgctgaatgtggtcctggaatgaagtgttggagtgaacgtaatcgcgaatggcctcaaggaacatggggtgtggcatggagaggatgaggtattggcgctggctgtagtgaggaagacgcgacagtgcatcagcaaccacgttcgtttttccagatttgtattgaatggagtagtcatagccaagatgcttggaaaggtaaacctgctgttcgggtgtttgaatcacctgattcatgagctcgtgcaagctcttatggtcggtaagaatgataaatggatgccctaacagatactggcgccattttcgaactgcagtggtgatggcatggagctccctgatatatgtggaggcatgttgtaaccgggggtagaagagcttgctaaaataagccaggggatgaccccattgcatgagaacagcccccatcacaatccctgaagcatcggtttcaagtgtgaatggtaacgaaaaatccaggagggccaagacaggagcctgagtcatggcttgcttgagtccctcgaaagctgattgagcaccttcgtcccaatggaagttgtccttctgtaacagggtggttaaaggagaggcgatggaagcatagcctcggataaactttcgataaaaccttgttaaacctaaaaacccgcgtaaggaatgggtattggtgagtgtgcgacttcgattttggcaggatcaggatcgacgccggcatgagatacaatgtggcccaaatactcgagctgttgctgggcaaataaacacttcgtggccttgaggaagaattgaccctgagtgagacaatcaaacacttgtgttaaatgagtgaggtgatcctcgaaggatgggctatacacgaggatgtcgtcaaagaaaacagtgacgaagtggcagaggaaggtttcagaagctcgttcatggtggcttggaaggtcgacggcgcgttgcacaagccgaacgacatgaccttgtattcataatgacctagatggtgcgaaaagcggtcttcagtgtgtcctgtggcgccattaagatctggtggaagccctgccggagatccagtttggaaaaacaggtggcgatgcctagttcatcgaggagctcatcgatggtggggatagggaagcagtccttcttcttcaccagcagcaccagtgaggagaacggggctatggctgagggtgatgaggccggtcgacagaagttcattcacctgacgttcaatctctgctttctgaaaataagggtagcggtacaggcttatgttcatgaggtctgagttggggaggaggtgaattttgtgggaaattggatgcgggggtggtagggatgtgggggtttggaataggtgggaatatcggagaagaaggtggtggattgcggggagagggtgttttaagggagtgtcggggctgggcggggaggtggggctcagggaaatatggaagaaggccgaggttgagtgggtctgaatgaggcggcggagttgcaaggaggaggtgtccgcgggggtggttggtgcatcaacgtggagggtgattggacggccgtcgaggtggaattgcatggtcagcgaggcgtaatcagtgacaacaggtccgagttgtatgagccactgaatgcccaagacgatgtcagcaccgttgatgggaaggacgtgaaggtccacggtgaacgtcgtgccctgaaggaggatgggagcttggtagcatacatgggtgcaaggaatgacggtgtcgttaccgacagtaacctggaggggaagggtgggggaggagggaagacggagatgctaggccacccgtgattgcacgaaattatgggtgctgtcgccgtcaatgagcacagtcaccggttggtggttgatagacccgtaaaggcgaagggcctccggggaagaggtcccggagagggcgttgaagctgatgagggcagggccagggtccggtggagggtgaaggggtggtttggggttgtggttgggtggagggttgttatcagggtcatcgtcttccgctatcagcatgtaaaatcgagcacgacaccggtgactgagactccatttgtcgtcgtaactatagcagagttcgagttcacgtttgcgggccaactcgtcaggtgtgaagcgcttaaggggttgtttgggtggtgacaatggtggatgagtggtggtgggcgggggtagtgggagaaggggtggtggagtttggtgggttggggtggtggtcgtggggcgtggtctgtaggagtgacggcgatcgtccaacttttcctcttggagtttggccagagagatggcctgtggaatagagactggctgcaaagcctgaacctcccgacggagttccggcgtgagatctgaaataaaacagctaagcaagaaggaggggggcagacctgtgacccggtttgcgagccgttcaaacttgtctaggtaatcgttcaccgagcctcgttgagtaagcttgaccagtgtgccttgggggtcatcgtaaaatgtcggggcaaagtaggtctcgagcgcgtggagcaaggaagaccaggaagtgatcaaatggttgcggtgcatccattgaaaccagctcaaagctatcaagcttaagggtatagcggtatgggggggtgatgaggtggggtaggtggtggttgagggggagtgtggggtggtaggtgaagttgaagttgaagtagttggtcctggatggaatcgagacaaagggtgaggtcatggtgagcgtcgataagggtggactggttctgggtaaggcggctgatggcctcttccaggcggtcggtagtcttggatcgtgtatggtgttcggccatggcgtcgccggtcggctggtcagaccaatgatgggtaatgtccttcgtatttgagaccgaagaggagtctccgtgaagaaagtgataaagtgagagagagaaagttaactgaatatattctgcttgctttatttcatatcaaagggagtatttaaagctaatgattagtgttgtctagaatattccagcatatgcatggtatgtgctacgtgacaaatatggttactaacaacaagcaatattaatattcctaatgtaatattcattcatgctagttaagatatcacgtaatccttccagaagcttggtttatggatattcctcttgggctgaagctggtgatctgcatgatctgcatcgtggttcgtatcatgttacttgtagattaaaattttactataaattatacatgaatgaaaaggataagaagatgatagagacaggtatgcaacaagacaagtaatgtaatagaaagagatagaatggaaagaaaagacataaaagttattgtgtggataacattattctttgaatttaattagaatgttatggtagtgttttactctgtgattcaattatacattatgtataataagattattgacttttctaataattattttaaaagttatatttaacacattgatacgttataatcttttaaatgacacaaaattgcttgtgtgggatatgtgtgaaaacaggtgcgatcgaatattgtggaaaggggaaggcctca

SEQ ID NO: 3032 - DNA, 5921 bp, Glycine max
  Intron number 1 from transcript Glyma16g25330.1 (locus Gly ma16g25330) derived from phytozome v7.0 (chr-ID Gm16; pos 29263571 to 29269491 reverse strand)
ggttccccaatcgtttgttaaaagattatcttgaggtatgtttgacacgtacccttgcttgggattcttattcctttattaatatttaattatttgattgttaatttttgtagaggtgtttgaattcacatgactacactgagacatgcattctgacatgcatgcgctcatgagttgatggcattaggtcccacaataattgagccaagttattgataaggttttaatagatttgaatcttcttgatctccattaaatatcacggtgtgtctccattaatggtggtataatgcatgctgtcagtgaaaatattataaatttgaaatttatatatatatatatatatatatatatatatatatatatatatatatatatatatatatatatatatatatatatattccgtttcttgtgtctccattgctggtggcataatgataaggtctcacattaggtctatacaaattaaatttttgaaaacaatcacggacgttactaaacttagcaatgatgaaatatctatttaattattttgtgtataataattgtatttaggttgaaaatatgattttatgtacagtatcccaaatctcctatcattagactgatggtttatataggtatttgattatatcatgtcaactattgttttaagataatatgtgatgtcatcaatcaataaataatgatcattacctttttaaaaaaattaaaattatgagaaaataaaaaattgacaaataaataaatttaaccatacatttgagaaattaaaaatatattttatacataaaattattataattggagtccattacgtatgttttgaagaaaaaaaatatcaatattgtgaaagtgacaaaaatataattaaaaaactctcataacggataaaatttaataaattgaataaaacatataattgagaatcattacagatacaaaatattaaaatacgataaaaaaaaaagtatctttatttaaaggggagatggccgggaaattggaatatgattagagagatctaacactagaaaaaaggcattctagatcgggaaataacattaggaaacgtaaataacaaatggtggaccatgcatgattgtgtggagacaaagatgaaaggcagaatgtggcttagttcgaccaccttcacccaatgagcaataacatcaaaagttggaagataaggattttaatggtcattaaactagtttactttactagtttgacatgcataatattttttggagtttcatacatatgtagatattaaatagtcctgcaactgcaactttacttgatttacagatatttaacctgtcacatcaagcatagtccatagagtaagttgaatgttggttgatcggaatgaatgttggttgagataaatccatcttaattactttgccccatgcatgctttctgtcaaggtttaaatttcgatatatccatcttaatcagggcagagacaggaatttattttaaggggtcaattttaaaaaatcatcacttaaaaagaataattaaatttaatttttacatatatatatatatataaagaaatttaatatattttttttatgaacagaagaaatatataattatattggatatgagaaatactaaccaacaagtgtaataaatacacaatcaacaattgatcaatagaaaaaagttagagaagatagagaaataataacaacatccttctcaagaaaaaataataaaaaataatatcttttatcttcaaaaaagagattaagtctgtcaaatataaaatcaacaataagtcatttatctccttattatcaaaatatgaactttcaataatgtcaattcaaatttaaccaacatgtaaaaaatttgaaaaaggtcaagaaaatatataactatagttaatattataaaaaaaaataaaaagattgaacataaaccttcacttttgaagttgtttttgtctttttttcatagacggaaaataatcaattattatatttgtgataaatttttcaacaatctgtttttcaatataaataatcatgtaattagtgagaaaatcatcttccattttattgtgtaaccttgtttttatgattttcataactgaaaaggcacttttgtggttattgttaacacaagaaaagtcaaaaacaagtcatagtaatttgtcaaccaaaggataacaaattgattttccagtctcagctaatttttgacataacaccaatagtggacaaactttggaagttgacatctttgggcacatcaaattcataatgtcgcaattcatattccaattgaatctttttcttgttagaaaattctgaaaagtagaatttctcaataagagtataaatgtctctagcattaaataacttgaatgaatctttaggatctaaagttgtgctcaattttagaagtttagttgcttactcacataatctactattcaactctttcaactaataatctatggtgatattaaatatatctacacaataatgatgtccagctgtcacaaaattcttttgaagacgagatcaaattatgtcagaaaaagaagcactcatttaaggaatttgaattgcttctttattgtaaaaagatgtgacttttctaaaagtgtaccccaactagaatctcttaactcttgaattaaagattttatgctagaagccaaacaaatagcattcaaaatgtcttgagatttttgctgcaaaacttgacaaagtttatcagtaaatcccatggtttctttcatcacatgtagagtaaaaacaaaatcaaatgaaatcaatgctttcaaagcacaagtagcatcacctcgttgagcagaagtagatcctttagcagctaaatcttcatcaagaactaaaatagttgcattatacatgcgtaaaagactacaaattgaatttaaatgagaactccatctagtatctccaaatttttgtattgtgccaatttgattagcttcctttccggtctcaatctcatcatttgcgaccaaatgagaaattttagttacataagcaacttgtaactcatcattgtgtttacaaaaagaacacacaacatttacaatcatattcaagttctgaaaaaaaaacatgtacaccaactacctctttagctgaagcaacaagagaaagttccaattgatgagcaaaaaaaatgtatacaatatgcataaggacattcttgaagaatcaaggcttgtaaatcattccattctccacgcatattactagctccatcatatccttgaccataaatattttgaatgttgagagtggatgatgtagtatcttgcacttgtatcatatccaaaaaaatgtctttaacatattcattcttatcaacaaatttaagacctagagccatttgttctcttttagattcatcatggacttcatcaacaattaaacaaaattttgtattatcaatctcttttggaatttcatcttgcaccttccgagcaaagacatgtagaatatctttttggatagtgggtgaagtctatcctgcaatttgaggggcattttccaagacaaattcatctatttccttattataagaagccaagagctttatcatttcaagaaagttaccacagttctagatcccacactttcatcatgttttctaaaagcacaagcttgaaatgccaatcatctaacaacatctataaaggctttaagacgcaatcgatcattcaaaatttattgtgaactttgtttagataacacactatcactatggcaagattgcttttcaaaatcttcaaacatctaagaggaacattatgaggtgaattagaattctttcccatatgagataaaatgcataatctattccactattcaccttttttcaatttttaaatcctttcgaagtaaatggacttgattttttagaaaatatataacattgaaaacaaaagaatgcaccttctagtgaatactctaaccaaggaaaatttctaaaccaacaagcttgaaatcgacaaggatgatcttcttgaccagaaagtggatacacatccataaaaaaatttgatatggtccaaactttatatacgttctacgaattaattccatcttgttgattagcatgataatttcaaactgataggtgttttctcgtatcacgtatcaaagtatcaatattaattttttctcgttcaatcctcaatttagaagtaagtggttggacaagttattctatggttgacactctaggttattctttcttcaacaatactttgaacattagtatctaaattgtaagcaaatgtattagagagcggttgtaattcttcgttatctctttctttcctcttataaaatgagtacaaaattttcttcttaaacttctttcaacctaaaaatacatagaaattaaccacaacatatttcaattaaatttagtacaattagatgattaatttcattatatgaaagcattacaaaaaaaattgacaaaaataaaattattgttgaaaaagaaaaaaaggtgtgcagtgaagacaaaaaaacgttatcctgatatgcacaaagggattgaaagtatttaaacaaattgtgacaaaaaattattcgatgttttaaactactcattgttaaaatgtcaataataacttaaggcacaagaaacaacaatataatatatgcatataatatatgcatagtggagggagagcaaaatcatctcaactgaaaatggaaactagaataacgctacccaatagttaaatacaaagaaaaattacaacttggcatttaacaaataaaagcacacacaataaatataaaaaataagaataataataaataaatgataaatgggagaaaagagaagtaggagacaaacaaagtgtagtaaagacaacaagtggtgtcgttccttgatatgaatgacggcaagtgataagaagaactagcaattagtgacaccttgtttgtgataacgtgtagcaatattagcatagacaataaaaatgagagaagagagaaaaagaaaaacactaaatgtcgacgaaaacaaaaaaaaaagttaccgaaatatataagagaaagcactaaatataatatcaaacaaaaaataaaatattaattttaaaataaaatagtattttaaaatattaaacataagttaaaaaattggagacccatgttatatttatggataggactggagaagaaatcgaaaaagtggggtggtcgtggcccccttgggccacccactccctctgccctgatcttaattactttccccatattctttttgtcaaggctttaattttggtatcattgcaatagggttgtaatatgaaagattttttttctttcttaatcatccaatttattaagggggaaaattctaactaatgtagagtttgatcaagtgagtaaaatttaactaaaaataaaattatttttattaatgatgaaacttaaatattactcaaatgattcaatcttaatttaaacacttcaatcttaatttaaatatattaattatttgtgttcaatcaattaattttaatatcaagatttttgagtattatgattcacaatatcaagaatttttagcatttcacaactgtaatttaaaaccttactatttaacttttattaaaaaaaaaaagtgtcaaactttagtttctaataaagttaaatcagtcgtgaattatgaagtagatgcaacttttttttcctttttattattcatttttatatttacatttaaaggagccagttgtggattgaaaagtatgaagtagtgtaaacattttctgtgaataaaacatacaagttagaaagttggtaaaatagctagcttaatttgaaaggtaataacttctgaagtaattttgctttcgatggtcttccatgaggaattatttacaggtg

SEQ ID NO: 3033 - DNA, 2082 bp, Glycine max
  Intron number 2 from transcript Glyma16g08630.1 (locus Gly ma16g08630) derived from phytozome v7.0 (chr-ID Gm16; pos 8028009 to 8030090)
tggggtttcctgaatttggctgtcaaaaaacccaggtgggtatttcagcacttttgcaaaatttcattttttttttcttccatttcatgttttggaataaactttactactgggtttctctgggttttgatgttttcttcttcttttgtcaattgttcttgctttgttgcagtatgagttttggtctgaagtatagattctttttgtctttttatgctgttgacttggttttgtatgaggtgatgaactgtgttttatgctgttttgttttgttttcaattgtttctcatgatgtgttattgggagggttgtagtgctatgaagtttatatgtggtgctgtgacttggattggataggaatctaactggcttgtagtgttagttttggtatgaagtatggattttttgcccttgtcttattaggacagaacttagatacaaaacttttgatactgttctccaatcataattggagttttacgttaataatctatgtcgacctttaatgcaaaactttattacgcggactactgaggtgaaactccaattttgattggagaaaaatgccaaaatcatgcaaagaattgtatggttgactcggtttgtgtgaggtgctgaactgtgttttctgctcttccgttttcttttccatgttttttcagggtgtgctcttggaatggttgtagtgctatggagtttgtttgtgttgttgcttggattggatagccatttgagtgaggtgtctggattacttcctcttggcttgtttttataatcttggtaaagatggttctgcatagctggatttccagctctcatattcttgttaatttcttgctgctgcttggttgtggcataacctacgggactgacactgatatcttctgcttgaaaagtatcaaagaatcccttgaagacccctataattatttgaagttctcttgggatttcaacaacaaaactgaagggtatatctgcaggtttaatggggttgagtgttggcaccctgacgagaacagggtcttgaatctcaaactgtcgaatatgggactcaagggccagtttcctcgtggcattcaaaattgctcgagcttaactggattagacctttcaattaacaaactctctggaaccattccgggagacatatccactcttataccatttgcgacgtctattgatctatctacaaatgagttttctggggcaattcccgtgagtcttgcgaattgtacctttcttaatacccttaaacttgatcagaatcgactcactggccaaattcctccacaatttggtgttctctcacgaattaaggtattttctgtatccaacaatcttttgacggggcaagttccaatctttagggatggggttgagttacattatgcaaataatcaaggcctatgtggaggaaatacattggcgccttgccaagccacgccttccaagagtaacatggctgttattgctggagctgctgctggcggggtgactcttgcggcattaggattgggtattggaatgttcttctttgtgcgacgtgtttctttcaagaagaaggaagaggatcctgaaggaaacaaatgggcaagaagtctaaaaggaactaaacgaattaaggcaagctatatcggtgcattgcacagaaaatatatgattacacagttattcatttttattgtagatacatttgagttttgtagcattagataattgttttcaataggaactagtttgttagaaaatgtcctttttttttaaaaaaaaaagaatctctcaagtttcaagtgaaatattttcttattaaatatttccttgactttgttgtgtatattaatattaattggcaaaacatgtttttcatattgctgcgctaaacataggaaaataaaatatttctaaattgagctggtaaaatatacattttctgtcaaaattaaaaaaacgtagaatacactttctgaaaattaatttctgtaatatttaaagagccttagttcatatgatttacatactattgaactcttatgagaatattatacctaagtctaactatactgaattggacatcaggtttct

SEQ ID NO: 3034 - DNA, 2161 bp, Glycine max
  Intron number 1 from transcript Glyma08g46440.1 (locus Gly ma08g46440) derived from phytozome v7.0 (chr-ID Gm08; pos 45545682 to 45547842)
gattctactcgccaacacagaattacgggaaagaggttcttgtattattgttgttagtgatactattattgcatgtgaaccgttttcactgtggaaaaaaaatatgatattttttttcgttggtggtgacttggtgtgcttaatattggtggatttggtgttgtgttgagtcacattcttgattttcagatggtgtgggctagcatttagccttttatgctatagtggtctgttgatcttcctaggatggttttggggggttcagtttaaatttgatgattttaaaattgaataagaaagctaaagaaaataaaataaaaattaaggcaaagttagatgtgcaattttatctttaaagtgccacaattgtgtaattttggtccctagagtgtgaccattgtctaaagtatcaccattgtgcaattttggtccgccagtgccacacgcaggcacatgtgccatttactacgtcgtctgccgcatcaccatgtcagagtcacgttagccatttttgttaaaaaattggattgtagcctaatggtagagacgtagagtggtagacccacattcctaatttaaaaaacatgggaaccaaatgtacaatacaaaattttgggagaccgaaattgcataatcaatcgctaaactatggggacctaaagtggattcaagtctttatagttttttagaaaattctattctcagtaattttattttcagaaaagtaagttaattgagaatgaattgtttattccccaacattacctaaattcaacattcggtataaatgtatccaaaccaaacgtgacccatttggttcctgtgacgaacaaagccactcactcatctttattctaactgcagcagcatggagacctgatagattttcacacgttttgtattattatattggtgggtttggtggtgtgttgagtcacattcttgatgtgttggatggtgtgtgctagcttttgtgctagtagcctcttgatcttgctgtgattttgtgagggtttcactttatctttttgaaagtcccttcctagtggtagttaggaattgtggtgataagggttcatgagttaggttaatgatggtgttaggtggatttgtttatttgtttgatattctaagtgcacgattgagcaattgtggaattgccttggcctggagctctggacctgggaggatgccttcataggtgaaattgtgggtaaatacttggctcgggtggggatttatgatgatgtagtggctgatattgaggattgatttcagtagttcaatcagaggattattggattcacattgtctgagtggcttggagcctttgactatttaaccagtgaggatatttgattggaattgtccatttagtggtttactgttttgtcatgtgattgtatactttgtatttggtgatggtgtgtttggatagtttgtaccctgaaactgtaaattaaattgtttatagtatggtggagggaggcagggggaggggggttataattgttggatttttcttttctggcacactgcaatgaatgtgggtgtctaaattgcgactgtactcattaaattgattgatttcatgaggtgggaaggatggagcgatcttgctctattagcaaatatgtttttccatttattgttggagcaatgctcattcgttggatgggttatttctgttttaattgtgtatttattatgctctacttgattgtttatcattgtgaacctatgaagcatggacccctcttttgttcgaagtgttgctgagttggacacatttccaacacaacacttattcgacacttcatattagatgtctgattcaaaaattattgtttgttggcatgcacacttaaactgtcacctttacacagctaatacacttgaaaaaaacatagaattttggtttaaaaagatgaatataccatcaatttagatattttgttatatattactcatatttcatttaattagaatctctttttttgtgtgtgtatgcggtgtccctgtgtccatgtctctgtcagagtctgtgcttcgtagttgtgaaactcctatgttgcaagttcatcctgtaaaattgaatgcttatttaaactaaaggcacggtgatgtattccaaatcatgatttttgcaggcagagggaag

SEQ ID NO: 3035 - DNA, 3375 bp, Glycine max
  Intron number 2 from transcript Glyma20g12140.2 (locus Gly ma20g12140) derived from phytozome v7.0 (chr-ID Gm20; pos 17039340 to 17042714)
ccgattacatcccaatgtgagttgctgataatattgttagtttttgttttgcataactaggaaatttgggccctgacatcttggaagaaatgttaataagctaaagccccttttcagaatgctttacctttatattatggtgcttaaagttgcaaactttagtttggtaaaatctctttatggtgctttttctgttgctctgaacaattatattatagatgctattcagaacagcttaaggactggctttcaaagctgcagttggtgctatctactaaacaaatccgtttttgtaatttttaagtcctcaaaattttattagaatttttagcaatcacttatttggtgtcacctcaaagctgttatgaaatactcacccaaatgttaataataataatagtaaattagtaataataataaaattctgatgcaatggtttattggcagcttttataaattccctaatgagttcttttcacatttcttttttatgataattagagaatttacctgagaaaatttgctggaaaataaaacatcatattgtttctatagaaggataattcatgttgaccttcaagaaaaaggagtgatgattttactttggatgttggtcctacttttatgatgaataattatatggggcacaaaggaatgttagtaatagaatagttttgctcattttgtcatttattgtttgttatcaatgaatttttatcagctaacttgaacatgcatgaggtcatctattttcaaaatttatgcttagatagtgaagaatctagctcccccaaatttcctcttaaaagattaaaggggaagaaattgggcatagttacttggggctacattcaaaaagttagtatatagacattttcaagttgtggcaaaactggacctctattgagtatttgggacacatcatttctgctcggggagttaacatggatccttcgaaagtacaagctgttctggattggccaattccttgtaaagcaaaataagtgagaggattcttgggcctcacgagctaatacatgagattcatgaaagattatggcaagattgtcctcccttgacaatgctgaccaagaaagaggtctgtgtatgaaaaggaaatcatggcgttggcactctcggttcagcattggcgccattaccttttcagtaggagcttcgaggtctacaccgaccgtagaagcctaaaacatttgttgcagcagtggattacaacctcggatcaacaatgctagctttctgaattgatggggtttcaatttgaggtgatttacagacttggcccagagaacaaagcagcggatgctctgtcctgtcaatttaaatcagccgagcttaatgttgtttctataagcccatattgggtggatttccctaagcttcgtgaagaggttttgaatgaccgggatttgatttgaatcaagggggctttgcattccaacccagcagccatgtctgattatactttgagagatggtttaatgtttttcaagggcagacttatattgtctaagagctccaacttgattcctactttgttgattgaataggaggacactccagatttaccaagactaacaaacggatggcagcaaccttctattggaaaggtatgaaaaagacaataatggaatatatccttcgttgtgatgtgtgccagtggcataagtatcaggccatgtcaccaaccgatctgctgcaatccattcccatcctagaggtggtttggacagatatctctatggattttattacaggattgccccttttacagccaaaacagttgcagaaagtttcatcagagatgtggccaaactgcacgtgtttcccaattctattattgatcgagaaccccctctttctgagtaaattttgggggaaacttttcaggcttcagggcacagttctgcgcatgagcaccacctataacccctaaaccgatgggcagacgaaacaaccaaccaatggtattcctggttatccgggcaaaattctggtacaacacttcttcccattcagcttccaccaaatctccctttgaggtggtgtatggtcgcccaccccctacagtgcttcgttttttggtgggagaaacataagttgaatctgttgcctccgttctcatcgactgcgacgaagcattgtatcaattgaaataccatctaaacagggtcctacaaactatgaagaaacatgttgatgctcactgtcgacatgttacatatgtcgtaggtgattgggtttatgttaagcgttgtccacatcgtcaacatttagtagcccgacgtatcaatccaaaattctatccccaatacttaggcccctttctggttatctccaaaattggtgaagtagcttataaggtgaagctacttgattcagcacggatttatccagtgtttcacgtatcccagttaaagcgctctctcaatcgcggttctgtggctgctgctttaccacctggaatggaagtaggggatcctgaaatccctcaacctgaggctgtaatcgccatgcaatggagctccactttggagtggtcgatcctatggaagtcccaaccagttgaagaggtgacttgggaaattgcggcttcaatcaaggacgagtttccttctttctgccttgaggacaaggcagattttgtagcggatgacattgatgagaactagcctaatgtagggaggccccttaaggtgtacacttgcaggcccaaaggtcccaaaggcccaatagctcagtttctattccgttaggagggatgagattggaagttagttagaggagagagaagttttgcggagagtctgttattagtggaggggaggggaattgtaaggcacggagggaattgattaggattgggagtctagagttattctctgacatgagggatctctgctctcagattgttatctgtatttccttccttttatctttttaatacaaattgcagagtctctgataggggaatacctatcaaagattgtttggtattttggccaatgtacatagtactaatcctttgataaatgctctagaatgagctttctgtatgtttaccaaaagtatattcatataacctttgatattaatcctttttagtgcttgaactaaacttgattgaagtcctcaagtatgtgccttcactgtgatttaaactttttatctgttgacagatagctatctttttagggcatacattatcattatagatgccctcatacaggaagccagtaccaagagaaatatgtaatgatataggaatgatttggattagtttctttttggtaattattgactttcaaaggcataactcatatatccatttgaaggttcgtttcattattggaggtg

SEQ ID NO: 3036 - DNA, 665 bp, Glycine max
  Intron number 6 from transcript Glyma15g04560.1 (locus Gly ma15g04560) derived from phytozome v7.0 (chr-ID Gm15; pos 3181359 to 3182023)
aaagcaaacgggtatgcaaacatctgggacctttctctctaggagaagtatctaggaacttcgatgcacctattctgtgcagatctaagtcaatggagctcatgaaatgacccattattatcatcaaatatactttcttcttactattatgcaagatttagtcttgattgcaccataatgcagcgtgtttgttttttcatttaaaacctaaaatggacaagttggaatttgtagtttctcataaaactaagtttgtaaagtgtgcccacatagtgaaatgggaaagcaaacatgcccttaacagtcaatacaacacaccaattcacgtttgcacacttaatcatgtgcttttcaaaccacttttagttgaaactggttttttctcctcgtaacatctgttcgcaaatccaaaagtttaaacaaacatgcttaatgatgttagaggaaccatgttttagaccattagcaaatgaaacatttttgtttgagatagagagcaatgtggttaaagggattatttctgatttgatgccattgattgaattagtaacattcgggatcctctctttctcaaatgtttgtcaactttgagatttttggatttatgtatgcctttgcttttctttctaggttgtgcctacctccaagggccaagcactggccga

SEQ ID NO: 3037 - DNA, 2759 bp, Glycine max
  Intron number 11 from transcript Glyma18g29560.1 (locus Gl yma18g29560) derived from phytozome v7.0 (chr-ID Gm18; pos 34205077 to 34207835)
cactgattgaggtttgttatgcttggcaattgtgtcttattgacgtagtcgtctaattgttgtttcctattaatatattgttattgcttgacttctttgtagtttttatatagcaatttttttcatataaagcattactggccatatcactgtacatcttgaagatgcaaaatggtatacatgcaggaacatggtatgagtggaccatcgtttttgatagcaacaattaagtctaaaactgaaatggggatatagttagtatggtagctttgttaatatatatgatcaaagggaaaaaaaagataaaagctaaacttggagccaagtgaacaaggcttaaacattgtgtttggtggaggttatttgtgaggaatgaaagtgaaaaggatggaaaggagtagaaagaagaaaagtaagtgtgtttggttgaaatgaaagatgtatgaaagtttttttaaaaaaatgggcccacaaaatagttttttattgcaaaatgagatgaaaataggggaaagctacagtgtttgagagtgaaaggcgttgaagaattatttttacagaactagccttgctcacctctgggacgaatgctatgtggtgaaccaaagtgataagaatatgatctatctgatctgtgtgtgaggccactagttcttcagcaacgctattcacttgattttttttattcattcacttgaattaaaatattatatattactcatgattttttatgctatttaatataggttttaacgctgtttcagatagttgaaattttagcacattttcttaaatgataacacttattttgctaattttatttttttctggattgagtagtgtttcctgcataactactggacactttatgtaattaagattcaccttgataattttgtaaattatatgccttgttaaaaaagaaaagaagtgtttcttcatgttaattgtgctaacgggtacaaatgtatttacctaccaaaccactttaaatcaaatatttcatctctttttcattctctttaaccaaacatatttaattttcactctctttctattctattttacttcttttcattcctcaaaaccaaacacgcttaaattttggtttgtatcttcttttctgctgatcttctactttgtagaagatatactcagtatataagttgtttctaaaagttctgaatatttattttgggtaagggacagcatgacacaattttttgttccctgtttgatattgaaaatgattatgggacagaacaaaaaagatgatgatggacagaacaaaaatataaattcttgtaactcctttgaagatcacgttccacttttcaactattctctgaactcaaatcacattgcaaacaaaacaggaagtcaataggaaaattgaaaagtttaagctacaaatgaattaaaaaaaaagaacttgagaagacccataagtaaaaaagacatgaaaccttttgttatgaacagaacaagcagcagacctgcaacgcaccattggagacgcagcagaagatcagcaaccctaatgcaggagcaacccactcaagcaccttgaatattatttctaacagaatctgttaggcatcgctgagctggcaggaggatattggtccataaggaatatgctgtcggcatgttgtttcccatcttgcagcactcattattgccatttccattttctgcttttctgttagtttattttcgcattctagcaccttctgtttccagagcagcatccttggctagtgcctatatatatgggacgcttattatgtaatgaagcaagcaatataatcagaaaagttcctttccttaatccccctttttctggaggtctcctagtcctcgaattctaggaaacatagagcagaaattctgctcataacacctttggtacatgaatcacgatttcagaatcccaataaaggaatccaatccatagaaaaagtagctagaaaaaaggataacattcaaaaatcatataatgaatagatcggagatgggaaatcacttatagctgaaagaatctacagaagaagaaaagcaacgacactagggaaggccatttttaactctgatgagagagagagggtcacagtatattggagtattgtaaaggatctgcagttattcaactgcagtcctgggtagtcagtttactgagttaagtttgcttagttagttggagttagttgctcagttagttagctgtcctaactaactagtctataaatataaaactgtaaagcattgaatctttgggttaatgaaactgatttttcccccttcatttctgttatcttttctatcatggtatcctgagcctagttcgatcaaagtgatcaacaatggcagaatcaaacattcctttccctcctcttccgcagtccataatttgatcggtgaaaagcttgaataactgctgatcctttacaatactccaattcagtaacacgatcatggctattaacagttatctaatatattaaaaagggtatttcagtaaactttatattattttgtttgtgctgtccattgtataccaaataatgtacagaaccaaaagttgtccagtaacttgaataattgtcctgtactgttctcattgtactttaacttagtgtgtatgaaacacaccttttgtttaattctttagctgtattgaattttgatatgcctactatagttttatattggactggtgagaggctccatttgatattttgatggtttgcagaggttgc

SEQ ID NO: 3038 - DNA, 1930 bp, Glycine max
  Intron number 1 from transcript Glyma17g14820.1 (locus Gly ma17g14820) derived from phytozome v7.0 (chr-ID Gm17; pos 11591736 to 11593665)
cttcctcctcctcttcctccgtcgtccatctcaaggtatatacagtacgattctccaattttcattattaatttttaataattatttgttttcgttatgattatggaaatttactaaggtttatcttcggtgctgatctgaatcactcgatatagtgtgggtcaggtctcggtctcgctttggcagtgccatgttcacgtttttggcgctacctcactgcaactttcctgtagaggcaacattttttttttccttttatttttaacaaataataataaaaaaaccataattaattactatatattaaacttttggcgaggatttcatttcattgatttccggccatgaaaattatcaacgcgattgattcagatttagattgttcttgtggcagtgtaagtaaaaagcggttgaagaaaatctgaaagtgaagctttgatgcccgagcaatagcatggaaacccgcgggtttctattacgtttctcatcttttttctttcgtttttttctttcttccgctgtgtatcgtttctttctctctcatgtggttttgttttccatttcaaagttgcaatatatggaactaataaaatcctgttttacagttttaactggttgttaatgtgtagtgggtcacatcaacaggtggccgcggagggtagggatagcctacgattagccccatggcattaacttgcggtcacgtcatgcctcctgctcccgtctctgttctcttttcttcatccaccattggttcaaatcattctgcctctgcacctctctgcattaaaatttcattgcttcgtttcgttcttactcgctccctcctctcactttttcatcgccacgccatttttcttctgcaaatcccaacccttttccatctcttccaatttcaaagcctacaaaattacaccaaactggaaatcccattcccaccagtaactttcattgattttacccttttcaaccgcgccaatataagggtctaagatgaaggcgttacattctagagcagaaataaacaaatattaacagtgcggtgatctaaggagaggtgcaattagggatctcggactctgtgttgtatgttgtgtgcctcttccaggtgtgagtgagtcagtgtgagcttcgtagtaaattgtaatgtctcgacgatactttaagatggggaaaaaactgaaaaagcattttcggttattagttttatatatatatatatagttagaaaataaaaaaagtgaaaacatatggaaaggtccctcttttgtctttgtcaacagaaatatgtttacgtgggacttgccaccatggtggtggggtatcgtccagttcaatatatataaaatcttttttttctttttttatcttcaaaaaaaaaaatgtgtgctgctcctgccactgttcaaggtcaacattcaagagccactcttgttctccccggataaaagggaaaaacaaaaggaagttggagacggtaagtttttgtttttttacatcattaccttctatctcgaatcatatttctagtctagtagtgagactagcatagcatagcatcatgccgtgatagcccggtgaggtaatttcgttttcaagctttctgtataaacttaatttgtcttctcaaggtgggctctcttccccacttgttcttcgatctcatggggatatgtttaataataatcctcctcgttcttctggtagttgatagttgctgctgctcctatgtttcattgtcttgtgaataaaaaataaattaaaaaacctcattttgttatacgtcattggtattatttcaggttcctgttataaattttgtctatatttttttaatagaattttttttatataatagattaaataatggatggtacttattcattgttaagcagatctcgtcgttcagagagagcaagtcagacgatag

SEQ ID NO: 3039 - DNA, 1558 bp, Glycine max
  Intron number 3 from transcript Glyma15g36180.1 (locus Gly ma15g36180) derived from phytozome v7.0 (chr-ID Gm15; pos 41303674 to 41305231)
caaaggctgaggtcagtgccttattctatattctttgaaatttttttgattgagtttgtttgctcaactagatgtcacatggttgaattgttggctgtaatttgatgtttaaatttgtagagctaggaaaattccatatgggagaatttgtgaattttctggtttgtctggtctgatttttggtgtattcatctggagcaggatcttagtgttcattttctttggcctggttatcttacctgcatgcttgtttagttgcttaccagaaaccttatgtaaaatatttattgtataatgtgtctagcgttatgctattagcttcctgtaatgtacattggaagttgcttttgtcttataaatttctgagacccgcagatcgttgatttgtagttagttagtcatgcgtgctttagtggtatttatgctaatattttgaaatgattattattgaatttatttaattgtttcaaatctaaaacaaccctggcattcccactaggtgggattggataaatgcaagatagatcatttacctcttaatccctcttagtggtttaaccttataattttctttgctctccctttacctttaactattgtacttttttccatctagtcgactcccttactggtgcttctatgagttttctctgcgcatgcccaaacaatctaagacaagactacctaccattctttcatattgttcattttttacacaacaatagctagctacatgcctacatcccactaggatgctgctcatttgttacacagacaaatttaagagtaatttatgcattcttttattgaatagaggagaactgtacaagtgtctacaaacatttgcatatataataaacacttctaatcagtaaaacttatgtatttagtgttgtatctactgctcgttgaatgaaattattgacaggataggtcaaacaaaatggcagattagagttttatattgtttcatctattgcggattgaatgaaaccatagatagaaaaggtaaaattaaatgacagtttagcacaaaagttgtctaaaataaaattaaggattaaagtttaaggttaaagacaagttgtgctcaagatatgcttcttggtcctttatcaaatcccttacattattttatatgcgaatttcacttctgtgaaatctgcttctggctacactaaataacctaactctatattagtcgagttaaacatgagattttgcctaataatattgtattgaaaagagtgagttgttagcatttctttattctaatattcatcaggtctcttcccttctcaagtcctcattaatatggtatggaagaactgttactatacatgtgtttgctgcttgcaacataaacatgtattcgccgttatcttattgctcccaaagatatgtaaattaatttagtaattaaaacatttgataagaaaagctgcatttggggatagcttacaggcttcttttgtgactgttggagagcatcccgggggtagagttactggtggtgtatcatggctgatggatgtgtaaatttctatgcaggtcattg

SEQ ID NO: 3040 - DNA, 3633 bp, Glycine max
  Intron number 3 from transcript Glyma05g05590.1 (locus Gly ma05g05590) derived from phytozome v7.0 (chr-ID Gm05; pos 5027927 to 5031559)
ccactgcttcttcttcttctgttatttccaattttgtattaacctgtgctggagtatttgcaggattgcaatctgtcatatgaaatcttttcaatacatcagtagtatacttctgctgatgaagcagaattccctttgagttagttacaaattctaatccaaggaaacaagctagagtaccaaggtctgtcatctcaaattcctgcatcatttgtgccttaaagaacccaataccctttaacactgcctgttaccagtagatcatctacatacaagcaaatcagaatcacacttgtctccttcttcacataaacaccatattcaattgaacatttcttgaatccactctgaatcaagaatgcgtcaatccttctattccgcgccatgagagcttgctttaggccatacaatgctttgttaagcctgtacactttttcttccatttcttctttcacaaagcctgatggttgagtcacaaaaacagattcctctaatggaccattcagaaaaacagattttacatccatgtgaaacagtgcccaattatggttgctagccatttctactactagtctaacagtctcgattcttgccactggtgcataaaccttagaatagtctatgccaggtttttgaaggaagcctcttgccacaagccttgtcttatgctttgcaacaatgtcgttgggattcaatttcaacttgaacacccacttcacaccaattgctctcttattatttggtaagtcaactagctcccaagtgttattcttttcaatagctttcaactcttccagcattgcgttcttccaaacctgttcttgtaatgcttcttcataactaattggttctgcatatgctagtaatgcaaagtgaaccaattctccttcttctgttacctcaatatcacttcccatttcaaaatcaaagtatctagttgacatccttcactctctttgtggtatctgattttgtggtgattttgcctttgcatttatttctgcgtttatagtgctaacctcattctgatcttcttcaattgttgatattattggtctaatttcacacctttgtctgctctagtcccttgcctctgcctcattgaagtatacatctctaatgatctcaaccttctgcttgtgtgaattatagagtctataggcaccagtaacatgacagcctattaatatcattggttcagttttgtcttccaatttcctccttttggcatcaagaatgtgtttgtagcatagggatccaaagatcctgagatgactaaccaatggctttcttccagaccaaacctcttttgggactttctctttcaatctcttagtagaacatctgttcaacatataagttgttgtgctcacagtttctccccagaatgaatgaggtagctttttctactttagcatgctccttgtcatgtcaaggatagttctatttcttcgttctgccaagccattgtgttgtggtgtataaggtgccgttacctcatgaattattccatgttgctcacaataggtgttgaatgccttggaagtgtattcaccacctccatttgtcctcagaaccttcaaagcttgtccactttgcttctctaccatcaccttgaatttctggaaaactgagaacacctcatttttttccttgatcaagtataaccacatcattctgctatgctcatctacaaatgatgtgaagtacttgttcccacccagtgatggtacctcaaaaggaccacacacatcaaaatgcacaacaccaagtacattggaagctctcattggcaaatgggaattaaaggaatttcttggttgcttgccaatgagacacacatcaaacaccttctctggtacatttaattttggctgacctataaccatattattagttactaacatattcaaacttttgaaatttaagtgaccaaacctgagatgccaaatccagctcaattggttgatctttgtagcctttaaacattgtacctctgctgccttaatgttggcttgaaaggttctatttcttgagagtgcagatctaaagactagcttcagattaggatcaaacaattccaccattcaatccttcattgacacagagaataccttttccaccaattggctacactcatcagattgcatctcatcccaggaacatacaacacattttcaatgagtgttgttttcccatcctttctctgaataagaatgttccccatgccttctgcacttagagttctgctatctgccaatctgatcttggatcttctattttcatcaaaatcaccaagccactccttgtgatctatcatgtggttagaacaaccagtatctagataccaagcctcagaatgtgggttgctatcactagttgccactaacatcacagggtgttcatcttctgaatcctcatcttgagctatgtttgccttttcttcagaattcttgttatgttttccttttccatgccaacattaagaggcataatgcccccatttctcacagttataacactaaatctttcttttatcttgtcctttctttcctttttgattactgaagttccctcctcctcctttattagaggattcaggtttatctccaatcttgtctttttctttgtttgagaaccaattccctttgccactgccttttcctttcttccatttcttcttgtttccatcattcttggtaaactgggcctgcattgcttgatccaaatcccctgaattttccctttcaatcaacctctgctcatgagcttcaagagaattttgcagttcttcaatctttaatttttcaagatccttcaattcttcagttgctaccacaatgtgatcaaattgaggagacaaagttctcaagatcttttcaacaatcatctgatctgacaatgattctccataagtcttcattgaatttaccaacagttgcattctgttgaagtaatcaaccactgtttcctgatcactcattgaaaggagttcatattgcctccttaaagattgcaacttcaccttcttggtctttcttgtatttctaaatgccttctgcagaattttccaagcctccttggctgtactagcctttgcaatcttctcaaatacaacaagatcaacacactgatgaagaagacactttgccttgaagtccttcttcataattgtagcatcatctttctctttctgtgagattccttccttcacaatgccaataatctcatggaagtcaagaatcgcttccatcctcacaacccattgatcatagttcttgccatcaagaactggtaacgcatgtatgaatccaccagtgtttgttgcggaaaccattgcagcaccttcaatcgggttcctgaaccttagagctctatgataccaatttgttggagaataaacccttcttcacactcacacagatacgaacagagaatatattttaatgaaacttgtgtgtattttcttatcaagcacttacacatatgcacctttatatagtgcttttaacaaaaactgttacaacagaaaacagaaaaactaacactctaaccaactattactaataatacccttacttatatttggattaaactcaacagataccttaaccaaatttgcataggttgcaa

SEQ ID NO: 3041 - DNA, 3995 bp, Glycine max
  Intron number 28 from transcript Glyma02g14280.1 (locus Gl yma02g14280) derived from phytozome v7.0 (chr-ID Gm02; pos 12818599 to 12822593)
gtttaaacagtcattagttttgactcaacggtgaaggatcatatccaaataccaaatagtgtttaagtgtttgtgttggaaataggaatatttaggtgataagaacttcaatgtttatttttccaagttgcctagatacttgttatagctaatttcaatgcattataggaagtagtggtatcttaattcttctcttgtaaattgttttggcattatctttgtaattctctcgaatataaataactaagttaattgttttggcattaattatctttgcaattatcttaatgcatcataggaagtagtggtatcttaagttgtgcactcacccatacccacacaatcatgcaacaaaataaaacgaagcaagcaaagtctctaaatcaaaaactaatacaagacacaataaataaagctttagtcttcaatcttcagtaggtgtcttggtcatgagggtttgctttgtctttcctttggatttaatgtctcaaaaatttccatctcactgggttctcaactgtggagctgcagaccatatgatatgaccccatcatctaagtacttttctacctattcccgaagtcccaacaataagagtatgtttggatagagaattttaactgaggaaagtaatttatcagagaatttgaatttctgtaatttagaattcattgtttggatgttttttttgtgaagaatttaaaattttagaattttaaaacagaattttaaacaattaaaaatctggaatttcaatttccttctaaaaggtgagaaattgaaattctcttcttacagtcttcttcaagaaacaccgtatgagactgtggaacatcgatcgggtttgagcgtagagaaacacgtataactagcacactaatcatatattttctttttttcattcatttttttttaccctcataattttaactttttttatccaaacacaaaattttgaaaataaaagaattttaattgaaatatttgaaattcttagaatttaaaatttctcagaatttaaaattcctccatccaaacacactctaagagaatagcaactgcagatgactcctactttcacccaatgggatctacctttaactacagctgttgtgtcatcctcctggatatgaagctgagagaagccccacaatctactaacacctatgctttctttgttggaatctgcccccataacataaaggatttcgttgaacttaatccaacgaagcgatgcaatgttaactgcttaagcttccttttgcatctatttgttctccttatctcctcgattagctccattattggattcttcttcctctatcaacatgatctttagatgcttatgtaactagggaagtgtgacactctctactccatacatatatgtactaataataaaagaaataggtatgcagaattaattaaaagttttaaaacacatttaaataaaattatttcaaaggataaaagactcacattcactttctaacatcataatagaacttgtttagataaataataaaatcatctcggctcaaaacaagactgtccaagacttcatgcaattaatatagaaacctatatctcaatatcacattctatcagagcattgtgtttcagcgtcctctagcatgaggttctccatagtcatctacctaaccatctgttctcacgaacacaaagttcgagatcatcacaggatccaaacacaaatagcacgcggggagtgagttatcacattcctaactaatagagagaaacaagacaacatagatatacgtatcatataaatgaaatatgacttacttaaacacacttcatgtcattccaccacctgtcgcgtaacaccacagctcaacacaacatgcctcatttattttcacatcattcacgtactcaaggatcaaaacgcaatatcactaaatcaatcaatatcgatcaatacacaagcattatgcaacatattcactaagactcaattctatatgcaatgtggtaccatgtcagtgaaaaatcttgtcgggcgtctaagaatacatgacaagacaaatcacacactagtatgtcaggttactttcactagggaaaatcatagggaccagtcagggtcacgtttgcgagaatgttccaaccatgtgggatcggcacatgcttaaaggagcactcaaatcgggtgtatttacccccaaggccgagactctgaagagtccatcagggcctttcccccctaatttaggtccaacccaaaaaacattttagcacacagactctatctatgaactgtacaaaacatacgattcctcaattgttctcaaaataattttatctcgccgtgcttatgattaaactcgttgggtccccacagtggttcccatcataatactcgtcgcgcattaactcgttgcctttaaaggatcttatagttatgtgattgtacgattcatagctcacaactcagtgcacacaacatatcaatgcacatatatattataagtcaatacatactcaatttatcacatacacccggtctcaatcacaatggtataatcccaatttaacatgttgtctcatctcatgaatcatatacattttacctatgaactatgcaatacacacaactactcaattgttttcaaaatcattttaactcgtcacgcctcaaagtgattcaactcgtcggattcccacagtgaatcccatctcaatactcgtcgcgcaaaaatccatcgcccttaaagggtcttacaattgtgtgattgcacagttcatagctcacaactcaatacatacatctcaatacacatgtatctcacaattcagcacaggttcaatttgtcacttactcacaatttgaatcaccatttcgtaatcttaatacaacaatttatacaaaatgcttctcacaacatggggagtaaaacccctcaaacaatttcacacgaaacatctagagcactcaagtttatcaaccaattcacatcagaacatcaattggtcagtcaaacaaaacaatattgtatttataatagaagtctgggtctgtcttatttttccttgttgcacttgcagtagcagcatcagatgatggttcagccatttaaaagaggattgaacagaaaaaaaaatgggtgtcaaaaataaaaaagggtgtcaaatagaaaaacaataaaaaaagctgtagacatcaaaaacgggtgtcaaacagcaaaaaaaagaaaaaaacaaaaaaaatgcaccactgaagctgcgttcgccgttgacgtcgccgttcgccgttcgtgcgggtgtggggtgcggggtcgtgtgcgttgccttcgcagggtcgtcactgctggtcgttactgggtgtggggtcgtcactgctggtcgctgctgggtgcagggtcgtgctgctgtgttctgtgctgtgcgttctccccgttgcgcttttgcaatagaatatcgggtagggttggatcgggtcagcccaacacctaccgcgcaaaaaacaaaaaaaaatccgctattcggtctttcccgcaattctgccatgaccaccatggtgccgccatacacaacccgccatgccactgctatttggtggcgttttttcaaatttccaccacgctattctgtcatggcgccgccatggccgctatttgataacattgcacactagggcagtattttaagcttaactaagaatctatgattatgaatttgagcttaattaagtatttgatgtgtgttataattttttttttcttttttatttatactatgttagatgcatttataagtagaatagtatctcaagtttgacttccatgatcgtaactccccattcccagttctaactatgtgtgaatagtctattcatttttgtgaaagtatgtttatgttacttataggtctttgtcaaacatgagaatgatcaataaggaatgcttagttgtgcataaaaaatatcaagtaaattttctaacacttgatgtatgattgtaggccagata

SEQ ID NO: 3042 - DNA, 4936 bp, Glycine max
  Intron number 5 from transcript Glyma16g18440.1 (locus Gly ma16g18440) derived from phytozome v7.0 (chr-ID Gm16; pos 20331110 to 20336045 reverse strand)
ggtataccagtacgcattgagctactcttggaattttgtacttttcatgtcggtctgtttttgatggaattatttcgcagttccattgataatgtgactcgtgttaaatatggaaattcctgcaacttgaaatgatgtgccctattttttcatggacctgttatatgttcaattgaccctatttttgtgtcaatgtgcaatatttcctgcactttggtagcttggttcatttgagtggagggttactgtcacatttttaagggtatcccttcggataagtagctgctttaggataagactaggcatttggcttccatatgatttagagcacataggttttagaaaggtgctgttaggattcccagaacccaacagagaaacaaagagaggggggggggggggggggggaatcttcccttgattgttatcgatgatcaaatgaaaaacagtgtacaaataggagttaccttctcaaatggtgcgtgttttccccactagtgtcgtgcctaacaggtgcccccatgcacgttgagggattagactcatgtttgatttaaagctttgtacagcaattataccaagtcaatgacactatgaaagacaatatttcttccaaaaggaaatctgcttaattaaatggcctcgtgaaataataattgaggtattcaaattaattcagtaggttccggaagagtgtcatgggtcaaaaaagttctggctattaaaggattcacggtccaagaaggatgtcttctctagacttggctgtgaacatttttgttttctatccaaaatattttaatgtcatttttaacactgaggagctagggtgacaagaattgtatgagctaagaagagttggatttgtagaaaactgctgattcagcaatgagttgggtccaggactgtgtgggctcctaagaacattagaacacaattttttgtgatataattcaagcaaatcctttggtgttagagtaaaaataagaatatgttttctatacagacaacagagcttgccattttcctttgtcctccaaagctagtagtagctggcaatgttttaggtctcaggctattattgccttttttctttctcatgtgaacttgttcagacttttgtcttgtatatatattgagagtttctgagtgggaaattactcaagcacttctgtagttcagtattgtagtccatgattttaacatggtagcaaagcaggtatgatcccactttgttgtctctccgccacagttcattgttgcttgcttcttttgtcgccataaaccaccgtctgtgccggtgaccattttctccggcaacctcacggtgcgccctgtcaagggcaacctaacccaagtggtattgggtctagattgtggcccaccctctctcatgtgcggttctcgtgcgcttctctcctttttttatcttttgtcagacatatttctctccagtctgattcaacaacatccactaccaccattgtgttcgtctctctggtgagtttgaccatgtagtcagcaaccatcgttgctgccggggccaccatgtgtcatattctgggcattggagtcctctaccttgaggttgttttcattttctgaagcttcagttcatatgttccaagcttagagcatatttaatttatttgcgccagcttgaggggcagtgttagaaaaaactgttttatatctgttgtaaatcttttagtggggaaagacagtaaagatgggactcgaagctcaaataatgaagctacgccacatagagtgctgaaatcagatgttgactcttccagattcagaatccctttctattgaagaaattgctgttcaggtttctgatttttggcttgacgaaatgaaggacgataagttgctggttgataacttacaagtgtcaatttctgaagttccagctctggatatccccttaatgagcttgtttttggaattctgttaactttttgaatatcacacatatgaaggaaacttggcagctaagcgacccttagttcgccacaatctctgtattaatctctatagtggaaaataaggaattgaattgcttggctagtttgattaactatggtcataagataggtatgctggttgagtttgtgtctctggagattattagttggaatttgagtgggttggatgattgtaggaagaggaagagagttagggagataatttcaatagcatcactgactattgtcaagcttcaagaaactaagctggagagttttgatgctcttcaggatattagggacttaagatttaaagattatgggtcttcttgccttctttaggtgtctgtgagtgccatggtattgctgtttggacaccagatgtgtttctaaaatcagttcttttcttggtaccttttcagtttcagtttccttggatgtcaaaggatgagggaattggtgcttgacttcagtttatgggcctcattctccatatttgtgctcttttgggattagcttagtttcacgttttacatagtaataggagagagttggaggaccaagataaacagaattaaaaagaaggaaagctgaataaaaataaaagaggagagtttcctagaaaagagaacagagagaataaggagaggttgccagagaggataacaaaggacagaaggaatagaaaaaagataggaaattatttttcaccagagaaggaagttgccacttgttcaagatgtgacaagtcagtggctgaagaggttgattgttggagagaaaagattgatggctgctagacttagatggctgaagagaagagagtagcctttaaatttagggatcatggactcatatctcagacatggtgcccatctctatcactctcttaatttggggactcatatctgagtcatgttacctttggatatctagtatccctgggtttgggcaatggttcccatgttaaattttgggaggacatttggccatctgggtgggttacattcctctttttaatgcttttccaagactcttctctattttgtccagtgcccctataagccaattttattcatcttttgctactctttcatgaaattttttattccattgaaatttgaattatagggaattctctgaattacagtcccatatggtatggctgcattcaatccatctctttctaatccagataagaggatttggtctcttgacacctcaagcttattttcttgtaaacccgactttcaatccgtctctttcatgttccaggaatgactctatacttttagataagtccatttagtaatcaattactccctctaagatcaaatcctttgtatgcacagcagttctgaaaagaattaataccaattatttacttcaattttgaagacctctaagtgctttgtctctcgactattgtgtgatgtacagatgagttctgaaactaattctcatttgtttttgcattactcagtaatttcctttttacggaatgaccattagtgttttttggtaaagattggcttcacccaaaggatctccaagagttggtgtgtattatttttagaggatttggcacttgtagatattctaagaggctttgatgctgttctcaatttatagttatctagtatatctgtttggaaagaaatgatagaatctttattgttctttaattgcctcgagtttattcaggatttgaacagttcatgtaacttttctgtggtgttctactaatggtcttttcagggttctatctttgctagactttcttagagattggcctgttctattgcatgttacttgttttgttttgttttttgcccttttagttttgatttacttctggaggatttctcttcgtcttgcatttgtacctgtcatctaacctaataaattattcgtaatcaaagaagttgattgtgatttactgacttctcttttggctgggattcactttctactaatgcattcttgctggacttccagttatcttgggtactttctgttgtatcactgcttctaggagccatgtaactcatgttcttggtagccatttttctcttatcatgttgtcgaagctttatttcttgtagacgtgccaagctacaacgtatcttttatggttcttggtggcttgaataaatggattgggtcagcatattcctcttgcagaccagccaaataagcatcgacaagatagtcttcggataagtgaagtttacaagaaatcacatcaaatgcattattaaattctgccaaggtgccatgctgttgcaaaaacatcaaatctttaaggcgatcttgatggcatgtatggtggtgcctttctctgtagccatgtccaagattgatggaggcataataccttttgcacgttagctgatgaagctgattagaaatagcctccaccatgtatgaaagtgcatcaacctttgcaagcttttgctctatttgaacaaatctttcttccatttcatgcatcattgtctatgatcttgtttttgtgtccatggttgaaaagattctgatctgtggtcgtggacagccagctctgaataccattttatagaatttaggtgggaagagaaagaaacaaaaagacagagaaagaaagagggaatgagagaagaaacagaatatagaggatagaaagaaagagaagagaaacaaagaggtcaaggaaatgtacactgcactccgtgattatcattcaaatacaacatacctgcctcagttatagatctacctaacagccataaaatatcagtagctgactaaaactaactgacagccttttctttttatatttacatatcagaattgcagacaagtattttttttaatgtgtttatatcataagtaattcccatattgatttagttaagcacattacgatcatgctttgtttaattccagggaccaagaaagaagatacttttagcactggagtc

SEQ ID NO: 3043 - DNA, 6145 bp, Glycine max
  Intron number 5 from transcript Glyma08g16960.1 (locus Gly ma08g16960) derived from phytozome v7.0 (chr-ID Gm08; pos 12433668 to 12439812 reverse strand)
ttcttccaagctctctctcttccactctctaggtgtataagactgaattcgaagggatgagctcagggaccaaattcatgtgcttatataggcattctaccatcaagaatgcatttatcagccattatcactcattattggctgttacaattctttattggccattatcatccattaacaaccattcaaaatggctttcaaaactgatgagcgttacaaaatttcaaaatgttatgaccatgaattattacattctcccacttggtccaaacattttgacttaatgctcaatcttcttaagaaatgaatatatgaatcatagtgatagttcctcttataacgagtaatatcatctatgtattacaatatactcaatttcccaagcagtatacttaaagtggtaataaaacttcatgaataaacccaatgtttattcttggtccaaaacataatttttctcaaataaatcaatgtgcaccaaaatatgagaaaatatcataatataaaagtttcaattttttacatatatgtatacaatcataaattggaaccaagtcccattctttctacatgatccttaaatttaaacggtggcatgcctttagttaaaggatcagcgatcatcaactcagtgcttatatgctcaatgaccactttcttgtcttttactctttctctaatggctaagtacttaatgtcgatgtgcttacttcgacttccacttttgttattcttagccataaagacagcagctgagttatcgcaaaaaattcttaaaggccttgaaatagtatcaattatcttcagcccagaaatgaaacttttaagccatacaccatgtgatgtagcctcaaaacaagagacaaactcagcttccatggtagaagtagcagtcaaagactgcttaacactcctccatgaaatagctccaccagccatcatgaaaatgtacccagatgttgatctacgagagtcaacacaaccagcaaagtctgagtctgaataaccaatcgcatctagattgtctgtctgtctatacataagcatgtaatctttggtcccttgaaggtacctcaacactttcttagcagctctccagtggtcaatacctggattactctgatatcttcctaacattccaactgcaaaagcaatgtcaggccttgtgcatacttgagcatacatgaggcttccaacaactgaagcataaggaatgtttttcatttgttccctctcaaagtcattctttggacattggttcaaattaaacctatcacccttcacaatgggagcaacacttggtgaacaatctttcatccgaaatctctctagaattttgttaatataggtttcctgtgatagacccaaaatacctcgagatctatctctatgaatcttaatgccgatgacataagatgcatcacccatatccttcatgtcaaaattcttagagagaaattgtttcacctcatgtagcaaaccccgatcattggctgcaagtaaaatatcatctacatataaaacaagaaagcatattttactcccactaaccttgtggtatatgcattgatccatggggttttcatcaaaaccaaatgaagaaattatcccatgaaacttaaggtaccactgacgagaagcttgttttaaaccatatatagatttattaagcttgcaaaccaaatgctcaccactattagaggagaaaccttcaggttgtttcatataaacctcctcctctaaatcaccattaagaaaagctgttttcacatccatttgttgcaactcaaggtcaaaatgagcaactaatgccaagattatacgaagagaatctttcttagatactggagaaaaagtctctttgtaatctattccttccttttgagtaaatcccttagcaacaagtcttgccttgtatctctcaatgttgcctaatgaatcctttttggttttaaagacccatttacatccaatggccttcgccccattaggcaactctacaaggttccaaactttgttactctgcatggaactcatctcatccttcatggcatcataccataaatttgactctttacaactcatggcttgatcaaaagtttcaggatcattttcagctccaatattatagtcagattcttgcaaatatacaatataatcactaggaatagctgattttcttactctagtagacctccttaatgttgcatcaacattttcttggggatcatgttgttcaactggttgttcatcattttcatgaatttgatgatcaacttgatctactagattatcaacaacagtttgtggaatgccaatcatgtgttgttcatcatccctttgaacttgaggggtatgaattacaaccaatctttcatttgacgtggaaggttgagattctatataatcaatttcagaacctaagtccctcaattgatcactcccactgatcaaatcattttcaataaatttggcatttcttgattccacaatcctagtaatatgatgtggacaataaaacctataacctttagacctttcggcatatccaatgaaatacccactaatggtcctcgggtcaagtttcttctcttgtgggttatatattctcacctcagacggacaaccccaaacgcgcatatgtttcaaactcggtttccaacctttaaataactcaaaaggtgtctttgggacagccttggttggaacacgatttaatatatacgctgccgtctttagtgcttcagcccacaaggatttaggaagattggagttgctaagcatactccgcaccatgtccaataatgttcggttccttctttctgccacaccattctgattcggagaaccaggcatagtgtattgggcaacaatcccatgttcttgaaggaactttgcaaagggaccaggtgcttgtccattctcagtatacctgccatagtattctccacctctatctgatctcactatttttatttgcttgccacattggttctcaacttcagccttaaagactttgaaggcatccaatgcttcgtatttgttatgaagcaaataaacattcatatatcgtgaataatcatctataaaggtgataaaatatttctgaccatgtgcatccatatctggacaacaaatatcagtatgaattatttctaatatgcttgaactcctattagcacctttcttagacatgttggtctgcttacccttaatgcagtccatacaagtcttaaagtcagcaaaatctagagtattgagtaccccatctttcactaaccttttaatcctctcaatggagatatgtcctaatctccggtgccataacatagaggaattctcattaatattacaccttttaataccagtttgaacatgcatagaactataagtggcattattttgtaaaccaagaagataaagaccatcagacaatataccattcccaacacattcagaattataaaataactcaaatgatgtgtctttgaaattaaaggaatatccaaacggtacaagccttgaaatagaaatcaagtttcgggaaaaacttggtacataaaaagtcctttctaattttaaaataaagccactacttaaagtcaaaatgcaagttccaatggcctccacatgtgagcctagcttattgcctgataaaatgctttgctcacttcccactggtttccttaggttttgcataccctgtaaagaatttgcaatatgaatagtagatccagaatcaatccaccaggtgttaatattaacactaaccatattagattcataacatactaatgagattgatttacctttcttctcaagccatttctggaatccggggcaattctttttcatgtgtcccttcttcttgcaaaagaaacactttgccaccttcttaatatcagcttgaggtggtattttaccattccccttctgataagcttgagacttaattgctttgttcttcccataagcagtagtcagtagtgcactctcacccatctccattacaagcctttcttcttcctgaacacacatggtcattaattcattgatagaccatttatctttatgtgtgttgtaggaaatcttaaatggcccatattcatgcggaagggtgttcaaaatgaaatgcactaggaaggactcagacatatcaacctctagtttcttaagttgagctgaaatatctcgcattttcatgatgtactcacgcacacctttcacactggtgagccgaagagaagaaaacttcatgatcaaggtgcttgctaaagtcttatctgaagtgatgaactggtcatcaatggccttaagcaagtctcggaccttttcatgctggtcaacagaaccacgtatcccagccgagattttagtcttaatgaacatcacgctgagccggttggatcgttcccaccgctcatatagcgcaacgtcagctgggctactttcatttgtgattgcaggtggttcgtctttccttatagcataatctatgtccatccaccccaattgtaaaagaattctctccttccatatcttatagttatctcctttgagttcgggaacatcacattgaatatcagaaaaattaatagtttgagaagctgcaaaattcaaaggcttatgtcaaaatttgaggcatactaatcttaattgtatcttttaccaatgtaaacataccataaaattgaatcttgtgacataaaaattgcctgtgggctaaatttttaattcaataagaaacaattaaaccttatgatagaataatcaaattatttgcttaatattcatgctttacgggtacaatatgaaaataatttaatttctatcgtaaatttttactttatgataaaatcgacaaattatacatatatcatgatgcctgtgggtaaatcatgaaaaataatacgttattttatcccaattaattatacagatataataaaaattcttgtgagataaaattcattatataagtataattaattacaatattatgtctaattccttatatgatctttaaccaacttaatatataattttaatcaaatatagatgctgtggctaatccataattaatcaaaatcataaagatcacttagacataaaaatttattatatgagaataaatagtattttgcatttcaaaatcaagatacaatataattatgaataagattctcatataattttataattgaaatataatattatgcatttgatttcatatatatatgcatagaataaaatgttctagaatatattcatgcataaattaaatcaaaattcaaaaaactgtaaagcacaatgtgtatataaggtattaaaaacgacaacatatcaaaaaagccttactagtttagtggtccgcacatatattagtgttctcggagtcaagggttcgacacccagctagcacaaaacgtaggagtttttgtcttttttttttttttttaaacactgttcatcatcttcaacctttagcgggtcaaacccgacccatacgcagacccgttcgttttttcattcattcggacaccatttttcacgattcaaaagccaaaattaaggaaatcaaacgaaatacatatttctaattttatttttttaagaaacaaggcccttcataccataaacaaaatcaaatcggaaaataccgaaaaacgaaaatggacaaggcagaggcaattcttgctctgataccaaatgttagaacaaatctcttttaacctgtgatattacaaactacaaagaaacacaggttattaataaaatgcggaaattacagatcaaatcatacctccagccattgctatgaagagtttcttgttttggttcttccaagctctctctcttccactctctagatggtgtataagactgaattcgaagggatgagctcagggaccaaattcatgtgcttatataggcattctaccatcaagaatgcatttatcagccattaccactcattattggctgttacaattctttattggccattatcatccattaacaaccattcaaaatggctttcaaaactgatgagcgttacaaaatttcaaaatgttatgaccatgaattattacacttgcaccctgatgaagaattctttccatcttctgtggagtggtttttctcc

SEQ ID NO: 3044 - DNA, 3379 bp, Glycine max
  Intron number 4 from transcript Glyma18g01060.1 (locus Gly ma18g01060) derived from phytozome v7.0 (chr-ID Gm18; pos 527633 to 531011)
gtagcataaaaggtttgcattctttgtttcatttctgtatatatgtgtgtgtgtattgataaaccttaaatcctaattgttgtatcaacatggtagcagtcttggaccaaggtggaagatacgaagtgaatgatttccttgaatattcaagagatttggactctactccactctctaaccttgtatttggataaggaatttcaaaatttcagggaatttaaaatgtccagaatttgaattgctttgattttaatttctttcattttttaaatgttgtgtttggataaatcaattcaaatttcttcaattttaaattttttgtttggatagggtaattcaattttcttcatatgcaaaatttcaattttatattttaaatagatgaaattttaatattaaactttatagaaaacaaacaatctaattttgaaatattaataaaaaatatttttcaatttttaataatttaaaaatataaaatattaataatttttgctagggttgttttgtctgaccataaccaacgatgtttttaaattgacatcaaccaaaattattttacgatcgacatcaaatagggtttttttgtcaaagtatgtctggaatatttgtcagctgacgttagccaggactatttttcggctaacgttggttgagtctatttttcaaccgatgttggctaggtttttttaccaatgtcggctagggtcttttcgaacgacattgaccaaggctatttttagccaacgttggcctaaaaaatcctagcaggggttgacaaaaaaatctacccaatatcggctaaaaaatagtttggttgatgccaaccaatagaacctacccaatgtcggcttaaaaacatcattggtcaacgttggccgaaaaatccctagtcgaagttggctaaaaaatagccctaaccaatgtcagacaaaaaatcctacccaacatcggctataaaataaccttggctgatgttggctaaaaaataacactgaacgatgtcgaccgaaaaaactctagtggatgtcgattgtaagaacctagtcgatgtcgactaaaaatagtcatgtccgatgttggtcaaaaatacctaactggtgttagcagaaaaaatcctagccaacatcaaccaaaaaatctaactaatgtggttaagaaatagctctggctgatatcagccagaaaatcctagtcgatgtcggcaaaaaaatcctaacgatgttggctaagaaaatctagttgacatcagctaaaacaccctagctaacatcagttgaaaaataaccctagtcaatattgactaaaaaatagttttggctgatgttgggtggaaaaacctagcaaatgtctactcaaaagttagtcatgaccaatgtcaatagaataaatctagccaacatcggccaaaaaaatcattggtcaacatcaactgaaaaaacctagatgacaacggctaaaaaaatccttgaccgatgtcagcaaaaaattcccatgattgacgttagtgagaaaacaaccctaaccaacatcatctataaaaaatcttaactgatatcggcaaaaataactttggttgacatcatacaaaaaaattctgaccaaaaaatctcggtcaacgttagtgaaaagcagcttatgtcgatgtccgttgtaaaaattttggtcacccgtagttgtgaatgttgagcgagaaagagtcgcgaacaagaatgtgagttagagtgagcatctctgaaaaaagaatttcaaattctatattttttgagagaatttgaaatcccactgttttagtcaatcaaaatgattcctaaaaataccaaaaattaaatcttctttcaaatattttatccaaacaagctattttatcatgaatccttttaaatttcatgaaaaaatgaatgcccctgctgaattgctccatccaaacacactataaaagtctaatcttttcccaaatgacaagctgatcttccctctcaacctccctcatatttataggctatctaccttaattccttttattagagtattataaggagctgcagttattcaactgcagactcaactagttagtattagtttctaacagttattggcagctgttagtttagttagtggcagttatatgactgctgggttaatgataataattcctctgacagatctgtctataaatacctttgtaatctttagacactgggttaatgataataattccactccttactttctctctattcttggtttagaaattttatgatggtatctatagcttagttcagtcatcaatggcagcagaaacaaattctgttccctcctcttccgctttccaaattttttatccgatcttgaaggtccagaccaaatctaccttggtaatggacgaggtctatccatcaactctactggttctacttttatctctcctactaatcctagaatgtctctgtttttaagtcagcctttacatgtgccttctataacaaaaaatcttattattgtcagtaaatttgcactagataattgtgtcttttttgagttccatctgaaccattgtcttgtaaaatcacaggtatccaatgagatcctacttcaaggctcactcttggtcctgatggtttgtatgtctttgcaaatctgcaacttcaaagctcagctgctgtttcagcttcttgctttatttctaacactaaatgatttcaattctgatgtaaatactgtttctactgcaagtacttgtacttgcacaggttctaaaactctttgacaccttagattggcccatcctagttctaatgtcttgaaacttgttcttaatcactttcatttcttactttctctctattcctagtttataaactttatgacctctctatcttgacccatcaaactaacagatatcaatgaccaattaactctctaaacattaacagatattggcaagtaacaactatctaacatcatgacggctttagaagaatttctattaactgacatgggaaagatttgaaaatcatgcgcatgaagtttttgcatgcttgaactttttagtaatgattgaaattttttggggctattggcactcccaattgataattcacactccatttgtacattaataaattgttaaatgtgaatagacaaatagcaatgtagttaattaaggttcaacttgaaccaggaaaatttagcacattgttggatattgtaattaaaagtagatagtggggagtgtgcaatgatagtgttatagtctcgcgtttttttttttaatgttttaataagatgtttttatgttatgcattgcatataatatagtgtttctttgacaattgtaccagtcgattctgtgaagtgtgttcgacctgattctatt

SEQ ID NO: 3045 - DNA, 2061 bp, Glycine max
  Intron number 1 from transcript Glyma04g37920.1 (locus Gly ma04g37920) derived from phytozome v7.0 (chr-ID Gm04; pos 44376252 to 44378312)
gctgggtcgacatcaacctactgagagaatttcaggtggggtttcttcaaagtttgattttttattttcaacttgtttcatcagattctctctgagttcgatgtatcgcatgttctgctgatttgattggattggtggtttggttttctgatgttggtttttgggtctttgctttcagttgtggtgaatttcattccggttagctgtcatgttggtttgaccattttgtgtattggttatggttttcagtggtgtgtttttgtgggttgtgagagtggatttagctaagatctactttggttttaagcttattcggaaaatatttgttacttaagttgttgacttgttttggagatgttatttttccattccgtatttgaatcgcagaatgttggttcttgaccattgcgtgcagtgacttagattcttataatgtccgtttagaaatttggaagtgtgaaaactgctatttagatgttttgagggtgcacaggaccccaatttgtagcataatcaatttcagggactgatgttgtgtagttgtttctgttgtaatatatggcaatggtagaacacttacttgtctgctgtatgagggtctaggaatagatacggtatgctatgtattgaaactggtccaagggtttgaaggggtaatgtgtcaatataaggtcgtgctatagtcaattttcactttggtcaggttatatggattgacatgagatcttgatgacctttgtggcttcttttaagtcacaccctgcagtggcctgtttctgacctttagtagtaatgcagtactttgttatatagtgtgaggagaacaaggaggaggaagaaataccagtcagtttgatcttgtgttttctgttgttgccctccattttttatgaatttcccacggtccaatattagcaaagcttaagaggttggaagaagcatagatatatacatagtaaataatttaagagatattgcttgcaaaagatagatttctgatgaatgtatggaaatatatttagagtatcttagaaacatattgttaggtccctgcttccttgataccctaactcacccaagaagataagtaggttgttatgcctatagcctttggtgtgttatctattacttgatttggaaaagagtggtgtgagttattgtcattttaaattattattgaagtgatgccatttttcaagcattctttatctttaaaggtatgggtgaatgaagtaaaagtttgatgctacttgattaatcagatatatcgaaaagtttttgagattttgaatgttgagatttcctgaatcatataaaaggttatctcctggacttttgagtttcaattttgaccctggaatcaaaacattaaaacataagcttgtcccctatttccctttcttttctgctatagaattactataaaataaaaatatattttgtgtttaaaataattttatgtagattaaattaaaatttgaaactctgtagaataccttattctttaatggttaataagatttgagtgacaatcattaattcaaaccttataatacctaagtccttttcttgcagccagctaggagaaaaaaaaagtgtattctatatgcatttgctatcactaattcactatatatagatgctgctccctaactgtatagatacttataaatgttatgaaggagttaaaaattaaagtcaattcaccataatagtatactgattgtgaagaactagcatatttcggattaaaattcactgaggaagctagaatgggagtatttgtaaaaaagagttttttatataaaactctgatgatacatacacttaatgccgtatactcatacctggttgcttggaatttaaggggttaataagtggtcttctctattatttctcaatgacttgcattaaccaattatgattccagactcaggagataaatcagagtcaaatacaagtctctaaattctgtgatttatttcaaaatatattatagttaaataaaaaatgacactactaagcatgttctggttgaaccaaatgtaggtagtgctggtg

SEQ ID NO: 3046 - DNA, 5903 bp, Glycine max
  Intron number 3 from transcript Glyma20g10890.1 (locus Gly ma20g10890) derived from phytozome v7.0 (chr-ID Gm20; pos 15294098 to 15300000 reverse strand)
ttgccatagcaggggtgtcttccagagacctgaaagtaaagccctttaagcctattaacaatatgcagatgcctcaacattttatttgctctagattatgttgttacaatagtttttggcaaaccgaaaaaattactcgctgagtcacggacaatgtcgctttctttaacacgtttcgtggcactgccaaaaattgtgcaagcagactatcaaccacgacgtccccaggataaaacagcccagatcactgtgtaagattcccactgcactgagggaaccttttctagaattacaccctcttgtatgacttgaaaagtcactctaatagtcaaccgaaaatatgacttgaaaagtcactcttatagccaaccgaaaaatatgacttaaaaagtcactctaatagccaaccgaaaaagatgacttaaaaagtcactcttatagccaaccgaaaaatatgacttaaaaagtcactcttaaagccaaccgaaattttagagcgacagaaagaaagagggagaagtttgccggaaatgcatcggctgaaatatgggagggagaaagaaaagttgaggaaatgcttctcaactggggcaaagaaaaatgaagaaatgagctctctatatatagggagtgaaacactattcaagtgtttatcctgagcgatgtgggacttgaaaccttttttttttctttctttttttcaaactttcatcctttgttctaacaatcccccacttgaaatttgaaaagaagattttcgaggatttcataaaattgtgcataaacaaaggtgtcatacaacttgaacctttgcatagtgagtaagattcagattttactagagtgactcgaagtcttgaactctatctccgacatcaaaccacacacaaccttttcataggtgtattctataaagcccatgcgttaaaggccatgcacgtctatcccggtatagtgaacgctctagaaatttttgcccaaaatttcatatgaagcggcccccacttcaacattcacataggtgagtctatcaagagtactcctgtagcctaggtacttcactcaacatagagtatagatctcattaaggatttatgaatttttcattacctcatcctcttgtaggactgtcaggaatcatgctactttcacttataacagcatgttcatctcatatcacttcataacttgttattacccattgaacctagttcttgggatctccagtcatttaggtcgggttaccatcatgaatgatcatcgcagtaagggcaataatcccattcttttagaagtgttatggactgtctctctagctaatcctttcgtcaaaggatctgctaaattatcatcagtgcgtacgtgatccactctaacagctcctattgagagtaattctctaacagtgttgtgcttacgacgtatctgtcgtttcttaccattgtaataatggttctcaatttttgcaatagccgcggtactatcacaatggatcaacacaactagtatcggtctttcccataaaggaatctctgcaagtaagcttctcagccaacatgcttcctcactagcagttgctagtgctatcatctcagattccatagtggactgagctaagatagtctgtttctttgacttccaagaaacagccccaccagctatgctaaatatatagccgttggttgctttggaatcatctgaaagagtgttccaatctgcatcgttgtatccttcaagtacagccggaaaccttttataatgtaatccaaggtttatggttcttttaaggtacctcattaccctttcaatagcgtgccagtgctccatactaggtctactggtaaacctgcacaataatcccacaacataggctatgtcgggtctagtacaatcagtggcatacctaaggctgccaatgatacttgtgtactcagtttgtcgtataccttcaccagtgttcaaaaacagttttacacttggatcatatggtgtactagcaggtttacagtcaaactagtcatatttctttaagatcttctcaatgcagtgagattgatccagagaaattccctcttttgacctagtaatcttaataccaaggattacacttgcttctccgaggtctttcatatcaaagttgttacacaacaatgatttcacatcgttcactacatgaatatttgaaccaaatatgagaagatcatcgacatatacacatatgatagtgcaaatattatttacagatttgtagtaaatgcatttgtcactttcattcaccttaaacccattcgagactattaagttatcaaacttttcatgccactgcttaggtgcttgttttaggccatacaaagatttatctaacttgcagactttatcttattgtccatgaatcacaaacccttcaggttgttccatatagatttcctcttccaattcaccatttaaaaaagcagttttaacatccatttggtgtaccactaaactgtgaatagcagcaagagatattagcacccgaatagatgttattttagtgactggtgaaaaggtgtcgaagaaatccacattctctctttgcctaaaacccttggctacaaggcgagccttgtatttatccacagtaccatcaggttttagtttctttttcaagatccatttacaaccaattggtttgcaaccaggaggcaagtctactaaatgtcatgtcttgttagattctaaagaatccatctcatcattaatggcttcttgccacaagtcagcatccaaagaaggcaaagcttcttggaggtttgatggatcctcctctactgtataagccatataatcggacccataatctttagcaattcttgctttcttacctcttcgaggctctatatctggttctggttgtgcgagattttcactactaatagtaggaagataactggatgaagtacccccgctatcccttaatttaaaaggaaatttattttcataaaaatcagcatcatttgactctatgatcacttttgcgtttaggtcataaaacctatacgctttgctattaatagcataaccaatgaacacacattcataggctctacttgcaagtttaaccctcttagggtctgggatccttacataggccagacatccccaagttctcaaataagacaaatttggttgttttttctttaatatctcatagggagatgtcttgctttttgatttggggattctatttagcacataacaaatagttaacaaaatttcgccccaccaaaaagatgttgcactagaactgtacatagtagctacaactaattctgtaaaagttctgttctttctttcagctttaccgttcatttcaggtgaatatggaacagtcgtctcatgtatgattccatgcaaattataaaactcattaaataaactggaatcatactctgtgcctctatcacttcgaagtttcttaattttcttattgaattgattttcaatttctgttacaaataacttaaacatgtcaagcgcttcacttttatttttcataagatatacatatgtataatcagagcagtcatcaataaaagtgataaaatatcattttccatttctggtcaacgttccatcaaattcacatatatcagaatgtattaaatccaatggctcagattctttaactactgatttatgtgatttcatagttattttagattgactgcaaaaaacacattttttcaaagtgatttgaagataactttggaataaaacctaagttactcgtgttagatatgcaacgactatttatatgacaaagtctagaatgccagatattaaaatcacacagcatgtaagcagaaggagaaactttattaatatcaagattcaatttgaacatgccatcagtggcgtaccctttccctacaaataccccattcttggtcaaagtaaataaatttgcacctatgatctgagtaaacccagccttgtttaaaagaaaactagaaaccagattctttctcatctctggagtatgcatcacatctttgagaatcaaagtctttctagaggtaaacttcaattcaacatctccagttccagcaacagtagtggtgtgggaatcacccaacaacactttcttattttcaacattcgtgtatgttttaaacatagcacggtcatagtagacatggcgggaggcgccagtgtctacccaccatccatctaatcctccaatcatattgatttttgttatcacagctatgtatggctcttgagtcatgttagcctggggagcacctgtcattgaaggatttctgcatttacgtgccatatgtcccggtttgccacaattgtagcagaggaatggctcaccgggattattcttggcaggtggatgttgtctagcatgttggacccttggggggttcttgttgcggttggaggtattgctcacattgcggttctgattcttaaagtttttgccaataggcttcagaactgcacccgtgttcttccttttagtgttgttgtgagacacaaccaacacttcatctttctgatcttgtctgcgtgcctcttcctcaatgcgcagacgtgtgatcagagactccaaagagaattctttggtcttgtgtctgagaaggtttttgaaatccttccagccaggaggcaatttgtctatgatgacagcaacctgaaattgctcatccaatgtcataccctctgatatgatatcatgagcaattttctgtatctcatgggattgagactctactgatttatcatcagtcatttgatacttgaggtagcgactaacagcatactttttagtcccagcttcctcagtatcatacttcttttccaaagccagccaaactaatttggcagacttatatgggctataataatcatagagatcatcagctaacccattcagaatgaaattcttgcataggtaatcattttcattccagagagctaattccatagtcattttatccttcacttccttctcagcatcctcaagtaccaccaaaatatcagtgttcaaaacatagacaacttttctcatagttaaataaaacatcatcttttgttgccaacgtttgaaatgatacccttcaaacctagaaggtttgttgaggtcattgttgttcgagccaataacatctacggtagccatagcagaaccgaaaccgtcttaaaattgttgttacaatagtttatggcaaaccgaaaaaattactggctaagtcacggacaatgtcgctttctttaagacgtttcgtggcactgccaaaaattgtgcaagcagactatcaaccacgacgtccccaagataaaacagcccaaatcactgtgtaagattcccactgcactgagggaaccttttctagaattacaccctcttgtatgacttgaaaagtcactctaatagccaaccgaaaatatgacttgaaaagtcactcttatagccaaccgaaaaatatgacttaaaaagtcactctaatagccaaccgaaaaagatgacttaaaaagtcactcttatagccaaccaaaaagtatgacttaaaaagtcactcttaaagccaaccgaaattttagagtgacagaaagaaagagggagaagtttgccggaaatgcatcgactgaaatatgggaggaagaaagaaaagttgaggaaatgcttctcaattggggcaaggaaaaatgaagaaatgagctctctatatatagggagtgaaacactattcaagtgtttatcctgagcgatgtgggacttgaagcctttttttttctttctttttttcaaactttcatcctttgttctaacagattaaagaagaaagaataccttactttagtttcattgttattcgcaaactttctgctgctagagaacttgctattag

SEQ ID NO: 3047 - DNA, 736 bp, Glycine max
  Intron number 2 from transcript Glyma13g02410.1 (locus Gly ma13g02410) derived from phytozome v7.0 (chr-ID Gm13; pos 2277293 to 2278028 reverse strand)
cagataaatacttgtacaggtatgctaatatatctgattgaattttctcactaacccaatgatagaatcatctattggtgctttattgacagtttttattcaagaaatggatttttttatctctctgccttatatttaagtgtctcaaatttaagttgaatacacaccttattttatggagggatagttctgacatctgactaagtaggtaattcgattccttgtatagtcttacaagtttatttattatatttcccaataattgtgtggtatatttacaatagctaaaattttgattgactttaaattattaattttttttgtttgctttaactggattatctattacaatttcttgatattgaatatgggatcttaacattttaatcaaatgtatcaaaccttagtcataattcattctttacttgcaataatataaagtggaaagcatgatgggaattcatcttgtttagatcgtgatagtcgttttttcattctatataattcaaactccttagtatcgttgcattgacttcaattaccaaaatgagaccaaagtgatgtctgactgtctttgtatattattgaatagcttatcctggttagcttgatttgttgtttgattcaatggcactctggttatgctaccaaaattcatgtatcaattaatttttgcttaactgtgattggctctaatgcagggaattaaggttggcaggtaaacaagaagctgtct

SEQ ID NO: 3048 - DNA, 1041 bp, Glycine max
  Intron number 6 from transcript Glyma05g35700.1 (locus Gly ma05g35700) derived from phytozome v7.0 (chr-ID Gm05; pos 39690683 to 39691723 reverse strand)
agctgcttcgtacacgagacaatccagaatacaaggtatgacgacttcccttttaatgtaattttctctgtgaaatatatgcaattaatatgccttgtacttaacagttaagatggtttaaatttaggtttatgagattgtgaaatttttgttatgtatacttcatgacacctattctggaaaaattaagcttgaggataagagagctcctttctaatcaatcctaaatgcttacattttttatatcttgttattattgaataactactattacaaacttgattctcataaaatatgcacctttagtttcttgctatttgattggtagtgtacaaaaatatattcagttcagcattatagttgttttgaatggaagaatggaagactattccaagtatctgtcttaccaaatgccaatttcatccttttacttaactctgtcagaaatcttctgagggtgcaagaatgaatgcgaggtaaatatattattagtgtgtttggattagcttcatggtgagaaataataaattttttttcagtgtgaaggtaaaacaacaaatagttgcttctactttttcatatatcaccatgattttgtgagatataattcattcctgtgtgttatccaaacacactgatgggttaacagctggtaactggaaaatgacactgtttatgatctgcaaaatttgccttttggttcaggagtgtctacaaagctgtagaataagtgtcttacttatagatttttgtcctgcgcaatataattatgaaaatgaatccttgtcaaagtcctttcaatttgttcacttgtggataattctgtggatatcttctgcaaatgcaactgccttctgctcatttttttctgatttatgcttattttgacatatttctatgacctttataaattttaggttttcatcttgctttgtttaatggcctcaattgtttcccaacaccttatttgatactttgggcatgtacttaccttcgtttcattttctttgatggccttctattgggcagtacaccatagca

SEQ ID NO: 3049 - DNA, 1525 bp, Glycine max
  Intron number 5 from transcript Glyma11g11310.1 (locus Gly ma11g11310) derived from phytozome v7.0 (chr-ID Gm11; pos 8053115 to 8054639 reverse strand)
ctgttactgtgtaagacaatctcagatatatattcgtgtcttttacgttttcgcaaatttgcccatgtttatttctctccacttggcctttgcctttgaacgaataactagttgctagtgtctaattaacataatgccaaaagggaaagcgaaataacaatgcaacaattgggcttaacgtgactcaaccttgacttctaaggacataatctgaaaatagatctaattaatgacttgttttaaaaatatatatattattttttatcaacattttttctattattatctgagagtataaaaaaaaaaacatttgtgtttggtttggatatctatatgttggaaccaggataattttggaccaaattcaaactttacacaaatgttttttttatattctcaaataataatacagaaacaactcataaaaataatagagaaaagaagaatttaagataggttattaattagatttatattcagattatgtctacagaagttaaagttgactcccaattattaagttcaattgtagtaatatatgctgggactaggataattattaagtgtaaataacttaaaagttattatgatctccacatatatatttacatttggtgtttaaattattattttctataataaaataaaaaaagtatacattgaaatacaaattaaaaattatttttattgtgtacacaagtttgctgtgaagaaaagtgtgggaaaaaaatagtgtgctttacattgttttctttctgaaaaaacagaacaggaaatatcttgcattgctaattgataatggtagtgcccacccccaaaatacccttgataggcgtgggaggcaaaaaaaagtgccccgtttctttgttatctttgagtttctttttaggttggagaaagccaagactctttctctaaaatgtttctatgctttattgctttttatcatgagagggaccctccctgatagatccagctttcctcagtgatttcgggtctcttctcacaactcagcaaaatcaaaccttccgccaacaaaatattcccctctcttttttaccttaggaaaaatggtatctttatcagcgcctttattcgttatatgaagaattcttccttcgtatttatgtgattggcattttagtaaattcttttcatttcaatttaattgtaacaaagcatgtagtatttttcaaccattagaaggaatgaagtaatacaagatataaggggtataataggaacttagttaacaaatatcacaaaaatcgaaacattcatatatttcttaatttttgtctcacacaaaaatgaatgaagagaataaatacgatttagttaaagataaaatcaagaagaccataatttatgaagtcatgaaaataagaactaaatttatataatttaaccttattgtggtgatatgctgctaattaattagttaattttgagagaaatgaagttggctagctagtaatgagacaaatatattaatgagaattgtactggtaacaccagggagata

SEQ ID NO: 3050 - DNA, 1096 bp, Glycine max
  Intron number 9 from transcript Glyma04g05920.3 (locus Gly ma04g05920) derived from phytozome v7.0 (chr-ID Gm04; pos 4517613 to 4518708)
tctgtgtttgctgtattgaggttagtgcagacattgtaagctgatttagtagtgtaatgaccatggggttcagctaaccacaccatagagtctttactattcctctgaataggaatggagcttatttcctccatgaactgcacagctatatcattttcatgatcaaaaagatttctcctccacctgaggtcccactcccagctatcattaatgaagttgcccatgcttgagatgaaggagctttgctgtctactaatccgaaaaagctgattatacttttgctcaagagtgtaatctgccccaagccacctatctgtccaaaatttgatactttccccactcccaaccttccaagtcatattctgactgaaaatgttaggatccgactgctggtatatctttctaatatccctccaccagtgagaatggcccctcttgttagactgaagctggaactctgaccagtcaccatatttagattttaggactctaaaccagagttgctgctgaccagaggcaaaggcccaaatccacctacccattagcgctgtgttaaatttcgaaatatcctttacacccaaacccccctcatgcttgggctgacaaatatcctcccatttcacccaagggattttgtgatgggtattgtcaccaccccacaggaaatttctttgtaaggaaaaaaatttgtgtacaactgtacaacagtgcaataatgactatgaaatgctaaggtgtgtaccaaatagagttttcaactactattgggtattgactttgcaaagttagtattaagtcttcagaattggtatatccaagaaagagactaagctttacaataattatcattggtttcttagtctgtgagagattggatatctgtgtgaacagatagcgcatattttgtatcttttgagaaaataatacaaataccaaaatgagatggatggttggttacttgtttgttttccttaacatgtaatgactagacataatttttatataagttttcacttttcatccttttttaaacttaatggaatggctgcaaattttccatctctaggtgtgatttgaacctactgctagcaacact

SEQ ID NO: 3051 - DNA, 1711 bp, Glycine max
  Intron number 1 from transcript Glyma08g26930.1 (locus Gly ma08g26930) derived from phytozome v7.0 (chr-ID Gm08; pos 21243070 to 21244780 reverse strand)
gaggttagaacttctaaccactcttatctcataaattattataacctccaaaatcattatgatctcaactaatctccacataacacataattaaatattttacttttttataaattaaacttaacacatgtcttacataaaggttaattaaagtcataaatacatgatcattcataactatctaataatttcttcttctctcactcacataccatagtcactttagcattttgattaagtgagagcagttgtatgcaaattcattattttttaatagtctataacatatcctaaagacactgttatatcgatttttttttaataaactgttgtataggccttagattagtgatatggatttctttttttcctcatttggcattttaatccatatgcttttagtaacgctaagaaacgatgaaaaatacagctaatactattttgctaccgacatacaccagtcaacaagatgtacacatactatcttttttagaacctcttaaatatttttctgtgcatctttaattaatgagacgtttcatttcgttttccttaaataccgcctattggcaacgctattagtttgacttgaaattgaataaaaacatttattcttttccgtgttgcttattttttatttatattttcaaagtggcctaattaattaagccagttttgtggttgatttttttgggggggttacacttacattacagtgtgtcattatatttaatttaattaggggagagaaaatgaaaaattgaaaaaataaattggatgtagaaatgcattgaatttttgtaccgtgaaagaaacaaaagaaagtgtttgtagagcccacatgagtaggttggcaaatggcgatggatagcttggaatgatgacctaactaacgatgaatggtgcaaagcaacatacacgcacaaggccacagtgaatttctggtctcgatttctctctccttttttcttgtttttattttcttttctcatacacgcacgcatacacacgcatgacacttaatgcctgaaagcaactaaaaaccagcctcattgatgattaagtagcctcagagccattatttaaggttctgttattcaacttgtcagctggcattggcacaccatcaatacaaccctatactgtgtgtagcagagtgcacatctatatctacctatctaagcatttagttgaactttaattaaactcactttaaatcattttttgaaaacgactgaacaatatttgaaatgtataaaagaaaattttctagtaataaaaacatgggtcttgttattaagcaaccgctactaatcactaaaaatattttattgaacattactacattagaagtgtattagtactaatgattagtagaaatgcattaaatagcactttataatgaaaagattctataaaattaactttttcattttgtttcttaatcaccatcctgacttggaagtacacttaaaagaattcagaatgaacaatttctaatttcttttaccatattctttaaataaatattttacttttttatctttttaaagtattgcattttatatttttaaccctaaataggctaaccaagtttttttaaacattactttatactttattcaatttatttatcttactaggttttgacttttaatccattttttctaatttagcgtgcaataatcttttgtggtaaattaggtccagg

SEQ ID NO: 3052 - DNA, 1870 bp, Glycine max
  Intron number 21 from transcript Glyma18g07950.1 (locus Gl yma18g07950) derived from phytozome v7.0 (chr-ID Gm18; pos 6692105 to 6693974)
aaactgtccgcctgtaagtgagaaacccttggctaacggaaacatatttatttattttctgtttaatctcagatagttagtttagccatattcaatgaacaaacagattctagagtttttttgaaggagcaaaaaatagcagaataaaatcagttcaaagaaggcttttatgtagcatttagagagtacatcattaatggtctaacattgcaaagaattttgaaattgtgtacaataaatggacaatagtttatagcaagtggaaaggaaaagacagagggacttaaaagaattgtctgtcactgctgaagtttcaatcttcaagctattttatggatccttatgtcaaatttcacttcgtagtagacaatagggccctatagcagtgtagcagagctgccccaggcaaattcagtagtgactaacgtggctgcaaccctagcaacattaacagtttttcccacactacagtgacattactgtgatgggctttagaaacgcatttttacccctgaaatcttcaaaaaagattatgtttatgaaaaccttcttcctcagtcattcctggaaaaaggtacctctgttttgaactctgttgtctgacccagtgacccgctgcttgctggcatttgtttctggccagctccgacatttcccaccaatgaccaactactcatggggatctgttcttcctttggtttctgttcatgcatcagaactcactcagcttagtctctgtttacacttcactgctcacagatgtattttttttttgtgtgtttgtgttttgttctttcttcttccttcacatattacaggtctatttttcctgtattctgttctatctccattctcctgttgtgctacacagttcacattctcctaagttttatgtaatgtgttctttaatttcaccttcatctttctttttttgacttcattcctacattcttagtagttattgctttaggttttatttgtaaactgtggatttttattgatcatgaatatattaattttggatatatagtttttaatttttgaatatttatatgtgtggtataaataagcttgtttatattatatatttaaaatagcagccaacctgctttcctttatccctgctatagcattttcttggttggctggtatgtgccactatccggaattgataactatgttttattcctcacattataatcaaagaaaagattcttcattgttagttaatattcatcttctcttgaaattgtttgtttcttctctaatgaaactaattctcttacaaaagtaaagtaaagaaaaaaatatgtgcaacggtatcaatgtaaaattcaaactgtgttttggtgcttttttgaggcatcatgtgtaaatgtgtaatagaagttcagtatgcttcaatttcattaaattggtatgtaaatgtttatattgattctctttatttttagaacataagagaatattttatcatattttagaatatcttagacaattctctaggattaatttccctatttctcattatttcttaagattagttttcatattttcttatcttgtcatggcttgtttccctttccctagttagctaggattatgattagtataaataggggttagagtgctcttgttttatgtaaccttaaacatattaatacattgtaatacatcttagttatatcaattcagtgtttcaatctcttttttatctatattcctccctctacccgaaaaatctataatttcaaaagtatctcattcaataaatctaacatgcttgctttacttgtacttttgtatgcctgattgaaatttctcatattatccaggcttgcagggaaatctctagtgaagctgatcaaga

SEQ ID NO: 3053 - DNA, 1739 bp, Glycine max
  Intron number 1 from transcript Glyma06g03650.1 (locus Gly ma06g03650) derived from phytozome v7.0 (chr-ID Gm06; pos 2555907 to 2557645)
tcgtgactcaccactctctcgcgcgaccaaattaggtttgttgtaagatttctttttggtccctcttttacggttttacctattttcgcttttcattatttttttcaaattagaaaaacaagcaaacaaagtacttggtgtgatgtttgttgaaattatgtaaattggatgttcgtgatgctgattattttatattcgaactgttttggagtgaaaataacacaaactattttgtgtttttttaggcaagtaggagaaatgaagtgatgcagaggtaaatactgttggctagtgctaattccatgggaactgtttttctgctgaagataaacctttacaatgaaatagtaagttggtatttcactcccctgaatatttcattgatcaatcttggtcttgctgatacagtgtttgtatgttgttagtgttttgattattgctttggtactcttcaagtgtgcctaagcaaacacttctgaaagaacatttaaaaacattgtcacagtaaacaaagttcagttctgatcgttgacgattcttaaccctgtatgctgatgaaacatacatgattaacaatttgccataggtaaattgtagaagctgtttaaagttttctttttaggaaataaaattaagatgtaaaagtcctcaatcctatattgactataggccatattcttagacttgttatggtgctcaataagggtattttagaggggttcgtatgttgggacgttacaagggtattttatggtgctctcaacaaataattttttatctgctgaagagcttcttgttttctcaggatttctaattttaggtttcacctttcattttctcagaatattattactactcattgatctcaggtttcttgtattatcaaaatattgaacctaaagcatgtcatttaaaaaacaacttaaatacaactgcatgttctaaaccagcaaacaaaacaaatcaacatgcataatcatagccttaaaaagccaaagaaaagtagagccttactttgaataatatagcacgatgccgacagaggccaacagatacactgcctatgggaataacaactgatcctaagcaatctttcagagattactgcaatccctccagatggaaaaaaagtgatcttccccaacagaagctgaaccacttgttatagcaataaaacacagttagactaatatgaccagacaaaaagttaaataggtcaagccatgaatgccaaggaggctcacccattaaaaggacaacaccatttaataaacctatacttgtcacattttagggatcatataaataattatatgaaagaggtagctagtaacacatttttccttagttcctctgatggggatacagtgaaaatccaaattagcggcttcaagattcttccagttatgagtctggactgtcttttctaaagattttaggaagcctgggaatcaattcatttgatttaagtagtttatgcatggaaacgtgttaaagaatgataactgaatcatttctttatctactagtgtatgagcatgtgaaataacaaacgaggtcactgcttgagggtattgaaattgaagacactagataaagaaagaaaacagaaaaaaaacggtgagaattgagatgggaacgagatcacaatcaacaaaagagaacaaataaaaataaaaatgtccatgttggcttgattgtaatctatgattttcaaatgtggcaggggttagtgaaac

SEQ ID NO: 3054 - DNA, 2658 bp, Glycine max
  Intron number 2 from transcript Glyma15g35240.1 (locus Gly ma15g35240) derived from phytozome v7.0 (chr-ID Gm15; pos 39806032 to 39808689)
tagcgaaggtgatgtattttcattctaaatctaaacattgttgtgttcaggccagtcagttattatggtatatatggtatacactttaatatgttcttgtattgttccttgattttagagtagatgagatgtttgatacagcaatttgattatgcatatacatgatgcagttctcatgtttatatacttggcctgttgtttgattgtggcaaactgagtttatgaatttacatgatgtgccatgaaataagtttatgctaagaccctaatatattacatagatgtataactagtttattgacaagttttttcctttgggcgacttttcagtgtagttctgtagaagatacagttctgttcctccttgtacttattctagtggtgctaaatgtgattaattatgattatgatttgtgtgattattagctgttaggagtccgtatgccagatttttaaatcaaacaaatgataagagaaagaattaatgggctgtttgattcatgagagtatcaggcttattgtgcatgtcatgggggagactggagagtgtcatatgtttttgcttgtatagtttttcccttgaaagcgtaatgtaatgtttggttggccatctttttgatatggtttgttacactaataatattgagccgtgtttaacaacatggttcatatctcctatatagtgctgcaagcatacactgtaaatgataggctatctttcatgtttctttgatttgatctatcaaatgagcagtttgttatcattcataatagagacagcagagattaaagtccattgcatcaattaatattgacactagaaaataaaagaatttgaagaactaactattatatctatgtttagagcagtaattttcttttgttttcttttatgaactgtgaaggaagagaagagagggcaaggttttcagaattacgtgactttgttttcaaacttttccaataattatctaaagagcttggcttatgttgctaaatatttgaacttttgtctcttaagaagaaaaaatgcttccatgttgtatgtttgacgataccagtatgcatcagctaggaggtcatggttaggtctagtatctgtaaaagattcagtatctggtactgatctactgtagtgcatatatttattgtgtcctactttatgaattagttagtgttgaatgttaagttttttttttttttgatgaggctctgatgaccaattccagagattagttgctagagtggtttttacctaggatggggtcattagggatggattttatttattattatggaagataccgtgattgatacatggatttgcctagatggctgtttttctgtatcacatgtatatctgatatttgtatggtacgaatgaatgtgaaattttggcatattttctcatttttggtggggactgttgcctgtgtaatttttgcatattttttcatccaacctgcatattttttgtttttgcatctaatttttcatctgctagtatttagtttgctactcttagaatatgataaatttctgctttggacatgtgtttttgtaataatcaagaaaactaatgcagaggtgaggatttgggaataagtattggagatttaactagttgtaatgatgaatataatggggctttagacatgattatgtatgttgtcttctttacgcatggatagatgttacatttatttaatgttccttttcttgtctatatctaagaaatttcaaaagttgacaatttccctagagtattatatcagatattaaataaatactcaagatgcacaacaatgatctgaaattaatttgatttatgagctttcttgtgtgaactgctttaccagttatttctaagtatctgttgttttttggtaggttggttgtctttctgttttttgcaggttagagcattgtaatttcttataatcatttcagagtgaactgctttaccagttatttccaagttactaatgatcttttctggctttttttctaactggatttataggagttaaatttgttctcacttttgcttatcgatcattgatgctccctgctccattaaaatttttctctacatcttttccagatactatgtgttattgatttaccataaatttccctattccttgtgtctcattatgcttttgtaggtatatgattgaactactttttttttatatcttcggttagtttctgagtttgagatgttgatgaaaacccaaatattttgtgtgtgatgatcctttgtttttattatctgtttctatttggtgcattgatgtttaaagatttgattaatagatgccattgtagcataccttgtcatttctgagtgtactgatcagaccaaatgggaatagaataactttgataggatgagaaacttggttgcttttgtggcatatattgaacagaataacactgcttttgagaaactttccggtattaaagatttaaacttgtcatcgagttccatttggtattttgttcatgatggacattattgtgtcgataattttattttgatttctctggtacaagtgttttgccacatttctttttattcccgcttttctccttatctttttatattgttagatgttagtactgatgtttcttctgttcaacagagtgttgcat

SEQ ID NO: 3055 - DNA, 809 bp, Glycine max
  Intron number 1 from transcript Glyma05g13910.1 (locus Gly ma05g13910) derived from phytozome v7.0 (chr-ID Gm05; pos 14670754 to 14671562 reverse strand)
gctagaggtaatgcaatcttggattgactaatacaatcttaatgcatgtaaacatattttattcagattaagtgattattttaataaattcggttgtgtaagttattggaatacctttcttttgatcttcttaggctatgtaattcagttataggccagttattatactaccaaatttggacagtcagagatgctcactgaaataagttacccttaagtagattactatgcgtcacaattgcaggtcaataagatactcggtatatgattattacaatttacagtgcaatacaattccctaacttaatacttctatttatagtatactagtttccacgattccgatcgcaactgagattgtgatgctaataattagttcaagtactagtagcaagtccaagccataccgatactataccaatgtcttaatttgttcttcatcaaaattacatatacagaatatgtaatttagattcaagtttttgatggtttatcatttctagcaggcattgccatatattgtttccattttcctcttttcccgctttacctcttttttcattcttctatctttatttgttcttagtctattttagttctgtatatttgaaggtttgttctgcatcaaatattagacttgccacatgtatgctgcttttgtgcagttagctttgtagctaggagcattatatgaagcagagtgcaaaaagaataatgttgccagtgcaaagtcagaattattctgttttattattgtcactctagtagtttttgcttcacaatgcaggtcagtgaggagaaaggtgagg

SEQ ID NO: 3056 - DNA, 8961 bp, Glycine max
  Intron number 7 from transcript Glyma03g22330.1 (locus Gly ma03g22330) derived from phytozome v7.0 (chr-ID Gm03; pos 28619601 to 28628561 reverse strand)
tcctaatagaaaaactacccctaatacaaaaactagtctaggtgccctaaaatacaaggattgaaaaatcctacatttctagggtaccctacctacattatggagccctaaatacaaggcccaaaaataatgaaatcctaatctaatatgtacaaagataagtgagctcatacttagtccatggacccaaaatctaccctaaggctcatgagaaccttagtgccttctcttgcatctctggcccaatcttcttggagtgttctatccaatgcccttggggggtaggattgcatcattccctcccccttgaaaaggatttgacctcaaatccataggttcttgaaactcagggattgtttcctcaacacctgtaaaaagaataaaaacatatgtattagtgatgttgggtatgttagagtagggtaaggattgaaaacctatttcctgaccatcttcccatgagagaacatagttcctcaccaactcaatgagtggtgctacaagtatagaaaaatatgggacaaaccttttgtaaaagtttgttaagtcattgaagccccaaatttcccttatacatggtggagtaggccactcaggaatgacctttattctcttacggtccttgggaagcccttgatcactatttaaaaagttaaggaaagtaatggaataaaacatacctttttctttattttcatgttgattattcctacaaaaaattatgacaaacctaaggtgtcccatatgagcacctaagtttgtattgaaacaaaaaataagaataaacctacctaatgagtccctatgtacaaaaatcatgaagatgttgggtgcatgagtgattttacaaaagagggttgcaccactgaacacattcatcataccacctatcatagggatttggtgccttataatacttattttgggcaccaacaaatcacaaggatttaagctcttacgaaccaaaccctaatccaacaactcctttacttgaggaataacctcaaggtcaagaagtatggcgatgctaagggatgtttcccttgataggagaaggtagaaagattgtttaagaaggagtgctcttttgatattacattttgttgcaaaatgattttccttcttaacaatcttcttagaggaatccttttcctctttttccttccccttggcctttgaagacaaggccttattatccttctttttcttttggttttctagtttttcttcctcatccttcttatctttcatagttagttgatccttggccacctgtgaaggtgtttgaggatgcaacacaaatttagtgccaagatgggtgagggtaatctcgttagttaggccattgtaaatgatcttcctatcaaattgccatggccttcctaaaagagtatgccctccctccttggaaactatatcacaattaacttcatccttatatgtcccaatagagaaaggtaccttcacttgttggttaactatcatttccccttgctcattgagccattaaagtttataaggttttgggtggggaatgatagtgaggttcaacttggaaactaatcttatgctacaacaattgcaacaagatccactatccacaatgagagaacaagttttatctaaaattttgcatcttgtatgaaagatgttctctctttgggattgagatagatcacaagattgacctccaaggagccttctaaccattaagaggtcacattcttcatgggggtagactttctcactagactcttcaccccttacatcatcttcacttccactagaggaagggcaggaagtagtctcctcttgactactataaatgtcttgacccctcatgatcatggttttctttgtggggcattgagaggcaatgtgacctctcccaagacatttgaagcatttaatgttgctagtcctttcttgggaactagtcttaggggtgtatttctctatggtcttacccttatcttccttgggttttgaaggtgcagcccccaaaattccatgggcttggtccttccttggataagagtgagagccataagattttgaagaagactttcttttaagtttttgctccactcttatacaaagttggactagctcatctaggtccctatatggaaggagttcaaccttgtccctcacttctatactaagcccactaaggaacctagctatgcttgttctttcctcctctctaagtccagctcttaaaaggagtagttccatttgttgcctatattcttcaacactcatactcccttgtctaagcctttggagcttgtccataagctccctttcatagtaggagggaatgtgcctctttctaagggcattcttaagatcattccaatactctactggaggatccccatgaatccttcgttccctaacaagggaagtccaccaatagagggcatatccttgaaagctaagggtagccaatggaacttttctctcttcgctaatatgatggcaagcaaagagttgttcaaccttcatttcccaatctaagtaggcctcaacattatcttttccatggaaatatgggaggctaatgttaacctcttgaggccttctatccttttctcttctttgggagtgatgtttagtatatgaactatggcgccctctataatagtcgctaagttcttcacttaaactcttgcaagagtcgtgactactataggaggcatgtttttctcttttcatttctttcattatttttcttctttcttcctctcttattttctctctttcatcttgacttatttcttccactctttttttacctttttcttttctctcttgtttttctttccacaacttaagggatctcaactcatctaatatcttatacaaggggtccttaggagtagaaccatcaccattaacactagatgaagaatgaagactcatgttagttcctaagttgcgggtctttcttgttaagggtttgaaaacaaaaagtaaaagaaaatatggttgaaactagccaaaataaacactaaatgaggtgtgaaagataaggtaacaattaattggtaaaaggcaagctatctaggcggtttgacaatggaaggtaaagaaaataagctatgaaagtaagcaagaaatgtaaactaggcgaatcctaagagtgtttggatgaccacatttaaggttcccaacaaaccactcacaatcctaagggaaaattgcctaaaattattacacacaaatggaagtagggtgacctattggaggctcccaacttacttccaatgaaaggcctttttgttacaaaatttgaaagcaatgaaagtaagtaaattgtcaattacaaaattacaaaaaggtcctcaattttggtggttgttctctctttggtgattcactcaatttggagtgcttcttagtccaatagctcttaaggtgattttccccttgcttcttgactcaaattcttcaagggatgacaccaatcctcctttccaatttcctatatggcaactcacaaacaaggaaacaaagagacaagcaataaccaaaaacccaaaaaatgaaatgaaagctaaaccaatagaggtttaacaagacaaatttttagggatttttcaacaattaaagcaatgaaaaacacataaaagcaagctaggactcaaagagaaacttagaatgactctagagtagagtaaaaaaactaaaataaaaagactcaagaaacctctagttttggaattctttttcacactaattttcaattgaaatttaagaactaggattggtataaaataggcaccaattatagaacacattttgatccaaaacaacaagcacacttccctttcacttttttttcctggacactgatttttctgccaacttgtgtgatttttcgtattttttcttttagtccaaatcacttgtttcttttttcataattttggtccagatgtctagaaatttcagtaaatatttaagctcaaaacacgtagtgaccaattcccagtaatttatacaagtttgtatgtttaagctgccaacaccagtgatttcaacctagaaatcaatagtagtgtttatgttgcttaaggcttggatagttacactttgtgtttgcttatgctcaattatcttgaataacacaattcaagagagcttaagacttattttgattcacaaatccagccacaactcagcaccacaactcaacttcatcataggcatcatgtaggaaacttagaaaaaaaaaaaaaaagagttcaataataagactacttctaggaattgatttagaacatgttatgaactaaataacatgcatgaattagactcaaaattcaaaagataggctaagaatgacaagaatacatgaacaaatgtatctagaattcaatcaacaaaataaaaattcaacacaaacttagaacataatgtgacaattactatgactaaacatgactctaagacaacatggattaagtgatttacacttagatttttgtgtttttttttctaatcaatattttggaagaaaatttagatctaaggttcaacacaagaatattatgaatgaaaaataatagaacctaaaatcaacacaaaaacatgattcaagagtagatctacaaaatttgaaccatagaaatgcaagaataagtgtagatctaagatttaatcggtttattttttttgaatctactctaaacagcaccaaaccacaagaaaatggaggatatgcatggagaataagatgaagaacaaggaactaaagagaattcaccgaacaaaaagatagaggaagcaaaagaacatcacctagatgaagatgctcttgataccacatgatgtgagctccattggagcttgtagacctaggatcttcttcatcaatggattcctttgcttcttggaagatgaatggcattggaatggagaaggaagagagagaggagatgccacttcaaggagaatattagtctagaagaagctcaccaccatatgaggtcatggataagagcttggaggaaaaaggagatgaatgaagggagaggaatagaagatcatgaaattttgtgctctaaaagagctctgaaatctgaattttaattttcaaatgatcaaagttgcaaaaatgcacacacattgtgacaccctctaccccgacatataagtaaataaaatatataaaaaatatcggtaaccaaattcacacggataaaaggttcacattcacttcactattatcaattaaaacttattaaaaaatatattcggctcgaaacaaggccgtcaaactttacaaaaatattttgttaaattagtgagataaaataaaatagactaacattatgcaattaatataaaacttatgccccactgtcacatcctatcagagcattgtgtcccgacgtccttcagcacaaggttcctttaagcacttcacctagccatctgctcccccgaacacaaggttcaagatcatcacaggatccaaacaggaacaacaaaccgggagtgagttatcatattcctaactactagagagaaacaaaacaacatatagtagccaaattcaatttacttagcatatctcacattatttcatcactttgtcattcaaaattcacttttcaatcatcaatcaaacctttcaatcatcaatcacaatacacaagaatcacacactccgatcaagacataataacacatcaatttcataatgaacaattagcaagcgcatgagacagttatgctaaaactcaagcctatatgcaatgtggtaccatgtcagtgaaaaaccaccctggggcgcttaggagtacataacaagacacaccacacaatggatttgtcaggtcactctcactaagtaaggtcatagggagaccagtcagggtcacaatgttttgcgagaatgctccaaccatatgggatcagcataggcttaaaggagcactcaaactcggtgacccccaaggcctacactccgaagagtccgtcagggcctctccctcctgattcaggtccaacccctaaaatcattttagcacacagacactgctagtgaattatacaatacccacgacctcacactcgtgtcttaaacacgtacaacatattgcgctacaatttaaaactggttcctaaataggaacctacactttctctttaacactggttcctaaataggaaacctacactttctctttaacactgcgcatttacacttttatcaagataacactggtcgggttattgtacaattcacagcttacaacacaaataatgtcacatcaagagttaatcacacacttattcacaaccaaaactcattcacaatttcacatctcataatgtcacaatccaccatcacatgttttcacgtatctcacaattcaacacctgttctactttacacttttactcaatctcaataacaatattataatctcaaggcaacatattattccacaattcatcacatatttcatttataagcactgctcatgaattatacaataccacaacctcacactcatgtttcaaacatgtttaacacaattgcgttacaatttaacactggttcctaactaggaacctacactttctctttaacactgcgcataaacaatggtcgggttattgtataattcatagctcacgatataattaatgtaacatcaagtgttaaacagatccacttatttacaatcgaatatcatgtccacactttaacatctcatacatcacagcaatcatctcataacattcctaatgatattcataaggtacaacatacacatgttcatcaaatttaaccataatattctcaactccaacacttaataatttttggaatcatactataacactctacaatattatttacataaattattaatataaataactacctctatatatatataaactagcatacatcatattgaataacaaattataaagtaagctttcaatgcacaaattctaaataattatatgaacactttggtcaatttcaattatgatattaattttttaaaattatatataaaaacctaaacagcaagaaaaagagaaaatacaaaatcaatatctctctctaaatttctcctttatttcatcaattcatattaattagaaaaagtactcgatttataggagtcacgctcaacacaatagcatatcaattttacaacaattggtctgtcaaacatatataattcactgtaataattataaggataaaatgaaaattgcaaaaacatcccaaaacccattccaattgatatctctaaggatccctacacatgttctcactaattcccaattgtgaataactcattccttacctttaagcgggctcacatgtgttcagccagcgatagtagcatctctagcggtttcctgagattccttcaatttttttcctctaactgctccgatagagttcccaaatgtcaaagagacagagaagggattgaagcctccacttgtactgttatcatgcgatttacttttctccctccacaagtattatctcgtaaataccaatggtgaaagcgtgtgaaattgaatttcgaacaacatatccaaatttcatgaaaatccaacggttaacgaaaccgggatcgtagttttaccgagacagctctgggtttctgcgggaaaggaaaatgctacaatgcgaggggtatttctcttagctcagatataatatcgaaattcccaacggtgagaatgctcagaattgggttgcgaacgtggtgctcaaatttcacgacgatccaacggtgaatgagtccgaaatcgttatttttctgagacaggttaggtggcctacgggaaaaaaagagagggttttggaaaaagagagaaaaaatgaaattgtgaggcaggaggctgaagagtcagtctgaaaactgacctagtatgttgctatttatagctaggggcatttacgacctattatttactctatttatttatttattattttataaaaacaaactttattttattctctatcaaacaaataaaaaaataccctttttattttctctcaaatcattattttaattaataattatatctccttatttatttatttataaaatctcatcatttttttaaaattctatttatttataaataacaatcctttttaatctagtttacgaaaattgggatgttacacacatgacctctattagcctaagtgtcacacaaaattggaaggaaatttgaatttctattcaaatttcacttgaatttgaaattgaatttgtggagcaaaattttggagccaaaatttcactaattatgattagtgaattttagctatggtttagcccactaatccaagatcaagtccaagattctctgctaagtgttcttgggtgtcatgaggcatgtaaagcatgaaggacatgtacaaagtgtgactatatgatgtgacaatggggtataacaatcaaatgctcacctccccctctaaaatttaattggattgggcttctcccaattcaattaattttatttctcaacacacacatcaaatattcacttaatgcatgtgaaattaaaaaactacccctaatacaaaaactagtctagatgccctaaaatacaagggctgaaaaatcctacatttctagggtaccctacctacattatggagccctaaatacaaggccaaaaaataatgaaatcctaatctaatatgtacaaagataagtgggctcatacttagcctatgggcccaaaatctaccctaaggctcatgagaaccttagggccttcttttgcatctctggcccaatcttcttggagtcttctatccaatgcccttgaggggtaggattgcatcagggggtaccatgtaccaaggtcattcttaaataatgagaagaacacattgattttttttttttgaagaaataacaggaaccatttgcacccaagtca

SEQ ID NO: 3057 - DNA, 4420 bp, Glycine max
  Intron number 1 from transcript Glyma04g38130.3 (locus Gly ma04g38130) derived from phytozome v7.0 (chr-ID Gm04; pos 44526949 to 44531368)
aaaccctaaacgcgtcttaaattgaactcaatcaggtactcgttttctcgttgttgtgcgattctgattatatttggttttcatttcttctcttttttttccctttgtgtttgatttagtgcagagacaaaacaaagctgttgattctgttgctaaacatagcacggtggacaaacgttaaaaaaggctacagatctttgattcaggtttgaacgaatcatttgtattgtatgatacgatgatgatgatgatcgtgtctgctccacaaggcttgaaacttaaaattggttttaagcgtaaatgcaatgcccaaaaagttattctagaatactcctacaaactgaaagtgaaatggatactcatgattttgttgttaatatttcgttattaatctatgttgttgatgttaacgaatccgatatctgggtatagattttatctgtgtgggtaaggataaatatataatacaagcagaaaaaggttggtagtgaacaaattctattggcaattaaatcagctaaagacccagtaatcgtcctaatatgaataaacactaattatcctagtcctcaaaacattcacgtaaaagcggcttgtgagcaagtaataatacctctgttgggtgggtcaagcgtctcaggctgagagtgctgttctgaaaacaaggcagaactagaatcgaaccagactgtgctctgtggccagtgaatgttatattaccaggaaagggcacaggggtgagaaagaataatagaagatgatgagggatacattattgaaccacttggttgaataaggttgcatcagtgaagtgtcaatgttccatttggctgtgtgagagaatcaaaattggaattgaagattttcaattttgtcaaagggttccatcacagaggaaacaaaagtcccttgtctctttggtgtatctatcttataataatatgcactgttctggtttttctattctgttgcttggctacttgtaactaaacaattttaaggaagaagttgattggaaggcagaagaaaatgttactttttagtttttactggctaatgtaagctgtcagcatttgctgcaatatttgggtgctttggcactgtaggcaagtgatgatgtgctttacccttccttaacccatcacgtattttgtcctttgctatattcctgtagctaactctccttaagcaaagaatgcttggaatagatggacaaccaaaaactactacaatctcttttttgtatttctctcactgtatagtgtatagtgtatactgccaacaggccacaatatttcctttgttgcttagtgtataaggttatgtctcttctctttctgatcctgagaatgtttattccacgtgtcacaacctgaccggccatgcttttggtaaagaggtttgtactggatcttgttaatgacgaaagcatagtcaagtttcaaagtcattccttcctcatatatattggtttcttttctctttgttagaactaacatgtcttttgtattttgtttttgtacttttaaattactttatgcttgtactgtcctttcttgtcttttctttttctctgccgtatccgtttgttcatagggtgcagtctgcacccctttcttctcttgtactcgacgaccacgtgtcaatatatataaaagtcttttggctgactgttaggactcaagctttaccaaaatagaactaagtctcaagtctcttcaaatatatctgacacttattagcccgttgttattttgttcacttcttcttctccgctgtttataaagagaacacataattgttaacatataaaatacaattgttttctgctattgcaggaagcagaaatgaaattttagttttatttttcttttccatctgttttctgaaactttgagggtctttttttaaaaattttatatgataaaccctttaggttttttttaaatatcaaaacttctgcgtcatgcactgattctattactaaatccatttgtccaatggacaagtacaagtctaatggatcctaatattgtaatattaaaagccttagaatctatacatttcatcaagtttgtcaaaactcattcaaaaatctcatgaaagtttgagaggacatgaaaacatggtgtcctcttgacctaatgcggggacatgatatgtaaattatacctttcataactctcctcggaatagccagttcatggggctgttggaatatcatgggtctgggcagggactataacgaatgcagttatttggagttacaaaggtgtggttggggcacatattgtgttttcgggcttgtgatttttggtggctattgttttggttttgaattccatttatttcttgcaagggtggcttgttttggttttggcgtttcatataacaagtttgtatggtcctggaatatgggtatctaatccttatgaactaactagaagaatgcaatctgtaaatactgcatagggtgtggaaggttttaatcctttattccttttgttctggggagaatagcttctcatcatatttagcaagaacattgggcatattagccgcgggggggtggttatgccacatttttaatgttgggaatttgtaatcttctagtgaacaaaaacaggtagtagtagatgtataatatcgtactataaaaattaaaaaggaccataaagctctttgttcagctggtacctacctggcttggaattgtgacactgattagatatcaaaccaccgaacttaacaatagctaatcatactgtcaataatttcttaatatttgaatgcacaaacaagctactagcaccacatcagaagtgaagtgcaaggagctcgcagaagccaaacatcctaaacatgggaactattttacactttgtgctcgtctggatcactaactcaatggaatattcacttttagcttgaattgtatttcatgttagatggtgttctactttttcattccccactttcttagggacaccaagagggagactagcctctttcatatcctgttatagcactttgtgacctggaacttggtgcttgaaattatgtataaaaggttgaatatattgaattggcagctctatatgttgtgaaagcttgccctgatttgaacagttacttttatttttttacaagatttttttttgctatactgctatagcaatctgatttgtggaaattcaatacagggcatatttttcccacttttctgcttttaaaaccaatgtctaaaactgattttggagaaaaaatagttttaaaatccatgaatttttaaactgtgttttgaattttggggttcaaacacatttttaaaaccatcaattttggtgctcaaacacgtttttaaaattaatgactacctagaaactgtaattctcttgttaaataatctagttaattccctgagggggcatttcttctttccaaaggggatgcaattatgtatgtctttgtttgccaaggaccacggcaaggggaacttgataaatgctattgctctttctcaaacaaaatagaaggctacttacattagtcgatcaggattaagtttgagttaatttgcttttattgcttcttatgctaattttttgctcaatagtaatttatgtactatttgagtatgcttgttatagatttttgctgaagattcaacttgcatttgacctgaaaagtgaatttggactgaatgagcctgtgatatgtagactgaatttttattctttttgggtcatgtattgcgagttctggtcttttggggactgagttcaaaactgaggtagtcaacatatagtgctgccaattcaaactatccatgaatatgaggtagtcactctatctgagtcataggtgatcattctttaactcatgagtaattatcctatattcctattagttaagaagtcaaaatgggtactgtctggtggttacgtttccaaaagtatttatgaataaaggttggatgtgcatacaaagttccctttggagtttggagatataaacttgctcctttaactttttttgcatatttcctacagttatcatattgagtacctagttagtgtatctgaataacgatgccttaatgttcctattttgttttcaattagtagtgcggatgtttgtgctgttcagttctgattgtttcttagtaagttcccattcacattcagtaactgcttttgcatcttcggctttttgcttgcaatcccttctcgagatttttccttcattaatattgtaattataaatgcagttggaatatataaattacgatttaaaacaatacaaaacacaacatacttgagatcatataagtttgtcaacccaaatattagttattgagattaacattatttcatatttcttagttgaaagcagattgaaggggagtaaaacaggaaca

SEQ ID NO: 3058 - DNA, 1190 bp, Glycine max
  Intron number 1 from transcript Glyma06g45930.1 (locus Gly ma06g45930) derived from phytozome v7.0 (chr-ID Gm06; pos 48655963 to 48657152)
cttttcctctcgcaagtcttaggtattttcattctcattattctctttgtttctctgtttcaatttattctttgatctctctttttatttgatttttgcttcgtggctttcttgcattcattacgcgtcatacgtaagcaagttcgtaactttaaccttttctttttgtgaacgagaattttttttcatacccagatgttaattttttatgtggggtgtgctattagtgctttgttaacgtaacggtgcattaacgagatttgaagattgttcttttgtatttgcactttgcatgatcatgatatttgtaatctgtttcattctttgaatgagattttatgaatctttttttgtttctttccttcttttttttttttatgaaattgggttttaatttgtttggtattatttccatggttatgcaattttgatttggggttttattctcttcgtttctttagagtttaacctttagcttcgtggcttccttgtagacttgtctcaaatacatatatgatcccatttgagtttactgtataaactaatgaaagttttcgagattgaatgcactcgaacaagattgatgtgacttgtgagggaatcgggttatgcatattctttgatattttgggtctatactgattatatatacaatgagagtagattattgtaattattggacttaacacgtgaaagtgtatttgatacattctagttataagatccatggtttcttttctttgtctgtatggtatgtacatgtgtgtcctctgtttctcgtatttgtaagtatgttatgtatgcatgtgtctttcggtgtatacattccaaggacattcattcatcagactgatcttaattttattgcatggcaaggtattgaaggtaaatatgggttaataagttatatgaatttgaatggatggtatgaagagatgaaaattgagttgtttattttgaaaccacagaggatcttttggtcccataatgggataagtagtaagttgcaaagtttctgtttatttctgttctggttcatattttctcggactgagaattagtagttagcataatatagacaacaatagcatcgtcagaaatgtcaattggtacatctcatctctgacttttagtatatttaaatttctctttcagtgcttggcgattgattaccccagaaggactttgtt

SEQ ID NO: 3059 - DNA, 2375 bp, Glycine max
  Intron number 1 from transcript Glyma14g03710.1 (locus Gly ma14g03710) derived from phytozome v7.0 (chr-ID Gm14; pos 2394270 to 2396644)
gccacccaggtaaacaatctcaccccaaatcattttttatcctttagtggataaagaaaagaattaaaagaaattattataccaataagatatagtttagtttgatttaataaagtatgagagtttctcgtaaatctttcgttatttgtctgattcttctgaattaaaaaaaacaatgtttattaaattgttagcatgaaaattatttaaatatttttttttgagtaattagaatgaagattcttttaccaatgtcttttaatactcgtttgcgaaatcactactcaaaatacgaactgttgaatactttttaattccttgtacaacaaacattattatttttattcaatgtagcactttttagtttttatgctatatataattaaatattttctattttttttatctctaacttgttaccaatctctaaattttagtattaaattcttaactaaaatcaacttattatgtattataaaaggaaataatttaatgagatttaactcttctagtgtgtgttttgtaaaaaaaaaaaaaaactcttctagtgtgcgtgaaagtaaagtaagtaattttaattgttattaagaaaagtaatagttaatattttaataaatataaatatatgatttattatgtattgtacttcacattaatcgttaattctcttgttaacagttaaaattactcactttatgctataaaataaatttattagagaagtcaatggaattttatgcaaaatgcaagcaaaagattgtcatgtcggaaaaggttattactagcgtgcttaattattttttgtttgcactttcccccgtaagtggacagtgtgcatatttgagcattatgcaacaaagccaatcttatcttgtctgcgtattttatcaatacgtattttttttgtgtgtgaattttatcaatacgtatataataaagtagtatttgcaatcttgagttaaaaatgaaataaaatcttttatggtacttttctaagacaaacgagtttgtaattgtttaaaaaataatgaaattttctttaaaaattgtcattttattaatacttaattttgtctataccattttttcctaaagctactttcaaattcatttttatgctaatttttctccccaaaacagaaattcatactattaaattagatacactatattgcgggtgatttactcttttagtctactcttaaaaaaaatgacatgacacttgtcacttttcaccttttttaattccaattattttgaattaattatgagcctattctttacaattctattttttttttgtctcttttagtattttttagattttttatgaattaattatatgtatcctgtatttgctgatatatttgtacggaatgcttgctaattataaaattatattaatgacatggattaagtttgctgctgtacgtaacgttttgattggcttagttaagtttgcataaggttttccccctatagaaaccttgctatgcaaaataatgttcgcaaactcttcaccgactaccaaatataacgaggagaatagaggaaaaagagagaaaggaacattaaagactacatgtgaaattgtacatccgatgttcccgtgcataaaaaaagaagatgttacaattaaaagcttatggttatactaatgaattgagtccatatatgtacgtgtttatccgtatggttggtggtatggagtatgcactacagatgattgtaatggatcgtgggaaacatataatctccatgatctatggtgggtccatgctgaaaggatagaaagttttttgtggggggtgggggggtctagtcttcatcaatgcatggcactatgtgcatgacatttatggctttagccaataatttatatggcagcttggatttctgacaattactgtctttttctttgataatcaagtggaagtggggtactcccttattcttctggcattaaaccatgttactatagttcgtgtggttaaacaacacaaactgagatgatgatgatgattgtatctatgctaaattgatttattttggatatcatagtgaaaaatggtgccatatgaatgcagaactcttcattctttatccttgttattcccaaaaacaatgaattcatcgccaggtagttatctacataaaaaattacaataaattcatatccgaataacattttcatggtatgctcaattaaaactaaacacctttgtttcttccttcttaaacagtttattgtttaaagagaaaaaaggaaacaaaacataagtttcagatgaacaaggactccactttctaattaattcccttcattgattgattcattaggattcattgaattggcctttgattgcacccttgcc

SEQ ID NO: 3060 - DNA, 5831 bp, Glycine max
  Intron number 2 from transcript Glyma08g37780.1 (locus Gly ma08g37780) derived from phytozome v7.0 (chr-ID Gm08; pos 36590385 to 36596215 reverse strand)
actatccttagagagaaaacgcatccactgcacaggtaagaaatactgattgcgttcctctacggcaacccgttggtttcgattgtgtgcagtgaaaggatcctcgaaccttatgaacaccaatgctcttactctcaagaaataaattttttcataagagaaaaaatagaaaaactttgagagaaagggatgagactgtagctctgtgtgtctttagaaaagaggatatatatatatatatatatatatatatatatatatatatatatatatatatatatatagacatttatgcaataacaaaatatgactgttagaaattaacttatcgttgtaaaaaacaaacgtaacaaactagttgactcattaaaacaaaaatcttaagaaaatctaaaataaatattttattttataaaataaaattaatataagtaatatatatttataaattttaaattatagcacaaatatttaccaatattccccacataatttaaaattttaaaatatattttctaaaagataatttgtataaaaacataagagaaagagcatgtgatattgtatttcggtatcaggaaccttccgggtttgagccttatacctagtgtttatgaactttcactcgagaaaaatgtagtgacttaattggtcttgaactacatattctttaaccggactttagtacacaatccctacaatattgacattcaattaggttctaatcagtgatagcatgttacacggtcttgcgcttgtatcttgtttcgtgagtgtcacttagagattagcccatatttcacaattgtggccccaccaccacactcactagatgaatcctcaaagagtgggttatgaccctcacccctacaataattgtcatcgaattcattaagaggtatttttttataccaaaaatacacatatataaatacttcaaccttaatattaccacaatttataatacacctcgtcataggaatgagaaatggaacagctccgccaaatttcattttagtgtacttttgccaacaaacaatttcgttgttacccgttgaactccatttatgggatcaccaatcacacggagatgggtgtccattgttgtaactaaataatgggctttagtcccattcctctcgacgactcaagtacttgttgacacgtcaacccttttgtaagcggatccgtaatattattttctgacctgagaaatcaaatttctaatagacttatgtctcactcttaaatgtcttcttttttcattaaaatttttgctagtaacttttgatatagcaacttgactatcacaatgcattggaattggaggtataggcttattcaacaatggcaaatcacataacaaatttttaagaaactcagcctcactagtagcagtatctaaagcaataatttctgcttccatagtagaacatgaaataatagtttctttagcagatttccatgatactgcaccactagctaaagtaaaaacataaccacttgttgattttgtttcatcagaatcagaaatccaatctgcatcactaaacccttcaattactacaggaaaacatgtataatgaatgccataattgatggtttctcttaagtatctaaaaactctttctaatgcaatccaatgagaatgatcaggattattagtataccttcctaatctaccaactacatatgcaatgtcaggcctagagaagtttgtcaaatgcaataaagaaccaataatttgagaatatttatgtgaagaaattcctttactcaaatttttctttagcttgatggatgagtcataaggagtagaaacatgtttcacatcaaaataattaaacctcttcaataacttttcaacatagtgtgattgggttaaaatcatgccatcatttttctttataagcttaatacccaaaatcacatctacaggaccaaggtccttcatatcaaaatttctagacaagaaagacttcacatcatttatgaattgcatattactaccaaatatcaatatgtcatccacatacaaacataaaatgacacatccactatcatcaaattgtttcacatacacacatttatcactattattgatttgaaaatcatacgaaagaacaacttgatcaaatttttcgtgccattgctttggagcttgtttcaaaccatataaagatttaacaagtttgcaaactttcttttcctttcccggttctacaaagccttcaggttggctcatataaatttcttcttctaattcaccatttaaaaaggcagtttttacatccatttgataaatttctaaattaaaaacacaagcaagtgcaattaagaccctaatggtagtaactttagaaacaagagaatatgtatcaaagaaatctactccttctatttgtttacacccaatcataacaagtcttactttaaatttttctatagatccatcagttcttaatttctttcagaaaacccacttacaatctatacttttacaaccagggggaagatcagtaagaaaccaagttttattatttttaagagaactcatttcatcattaatagcttttttccataaaggtgcatcaatagacctcatggcctcaccataagttttaggatcatcttcaagcaaaaaagagcaaaattcagaatcaaaatccttaacttttttagatcttttactcctcctaggttcaaacacaatgtccttattagtattactacaagaagacaaattagaacaagaagtatcacaaatagatttagacaatttatttttcaaaggaaaaatattttcaaagaaagtagcatctctagattccataatagtaccattagaaatttcagacacttttgaattaactaccaaaaatctataagtagtactatgcatatagtatccaacaaaaacacagaatatgacatccttttcttattaatggggatgtttacctttgctagacatccccacactttaagatatttcaggtttggttctctttttctccatagctcataaggggtttttttcaaaatttttataaggcactctattaagaatatgacatgcagaatacaaagcttctccccacatattacttggtaaaccagaacttacaagcatagcatttaccatatcaagcaatgtacgattctttctttacgcaataccattagattgaggagcatacggaggtgtcacttcatgaataataccatgcatttcacaaaaattactcatgtctaaagatgtgtattctccacctctatcgaaacgtaaaattttaatttttctttctaattgattttctacttctgttttatatactttgaacttatcaaataattcacttttgtgattaactaaacacacataacaatatttggagaaatcatcaatgaaagtaataaaatatctcttaccaccatgtgttaacacatcattactatcacatacatcactatgaaccaattcaagcaagttagtttctcttttaatacatgtagtaaaactctttctaggttgctttgcttgaatacatgtttcacatttttgttttaaataaatggaagccttaggaataagattaagaggcatcattcttttgatagaattcagattcacatgtccaagcctaccatgccacatattagaacattcaacatttgcaacaaaagaagaaatattggatattttattaatagagtgagacataagacttaacttaaacaaaccatcacaaatgtagcctttaccaataaaattaccatgtctcgtaataacaactctattggattcaaaaacaaccttgtacccttgttggactaacaaagaagtacttattaaatttttcctaatatcagaaatatgatagacaccatctaaaacaataaagtttcttgaagatagctctagcttcacttgaccttctcctaacacatgtgccatactcccattcctcatgctcacagtacgtgtgcttgattcctgatataaagaaaataattttttatcagtacacacatgaacattagccccgaagtctataaaccaatcatttgagttaaaaacacaatttaactcagggctagtgacatggtacctgtcaaatggggaatcagaggcagcactggtggtaacaacattagcctaaggtttagggaaagacgtgggctggcgatgacgttgaaaacaattcttagccaaatgattagctcgcccacaaacaaagcaaaaaatttcattccccgaatttttatccttaggcttattgttgttattaaaagcattgttcttatttttagaaaaggaaggctttctaccaaatttatttttgttaaacccatgccttttgaaggacttagagaaaggtttgctagagctctcaacaagataggccttagagtgagaatcagatttttgcaagtgtttttgagatgaacgatgtttatccttaatgtggagacagacaagcaaatcatcaaaggtaaaactttcatgtttatgtttcaggcttcgagcaaaatcagtccacgaaggaggcaattttgaaatcatgaaagccacaagcataatgtcaggcaaaatgattcctttcaatttcatgtcataaataatgttttcaaattcatggatttgatctgaaatagattttccatcaatcatttgaaattcaatcattttttcacaagagtaacaacttaaaccttttttagcagatccatatttcaattcaagtgcttcccataactcaacaaaagttttggtatggcaaaaaatcttatatatgttatcagccaaagcacttaaaatgcgtccatgacataaaatatctttatcagaaacatcatgcttaatggttgcatcagtttgaactatatcagtagaggaagttgaagtttttatttctcttttagaaatcacagagtataaatccaattcagtgagccagaatttcatttgttgttgccaacaaaaaaaaatttcacccataaatttttcaggcttactggaaagggacttaatcatatccatggcgaacattttgataaaataggatgctactgcagaaaagactatgcaagaagaaagagaaaaataatttttctctctaagactattaaaaaataaaataaaaaatgagaaataaataagaagcaaaatgcaaagtctttaattaaataacaaaataaaagtagcaaaatgaatttaattgacaacacatgaataatgcattataacatacaataagtagaaggaaaaaataaatcaggaaaagaattatttaccttgggttgaagcgcgcaaacgctatccttagagagaaaatgcacctaggtaagaaattctgattgcgctcgtctcccaagatacgacaacccgttggtttcgattgtgtgcagcgaaaggatccccgaaccttatgaacaccaatgctcttactctcaagaaataaatttttttataagagaagaaatagaaaattttgggataaagggatgagactatagctctgtgtgtctttaaaaaagaggacatatatatataaatatatatatatatatatatatatatatatatatatatatatatatatatatatatatataggcatttatgcaacaacaaaatatgaccgttggaaaccaacctacaattgtcaaaacaaacgtaacaaactagttgactcattgaaacaaaaatcttaagaaaatataaaataagtattttattttataaaatagaattaatataagtaatgtatatttataaattttaaattatagcacaaatatttaccaacacccttgacccattttct

SEQ ID NO: 3061 - DNA, 568 bp, Glycine max
  Intron number 4 from transcript Glyma02g05430.1 (locus Gly ma02g05430) derived from phytozome v7.0 (chr-ID Gm02; pos 4371747 to 4372314 reverse strand)
ttcagtttaaacaaaaattttacaggatattacaggtatttgaaatgtttatatgttaatagaatcagtgaatgatgactaaatccaaaagtcattgctttgcagaattttttccatgcttcaaacggtggcttttgttcttatttggattttggtagtattttctgcttcaattgtgtgttattggataaataattataagacaactagacaagttgataattcggagctagagtttaagattctctgaacttgttaatgttgattatgtttgaaaagtttgaattggttcatccaattgtatcattgctaagaaaattgtgacctgaaaactgcttgtccgtctcaatatgtttagaggtcgtgagttcgaatctccccactaacattctagcaaaaactaacattggctgataaaaaaaaactttttaataaatgggacatgaatatcatagtttgtgtacagtgctcatttttttttactctgttttcttgtatagagctgaaaattttcttttttcttttgttttctgtttgattgatgttgatagtctctttaatagaaaag

SEQ ID NO: 3062 - DNA, 3426 bp, Glycine max
  Intron number 9 from transcript Glyma19g13070.1 (locus Gly ma19g13070) derived from phytozome v7.0 (chr-ID Gm19; pos 16322019 to 16325444 reverse strand)
aggtattctctattttctactataatatgattctgctattttttttaaaaaaattctaataggatactttaaaatgaggcaaatgtttaaaccagcatctgtagttcatagatgtggacatgtttattgatgtattactggaataattcaagctctgcaatttctcctattactttagtctgttgttaaaccaacagtgttttaggaccagcttgatgcatgacttcattctagatagtgataaaatatgcatgtataaatttaaaacaggtaaaaatatacataaaataccccttatacttcagtttctgtgtaatctaccttcagaatttccaaattggtaaaaacctgcttactagatgggcaaataaaatcatttgaacttgatgtgtgagtgtgaaagacttcctctgcacatgaaacatctactctatttactgaaaattgtcagtgtgtactttctgtaatcagaaatgtgtttaaatgacaaaaaaaatgagtttgctaaatgaccaaatataatctgatagtttaagctgggttttaaaagaacaaagagaaaaaatggaagtagcaaaaatgagtatgtttagatggatgtgtgatcacataagaaaagacaaaatgcaaatgattgtacacgaggtgatattggtgtgatactctatcatggaaaatatgacaaaaaataagttaaggtggtttgaacacatgcaaaaaaggccatcagaggtatcaatgaagagtagattgcattgtttttaatcctgtggaaaagggtagagggagactaaggacattggaggaaattattaaaagggatacccctgagaatttggtttttaatggagtttaatcattaatggattatgtgattcatgtagttgatctcacttatttggctattattgttgtcttacttttggttatcacttgacttaccataaactagtggtttcaagtgaagtacatgggacattttgttagcacagtgaatatctaatgaatggagtgatttgctgcacatttagtaaggttctaaggatggttttgaccattttgtaaaatatgctgaatatattgcagaagacatgtatgatttagcagtagaaaacaaagaaattaaaaattacgcgaaaacaaataataagatttagaaaactattttaaaaacatcagaattagcagtggatcactgaagatagatatgagttgggcaggataacaacatgttgccatctttggttaattattgcaggcttgcagtagttaaattttaatactgttaagttagattatcagcctttttattaactttgtagttatggtgctgctattaaagagtagcagggcagtttatattagatgcccgctgcaattcgctacccactttgtggtgctttctaccattgccatggcggatgtggatttctttttaattaagaggttcaaatagggtttttaaaacctttcttgcacttctgcatgttatcttctcctactcgttcctgtgctgattgccactcatccaatcttctcactccagtcaccattggccagggattccgattccagctcccatcatctgagtttaatcatttctttcctttttttttccttgttttttcatctcttctttttcatttgttctttttcccttcacattctcatcatctcttctctatttttcattcccccctcccccttctccgttttatttttattcaatttttgtcaccatctatactgtttttcttgattttttcttctttttcttttattcaattttttcaccatcttgttttttcctccttttcttgttttcttctgttcttttaattcagttttttttatcattttttccctttttctgtttttctcgttttcttgattcttttttcttctctttctcacttctaggacatttttaggttatatttatcttttttttagagctgttatgagatttccatgtgtattatttcatggaatatatttttaatttttttatatttgttttattagtttatattatttattattcttttgaatttttctacatgttatatattctttttaattcatattgtggatttttggcttttcgccatggactgccatccgcaatttataattttttggttgtatatgaattgttgtgcatatatccatctggtaatcaatttattgttgaactatcttaattttatggctttaactcctaatttcaaaagataatatatatatatatatatacttataacttgatttaaagattaatgaattagattttagtaattcataatttaatataaatgtggatgtgttttattataatctgaagcgttgacttaatccttggttttaacttttcacattgtctttgcattttaaaatagccaaaatcttaattttattgacttaattcctgtaaaaatgtttgctattgacaatgtgttcatactatactgtcctttctgttttgagtgaaccgtggtttgcttatgttttgtgcttgtgaatttatgtcccgaatccttatacattcaaaacttatattccctttaatcttttttataagatccatttaactaatttataagaattaagaattaaggataacattaaatatgtttaatatttatattttttgggatatactatctttttagtccttaaactttttaaattttttttgtttttaatccctaaatttattttatctgcttgtagtccttaacttttgttttttttacttttaatcccttgagaggactaaaagtaaggatagaaaaaagttaaaaaactaaaaagttaagggactaaatataaaagaaaattagggactaaaaacataaattttaaaaagtgtatggactaaaaagttaatttatcttttttttttctttcaaaattactcttaatattaatgaaacgaataaaaacattaatggatactgatctaattgtttgtcaatataacctttcactgccatgatttttattaagagtatttctgtaaaaaataattcttataaaaaggatcaaacaccactttttacttttaacttgggtagaggatccggagggagcataaataatatggcatgagcataaagacatgaataaaactttgaaaccgtagatgatggctgctgaaaaaggttttatgtatttatttattgatatatattttaggcttaaagatggttttggtcacggaaaatatgatggtttttagttttaattatataaaaaatgctgttttaatctctacatttaacaaaaatatggtgtcactcgtcaagaattaaaagtacctaacttataatttgaagacctaaaaataaataaaattttaataaaagattaaaacaaaaaagccatattttatatgagcctctggttttcatctctgcaggtggc

SEQ ID NO: 3063 - DNA, 2084 bp, Glycine max
  Intron number 1 from transcript Glyma10g05790.1 (locus Gly ma10g05790) derived from phytozome v7.0 (chr-ID Gm10; pos 4534088 to 4536171 reverse strand)
tcgccgacaaagtccctccttccttcgatcgcgcggtaattccattctcatatacatccctttctctctttcaatttttattttccttccattaattaaacccatcgtaaatcgaaatcgttgatcgaacaagcttgcatcagcatcgttatgttctctgaagctcagatccttgcattcttttactaattagctcccttcatttagttgttctttcaattatcgctattctgaaaaattataattgaatgtttttaagtaatcgcattttgtttgttatcaaatttaacgattgactcatgatttctgcttgtctgttgtgattgttgtttctgaccattccatttgtttgatgtgattgtttaggataatttttttaatttgttcgatgcattttttatttgagtttatggcaatccatgtttagatgctaacatggatatagagcagaaaaaggttattgctgtgttcaaacaacgaatgcacactcaccgatggttcagttttaatattttctttttgtctaatgatattgcaaatgcgtgtcgcagagttacctttccttgatgcataaaaatcatttttggattgactttcaagtttcaagtttcgtgtattaacaacatagcatttgatttgagaaacatgttttctgtttttgcatttaattacgaaaatgattgttaggagtagaggggaggggaagaaaactacactacttggtttcgaggaccaagacctccttacaaactaattttctaaattcttctctttctttttattcattgattcttagagcttttatacacaattgcatatctatattcctactacaataaccgctacaataaccactacaataaccgctataataaccactacaataaccgcacccccactacaataaccactactagaatgataactacccctatgacaggtttccatggcagagcatcttcttcctaacaatgatccattgttttgattttgtttcatggtttctaaagtttgtatagaaaataatgaaaattttctattgtcttctattttcttttttactgttttctgaatgacgttttctgaaatcaaggattaacggaggatttttaatttcttactgattaaaatgtcttaccatacaatctcagggactagttctgggtatactacaacaacattaaatgttccaactaataagatatgattaagaccatttttcatttctgaagtagggaatagcatcattccgaacaagtttgttgtattctatgtttcaaaatttgatttgtgcaatttgtgtgactaaattttagagagtaggggaaaatgtgaaggtgcaataagaagcatgagtatagtataaagtttaaagtagaaaaccaaaacaacttattagagatgttctggttttttcattttaaaaacttaaaaagagttattagttcttaaaataattcagatgttcatttgtttaattttgttttcggaaacaggaaacaaaccaaattccttagttttaacttaaagccttctaacttgtaaaagtgtaattataatttccctcaattttagtttaccgtaaaactgagttagaagttaacatttctgataaattctctgtaagacagcttgcaaatttatagaaacacttttgggcataaaagtagccccttcaaatatccgaatttcacaaaccttcatcaccaatctcaagcatgtgcaatcataaaatagatttatggagaatattctacttttttaaagagaaagttctaccttaaccatgtcatataaaatcacctttctcctgttgttattcttcttttgcaataaacagaggctcacctttaaagaaaactatagtgtacatgttatcttatgcttggatggctttgacaattgctttgcttgtgatgtttcattgcattgttttccctcttgctaaaataaattcctgtatattgattgttaattttgcaatttcttttttcttgatcgctccttgacatggaccttatggaagcgtctcgtttttgttgcacttagggttcaaaagggttcaacccagctttaattgttct

SEQ ID NO: 3064 - DNA, 1248 bp, Glycine max
  Intron number 3 from transcript Glyma03g24170.1 (locus Gly ma03g24170) derived from phytozome v7.0 (chr-ID Gm03; pos 30887667 to 30888914)
actcaagtgattgcgaaggtatgctataacctgattctttgttttttgagatatctcccgcaatgtttttttgtccttatcagttatttttatctccatcatcatgattataataccaaaaactggtattgatttggtctcttctcataaagaaaaattagcagtaaaatgtaagatctgttcttacatttactgttaatttttctttatgaaatacttagtttagccattttagttaatgtgactgttatagattattgggccatttttttctaaccagctttaatggtgttgcatgaagttggaatttttttaatagctatgttttcgggctactatatggttttggtaggactgtgggatttgaatgttcatattgtatttttttgtttttgggatgggggaggggaggtgcttagcagatgattttttataagattaagtgtttggtttctatttgattttaaagcacagaaatgacatcatttttgcaaatggtacatttaatgccaacaaactgatggacgatgcagtcttcctactatggtcgtggctcagaaatttggagaaggactttaatacacattataatcactggtctaccaatattagtgcaggatttttaagaataccttgatatgtgtattataaccattcttgtatccacactctatctatggtcagaattaggtctacctggaatctaatctgatctgtaatttgtacattatctagtacctctggtactttttaatatatatattttatctttgctgatcaaaaaaaaaaaatatatgtaagggtgttttcctattatatatgctgagacccgaaggattgagtaactttgcatttctaatattcttactttatctttgttgtttcttttctgtttatcattgagtgtcccgtattctccaagatcattgtatcctcatgctcactgttaatgaatttcttcttttatttaaaacaacaattaaagtaggaagctacaattagtaaagtagtttttctttttcttgtttttttgaacactaatgtaaatataggttttgatttaacatgtagctagttatgcagttacttcaattttttttatatatccaaatcgatgtagaaggcagattgaaataaatggacttgtgtcaagttgttaactgctattcaaatattatttgactcctcatctatgggcctcttttttgcacaggtcgatcttgctctggagcttttggaggatctttt

SEQ ID NO: 3065 - DNA, 1491 bp, Glycine max
  Intron number 7 from transcript Glyma17g36310.1 (locus Gly ma17g36310) derived from phytozome v7.0 (chr-ID Gm17; pos 40261695 to 40263185 reverse strand)
cgtggaaacttgctaattattgggggtgatcttgcgtaagctctctgcatttaatattgcgaattgtggctattatcacacgatttggtcaattgttatttattatttgtgagtttcagaatgataagttgacaccatttaatgccatggttcttgattgagaattttgaatacttaggtctaaaatcaaatcatgaaacaaggaattctgagtcttctgtacatagttttgtacatttatgtggagggctactaaccagatgccacatcatataccatttatattacccatcaacttctttttgcttcagtaaacagtgtgattaaaggcaaaacgtatcttataactggggtttgcattttgtagagttatctgtgtagatcaatttttcaacttcaattttaggaaattgagattatttaacaagtgttgtgttttttttttcttatggaaacatgtaatatcatctcaagcttttatattatggactttgattttgtaattattccacaactaccacttccttttgaaatactctggcatggttactactagtttcaggcatgctttgatattgattactgattttctgcttcaccccttctaggcttcttcatggaccaggtagttgactagtgtaaaggtgtaaatgagttgtcaagccaaatatttgaagtttgagcttgacttgtgaagaaagagattgttaagtttggctcttttacccaaacaagccaaatttaaagattgtccaaacaaaccaaatttaaagattgtccaaacgagccaaatttaaagattgtgcttggcttatttgactcatttgtggcataattatttttatttttctatgaaacaaatgtttgtttattaatgtagtatttagtagacaccttcatgctaggtgaagtaaaaaagagaaataaaatataattttatattcaaaataactgacttgagattggaaatgaaaatgacaatgacaacttttttttaagtttatggatacccattaaaaatgactcttgataattgaagtaaggtaaatgatatgcatacgtcaataataaataaaattacaatttttcaagttaatacaataaatgacatcacaaattcacaatcatctaggtatacatacatcattgagctatttgtgggctgttaatgacaattggctcatttaaataatcaaacataactttaagcttgagcttgtttgtttagctaatcaaacgagcttgattgaacatttaaaaagttgagctcaaataattcatacatagtttaactcatttacatccagaaaattagctttactgaacttgtttgaaatgtcagcttattctgggactccaaaactgctttttcatccggaaaattcaagtttcaaccgtctctctcaatgttctgtagatatatatatattttttccttcaatgacttatttatgttctgttgcaggtatccaaatccatcagcattcacat

SEQ ID NO: 3066 - DNA, 8985 bp, Glycine max
  Intron number 5 from transcript Glyma18g11320.1 (locus Gly ma18g11320) derived from phytozome v7.0 (chr-ID Gm18; pos 10094963 to 10103947)
ccaagagcagccaaatactctttctgcctgaaaatgtttcagtctctgctcccactactataaaaagcagttttaacatcggtttattaacatcggttttggacaaaaccgatgttaagttaaacgcggtgacatatttgtaaataaagtattattcttaacatcggttttccaaaaaaccgatgttaatgcatacacattaacatcggtttttgaaaaaccgatgttaacatcattagttaacatcggtttttcaaaaaccgatgttaatgtatgatatgttaacatcggtttttcaaaaaaccgatgttaatgcatacacgttaacatcggttttttggaaaaccgatgttaacatatcacgcgttaacatcggtttttgaaaaaaccgatgttaatataaacttttttttaattatttatatatttaaaaaaaaaacatatattgcgttattaattatattttaattaaaaaaataataattaataaacaataataaattcaaaaggtaaacatttaaaaattaaactaaatttttaaaatgaatttcgtaattttaattttattatttcatgattatcatttaaatataacacacatttatataaattatttgatattagttaatttgaaaaaaaaatgtttttaataatagagtttaacttttatagaatttttatagaatgttggtaaaatcaattatatcgtaaaaaaattaaaatttattactaatatattttgatttaattattataaaaataaaaaaaaatcttcataaaaaggtaaatggagaatattgtttaaaaattctatgaaatcctactatatttatgttatcgtattatctttaaattaaaaataaattaaaatatttgtatatattaatttgatttattgaaaatatatgttacagtggtttaatttaaataattatagttatctcatatatttgtaggatttaaaaaaatgatattttcattatttctaaacaaaattttcagaacaaaaataaaaatattttcatgagacacgaaaattatgttttaagtctttaaatttagagttaattataatccacatgtaatttatttttattacatttgtcatttttttattatttttaaccacatttgttaattatgtgaattttttgttaataaatttaataaaaaaatcatttaggaaagaagaaacaaagaaaaagaattatatttaaatagtgatgaatttttaaaagagtaattaaattaaaaaaagttaaaagtaaatgttttaaaatatttttttagctgatgaaagaaaaatttaaaaatgaactaaaatagtatgtcaagacttatttcgaatacacttgacaatgcattgccttatgacttatgtgatgcgtcgaggaagagagtgtcgagaaataatattacaacataaatttttgcatcaatttaataatatgaaaaaattctctataatcaaacaattttctatgcacgtatagaaatattgtcacgctaagcttactataaataacaattaatatttattatcaaataatagtgtaaaaataatttatactatctatatatgtataaactatttgctcttaaaatttaaatgtccaacataggtatattaaactaataattaatctacacattaagaaaattactatggtatattggtagtgacatgaagataatatgtaataatacgatgagttattaactatttgttaaataatgattttatactaaatgttcgaaattataatattctttttggtatgaaatgtttagaattatttttataacgagtatcatgccaagaaaacatgatggatattaatttaatatatataatattcgtttattaaaaacgtcaacatgttaatgttttactttatttacaaagcattctcaaaattaattgtatactaaatttatatataaataaataaaaaatctaaggaaactacaacttggggatttgctactgttaaggggtccacaacaagcatgctcctcacattacaaatgtgttactggcttaattgacatcatgttaaaagaggattatattttaggaaaaataaaaaggcaaataaagtgaccatgatgataaaataacactcagacgtgcatatgaattcttttaatttataattgttgataattaaattatcgataccaaaatagttttttaaataagtaaagaaacccgatgctttgcatcttaaacgggatgcagtagtgtagctgttttagggccaccaaaaggaaggggcatgaaaggagaggacttgattggactcgtttattgctccctccactccaaacaaaagggcatgaaaatatgcaagcgtgaaacttccagaagaaaggcaagaagcagccgtgtgggacacctcattggactgacttcaccgcagaaaggggagggaattgcaaatccgcaattctctctctcccgataatgccacaacacagtttctttgtatttcacagtacaatcaagtaaacttgtttttcttctcttttatattgatccttttgatctattctgaacttcattgatgccttcatgttgtgtttttttgttactgatttctattgttcgttgcgtttcgttgaaatgaatgctttgtttcggtggagctttttcaattggattcaccttattcatgttttgtgttcttaatcattaataatatatcatgataccataagaaatttccaaatccacagctactctccgtaaaaccctaaccaacacctcaatctctgtcaatcgaagccccaaacgccgtttcgcaagcgcgttgtgaactgacgcacgacatcctagcccaaagccttttttctttttctttttttccattcgtttggggtgtgtttggtttagaccagagaaataaagtagaaggaagataatttgaaaaaggaaaaataaattagaaatgtaatgatatgttgtcttgtatagttgaagagaaataagtgaggaataatatttttttttcaagaaaattgattttttgttctaaataattgatttttgctttagtttggtgttgatgttggtgttggcattattgtctttgctttagtttggtgttattttccacaccggtgggacaaaaagagaggagagagtttggaaaagaggggtatggggtgagaggtagaagtagaaggtaagtgtattaggagtgaatgaatgaagtgagaggaacaagggataggaatacaatggggtatttatggaggaacaagggataggtacacaaggtaggattaagtagcttgatttgaatagtgaacatttattagtcgatggttatgctagaagaacaagctagaattggggagagttgataagaacaaatcgtggctgatatgcaagcatgtgtcatgcaagggtgaattcacggatcattcttgttgacgtgtgggtggcctaagaagatgccatgcaagtaatgaatctagacaaaatgaacaagcccgcttttgtctctcatgtttctctcactctcattctctacgataaaacctcctttttaagatcaacttcatccctaggtttggtgttattttgcactttcaagaaacaaaggaacaagaaaaggttaagcaacaaaaagataaacatggaggacaaaaggaccgcaatcacaaataaccaagcaaggaagaaaatccacccattaattagaagcttaagcattggcggcgaaggtgggattgtggggcttgttgtgttcggtggagccttggccattgcgggtttcatggaagttgcttcttttgcgagcaacaaaaataaggcaaaggacactcatgatgatcaccaacaaaaataagtgtgttaaagtagaactaccaatttgaaattgctacgtggcaatcatatacatgcagttggcatggtgcaatggtccactttctcttcttcatacctttttctttcttttattattatcactgtatcatttaattagtcttctggtctgcatttattgattgagggaagcgtgtgagagtgagtgaagtgaagggtgaggagtcactgtgcatgaaaggggaaactgagactgaattaaatatttgaactttctagaatatgaatgttattatacgtgttttataatatattaaaattttaaaatataaattattaacaaatcattgataacttatttgaactttctagaatgtgaatgttattatacgtgttattatacgtgttttataattattaaaattcaatatcttttaaagacgattctttgattttggattgaaaaatattcggattaaaaaaatgaaaatatattattaatgcatacgaatatagactatttatttatgataatataatgatttattatattattatcttttgacatttaatataatgataattttttatttatccaatgtaatgatgtttgatagaaaaaaaagaaaaaaaaacaggataaagatatgtttcctttgtttgtttaaagggaaataaaaaaaataatttctaaaaataaattttattatttctttattaattttattatttctttattgtgtctatgagttttaaatttacattttataatttataaaatgtggtctgtggttctaaacgggaaaacaattggtgttaatatagaagatgatgattcatacatggacacttatgttagtcctttgtctacacaaatgacttctaacaacgtcggagaagaagaagctgacgacgttcatgctaatcgtaatgatcatgataaaggagaattaattaacatcgtctaacgtaattttctaatataatatttcatttcggtacattcatttacataactcatacagtgttttttgataatattaactaactcaactttttctctttaaaggaccacgactactccacctgcctcgcctcctcctcctcttcctcctcctcctacagacgctgatgcgtctccatctacgttgaagcggacacgcaaggcgacacggctacgatcattggccactagaccacctggggcagaaagacctgtggtcaacgtcgatcctgctaccggcaaggccgacggtccccacaagaaaaaattaagaacatatttggagattgtcgctcgtgataaggtcgacgtgacatatgacacctggaaggaagtccctactgctcagaaggatttgatatgggaggatattcaggtatttgagttttcttcgttgattttctttaatagtctaaatttgttatttacttacaataaaacctaatttagtttgtcaggcggaatttcaaatccctgaagcttctgacagtaggacaaagaagaaaattcttcagattgtcggcgagcgctggaggcagtttaaatctgacttgactaggaaatgggcacttgcagtcgacaaggacggtgcggacgacattgtctgtgaaaaatatggcattagcaaggagaaatggactcagttttgtcagacccgcagagacccctcatgggaggtatgtactttgtcattttagttgttttccacaacaaaatcacttcttataatttattgtaataatcattttcattaatgttaaacttttgtaggatgtacggaaaaaggcacaggcctcccaaaagcaaaacactgccccccacgtattgtctcgtgggggttatgaatatttagaagaaaagctcatggctgagaagacaaagaaaagactggaagaagctgcccagtcaggaagcactgagggcatcattgaccctccatctcccatcagacgccacgtgaaatggaagatggcccgcacgaagaaaactggacagatgacgtctgaggcagcaaaggaaatagctgacaggattgtaagtcatttttaattaataattgtaattatctttgtgtattttgtgaattccttggacaaatatgtgttcggtacaggattctttagacgagcaggcgtcacagggatcgttcatcccccatggacgtcaggatatcctgactgctgccattgggcgaccagagcaccctggccgtgttcgtgctgttggagccggtgtcaccataaagcaatactttggatcagcttcacgaacatcccgcagttcttcctccatgcctcttgaagacctagaacagctgacccaacaaatcagagaccaattggaggagtcaatcacagaaaaagtgactcgaaggatgatggaatcctttagccagatgcagtcccagtttcagtctcagatgcaatcacagggaattgcactacctccagagccagaggttggtccctcaggtccttgtgtcagcacaaaggagagttgtgttgctccctcagggaacgatccagggacgggtgactcagacaaatgcggcctatatattgaagaaaatccttcctgcttggttgccctaggaagactttacgagggatccacaacagttcacaacatccctttgttgcatggccaagtcaaggttggtgttgaggaggttaaagatacagaggctctcgttcctgtacccactgacgaggttaccttagtggggcagacacttaacactttccttgcttggccaacacatcttgtgaagcgtttatcagaacaggtattttactctgattaaatgtttatttttttcaattaatttgttcactgtaatcaaaacttgctaattaactatgttttatcaataggcagctgtgtctccagcaaaacctctagaaagcccggatgaagaggtcgatgatcccctgtacctgatgacattgaccatcccacaactatttttgaagccgctccaggttatgtgggatgctaccatattcggggtgtttaatcaaaacttcccgttgtatataaagcacgaagatctctctgaaattgcacatggtggtcaatgtctcagcatatctgttatacagttgtggattctgtaagtcattttagattattattaattaccaaagtaattgttttaaattcattcataattaactttgacttaacaacacaaccatctgactgagacaagtgtgcgagcggggaattctgatgtttatggattcctcgagccacagtccattaagagatctgggcaatcacaatttgaatccgaaagttacatcaagagttggatacagagttcaaaacgagatgtttaccttggagcctatctgaataggtaagtcaaacacaataattgaatttaaataatctatactactacaataacccatattcgtctctactgcagtggacactggcaaatggtcgtcattctacctaaggaaaacctagttgtctggttttgttctttgtataacaggccagacaactaccttaagggaataattaacaggtcagtattgttttcaatacattttcattggcataactcaacaacatcaatattttaatgttccttatattcaacactagtgctttgaaaggacttgatgatactctacaaccgaaatccaaggctgctgctaggtggattgttgttaaggtacgtgatttaaataaaagttctacttatatatattttatgtgtgtgtacactaattgtagttaacgtttaattaatatccaaatttcattatgtatttagtgtaatagacaaaaaggaatcactgaatgtggctactacgtgatgcactggatgtccatgataatcttaggatctttcaggaataattgggagacggtaattgtttattacaaacaaatttggtttttttataattgttattacattattaatttatttttttatttgatcatgcagtattttaatgaagttagaccattggaagcagagagattcaaggcacttcgcatacagtgggcacagtattatctaaaagttaaaaatcaaacataggatgttaggcaactatgtaactttaggttaattaattagtttacgtactttgcattacattttttacaattgttgtttcatcttaacattgaacaacctttgttgatagctagttttttgctaaaatctatttgaaaactgaatgcaaatgatatatgttgtgtgctgtgtggtctgattttaaatttacaggttaaattttggttcttttgtaaaaacaaagacattatataaaaaaaattcctgaaaacaacatctgttttttataaaaaccgatgttaacgtgggttaacatcattttttataaaaaaaccgatgttaactgtcaatagcaacacattcgttaacatcggttttttcaataataacacattcgttaacatcggttttctgtaaaaaaccgatgttaaaattcaatagtaacacatttgttaacatcggttttttataaaaaccgatgttaacgtgggttaacatcggttttttgaaaaaatcgttgctaactatcaatagtaacacatccgttaacatcggtttttataaaaaccgatgttaactgtcaatagtaacacattcgttaacatcggttgttttataaaaatcgatgtaactgtcaataataacacattcgttaacatcgattttttataaaaaccgatgttaccgtgggttaaccatcggtatcttaaaaaaacccggtgttacctgtcaatagtaacacattcgttaacatcggttttttacagaaaaccgatgttaacgaacgttaacatcggttttctgtaaaaaaccgatgttaactgtcaacagtaacacattcgttaacatcggttttttgtaaaaaccgatgttaactttcaacattaatatacattttctgggtgtaattcatattagcaacatctgttatttatataaccaatgttggtaattttacgttaacatcggtttttcaaaaaccgatgttaacgataatactatcaacgtcggtactttcaacatcggttgaaaaaccaatgttgaaagtcataaataaccgatgtagaaagcatattttctaatagtgtccttggcattgttttc

SEQ ID NO: 3067 - DNA, 2150 bp, Glycine max
  Intron number 1 from transcript Glyma06g43550.1 (locus Gly ma06g43550) derived from phytozome v7.0 (chr-ID Gm06; pos 46569602 to 46571751 reverse strand)
agaaggagaagattaacctctctggacacgacgaggttctgaattttctcacttcttctttttcgcattaactgaaaaatttgtagttggaaatgctaccacgcttgttcgaatgcaaatccatggataaaaaataaaatgaaagcaaaaacaaggattctctttcgttctcaaaatttattaaatttattttgcagggcaaatcaagacaggctcgaactgttttaaatgtgtaattggtgaaaagacggaaatgaccccgcgggtaatttgtttgtttgcgtgcagtacatcgtggaaggagggagggatttgttccctgcacattggtcatccaataagaaaatgtaacttttgtttttcttctaaacgaatacgatattgatattttttattggagcgcgattgatttctaagttcgcttttgactgttggccttttactagttaatcctggtaaagatccagacgatatatatttttgaaatgaggtcctttgtaacgtgacataaagatttttttaaatggaaaattttataaatcaaaattaaaactaaactaaataaaaaatattctattataaatgaagcaaaatctactaaagtattatactacaaagaagaattagacgaattctatcaatatccgaactttattctattatatagaaaaaaaaaagaaaagaagtaggttcttttcttgatttgttccacaacaatcgaattctcccaatttttttatttataaaaaagatattctcaattatgtaaaaaattgaaaaattaaaatactcttttcaaattatcaataactccctcatcattttcgattacgaaaaagaattatacatgttagataggatccacacaagaaaaaacacttgccattcgttggttactaggggcatctcgaaaacgtccaggtcgaaatatggctttcaaattaagttccgaattagtggatgctgccaaaggtagtggcgatgccatacgccaaaaggaagagactcatagaatggcagatgcaaatagagcttttgcacattttcgttaatccatgaacaagatttatatagacacgtagacccatgaatccatacatctcgatagaaaaagaatcaaaattgatgaatatatctctcgaaacaaacgaaaaggaaacgaaaaacagaaacataaatcatggatcaattaagccctctcgggacttgcttaagaatgagaaagagaaatcttatgtaaataccacagaataaggtttgatcctattcatggggattctgtaaatattccattccaaaaagagaaaaaatttgaaacaattggaattttttggagattggatgcagtcactaattcatgatctgacatgtacataatgaaaacttcattctcgattctacaagaatttttatgaaagcctttcatttgcctctctacaatattaaaaagaaaaaactgtaagtgaaagtttctgtctcacatacattaattgttggaaaaatatcgtatgcattgatatgaaaagaaaatatttgatacgcaaagacataattgaatgtatctttcaattatttctataagataaaatcgatatagatagattttatcttatagaaataattgaaatgaatgttgattgacacgtgtcacgatcttattggatgacgactgtcacatgtcatgttctgattggtcaatgaaaacaacaatacatttcatctttcatagaattgatatccaatcaaaacatgacacgtgacagtcatcatccaacaagaacgtgacacgtgatagtcaacgtccaattgtgggggtcaacattgcacgattttataaaataggaggtcccagttcgtgaattaaaaaattaggagaccaaataaaaaattggagataaagtgggggatcaattttacaattttgcctataataatttgggaaatgttttttatgtggcatacatacctaaatatatcatcttatgtagtatgatttaggtgcatgtgagttcattcattatgaaacaagggccgaaattatttaaaaaaaaaattaaatctatgaaaattaaaatcaatattctttttccacgttgcttgaactgccttcaccagggacctgctcaggcgcagaatttgcgggactcgct

SEQ ID NO: 3068 - DNA, 7277 bp, Glycine max
  Intron number 5 from transcript Glyma10g19040.2 (locus Gly ma10g19040) derived from phytozome v7.0 (chr-ID Gm10; pos 23572108 to 23579384)
tgtggggtggcaaaaagagtacacctactgaagaggtattttatgtttttctttttttggctgtgttcttacctttgcatatagcatggcataaaagagtattttttttctcggggtttgatacttaatgaaagaaagtaatgaactatgttactgtaattcacatttctaggcttctgtttctttggaaatagtgctttacaatttagatagtagcaacatgaaagttttgatagcagaggtttaaattgtacatttaatgatgaccagttctgccgtacactttgaatttactgtgtaggaatactgataggaatctggttccaattgaagatgaggaatattgtagtattgaattgaaatggtataagttttagaagaaacagagctatgctcccagctaagggaagatttcccttaaccccaagctaatgccgaactatccaacaattaagaaagatccttctcttccctattttctcttttctaacagaatacattatttccttccctttttctctcttgtctaactaaccttccacttaaatccttttttttgggcctgcgagaatataccatgagcttgtcagtaccagacgtaaccttagtagctacttggtcagctgctccatttttgtcttgggttacttgggcttgggtacttatcaatatcacctttctgaggaactgcctggtcctcaatgcaaaaagctgggaattggtatcagcaccttttctagatggacaaatgttgtgttcaatagatcacgaactgatttttctctcatttttgcggttaaaggatactgatatggtctcacattcactgaagtttctcctgcttgtaatactatttgcatgatcatggtctcttgtgggagcaaactttttggccttagaaagatctgttgaatgtcctgcaaaatcaattctgttactgttgctgttggagtttgttctactcttctgcctaagtcgcatgggaaattccttcaacatcacactctagtgcctacaaaacttgttccaaggcagtaatttgtggttgtccccccaatctggtgccacaccacaaaccatctccctctcactttgaatattcgactcctttgtttgcagaggtttatttttcgcatcttgctccttgccctcccatataagtcttaagttttgggtcatgcgatattgaattggttgatatggataattcagttagttcagtttgttcagtttctggttatatgttaggtagtttgataactaattacttttaactaagtactgttgaaaatcagaataaatattctgattctattaataatagcggtatatagacgcattatctttgatttagaggaaatagaatatcctctatttatgtgtaaataatgtaattaacctacataaacatgcatccgctgtgtactctaagacactggtttcactcaattatcccttcttcaatgatcttcatttttattcagtttttgtggcaacttttcttcaacaaaaatcttgccaccgtctcttttctgaagtgtttttcggccattgccttctgctcgcagctcaagttcctgctgccatccttttctgctgtgtttttcaatgactcttctgtgcttcactggtggtgtgtttctaccattgttttccttgcccatggctatttatgattatttcctgtcaccaataaatagatgataattagctgttgtaactgcctttaatacagttacattttcagttacagaaattatctctgaattctattaacttcttgtgtttggtcctctaatgaaaaacaggattagatgcaatatgcaaagctgttttattatcacaaatcagaatcatttgcaatccttgttatgcagtggaacttgttgaatatccttgtagtttagccatttgtagtaacttagttggtagcatttttcagagggcaacagtgcattgtcactgtcatagcctctctctctctcttctttccctatcttttgtactctatatatatgtactagtttgaattcaataaagtaaggaagaaagctttattctggtctccttcaacttggcatcagagcgggttgccgccgtccccgccgcgccgtccgccgtccgccgtccgctgccgcgccgtccgccgtccgccgccgccggccgccatcaactccggcggttttctccggcgagaccagggttcggatcgcctcgaaaagcgcgatccacccctggaactcgtgcagccgtaggccgccgcacgcgcccacacgctccgcctttcctccgcgcgatttccggcgcgtgctgctcacgcgccgccgtaccggcgtcgggagctgtcccttccggtcccggcagcctcaccgtcacctcctggacctgtttcaagcttcaaatcccgcttccggcaagtcgtttggtcagcccttgtgtgtttgcctctcttgtgtgttagggtttgctgtttttcctcttaaatggcctcctctggacctgttttttccttttccgggaccccaaccatcaccactgccaagctgaactggaaaaactatccttcatggtctgcttccgtggagttgtggttccttggtcaaggacaccatgatcacttggagaaaacctccgattctgtttcagatgataaaagagctgaatgggagaagcttgactatcaattatgtgctgtgttatggcaatcagttgagctggatatcttggagattctccgatcttttaaatcatgccgttctttttggaagaaagcccaggaaatctttgccaatgatatccaaagcttgtttgatgcaactatgaaagttacagccctcaagcaaaccggtcatgacatgatcgctcatgtgggtaaggctcgggctgccgtggaagaactaagaaagttccttgtagctgattcattggaggaagtgaataggaaacttgacaagttctacatggttcttattttgaggagcttacattcagactttgatcatgtgcgtgatcaagtgcttgctggggaccaaattccatcaatggattctctcatcacccgacttctccgtgtgcctcatttactgaaggatgagaatcctactgatggagtggagacgtcagccatggttgcatctagagggagaggaagcggccgcaatagtcgaggaggtcgcagtggaaggggtggacgtcctcattgcacctattgcaagaggataggtcacacccaagagacttgctattcattacatgggtttcccgacaaggtcgcacaggtttctaaatcagagaaagcagagtccagattctctgatgaggagtatcatgagtacttgaagctcaaatcagagaagcccagcaaccaagctcaaccctcggctgtaccatgtttttcaacagcgtgtatctctcaatccattgagggtcacagcccttggatactcgactcaggtgcctctgatcatatttctggtaataagtcctccttctcatccttttctctgccaaaaattcctcacctcgttactgtagctaatggctccaaggttctcaaggaagtggtcaagtttcattgtctccctctttgaaattaaattctgttttatttcttcctcagtgtccctataatctaatctcattaagtcaattaactcgttcgttaaattgttcagtaacctttactgccaattcttttgttattcaggaacatgggacggggcgactgattggagaaggacatgaatcacgagggctttattacttggaatccagtccacctgggtcttgttttgctatctcgagacccaaacttttgcatgatcgtctgggtcacccaagtttatcaaaattgaagattatggttcctggtcttaagaatcttcgagtcttagattgtgagtcttgtcaactaggaaaacatgtcaggtcgtcatttcctcaaactgtacaaagatgtgactcggctttttctaccattcattctgatatttggggaccaagtcgcgtcacatcttttggttttcgatattttgtaacctttattgatgaattctccagatgtacttgggtttatttattgaaagacagatctgaacttttgcctatattcgtgtcattctacaatgagattgagaatcaatttggaaaaacaattaaaatttttagaagtgataatgctaaagagtatttctcgtatgatctttcttcttttttgtcttccaaaggtattatacatcagtccacatgtccacatacaccacaacaaaatggtatagcagaaaggaagaatcgacatcttcttgaaactgctcgttccctaatgctaaattcgaatgttcctacacatcattggggagacgcggtgcttactgcttgtttcctaatcaataggatgccctcttcttcccttgaaaatcaaatccctcactcaattgtctttcctcatgatccactttttcatgtctctcctaaagtgtttggttgtacctgctttgttcatgatttgtctcctggtttagacaagctttctgcaaggtcagtcaaatgtgtctttttgggttattctcgtcttcaaaaaggttacaaatgctactctcccaccatgagacggtactatatgtcggcagatgtcaccttttttgaagacacacccttcttctcttcctctatggactactcttcgtctctccaggaggttcttcctatctcttcagaccataatgtcagtgttgtcccatctccctcaccaacttcacctaacgttatctctccacctctggttatcgatcaacccaggacaaggcaaattggatctccagtacctgaagcctctcctagtgattctcgttcttcttcagccagtcctccactcatggatccttcctcttctcctactcattctgactcacattggcccattgccatcaggaaaggtactcgttctactcgtaatcctcatcctatttataatttcttaagttatcaccgtttgtctccttcatatagttcttttgttttctccttatcttccctcactgttccttccactattcttgaggcacttgatcatcctggctgaagacaagctatggttgatgaaatgcaggctcttgaaaataatggtacttgggagcttgttcctctccctcctggtaagacgactgtaggttgcagatgggtttacactgttaaagttgggcccaatggtaaggttgatcggcttaaggctcgcttggtcgctaagggctacacacaggtatatggcattgattactgtgatactttctctcctgtagccaagctcaccactgttcgtttgttccttgctatggcggctatccgtcactggccccttcatcagcttgatattaagaatgccttcctccacggtgatcttgaggaggatatttatatggagcaacctcctgggtttgttgctcagggggagtatggccttgtgtgtaagcttcgtcggtctctttatgggttgaaacaatctcctcgagcatggtttggtaaatttagtcatgttgttcaaatgtttggactaaaacgaagtgaagctgatcactctgtattttattatcatacatctcctggaaaatgtgtctatctaatggtctatgttgatgatatagtgattacagggaacgatactactaagattgtccagctgaaggagcacttattcagtcatttccagaccaaagatctgggatctttgaagtatttccttggtattgaagtggctcaatcaggagatggtattgtgatctctcagaggaagtatgctcttgatattttagaagaaacaggtatgcaaaactgtagacctgttgaaagccctatggatcctaatctaaagctcatggcagatcaaagtgagcttatcctgaccccgagagatataggaggcttgtgggaaaactcatttaccttactatcactagacctgatatctcctttgctgtgggagtggttagccaatttatgcagaatcctcatttggaccattggaatgttgtcatgcgtattctgaggtatgttaagagagctcctggacaagggttgttgtatgaagacaagggtagtacgcaactatcaggatattgtgatgctgattgggctggatgtcccatggataggagatctacatcaggttattgtgtcttcattggaggaaatcttatctcttggaaaagcaagaaacagactgttgtcgctcggtccagtgcagaagctgagtatcgatctatggctatggttacgtgtgagctcatgtggatcaaacaatttcttcaagaattgaggttttgtgaagagttgcaaatgaagttgtattgtgataatcaggctgctcttcatattgcctcaaacccagtctttcatgagaggaccaagcatatagagattgattgtcatttcattcgagagaagcttttgtccaaggagattgtcactgagttcattggttctaatgatcagccagcggatattttgactaagtccttaagaggacccagaattcagactatatgtaacaagcttggtgcatatgatctatatgctccagcttgagggggagtgttgaatatccttgtagtttagccatttgtagtaacttagttggtagcatttttcagagggcaacagtgcattgtcactgtcatagcctctctctctctctcttctctccctatcttttgtactctatatatatgtactagtttgaattcaataaagtaaggaagaaagctttattctggtctccttcaactgaactctctcttggaattatcttgcaagctgttttattagagcttgttgccaaaaagaaaacaatttgcaaccttgaggtttgaatcatggtgtacctcaaaagactcacctatcaaagtaccaacatttcaagtaccaaaactaatcaggcacccctggactggcttcttctatcgacctgtccaaaaaaatgataggacccatgctcatttaacattacatctgggagccatgataatgatgttaccatgtatttggcttaaagtttagtgtgttgtagaagttgcaaattcctagatattttcagtttaacacacaagtagggtgtagtgtccttttttgtcccttgcatactgtgggttcttggtttgcaggtatcaacatgctcctcttaaattttggagatagttgtcaatatggtattatttgttagcatcttttgaggtcacattctttttttttttaacattaacaagtcttcttcagttgtgcacgtg

SEQ ID NO: 3069 - DNA, 1657 bp, Glycine max
  Intron number 4 from transcript Glyma19g33190.1 (locus Gly ma19g33190) derived from phytozome v7.0 (chr-ID Gm19; pos 40809145 to 40810801)
tacaggtgtctatcgattttttcattccttacactgtcctaagccttagataagtgagaattgttactaacaataatataaatttaatactagaagcagtcatacagttgaaattgacatacaaagaatgagaatgtggaaaatgcctctgaaagtttaaaataaatttcctgaatatgaccatctttgttaggatcacctcaaaaaagtgttaggtggaataatgagaaaaactaaagattttgggggttcgatattcttacccattatatacaagtgatttgttgtattcaactactatctgttggattctaggacaattgagctgccggtttgatggttaaaaaggtgaacagtgaactctatcataggcatggagttaaaaaattctccagcaatgcagtaaatgatgatgaaaaagtgccatataaatagaaaaaaagtttgtgttacataattttgtcatgtaatgggaaatactgtagtgattcatggatttttaggttgaaaattagaacttttatctaggataggctgtatgggggagagcttcttattagatgtctgttagtaatgtgatgttcttcagttttttgttgagtatgtgtatcttctgtctgctttcatattgccctggagctctcttacccagggtcaactaaaggatgaatctattaattgcatttcttggcatagcctgtctgatattttgaaggttttgccctgattcttgcttatgatattttagattagacattgcatgattaaaaactattacccagactcttgctagaattattataacataaaatcccgcagaagcagaatgattcaggatgttataggacagccatcatttatgacatcgcaaggtttaggcaatttgattacttggaacttgtgaattgtatacacaagtagtttcggtaaaaaatgataattttgttggagacagttagatactttgggactttgtggactgcagatatggattattaggtaaaaattgattatgctatgtaatagttgttttcatgcaattattgagaagataaatcaacagataagccgttgttaggattgaaactgacatcattctctactcaaatggtgtggtgattactgattttcattaaggttttggcaacaatttagctaaaacattaatgtccactgaccttttgtgttggtgataatttttgtttggagatttgttaaaaggtaacacaagtggagtgagtattatgagatccttaattaatggaacttgagttaagaaagacaaacaaacaagaaaagaagggttctgtaattaggggggcaggtgtgggtgaattcttgtaacacttcattgtgtctccagctctttcccaatattctgaaaagcaggattcacatttattcctatgtactttcagtaccactggtactagcctataaatatattaaatattttttgctgagcaaaaaaaaaaaaacaaacaagaaaagaatttgaagaatagcctattagttataaattatggacaagtcagcttctgccccttcagagtgattttgacaaaggaaccttggtagattggaatgttaactttatctttctgatatatagtggaaaactatctattatagattcactgcactattttctttttgc

SEQ ID NO: 3070 - DNA, 794 bp, Glycine max
  Intron number 3 from transcript Glyma07g30360.2 (locus Gly ma07g30360) derived from phytozome v7.0 (chr-ID Gm07; pos 35367224 to 35368017)
ttgtgcctacattcaagtcacttaaagccagtcctgtaagaagttcttggagttataccttttttttccagttttctttaagttatgctcttgaaattatgataatctctcatcttaaaataatcataaccatcattcattattgctctgtattagtttaggtaaattcctgcattagtttgattagttaaaatggattaaggcattctttatgcaaacgagacaaacacaagcatcaagaatgagaagattgcacaacttaagttttgatgataatttgaatggctatagattgaagatgtgatttacagcaacctcaatatctatagtcattcagttgtacttattaaacactgaaataactaattagaagacttgatcttctagttatttttgcaattattggttttggagtttgtgtacgcattgattcccatcatttatcaatataatatttgttgtggccattgtagttaaacaaatttttaagtgatctttactattctatgaatttaagattacagttctgttgctggaaaagtctagatttttagttgattgaaatctgaaattaattgttgtaccacagaaattagtttgaattgattttaaattgtaaaaataaatatctaaagctactttatatttataaatatgcatgttgaatctcacacacaaaatagcagaattagacttagtgttatctatttactttcttatattaataattgaaataaatttaatggttgttattttcagatacttggtttcttctgtgctggtgtggtactcaa

SEQ ID NO: 3071 - DNA, 4244 bp, Glycine max
  Intron number 2 from transcript Glyma19g22530.2 (locus Gly ma19g22530) derived from phytozome v7.0 (chr-ID Gm19; pos 27370543 to 27374786)
agttatttaggaggaaactccaatctcattctcctgtaagctttagcccctctcttcatggcaagtttatttgttttggaatatttacttttctgatccttgttgcatgagacttaaattggagacccttagaccaaaagttgggggttgagaaaagaaaaaattgttctacaaatttgaggcatagggagcactagtatttctggaagatgttagttgttagattaatgtgacaatactattgagaaaaattatctacatcatcatataattgctgctaatttgcaaaagatttatcaatttctttttagagtaactgaatagattgcagcatagcttgattatgcatagttgaatacaaagaattcgaacatgccaatctttggaatagttacttttctggtccctgcagcaacagacttaaatggagaccattagacagaaagttggtggttgggaaaagaaaaaagaaattgttatatgaatatgaagcatagggaacattagtttttctatgttagagctgatcatttatctttacttataattgtttatttgagcaatattgtttgatgttagattaatgtggcgattctgttaatctcttttttttttttatctagatcatcatatcgttgctgctaatgtgtaaaagatttatcaattttgtttaagtcatagatagaatggactgcaccatatttattacatcgaacatgccaatctttagttgaagctaaaatgtttgtagttgacaaacttgcagatctttctaagtcttaaatgagcatttgaagatggacaaagataaattttaaaaagaaaagaaaaaaaactcttgcaatgtgctaactgatgatatgcagcatcaacaatgattaagccaaccagtaggtgggtttggttggctgcatgggtcgttaggttctatcaaaacctaatttaatgttaattcatttgtagtaaagtgaggttgagccctaatgcaacagtaaagtttccctgtgacccgatggtcactggctttgaatctggaaattgcctctttgcatatgcaagaggaaggctgcgtacagtgatccttccccatacttttgcaaagtgaggagccagggtatgctagtttttttcatttgtagtaaagtcttttttattttaaataatctgactatgttccatttttcttaaaaagcctccattggtcttgtgaccaaaccaccttatgtgagtttttgtcatctcctcaataagtgttacatgatcttttaattagttatattgtttcaaatcctacattttcttctatcttctgtcatcttcctgagcattctcatattcactaacaaggttttctaactcgagagttataatcccacagaatatttgtaatgtgacttataaatggtaagtgtttaccacataaaaataaggtaaaacagttatccataatgtttatcaaaactccatcaactatagttgtattatgttttgcaacatagaatgctccctagaaggaaataatgatgctcatccaaaaaatatcccttgtcaaagcacaataccttagtccatatcctctcacctccaatatcttactcagtttatgtatgcagtatgtactccttttatgttttaataacaaatgaaaagaacagaggaacagccgtgcagtggattgaaataacagaacaagaacagaactcgagtttgaaacagaacttaactttgatttctctccatcatgttgtgcaaaaccaaaaccctctattttccaaatgttgtcactccttaatgatgaatgttgggtttacagacatcttcgcagcataaaagacaatgggtttatgtcttgatatgctgggttcacaatgctggacttgatggaaactaaactccatgcagtgtctgagctttgaatgatttgcagaaaacagatgtggatgagacttttgatcaattcgtgtgattgagctctccaaatttaatgcttgacattttctttagctacaatattgcatgtaatgtgtagtaaatgagcactcaaatcaacgttgttttgggtcaattgggggcatatataacattttttttttacttgaatcactgagtcacttcttaacttgtgagtttatttgaatttaacattagtctatatttccttttgtcctctaaaaaagaatatgtgaaaatccctttgtttccttttgaatcttcaatgaaatcaatagatatatagcctcctttttctcttttttgaagactgatatataacctccttgattgatctccttggcataaaaataaagttggctctctagtacactctgttggcctaatttactctcattctctaccaagggaggacgagccttgggcagcggtaaagttgtgccttgataaccggttggtcatgggtttgaaagtaaaaacagtctctttgcatatgaaaggttaagactgagtacaataatccccgctcataccttctcatagcgagtatccttctggtgttgggtacattagtttttttaatattctccaccaaagatttaacatcaaaacatctcagttgcgatggtcaccacaacctccgaaccatgtcaccccctgattcgtaactctacattgtgatcatgactgcaattgcaatttaaaactttgttctttaccgtagtcttattgtgaggttgacttgtgtagtttgcacaattttgtacatccccttttattcttataaatgggtatgaggtatcaaattgttcctgttcggctaatctagcaattcttgatctcattgtctcattgaacaagttagtaagccatgttataccctccccccttaaaaacttcaagtttgaataagaatattatctggttgttttatcattgtctatctttctctagccctttcttttcctgaaattcttgaattctatgtaaaatgtataattttgactatgttctttagtgaatagtgattaaactctctatatgttattgttgcatgcccttcattgagcagcttgtagaaataagtcatccattttttcatggtatcttgcataattttaccaaagctttttatgccttctcttcttttttaatgagattcacttgacctactttttgcctttgctgtgcttcttgtccttccaaaccttgcatagctgattgcctaatgccaggtccttgcaaaagagaattattatgttatgctgatagtgtctaatatataccttcatccaatttttaatgtcatgggtcaagaatgagattgcactaaaactgatgtttctgaaatttagactggtgttttttttctacttttagaaatctccctagcattagtgttgcattgcatgtcttaaccattgtcaccagtttgtcttggtgtagcttttttacaagcatatcatacttttgcaatttcattttgcttaatattttataccttaagctttaaagactcttgaatttaaattgtttccaactcactgttaaacaactactgaattcaaaattatattacgagtttatttatttatttattttgaaaggcatattatgagtttatacttcatccatatgttaatgcaaaagtttttacactattggtaaacactaaacaagaaaagtgcatttattgtagcaattaagatttttcatttacaggaaactcttaactgttcaggtggcatcacatgacattggcactatcagtcaatcagaattaaatcccaattgcatgcaatatgacatccaattatgttagttctcatcaattatattttatgatataaagaatacttatcttagaagtactttggatggacttgtccatgtcctagctataattcctccctcttaatagaactgctgtggacttgggtccaaataagtaataatcaattcatatgcaagattatacaaatatcgattatgaatttaaatctctagatcttttgttatgttgcttatatttcatttcatttgagtttctctctctctctccgccccccctctctcactctctctctttcacacacactcacaaacacacacacacataatgtgcatgatgtgtctggtgtctgcatctgagtttgtgtttttatgttgtgcatcacataattttttcgacttcatagcattgtgccttccatggtacaattgtgttgtttactaatagctactttatacttgttgcagaattcttcttttaagtcatccattatcacaaagaa

SEQ ID NO: 3072 - DNA, 1965 bp, Glycine max
  Intron number 2 from transcript Glyma17g17310.1 (locus Gly ma17g17310) derived from phytozome v7.0 (chr-ID Gm17; pos 14112725 to 14114689)
gccggaattccaaatctgaattcggttccattaaggtaattaatttttatgttaatgctgcctacctctctgtttgaattatttaagcctcctatcgcgcaattaattaaattggtttgaaaaattattaaactaatatgtctgtgtgtttggtgatgaatatgagtataccatgctgcgttttaattgtgatagtatggtcgaaggatagcattattttttttcttttatatcatatccttcgctttaaggcagagtctaattggaatatagcggtgtggcattttttttttcttcttttctctgtattagacatgaataaaggttttgcatgtgcaaattcatagatgatcgtatcttctgtactacagtagaattttatcattatttcattaaggacggatctcaagggtgtttcttctttttttagaagagtttggttataaattttcctcacttttagttgggacagagacactggtgagtgcatgtaataattgtttattttagttacaagtttgtgctatatttgacactagtcatccacaatcgatccaatgctctcacagatcttatgtgttaagaaagttctaattaaactcaattactaatttgttgttgcgtgttactaaaaccctttttcttgcaatgaccaattttattctactattacctaatttgctcgtatttctgtcataaaaaatggttttttaagaagcacactaatgtctaacttagttatcataataattcagacaagacacgtttgtccgtaaattaagtagaactagttttgataaaaaaaaattaaaacaatttaatttaattgaaatatatacccaattgatttcatctgtaaaatattacatgtatgctagtgagaggtttggcttaaaataaagcagaactaattttaattaattttgaacggttgaacataattaaaatatgtctaaattagttttaactacaaattgtacattattagaacatgtgtataggaaaaagaaattgattttgagtgtaaaacaaaacagtccttagtcgacgaccatgcaatggcaaattaggaaagtacgtcaaaacaatgcatgctccactatccaaataatgatacatgcctttgttctgttacttttatcactttctaagtttcttcacgtttccacttcatgaaagcactaccaaattacaaaaggcatgtcaggacggctggtgagctaatcataggatatatagcatggatgcttttaactaaagatatgatcttttcaactttcaaatgatttttttttttaatacaaaaagaaagacggaactcaaatttgtattcaaataacacctaactttaccatttgcgctaagtgaagtggtcaagttggaattatctttgaagagccatcgtttaaatattacctttacaattcgcattatgccttcctaaagtggccaagtttttttattagtctggcttaaagtggccaagttggagtccatttggaagagtacttcctttcatatctaactttaaattttacaataattctaattgctattactggaatatgatgtttggccaattgattgctagaatagaagaagaaaaatgcaaaacatatggttaaaataagaggtctagcttatttagtctatcacagcatgaattattataaacttttttagtatttatcttttgattcttattaatttaaaataaaacaataaagtaaaaatatactaccagataagatatcataactaaagtagtagtattaatgttccaaggcatggattaaataataatcactaatggaggcaacaatctatgacttctgtgaatctgtactatgaatgaatacgatttgtcattttccctttaccacttggcgtgtgtgcctatccaatgcagtgccaaggttatctcttttttctgttcattgtcaggtcgaacaggagattcaacga

SEQ ID NO: 3073 - DNA, 597 bp, Glycine max
  Intron number 2 from transcript Glyma13g00910.1 (locus Gly ma13g00910) derived from phytozome v7.0 (chr-ID Gm13; pos 629592 to 630188 reverse strand)
aggttagcttcagataaatttagattattatgttgtagatttatgctttttctttaatttcctttggagaaagcaattatatttacattagaattgtttatattgattatctaaaatacgtataaaagactagcaattctcatgccatcgagaataaataaaacttacggatttgacttctgtcaagtaaaggaagtgcatctcagataataaaatacattaataaccattgattaaaaaatcagcagttaagatagtaactaaactcaaagtttatttgtacacattttattttattttttttgcaatttcaatggttgatttgttggtcaaccataataaatgcaatttattctctcaaatatatatttttttactttaaggggttggatgtaaaactttataattgttacgagctttgatctaatctaggctaggttgattctgtgtcgttgtatcatggagaattttatatatatttatgtttttccattgatgctttggttttataaagatggttgtatatcctagtaacatggaactgtgttgtttggaacatgaaattagttggggtgtgttcgtagagaaaacagccat

SEQ ID NO: 3074 - DNA, 2132 bp, Glycine max
  Intron number 2 from transcript Glyma07g07870.1 (locus Gly ma07g07870) derived from phytozome v7.0 (chr-ID Gm07; pos 6523958 to 6526089)
tgggtctgggaagaaacagcagttggcttctcttggtaaatctctatctcagctattattttgttgtgtttgatgatagcaaagtaattagagttttaagtttagttgagatgttgctggttttgtatatctttatccaagtgatattttttttcatttaaatgaactgaattatcaatgactttggtattccaatataatttgggataaatggttaatttctttgtataggaaaatttctgattataagatatgtagattgtgagagaatggttgagctcttgaaagttttggtttattgagattactctgtattattgcaaattattttggattttgctttgaaacagttgagccctcaaaaattttagtttattgagattattgtactgcaacaaattattatgatttttttctgtgaaactattgagtgtttaaacgtttgattgtttcagtgttcatagagcagttattttatttataaattttaatagtaaatcaacttttataactaaaacattacatttagtgtgtgaaatgctcaagcatttcctaatatcccctgttacttattattgtgagacaatagttgaatgaatgaatttatgcctttacattaatttcaataggtcaattttttttaccatatccaaatactatagaagttatgtttttgacaatacctgtacattaattcctataaattatgtttttattggaatgtattaagaataggcagttttggtccccttagtacatttccgttttctaagtttgtctcctgagctcttaaacggagcacttgaagaaaacaaaagaagaggatgagaaaatatctcacggttgttcctgttttttggtttttgaaacacttgttttgaaaacaattttcagaatttactagtagattttggacaagaaattgattgttgaataaagttgaaatgttcgttactttacaaaactatgaaagctgcactattttatttatttatttctattttggtcttttgctacctatactaaatttaatggagagagagagagagcattgatggggtgaaaggaatttttagtcaaaatgtaattatattttctttaaattaattagggatgggcttgagtctaggttgtcccttgagtccactcaatcccaaccttttgcctaacccaatgatacgcattgggtcttaggttgataaatttcaaactcattgcaccttaccctccttttccttttcctctccccctcccaatctatctattttttttctatggatattaaaaaaattcatatatttgttacttgatgacctagccaaaattggtttggttcagtttatgttgagaataaaattttgcaataagtgacctagccctaattggttggttttgagcaaaaaatttcccaaacctggctgatggcttcccctaaagtcaatgatatttaatgactttcttaatttacccagaatggttgagtaatgatttttgaacgaaacttagaaatcaggaatcaacaattgcctggtatattaattattggtcctggtaattttttttgaagggaaattggtcctggtaaatggtaataataattgtaataatgataataggcaatgatagtaaattaataatactatcaggaaaagacattttctaagtattgactgttttctaagcaaaaagtcaatatgtagatgtaattagtagagaaagtatcaattgggtattacaatattaattatcatgcaaccaatactgaattgtgcactgctgtatgtaataagtcagcatcagagacaacattcatagaaaataaagttgtggacgtgtaattggaaataattgggaaggtgcaaatatacatcttagatagcagtttcatggtaatttttttaacaaagattacaacatagctgatctgaagtgagttcaaattcaactcttatttttttgacctttatatctacataatctactatacagggcaaagaaattagcatagtttgactagctaggtttatgtctgcaagggctgattcatcctaggggattgattatattaatttggtttaattatatattgtttattgttttgatgttttgagtggtttttgccaggtgaattg

SEQ ID NO: 3075 - DNA, 5729 bp, Glycine max
  Intron number 10 from transcript Glyma14g21790.1 (locus Gl yma14g21790) derived from phytozome v7.0 (chr-ID Gm14; pos 25471208 to 25476936 reverse strand)
ctgttgaacatctattggcttctgctgacatacaggtattcactaggacaaattcttgctctctagtttcagcttttgattactgtattcttaataattcattataggtagttattcactgcacactaaaggtcttccatgccagcaaagtaggaatgacttttaatttgtaatctgacatttaatctaagtacattttttcttccttagaaggtgcccatatagtttattgcgtgaatttatgtttaagtgcaccctgtccaaaatagaactgcttatgagcataactaaatctattattatgattgcgttagaactgtgattttatgaatgaatcctccaaggggacaatgagttcccttgaggtagagaagaattacagaaagaaactgatgggaatgttcgagagcctatcctctcctccaatctctttctcacagactaaccgaatgccctctctctcctgcttctattctatttatacaattcttataaaactaatcaattacaacagacccatcttattgggcttggctatcctattgggcctatacttcccgtgagtcttccttgtgtaagtctctctaattggacgtctaacaatactcccccccaaaagagccaccttgttctcaaggtgacatgcaagaaattgttgctgaattgaagtgacagattccctagttgcttcaaaatcaggaagatccttccactgaattaatatctctgctattcctgaaggatggttgcgaacagctaagggctctaccaataacattcatggtaaaggttgaggctgcaccgatggagatatggccttcttcaaaagggacacacggaaaaccgggcggatcttgctgtctggtggaagttcaaactgataagctactttcccaatgacttagctaacccgatacagctcataggacctgggactgagtttttcatatattttcttggctaagaacttcaatctataaggttgcatcttgagatacacccaatcaccttttgtgaaattgactttccttctgtgcttgttggcataggttctcatatggtcttgggccttcaccaggtttgattttagctcgttaagaactatatctctctgtcttgggttagtcgattgacttcttccactgctgagggtacagttgttcctttcaaaagttgagggggatctctgccataaaggactctgaatggattcagttttgtggagctgttgtaattagaattgaaccaaaactctgcccagctcaaccttttgggccattgatttggttgcgttcctgttaagcatcgcaagtaagtctcaaggcattgattaacttcctctgtttgcccatctgtttgaggatgataggcagaactaaatttaagtttagttgcagcaagtctaaacaattcagtccaaaagtggcttaaaaagatcttatctctgtccgaaactatggtagaagggaaaccatgaaatagaacaatttctttgacaaataactcagcaatgtccttagctgtgaatgggtgactatgtgagataaaatgggcatatctagtaagtctaaaccaccaccagaatagcatttttgccttgtgctttaggaagtccctccacaaagtccattgatatgtcagaacctaaccagtgtaggaataggtaatcgttgtaggagacccgcgattgtgagggactgatatttattttgttggaagatctcacaagaagcgaaaaacctctggatgtcttgtcgcataccttcccaatacactaaagatgccaaccttttgtaagttcgaaagaaacctgagtgacctcctattgctgaacttcgatattcagtaagcagtgtgtgaattttggaagaccctattggtaaaaccaatttccctttgtaccataacttcctattctgaaaagtgtaactgaggtgtgaagacgggttgcttaataaatcatgcataattccccacaacttgtcatcagcctggatttctgtttcccattcatcctagtctgaaaactggactagggaaatagcttcataagtcatttgccttgacagtgcatctgcagccctgttgtcatttccgggtttgtagaggatctcaaaatcgaaacccatgagtttggaagtccacttggactgctcatcccccaatactcattagtccataaggaacttcaaactcctctgattcgtatggatggcaaacttcctcccaaataagtaatgtcgccatttcgttacagccatgacattggccataagctccctttcatacactgactttttctgggctctttctgaaaatgtttggcttagaaaagccactggcctaccttgttgcatgaggactgatcctagtcctttattagaaacaatagtctctatgcagaagttttgactgaaatcaggcactgaagatggggatttcagccatagttttttcttagtgtttccatagatagttgtgcctcctccctccaattaaaccatcttttgttaatagttgattgagtggtctagccatcttcccatagtccctaacaaactgttgataatatcgtgtaagtcctaagaatcccctcaaagccatatcttttggggtaggccaatcaaacatcacttccagcttcttgggatcagctgctactccttgacctgaaattatgtggtccaaatattccaattatccttggccaaaacttcatttcttctttttggaaaacagttgatgcccttttaataaggataagactggtcttacttgtctaccatgatcctcatcatttttactgtatattaatatgtcgtaaaaaaaaactaggacaaatcttctcacgcagggtctcaatacctcattcatcaaagcttgaaatgtggaaggtgcatttgtgagcccaaatggcatccccacaaactcataatgtccctcatgagttctgaatgcagttttctggatgtcttcctctcattctgatctggtggtatcctgatttcaagttcagcttagtgaagatagttgctcctcccacttcatccaacaactcatcaatcatgggaattggaaacttgtcagggatggtaattttatttaaggctctatagtccacacaaaacctccaccctccatccttctttactagaataatgggactagcattagggctgatgctgggcctaatctcacttgaactcagcacatcatccaccaatttttctatttcattttttctgatcgtgtggatactgataaggtgtaaaatttggaattgtagccccctttttcagcacaatagcatcgtcatgccttgatcacagttttgaaagatgcagctgatctagacatagctagttctcctttcaagatttgtttaccattaggtgtgggaaccttcaatgtgagatccttaaagttcgccttaatctcccaatcctgccaaccactccattcccaacatgatatcgcttctcctaatccaaagataaagaaatcttgctgaatttccaatccttgaacttgaaagatcacttgcttgcataccccttcacatctaatcatcctcccatcacccacttctacagtgtaaggtggggttgtagtcactgtaatttctctttctcttaacccccccaagatcaacccttggattgtttattggcacacacatgccctggtacaaacctcccatcacattgataacaccatcccctgttggccttatcttgtaactcagcatctgataaccttttaaagggtctccctctataggaacctgtagatctcacactattggtgtccatacttgaacttccctcaggtgacttaaattgactccctttatttcctaggtccaaagtaactactatccttgaggatgtgtaattcctagaagaccctcctcctttactccccggtgtattaccctttgttaacagtgtatttttttcatcaatactttgtgcaaaatccatcaattctggtagagaacttgatgaagtttgagttctgccttcactacatcctttaagccattcagaaaaatccctcttaagatactctggctctgcacctcggagaggtcccgcatataactcaaatcgctcgtggtactcctccactgtcccttcttgtttgagactccacaacaattcgtaagggctctgaatcatagatggttgaaatcattgtatcattgcagctttaaaatcctcccgattagcattttgagcacacaattcccaccattggtccatgttagagcatttccctccattgcgaccattgctgcttggaccctctcaatattgttgactcctttcaatttgaaatatcgtaccaccttactcggccaaccatatacatactcactgtcaaaggttggaatttcaagtttctgccaccgctcgttgcggttttgggaattagtgtgggtatgctgttatttctgccaccggcatggcctccgctattcgacattcctctcactgtctcaattaattctcctatttgcctcctaatttctgttcgctgaagcctctcttcctcgaacattctccttaattcttgcaatacctcatgcgtggtgatgaacccctcgtagctgtgctcaagaaattcaactcgtgcatcaattcctctggttgaaaccatgaatcattccctgaatcgagttctctgatagcaatctttggaatgtgattttattgatgaatcctccaaggggacagtgagttcctttgaggtagagaagaaaaacagaaagaacctgataggaatgttcgatagcctatcctctacccaacctctttctaagagactaaccaaatgccctctctctcctccttctattctatttatacaattcttacacaactaatcaattacagcagacccattttattgggcttggctatcctattgggcctatacttcctgtgagtcttgttagatttcaacttaaaattaatggtactaagtgaagttgcccaacagatatataagctacatcccaagaactgaggcagttaaaacaaattggcattaagtgaagttgtccaacagatatataagcttcatcccaagaattgaggcagacgatgtgggactttctaacaagttttccttgtgtaagtctctctaatcgggggtctaacaggttgcttgtcacttcaaacttcagcagaaaatgacagacaggcataatgataatttagttaggttcttgactgcactactgcagtagaggaaaattttctttatatacaactgtgatgttgtttggaactgaatgttggacagttaaaagccaacaagataataaacttaatgtagcagacataataatgttgcattggatgagtagacatactagacaaagtagaataaataatgaaagccttagagaaaaaagttggggtagcacttatggtagaataatggcagaaactcgcctttgttgttttgggcatgtgtggagaaaacttgctgaagttttagtctaatcactagaggcatagggagactaggaaaagtaaaggcaaagccattaagaaggacttagatgccaatagattgtctgtagacaagatttatggcatcatttgatccttgtagccaatcctgcatatttagaaatggcttggttgttgctgttgctgtttttcgttcacttttcacatgtagatattgctggcactttacatttgattctacagaaa

SEQ ID NO: 3076 - DNA, 7490 bp, Glycine max
  Intron number 1 from transcript Glyma15g08880.2 (locus Gly ma15g08880) derived from phytozome v7.0 (chr-ID Gm15; pos 6300931 to 6308420)
ctccaaagtccttcaagcaattggccacttgagatcgatcgatggatggtaattttttcgtaccatataatatcaattaattagttgcttaatttatgctatgtttgaatttaaatgtgacaaatcacttgtgtgtgtagataggacacacagtgattaattgtgggtcggtaggtagattaacaaaggttatcatatcactatatatgatggaaatttgaatcctttttaaaaaagaaaaatgtcagctatatatggagtatacataacacaaaccctaaaagcataacccaaacaaaccctaaatttccatcgttgattgagaaattgtttagttagagtaatatactactagctaaagaccgcaaagaataataattagagtagaaaggataccttctctctcgtctcctctttttcactctctctttctctctcttatcattcaaaacactgttattgcagtttcctaattaaatacttctcaggtaggcactttatgctgattttgggcctatttctgagtatgctagatgtctttgctccccatggccatgcgagcttgatatatcatacgttgcatgttattcatacaaattgacgtagaacacgaaacgtacttgaattcggctaagtattttaaacgaaaacgtgttttaattaataaaacagaatccttctttaagacaatttgtacggtaatgtggtccataaaaattgtgtcttgttagaaacatggtataaaagttaattgttttatctatttgtctctctcagcatccacacaaacgttggtttgttcaatgatggtcatatgtatgtatgtttagaatgtgtacttaatctagccatttgtgaatgtgaggagagattacacgaaaatggccttggacgtttccttcttgtttgactctttgtcattagattgtctatatatacttattgtctcttaaaaaattctatccagagtcctccgtaagtatactcacaaatagtttctaaaacaagaaagggaagacaaataaaattaaatgtgaatttttgtcttataaataaaataaaataaaaaggaagtacatactgtagatatagagaactagatcaatcataagctcaaacctaccagattgttctggtggaaggacatctcagttagatgttgaggttcgggccatacatagctatgtaagtgtgcatgaacttgtctgcttctgaaaatggcttgcaaacatactaattttttaaatgagtttactatattttaatgggccacgtttgtcggcaatctttccctccctgcctctttctgtatatacttccatgtccatgtaaggttttaaataatgaacctcaactactgtattctttccaatccatatatttcaatttcttacaagtcgtacatagaggaactttccttcaacttgtacctaatcttatatttatcacagagtcagtgacatagcaatatgagcaaaccaaatatttacttgaaattatgctctcacatcatacatcgctgtcccattccaaatacctcatattagatcctcagcagggtgaatgttggcatcctataaacattgtctcgtggtcagtagaaaatcgtgcccatgataaagtatactagtatactaagatagatgtcattgaatgatattctatcatacaaaaaggaaaatttttaaaatatacattttttactttcattttatttttactttttacttttttttactagcattgcatcacttacctcattcatcactttctctttctatatttttttttctctctcatctttccatccaaatttggaatattcacatgttgaattgattcagaattaagttaaatcaaatttgaactaattatttttaattgaattggttggtttaggattttaatttctttttatatttcaatcaatccaaaccaaatcaattctgttaagatcactttgtttggttcaagtcattgggttatgaaaaaaatagttattatattttttttttcaagtttttatctttatttgttatttattttatataaatatttaattttaaattaatgaaaggtaaaaatgttccttattctttaatgactaattatttattttatttgatatttatttttatatatttatcactttatatatattactaatttctttattaaaaatataataaaaagatacataataaacatgaccaaattaaaatacatagtaacaccatataaaattataagaagatcaaaataattaaaaaagaaagaaaatacaaaagtagaagaaaaaaaataagttttaaagactaaaatgtattaatctaaaagttaaaaaatgactaatcaaatcattgaattgattcaggttggaaatagataaatctaagaattttgaattaaaattgaattgaaaaaatcaataattaaaccaatttaattgttttaatttggattgttcaattcatcgggtcaatccaatttgattaacactcctaacccagatctttctcacaatagaatggaatattactcgctaaaatccaaaaatattttgaatgaacaaattattttcatatacccaaaaatgaacaaattaattaagatactagtaataatttttagattttaatgataatattttgaatgtaaaggtattttatactttcaaacaatcttaaattgttatatcattcaaaatatttgatttttataataattacttaaaaatatatacctaaagttttgcttaattagtcagtaaaaaaaagttgatagtataaaaaaaattatactaacaatgtatcaaaattaaactaagtttttatacatgtttgtatagttatagttaaaatatttaagtttgaacaaaatattttttgttcagaaatcaacttcatggttcttctctcttttttttttccatttttgtgatccatcaataaggcttactgctattgtaatgaatttttaagatttgagatgtctaattaagttagaagttaagactttataatatttgatattgatatatccaataaggtgtgcattgcttatattgcgaatatgcaaaacacactgaactaatcaagcaagttatatgcaaaattcaccttagcctgttaggttattacttaagaaataagatattggaatgaaagtatatatgtgacctcttttgatcaaaaagagaaatatatatgtataacctccgatagctaacttagacctacctcacacgggtccttcacgggaaaagtaatctttaggagatcagatcaagaattgtgcatataaaaccaaaatagctacctttctgcatttaatccaagtagctagaatattttatttgatttgaggctttatcaattatataaaacagggataaccatattaaaagttaattaattgtgtcaagaattgaatcaatttaaaactcgaagaattgtttgctttaagaaaatattttgtttccattctctattttttttataaataattgcaaaaatatcacattatttttggctttgtttctgtcttcaaagatttgcataagtaattgtgaaaataaaaaaaaaattactatgtcctatataaactatgtcttcaaaaatatttttaataagttttccttaatttccatgaactattttggacttaatttgaaacattaaaactttagttacaataatgggtatggcaatccaattattcattgatataatgtatcatacagttatgatagatcaataatactaacagattaatttttctaagttgaatgacaaactattagtaaataatcattttataaagtttagtaagtaaatctttattatagtgataacaccaacaaactaactgcataatctgcaccgtgtatggtgcctacacgtcaatgtttgttagctagtgtatatagcaaaagcgttcagaatctagtgtatatatacatataaatataatatcatcatgagctaaatgtttacactatgttagttgatatcaatgatgtatcacttacagttgatatttgtgttttgtgcatcgttatatttaataaactttttaaaaaagccattgcaaattgaataatcaataaatggtcgacagtcactattctcataattaaagtacctactggtttgtagggtgccgtgcatgctgttaccttgcaatagtcaattaatagtcaattttaagtatacatgtgcctgtttaagcttaatctcagaaaaatttaaaggtgtataatagtcacgttggataagttttactttttttttaaaaataaaaagtgttctttagaagttaaaaaaaattgaagaaaaatttaaatgaaatttataccataaaaacacttttgtaaatttatccatgtatttatatgttcttcatttgtatggcaataaaatttcttagaagtagacattgtgtttaatgatttttttattgataaaagtacaaaagatacctcaacccatttatcaaatctaaacaatcaaataaaatgttaaatcgtccaaatttcctatatggccttttttggaatccgcacatgcccaatacagagtgaatatggatttagttggatctacatcaagcaagcatgaaaggtgtattatgtataaagttagaactaattggactctatccttataaattcattgacaattttatcaaattgtctatcatgttaaaattatttgtgatacaatatgaatgattttctttatctgatgatgatgtatctattttcaattatatctattaagaaactctatctttgagagtctaatttatatatttttttcatccaattttttttacaaagataaaaataataaatcgcattaaaattggaaatgcatgaaaataggctaaacgaatatcaatctatttctagcaatgatttcatttaaatgttctttttcagttctttagaaaataattatttttcaaagcaccatcccctaaacactatatgggttattagatcataataaacaattaagcatagaaaataacaatagaaatagaattgcattaagtagataataagaaagagttatattataagagttggtctatcagactcccaacaatgggatttagcctctcattgacatgagagttacactttaggagctgatgtagatagaagaaaggaagtgatgaataaaggaagagaaggagataatgaacatagaaagagagtttcccctatttgagatactcatgcttaggatgtattcattacagaactctgagtttcagtgtgttgtttggtttgtttcatacttcttttataggtctaaagtagcttaaaattcacctgaaattgcgttaagcgaaccttctaggcttagcgagtatagtgatgatcacacgcttaacgcgagattcgcgctaagcgtgagctggccgataagcaaggagacgtgttggacctgtcttacgcgctaagcgagctgtcccaatcttcaattttttttttcaaagctttttcttcacgtttttatatcaacattcctccaaagcacttaaaattttcttcttttgaattttgctggtcaaatattacaatgatatcaattttttcactatttcattaaaaatatcgttaaaatgaagaaattataatcattattcactaaaattgactatcaatttaactcaaatttcacagttattaatccttctatacactgtttcaacactctccttcaagttgaactgaattcatctatttgttgggggcagttatgacttgtgtatcattttagtcccaatacctttttctttggtttgtcccaatatggggctttatagttcttcaaggcgttacttcaagatctggccttgccacattagtaaacacattccaggggttaagcatcctattagtaaatgaaaactgtactacttctatgtttgctatatataacccaagtctaagaattttaatggtttcaactagcctttcatagtccaacttttcattcttgaaaataattttaagttcatatgaccatatagcagtatatgaagaaccatacctccttaatcttgtagtgaatgttaaagaatacacaattgagatcatgatttggaccaagaattcttcttttcaaggttactcttgtttgaatattgttgatcaataagatttttcaagaatgacacattattggtctcagtggtatagaagtttcttagaatttccagagcaaactcctgtctattgttgagtcttcctcttgaagaaagtccttttttgaatcacatttatgtatcagcttcctaattatacttaacaaaaactgaattgaataaatttataaattcatcatataattattttttccttaaaaaaaatcctttttccactttatattcaacaccattgcacatttaactatccacacacctacaactctcacactgtatcattctcatatattttctcccaggtaaactttaactagaatttttattgattaaactataggaaaattgttttctacaagtaaaaccactaaaaattaaaactatcttcctaggatgaaagggttgttgggaaggaaaacatatatttcctgccatataactcaatcaaactatataatagatgattaaagttaaaattaggggaaattatacttgtaatttcttactttctcaagttactttttaaaacttttttattatatatcactaaactcctctaaagtttggattatataaaaaatgatataactacagttaaaatcgtgattaataaatataaaactctagctaaattaaataaaaaaaaatattgagtgttaagtgttgcaaaaagaatgaataaggtccctgtgatacaaagtacaagatatataagttaaagcgtgaaactataaaaaaaaataaaaaacaatagagtgtactttatcctaaaagttaaacatccaaaatacattacaccgaaggataaaacttttatggtaccaaacaagttggatgaaaacatgcaccatgatgtctttgatttcacccaaacatattacagctttgttttatttttttggttcacattgccatgtttatatgactacaatattcgtactgcattggtcctaaatttttcgcaccatataacatctctttaagtatatgcaagttttagatgtacgtaacctaaagaggtttggtcagttgaatgagtggaaacgcatattctgatcagtcactatgcaatttctgatgtttggaatgcatatttgcatacatccaataatggctataagtttttcgaaaatgcttctatatattgcaagcaattttaatagtgacttttcactctgattatgtgggtattaaactataagttatagcatcaaaaggatgtgattaatatgtaacaagtcactttttctgaatactctttgcatgcaggactgcaagaacgacttacttggattggggatttaatttgccaa

SEQ ID NO: 3077 - DNA, 2427 bp, Glycine max
  Intron number 1 from transcript Glyma09g36570.1 (locus Gly ma09g36570) derived from phytozome v7.0 (chr-ID Gm09; pos 42275789 to 42278215)
tttctttcttcccttggtttgagctcgttttttaggtaaagtatgcttctctttctttgccccctttcctctgtttattttatctgccttccaatttttttggttgcttttctttttttcttttcattcggtgccgattgggtgaaacgctaagacattcagaagggtcggtgccgttttgacttgtgaatgtttcgtgttaccttcgcttttagtgattattattattattattattattgttattattattattattcaatctggtgttaaaagttttgggagctggtcagaatctaggattcaaagccacctttttattttctcttttcaactcattttgattgaaaaattgttttttttttgggttcattttctttttctagttaatcatattctactttgaccgatccttgattgattggttaattcggttttttcagtttttcccgaccgtgagatgggtgctgtcgattattgattctgatttgtcttccctgaagctgtttttgattatgctgatgtgatgttgtttgtttacacccttgattttttttagtctaattgtttattgtcctcatcgtgtaaactaatgtgaaccatttaaaagaatgcaaatataaaaggaaatgaggaaaaagtcaatttctgaagtctacatcactctgtgttcaatttcccggtcatgaggttgtttttcggagtattttaaatttataccatggaaatacttgtaatttacgattggttttgaaggaaatgtgccttacaaagtttgggaaaatatgtattctttgtcattgtttattgatattctacgtcagtttgtctatttcatcgcagaatatttatgtgttgggtccatatgtattattgactcccactctttgtaggcccaaattgtgtggttgcatatggtattgttttctttcgtgtccactaagtggggtagcacacctttacattatgcagaaaatcagcaatttcttaattgtttcattaatcattaacagcttacacttaagccgttgaaaatttttatcttcctatttcttgttagtggtggttggattttttcattcctgattttttaagtgtagtttggtctgttttcatatttattctgcatcatgttgtagtcattgttagtgatttctatcatctgtcatatttaattagttgttactctgtagtagatataagtagtttgtccattctttaataaatatctacaacattcatcgttgtcacgatcaattctcattgattgaaacctttcctagagtggagtactctttagtaatcaagcgtggaagattatgttatgttttgattttcttaaaatgggtttcttttatccctgttaagttggggtaattgagtttatatggaaagattcgaatctgcaagcaggacttgacctttggtaccagtcatatgagtgtctctttttgtcaatataacagttaattactcaagcgacatatgttgtgaaaatgatactaattcttctgttcattacctgctcttgctgtacaattttataagcaacaatcaaggataaactgtttccttttcccttttgctatttttttaatattataattacaaaagccaaaagagtgtaagtgcatactattgtcatagatgctttttctctttcaaccatttcatatacaactgaatatacatgatcctaactctaatatattactcaactatagttcaaggaaaacctcactacaagtaggatggaccctttaacgtctttaggatggaccctttaactctaatatacatgtttagttgtcaattaaggccaactggtgctttgtgtatgtatatagctcactacaagtaggatagaccctttaatgtctttatttggattttagttaattgcatttttagaccaatcattaataggaagaatcaataatacttccttgctttttattttttcaaatgattatttaaattttctgttatataattgtgcagcatttgataacagctgttcccaaagctgtctcccttcacttttccgctctctgctccccattcttgcttctgcttgcttcatgtgtttcatagtataacttctatacatctcaagcatcttttgttatttattgatttgatattggttttagcattttcatgtgcactgttttctctcacaattgccagacctacaagttgtttttccatttctatcggatgcttcttattattagaattttacatatttaaaaatcatgttttccaatacatgcctgcaactcttttatccctgatagttgataggaagatgaaagtgcactcaaactcaagatatccatttgtttaaattattccagtcctgatattcaagtactttaaagtaaatcaattatatgatcattattttcaggagctcggcagttg

SEQ ID NO: 3078 - DNA, 8529 bp, Glycine max
  Intron number 10 from transcript Glyma03g40350.1 (locus Gl yma03g40350) derived from phytozome v7.0 (chr-ID Gm03; pos 46133851 to 46142379 reverse strand)
gatcaagtagttgggtaatttgatttggcaatattattctcattgtatatggttcttgttagaaatctgttaatgtcattgttgcattgatgggtgggggaaggggtgcgactcatactcttagcattttcacgtaaacaagaacagatccttgttgaaccagttgtcataccttttctcgattataaacttcaaagttgacattagtggggtttgaagttggaggctgcttcttgaaagaggactcaagcatccctgtgacaccctctacccctcacatatatattaataaaggaataaaaattcaaatattaattaaaagtatttttaaaacatttttaaatacaagcttttcaaatggataaaaggctcacattcactttcttctacatcatattcaaatttgtccaaataaataataaagtcatctcgactcaaagaaaatcatataagtctcatacaattaatatagaacctatatcctaatgtcacatcctatcagagcgtggtgttcccgtgtcctctagcatgaggttcttcttagtcatccacctattcatctgctcccccgaacacaagttcaagatcatcacaggatccaaacacaacaacacacagggagtgagttatcacattcctagctaatagagaaacaagataattaaatatacatattatataaatgagataccacttgcttaaacatagctcacgtaacttcaccacttcatcattcaaaattcacttttcaattatcaatcacattacacaagaatcccacacttcgatcaagatataataacacatcaattagcaagcatatgcaatagttatgctaagactcaatcctatatgcaatgtggtaccatgtcagtgaaaaaccaccctggggcgcttaggagtacataacaagacacaccacacaatgggtttgtcaggtcactctcactaagtaagatcacagggagaccagtcagggtcacgatgttttgcgagaatgctccaaccatatgagatcagcataggcttaaaggagcactcaaacccggtgacccccaaggcctacactccgaagagtccgtcagggcctctccctcctgattcaggtccaacccctaaaataattttttttgcatgcagacactgctcatgaattatacaatacccacgaccttacactcgtgttttaaacacgttcaacacaatcgcactatgatttaacactggctcctaaataggaaacctacattttctctttaacactgcgcatcaacgcttttctcaagataacactggtcgggttattgtacaattcatagcttacaacacaagtaatttcacatcaagtgttaactacacacttatccacaactagaactcattcacaatttcacttctcatagtgtgacaatccaccatcacatgtttacacgtatctcacaaattaacacatgttaaactttacacttatactcaatctcaataacaatattataatctcaaagcaacatattcttctacaattcatcacatactcacaatttgaatcatcatttcatatcctcaatataacaatttatataaaacactatcacaacattaggactaaaaccccttaactaatattacacaattatatcaaaatcatcggtcgaaatatacaaatatcaagaacacaatttatcaagcaattttcattaggacatcaatattttatttataatcataaaggaaaaattgcaatttaataaacatctcaaaataaaaccccaatttaatcctctaaggatccctacacatgttctcactaatccccaactgtgaataactcatcccttacctctgagcggactcacgtgtcttcagccagggatagcaacatctttagcggttccctgaaattctttcagttattcctccgactgctccgatagaattcccaaacgtcagagagacggagaagagattgaaacctccacttatactgtcttcatgcgattcctttttctccctccacgaatattatctcgcaaatcccaacggtggaagcgtgcggaattgaatttcgaacaacatatccaaatttcacaataatccaacggttaacgaaaccgggatcgtagttttaccaagacagctctgggtttctgcgggaaagaaaaatgctacaatgcgaagggtgtttctctcagttcagacatgatatcaaaattcccaacggtgagaatgctcggaattctgtttcgaacatgatactcaaatttcacgacgatccaacggtgaacgggttcgagatcgttgtttttctgagactggtttgatgggctgcgggaaaaagaaagggttttgagaggagaaggggaaaaacgaaaatgaggccaaaaggaggcagctgacttaatataactatttatacctagggtactcagcctattatttgctctatatttatttatttatttttttactaaaaagctttttaaatttatttacgaaaaattgggatgttacaattccacccctcttaaaagaagtttcgtccccgaaacttgccgaaagatcgagaaaaagatatcacgcatatgattctcaatatcaagttgtgtgtctagttgaaactcttttttttgttactccgatcacaagactcctctgcacttaactattaaatccgatgatcctcgtttactcaatgatagtattacataagtaagtcttctcacgagagtgacatctcaactataatagaatgtgaatgacatactatttggagtagaataatatcataggagacactaatgacaaattgaaaagaacaaacaaacacaaggagacgtgactgatcacatggtcgactcttttttgaacatcggacggttcaagaaagataatgagtttcgagactctcacactctaccaatcctagttcacattgactatcgagaatacatgatttgcctacccttgagtctaagcctcttccttcaacatgatctttctcactttcgtatacttgactcataactctcacttaggttcaagaattgtaacgattcaactctaaggttgtctacttgatactaactgggtgctaattagataagtaatacagattactccctacttctgtaagtttgttcaccttgaggtaatcttcacacatatatactcatgtcaccctataactttgcacttgaacttgaggttttgattgttgtttacaatatctaactctataactaggacactagtcatatcatcggtttcctattcaagctctaactactaatctagttctaacgtttaaaaaaataaactcacaacaagattcttgagaattttatccatctcttttattccgggttcaactccaaagatcctcacaatgtatcaaactaacggtaatgtctcccaaaatattatggtgaacaccatggttacctattctaaatcacatataggataaatcttttcataagtcttaagttgtcaagaaacatttatcactatttgtccttctacaagcactcctctaaacttaaaattatttcaattattttactactccaataaggatctacgcggccaagatatcactcaacggtttacagtgaccgacttttctatggacttatgacttactccttacaaggatctcatccgaaaacttaaacttacttgagtcatctccaactagaattaaggttaattcaaggaatgctaaaataacttttggttcgactactggttaaggaaattttatcttaatcttaggtttcattcaatctcaaaacaacttctacccaagaaggatttaaagctatctctcacctaaaaaataacatactctaagggtcaacatcatctaactaaaatgcatacgaaattcttagtacgaacatgattcccaagggtctataacaaccttaaggtataccccataattcaacttaactggaaacatactaaacactattcattgaaaccacaacactcagggtaggagatcctgtcacacattccacgaacacatagtggtcatgaccaggtacacatagaggccacaataggtactaaggtattccttgaagcatccacaaacttttccaaattaaggtaaaaagaattaagatttatctcgctaatcatacaactatcatcaataatcttttaggtcacctaccttacgcaagaacactcactcttgaatccttctatgcttaacaattaatgtcttactaactaccttacactcttcttaaggttccacattaaacctcttagctatacttcataacttttccaactaccctatgttctcaaacaactctatactagatatttctcacgaactacgattacaagtttctatgggtactacacttataagattctcaatcttgcacttaggtggtaactaagcatatcctcaaggaacacaaatacatgacttactaagtttgactttcgtctatgggtaacaaggataatgcatactcaagtgtttcctctcaaacatcttaacgtgattgtcaaggacgaagtctctctttattcgtaatagaagtaacaacaagaaagattatcaaatagtttaactagacatgattggaagatgagcaactaataacaagatgaacactcgattgattaggagataataattttgaataaaaaaatgatcacttattcggaatcaacaacaatatttcaatgaattctagcaacaaaaacatgaccacaatgtacactcatatgaagacattaacaatcacttgattgtgatagaaacatcagtaatccaattgtttgatgtagtctcataacacaaagaattaattatacttaggctttcaagtgaaatcaatttatttgacttaagcacgcaacacaaaaaaaaaggttgcactagaattagaaggtacgatcaaaagagtattccttatgaaatataacttgatatgagtcatccaactatagagtattagcatcactaaaaacaagaaatcagaaacaaccatactacctatgcaattaaggaagaacaccatactacaactatatatacttagaattataaggttcctataacaagtatataacgtacatttaagaagtaagaattaaacaattaataaggatgtattgaggaatcacaagcttcaataactacattcacgactacacacaaaataagggagttaagtagtcatgcgtttacacatcaagaaagacacactcatccaagatatatatatggtccaaaaggttcttgcaacactaatccacgcatcaaaggagaaataagctaactaacaacatacacacaggatgatagaggttcgttagcacattatcaatcaatatcaagactacttgcatcatccaatggcttgccataatgtccaaccgcacttcgcaaattatagagatggccagtctcataactcatgactcaacagtgaatttatggtatagcaaacattaaggatgcaaggcacatacaagcattattattaagtcttatttaatcatgtaggagaaaatacaaataaaaattcaagcatgctcaacaaaagtactcataagtaaccacacagagtgcacaccagaatatgataagcacataacacactggccgaaaggttcgacctgctctgataccactaaatgtgacaccctctacccctcacatatatattaataaaggaataaaaattcaaatattaattaaaagtatttttaaaacatttttaaatacaagcttttcaaatggataaaaggctcacattcactttcttctacatcatattcaaatttgtccaaataaataataaagtcatctcgactcaaagaaaatcatataagtctcatacaattaatatagaacctatatcctaatgtcacatcctatcagagcgtggtgttcccgtgtcctctagcatgaggttcttcttagtcatccacctattcatctgctcccccgaacacaagttcaagatcatcacaggatccaaacacaacaacacacagggagtgagttatcacattcctagctaatagagaaacaagataattaaatatacatattatataaatgagataccacttgcttaaacatagctcacgtaacttcaccacttcatcattcaaaattcacttttcaattatcaatcacattacacaagaatcccacacttcgatcaagatataataacacatcaattagcaagcatatgcaatagttatgctaagactcaatcctatatgcaatgtggtaccatgtcagtgaaaaaccaccctggggcgcttaggagtacataacaagacacaccacacaatgggtttgtcaggtcactctcactaagtaagatcacagggagaccaatcagggtcacgatgttttgcgagaatgctccaaccatatgagatcagcataggcttaaaggagcactcaaacccggtgacccccaaggcctacactccgaagagtccgtcagggcctctccctcctgattcaggtccaacccctaaaataattttttttgcatgcagacactgctcatgaattatacaatacccacgaccttacactcgtgttttaaacacgttcaacacaatcgcactatgatttaacactggctcctaaataggaaacctacattttctctttaacactgcgcatcaacgcttttctcaagataacactggtcgggttattgtacaattcatagcttacaacacaagtaatttcacatcaagtgttaactacacacttatccacaactagaactcattcacaatttcacttctcatagtgtgacaatccaccatcacatgtttacacgtatctcacaaattaacacatgttaaactttacacttatactcaatctcaataacaatattataatctcaaagcaacatattcttctacaattcatcacatactcacaatttgaatcatcatttcatatcctcaatataacaatttatataaaacactatcacaacattaggactaaaaccccttaactaatattacacaattatatcaaaatcatcggtcgaaatatacaaatatcaagaacacaatttatcaagcaattttcattaggacatcaatattttatttataatcataaaggaaaaattgcaatttaataaacatctcaaaataaaaccccaatttaattctctaaggatccctacacatgttctcactaatccccaactgtgaataactcatcccttacctctgagcggactcacgtgtcttcagccagggatagcaacatctttagcggttccctgaaattctttcagttattcctccgactgctccgatagaattcccaaacgtcagagagacggagaagagattgaaacctccacttatactgtcttcatgcgattcctttttctccctccacgaatattatctcgcaaatcccaacggtggaagcgtgcggaattgaatttcgaacaacatatccaaatttcacaataatccaacggttaaagaaaccgggatcgtagttttaccaagacagctctgggtttctgcgggaaagaaaaaggctacaatgcgaagggtgtttctctcagttcagacatgatatcaaaattcccaacggtgagaatgctcggaattctgtttcgaacatgatactcaaatttcacgacgatccaacggtgaacgggttcgagatcgttatttttctgagactggtttgatgggctgcgggaaaaagaaagggttttgagaggagaaggggaaaaacgaaaatgaggccaaaaggaggcagctgacttaatataactatttatacctagggtactcagcctattatttgctctatatttatttatttatttttttactaaaaagctttttaaatttatttacgaaaaattgggatgttacaatcccaccattgtgccagtcaatgtgccttttgttatctatcaacccttatataataaatttgaatactcactcttgaatgaaaggacttggaggatctactgtctttgtaaggaacacgacccttcctgcatcaagaatactatcacttaaatttaatcaatttgaatttcgacagaccatattgaattgattgacatacagcttatgtgtctaacttcaaataatttatttccatgatttattcctcaatttcaaacaattaatctctttaatttattccttctaacaatatagaatccttagttttgaaagtgaccattttagttttttggttatatttatctctatagtaatggtttaatgcaatgtacctaaaagaagaaagcggtgtacagatgtgtatctgtatgtatattaagtaaatgtgaaacctcggacttaaatccttattctgtttggctcacgcatgcaatttatgtctgccttacttcaataatcttctttaacaatttaattagctcgtgttcccaaagtttaaagctgatatgctactgatgtatggcagatcatttcgttctgttactggatctgtatttttct

SEQ ID NO: 3079 - DNA, 1156 bp, Glycine max
  Intron number 6 from transcript Glyma08g14770.1 (locus Gly ma08g14770) derived from phytozome v7.0 (chr-ID Gm08; pos 10762642 to 10763797 reverse strand)
ttaatgtgagatttctgctaaaatcaaagatgggtagatgcacccattctaaatcattcatagcttgatttcaattaatttatgaaaagggatatagttttgataggtggcttctagttctagaagaataaaatagccagaatagttttgagtataaaaaatttctggagcaacttatacaaagactagctttgtcttaaaggtctaagattttaactcatggtgtgcaaaacaatttccaattatggctttaggcctttagctgtctcttgcaatttttatcagaatattgccaattagaactctgcttagtaggcagatgcattcttagtcatcaatgagtttttgaacagagaaaaagtttgtttaccagggtatattaattggtatagtatgtaatctacttttgatcattctaagcatatgaatgctgcttgttcatcacatagtaggttcgttatagaggaatttttgtaagggtacagtgttaggatccaaatgcaagtgcaaacagcaaagaaatggtgtttcttcatgtattggtgatactagggaactgccttaaatgctttacatgctgagaacccaaataacatcgaatctactatttgcttgagtcttctctggtttgtgatagacctttctgtacatccaaagcaaaatgttgtataaattgtttacagataactttcagtacatctgcatatcatcctgaacggaaatgtgaaatgtaaatatgtgaatttcttgccttcaaatatttttggtctatggacctgtggtggcttatcaaatgatgaatcatactactgcaagtttacatttgattgtgctggatatttattttttcagtggaagacattattttctcttcatcaatatgtgttgttagacaagtacagcatggctgccttgaaattattgggaaaattgcctgcttatgcaaacttaagcttctaagaattggtcaggaacattcatgttgaaaaggacaaaacactgggtagacttttggtagttgcaaaattcacatcatattttagctagcaagttgatttggaatttttattaattgacatacttgtggactttattttagtcaaagttgaaatttgacttgtttaaaaaatttatttctcttcattcctgtagataa

SEQ ID NO: 3080 - DNA, 1575 bp, Glycine max
  Intron number 1 from transcript Glyma11g33750.5 (locus Gly ma11g33750) derived from phytozome v7.0 (chr-ID Gm11; pos 35621458 to 35623032 reverse strand)
caaccatctactccacttcttcacactctgtgtgtgtaagtgcttacattacattacaattcactcatcaactgtgctggatttttgtttctattgattgataaccttttttgtggacaaaacggtgttgcttagtgttaacaatgcacagcctcaaccaaaagcatctttggttttaagtaaacatttggttctgttttgtgctcatctaattgcagtgagcaatatgattcatgaaagaagaattttttctatcttgttagtgttgttcttctaaatacctccctccattcaagaacagaagagatttggtttccataattcccattaagaaattgtgtttatagcaggaaaacttgttttgagtagaggttcatggtaaaaattgtgtcttttgatgggaggtttaatgctctatagtctgaagaaagtattggaatggaagcacaacgcaaaaggtgagcaatatcatcctgtagttgctatgtgggcctcacttgcttttgtgctttctcatactgtaaattcttttggtggatgattctgccaaatgggagtttcaattgctggttgagattatcttcatgttaggggactagggcctccttccatggtggaagtttgtcaatctgtgttggagatatgatttttgtgctggacacacccttttagagttcactgttgattgggaatgatatgctttataaaagggttgtgtttttggtagttagcaataagtgaaataaagaagtaaagaaaaagtaaatcatttttatggcttctcttttttggggttagagatttcaatattatgccttattgatgaggaatctctggattttaagatgtttcaggccaatatgaaaatctgacctatatgattgatctttttctagagtaagccatgacaatttaagtgtgaattaattttgaataatgagctataccaggaaggaaaaggaaatttgttatgttgatggacagggacattgttgttacttgatagatgtaaaattgagctacttgatgctgaggataaatcttgtctccacaacttactttactttattgatattttaaaatttttgcaataattgaatttaattgtcaagataattagttcacatacattttaattgggacaccttggtgatcaaaaaacatttatttaaattcacttgatttgataactacaagctgagaaaatcttggtctctatttgtccatcaccaaaggaaaagaaaggggaaataattatggaaagtggtatcaccttattttataagatggttgcgatgcattaattggcatccccacacttttgaagcctaaacctgtcatgcataaaacgttcctaactttttgtttatgatgtaaatgtggaaatcggcattcaacttaatttgaaacatctcgtttggaatacatttcatattttcccattaggtcatttatcctgacattttggttttgtggtgttactctgttgattctacatacctgcttgaataggtcctgactcctgatgttctgctttgttttctctttgacaaggaaaataacaatctcttctta

SEQ ID NO: 3081 - DNA, 3565 bp, Glycine max
  Intron number 6 from transcript Glyma01g40220.1 (locus Gly ma01g40220) derived from phytozome v7.0 (chr-ID Gm01; pos 51988393 to 51991957 reverse strand)
caagacacttcgtatttggtaagcctccttaccaaaaaaaaaaaaacaactaatgcctacaactgatgtgtatagattccttttcccgttttgaatgatttcagcaagtggttgtttttccaatgtctttgcccaattttcatcgagctaatctcttttaacttttgacaatgtctactattaaagatataaaggaatgccatggatgaactccaatgaagaagaaaagatagctagtgaagaaaattattggaatagaaagaatatttaaaaaacttcgtaccccattgcccagaggctcttcgctatgcgaaggtatgggggagggatgttgtacgcagccttacccttgcatatgcaaagaggctgtttccagattcgaacccatgaccaacaagtcaccaaggcacaactttaccgctgcaccagggctcgatttgatcatagaaaatggttcacaattattattacagaattatcatacaaagtatctttcattacttatataaactctataactaccataacagaaaactaaccacctctaactaattataacaggcttagttagttaggtaactaacaactaacaaacttagttagttaggatggttaatatcccccctcaagttggagaatgtatatttgacatttccagcttgcactgaagaaaattgaaggcgcctagtggaagtgctttagtatatgtctgcaagttgttgagctgaagcaatgggcagcaactttataaggcctgaatgcagtttctctcgcacaatgtgacgatctatctcaatatgtttcgtgcgttcatgaaagacaggattagcaacaatgtgaagagcggaacgattgtcacaaaacaaaagagctggttgaatgtaaacaatcccaaaatcattaagcaagtgggttaaccattgtaattctcatgtagcactggctattgcccgatactcagcctcggaagaacttctagagaccgtggcctgctttttggatttccaagaaataagggaattaccaagataaactgagtagtcagtgatagatcgcctggtatcaatgcatcctgcccagtcagagtcactaaatgctttgagctgcaatatgctggaagcagagaaaaatataccagaacctggtgctgctttcaagtatctaagaatcctataggctgcttgctgatgagctgaagaaggatgagctacaaattgacttaagtgttgcatcgcaaatgtgatatcgggccttgtattggtgaggtaaataaggcgaccaatgagcctacgatatgatgaagctgttgtatcatcaagtggagttccagattgttggtgtagtcttacagcataatcaattggagtaaagacaggtttgcttcctaacatgcctgcatcatgcagtatatcaagaacatattttctttgacaaatattgatcccttgtttactacgagccacttcaagtccaaaaaaaaatttttagtcaccaaggtctttgattttaaaaacttcatccagaagctgagtgatggacttaatctctagaagatcattgcctgacaagacaatatcatctacataaaccagtaaaacagtaaaagattgaagatgctgcttaataaacaaagaatgatcagaagagcactgtctatagccatgtgagatgaggaaagtagacaatcgagcataccactgtctactggcttgtcaaagatctttgtaatctaaaacttgattagattttgttgagtgcataccaggaggcaaagtcatgtaaacttcttcattaaggtctccatacaaaaaggcgttattcacatctaattgctttaaatgccagttgttaacaacaactaatgcaagtaacaatctcacagtagttatcttagtcactggggaaaaagtatcaaggtagtcttgaccctcaatctgagtatactccttggctactaacctagccttatatctttctactgacccatcagccttgtgtttgactttataaacccatttacagccaatagcagatttgttaggagggaggtcagtcaaaatccaagtatgattagcctctaaagcctcaatttcaacattcattgctttgatccatttgtctgattgggaagcttctttaaatgacttaggttctgtcttagagaagaagttaggtggaaaaccatttttcttataacatgtttctactgtgtgattgtctctactacagtaactgcaagaattagataatcttgtattagcagcagcattaactaaactcagattgccaagtgcatcagaacttgcaaattgcctttcttgttgtgccatataagagaaagctttgttaatcgatggcaagggatccgtcatgagtatgtttgatctaacatgattgtattgatcattgagaccacgcataaactccattattctatcttgatctttccttttctttacttcaacaagagcatcacagccacatttagaagcacacgtacacacaggatcggctcgataactctcaagctcatcccaaattgttcttagctttgtaaaataatcagtaatatccatgtctccttgtttaattgaagctaatttatgttgtaaatcagaaattcgaagcaaatcaccttgtgagtatcgggctttcaaatctttccagatatcaactgcgctgtccatccataagatgctttgacaaatggaagttgcaactgagtgtacaagccccgaaaccaccatgttatttgctcttttccaagttgcgtgcaatctatgattcaaggttggtcaaggaagggaaccatcaacaaatttcactttattctttgcactcaaggccgtgagagctgatctagggtgcaagtagtaagggctatgaacactgagagattcatcttgttcttcatccatcttgaagaatcaacaaagtacaaagagaaagaggaaggatatagcgcagcagagttcttcaattgaagagctctgataccatattgaagatataaagaaatgccatggatgaactcaaatgaagaagaaaaggtagctagtgaagaaaattattggaatagaaagaatatttgatcatagaaaatggttcaaaattattattacagaagtatcatacaaagtatctttcattacttatatactctctataactaccataacagaaaactaaccacctctaactaattataacagacttagttaacaactaacaaacttagttagttaggatggttaatatctactctgcagttctatttcatcattccccattgcctatcccattgttccagaataacacgtgacaagatcttagttaaaattcttcttttatgacttagtttctaattaccatagatcccaacctttgttgtaatatttgccaaccaaaaccctgtctctcgtgaaaaaaccacagtttttttaattaatgcgggtgaaaggttttctctaagctttaattagtgccacatcactcttgttcctccagagtattggtttctgtcagttcttttagctaaccgttttatctttgcaaatttgtgcag

SEQ ID NO: 3082 - DNA, 641 bp, Glycine max
  Intron number 12 from transcript Glyma16g01470.1 (locus Gl yma16g01470) derived from phytozome v7.0 (chr-ID Gm16; pos 1042998 to 1043638 reverse strand)
acagcattaggtaaagagtggattattgagttgctccagtttttgtccttttcatttaatgaagcattaaatatttaattttcaagaatttaataggtgtatatgaacttttgatattttgtcaaattttagttgtatacttttctatttagatctgtctttaactttgagaataattctcaaactgaaaatattgatgatttgaggaatgcagaatgcctgttttaaaacattttaagtagttttgaggtagtattggcactgaaagccttttttttttttttcctgtctttctactcaagtttacagtgtgtaattgcttcttttcccccctcaagtttctgtttgcaaaaccgaattgctactttaaaaactcgatactttctttagatgatcttgctcatgaagttgagatggtttttagctttgacttacaatctatgtaaggacaatattatataggcaaaaaggtaagctcaaattcgtccttctcttttgaggatgaaagcaaatgaataaaagttatttgtgccttgtgggttttattaaatgatattgtctaaaattgtcttctgttgtctgaagattgtcgaggctaaccctttattttggtaggtcaactattaaaagatcgctatcag

SEQ ID NO: 3083 - DNA, 1713 bp, Glycine max
  Intron number 9 from transcript Glyma07g31430.1 (locus Gly ma07g31430) derived from phytozome v7.0 (chr-ID Gm07; pos 36442789 to 36444501)
ctctctagttatcgttctttttctggtaagctgttgcacttgctgctacataattggttgtttcgctttagtctcttcctcaagtattctcttttcatgtactgatgatgtttggctgcagttatttggtgctctggaaatgtaatttagttggaatgaacttgtgttttagttggttctttgaattatatgtattttttaatttttctagctgcttaagtttgtgttttttttcattaatgtgtcacaggtcattttttttgtctcacatatatatcctttttcttcataataaatatatctattgagatgattgcctttgtcttcattcatttactttttaagtttaactggacataataagcattcaaaatacattatataaacttgtaaatgttttattaggtgttatttgtttcagtgatttgattttgaatgttataccggctggattcgaacccagcccttatggaattgtcttacgacaattaccaaccatacggaccaagaatgccggtaggtgttatttgtttcaagatatatgattaaaatcccaggatcactataggaatgttatgattgaacatcaattgatatattggaaaagagtaatatcaaatcacacagaatacagcagaattttctgtgtcagagtcatagactcctacagagaagagttctctgttcaaattactagaaaacaatatgcatatatcccctattacgcacacatttaataatatgtaactgctcctaactttctgccccaaactgtcaacatgacagttaccattcaacttattcaaataatataaaatataggcttaaatatgtttttgatccctaataaatatttgctttttacatttgctccctaatgaatttctgttttgcgttgagtccctaataaaacaacaattttatttttggtccttgacactttttttagtccttgataaataagtgaattttgtgtttgcttcctgataaatttttttcatttgtaattaattgggactaaaaacaaaattcgttaatttattagggagcaaacacaatttactaatttttcagtaactaataaaaagtgtcaaggaccaaaaacaaaattgttgctttattaaggacttaacacaaaacaaagatttatcaggaagcaattgcaaaaattgagtatttatttgggatcaaaaacatatttaagcctaaaatatataactactaatgacagtgttattattacacctatttaatatgtcccggctcctactttctgcctttaactgcccataattctcagttcccatcatgttattactgggtaaatacaaaaatatgctaggctagcatttagtgtttgcaaattttgattagtaaaaaaagaatgtggtagaaggaaatggggagttgaagttaatggttgggtgggtatcagaataacttcccataagaaagtaatatatatccaccctttacaatgggaataaagtgaaacatgacatgtttctttccttggaactaataatgcccatgttttccttgcataggaatgtcatattcccactcttggaatatttctacaaaacttaaaacaaacatgcttttattgtctagtttttgttttgttttgtaggattttgaatgttttttccagttctatttgttttagtgttattgtttcaatgacatgatgtcatggttgttgtgtaggtg

SEQ ID NO: 3084 - DNA, 1918 bp, Glycine max
  Intron number 1 from transcript Glyma20g34340.1 (locus Gly ma20g34340) derived from phytozome v7.0 (chr-ID Gm20; pos 42722808 to 42724725 reverse strand)
gtcttcaatcgggtaagcattgcaatggttttcttttttttctctgattcaattcttgaacacactacttgtgaggattatttttcttagttataacttttttcttacgtgaagattgaattgtcaattaatcctagcttcaaaatcagtcacacattatccagaacagtaaaagggtgctgcttttttaatggttttggttttcatgtaaactttgattctcttacatggaatgtgagtgttaagatgatgttgttggagttctcaagagtgttcgagatagaattattagaatgagaattatgttcagattttcaaggattaattagaaaagattagtgaaaatatcatattctagaagaggaattaggaaaactcacaatttcagagacgaaaaacattgctgaattcagaatgtggtatgaagccattgttgttttaattccttgtaattttattcatttagcaaaggaaaagtatgaacatataccgtattttggggtgaagctgaaaattagaaaaagattgagagaaatttgatcgatgtaataaataacagtaaaaacgtaaagagaaaaaaaaatgaaaatgaggtgaaagaaaagttaggtgtattgtatgtttaataataacattttagcctaaataacttataaacagctgactgacctcaggagaggaataattaacttagttaatattttgcagaataacgaatttattgtttgtagtgttgggtgatgcttagccacacctgagcgttacttattctattcccattcaacagcatacatgtccggtttgtgagcatccatttctccataattgacatttaatttcagtttttcaaaaccttttttatagtaactccttccaagaattaattaaatattaattgcccttttaaaaaattaaatattaatttattagaaagaaaattgtcttttatttaatattgaatttattactttagtgtacttttgaaaaaattaaatattaattgattaaaaaaaattatttatcaatagctataaaaatgttatcttttttccaaattttgataataaaaaaataagaaagttaatgtaattatttatatcattttatatataaatttttaaaataaaaaaatagtatttttaaaattatgaaaaagaatatttcaaatcaaacaaactctcccgaatagtccatgtgaatgttgaatctaagaatgattattagaccaagagactacaaaagccagaaagtatacgccattgcacatgaaaaggaaatatttagttacaatactttaaacattttattcgcccaaacacccacgtgacccacgtaactatatggattaaaaaaaaaacactcacgtaactatacttaagttgatcacctaactttacagctctatgggccccacctgtggtcatgatgtttacttgtgtagtttctatcaggctcagactcgtttggacttctagatattgtgaacccgatggacagaacgcaactaaaaaaatgaaaaaaattgtcaaattgaagcatatatatatatatatatatatatatatatatatatatatatatatatatatatatatatttatgtgctgggcatttaatgtaacctcatgtgaagcatcagtattatcagttaaaatgggcattcaatgctttgtttgtgaaactgattgatttggacctgacttgttgtcccgtactcagctgtttaggtttctttataaaattacacaattttaaaattgaatattaatataactacatgaatagatccagttaacaaaaggacagagaagtcaatttctatttattttatatcatggaatgattacagcagtgcttgtgaggctatatatttattgacattgtaacatggattattgaacaggtcacctatcctaac

SEQ ID NO: 3085 - DNA, 2050 bp, Glycine max
  Intron number 1 from transcript Glyma13g29520.1 (locus Gly ma13g29520) derived from phytozome v7.0 (chr-ID Gm13; pos 32437652 to 32439701 reverse strand)
ggggagcacggtaactaaacttttttattttctttttttcaattcctgatttggtttagtaccagcagtgattgtgatttgatatttgatatgatttggtggtgttgttatttccagtttttagtttgacaaagccgataacattaccaatttaccatagatgtcatttagaaaaggtcaaaggttaggcttcggtcttcagggttgttttattgtatcctggtttaatgttgtttgactaggcaaatgctttatcgtgtcatgtggattcattccgtgcgttgtaatgcccgaataattgattgcacatcgagttggagattaacttcggaggcattttgtgcacataattattgttacactttgcacagggcggttgactaattgcttagctatgagtttcttgaaacaaatttaagttaggttctcctcttaccgaaaggagcttgatcttatctttacatttggttattattattctttttgaacttaaagtggagtgttgagactttggcaagtgtaccaaatcgctcttaagtaataaagctcggtagtttaaaaaggaaagacaattaataaagatgttaagaccagacaaacccaatttgcccctgatgcctcattggcaagcctattttaactacctatctcccaaatgcctttgcgaagattcaataattaaaatgcattaaggttaagttctagatgttgcttaaatgtatgggcagtgagttatcattctatgcctagcaatggtaacccaaggattcttcttttcttaatatgttctgttaggcgttaccctttcccaagtgtataaccccctaaatcttaaatatttattgggaaatacccagcaaataaaacccaaaaagaagtttaagaacaaatgcaagataacaagaaaaggattagaacagaaaaacccgtgagaaattccctttgcattgataattcttgaagcacatagctaggggattagccactcatggccattgagggcttacaagggggtgaaggaaagaatggggataaaaacaaagaatatagagagagaagagagctcaggcttagagtgctgagaatagtgctctgagaggtgatgattccctgggactgcctctctatttagtgggcttatgggctttcgtagttgcactcagctccacacctcgcgcttagcgcgttcagatcgcgcgctgggcgcgacatgcaggcttagcttgtgcttctgttggatcgcgctgggcgcctagctgggcttaacgcgtaacgatttctgctccttcgtgcttaacgccacgcttagcgcgtgtaattcgcttagcgccctgatgcgcgcttagcgccactgttgggctgggcctgcttcagaattccttctttctcttcctttctgttgccattttttgcttaatgtaccctcatttttcgtatctgcaaccagaaattcaatttaattaatgttttcaacttttaattataaataactgctaaataattaattttaagtcaaaatttgactatttaactactattaattcacacttatttagcagttatcatggagcaaggagttttcatgagcatttatttggcattgtgtttacatctaattttcggaagtagatacttacttctgtttcacgttgacttagtgcttgtctgtgtaaaatatttgtatgatgggagtaaacatcaagaggatataagtaatgtgaaacttggaaaatatgatggatcttgtgctggaaattgtactaggtttctttctgcttgaagtgttaaactattaattctggttgtgcttatccatagtttaattctcaatgaagcgataaacagactcatgctgtattatgtttctgctgaacttttttgtttgtttgtagtcttgtcttcgtgctctctcttttcctcttctctgtattctgtaaggactgttccagggtcttctgtatgggccacctttgaaaataaaatactactattagatatgtaattactggactgattattaatcttctatctcttaaacagcctcttgcag

SEQ ID NO: 3086 - DNA, 1708 bp, Glycine max
  Intron number 6 from transcript Glyma15g41690.1 (locus Gly ma15g41690) derived from phytozome v7.0 (chr-ID Gm15; pos 48874631 to 48876338)
ctctatctgatcggcgattatttgttctaaagcaggtaaacttggtgtcttaaatttttatttcagaagttttctgggataactttatacctaaagtgcaggaatttcatgatgggatgtctgtacctaatgcaatgtactaaaagaagtggagtatggtatttttggcattaaaaatcatatcaaagaattagttttgcattttaacattattttttcctggtctactgtaataatttaaactatgactctttcccatctgataacttaaatatatagcaatgggtgtacatgagctgcatttctgcaaggtgatgagaatgcctgtgaagttaattactctaatcatacctcacaagtatggtagttgttgatgtttaataagatagtggaaactcaactcaaactaatataagggaaaagagtgaatcagagtaggcaaaaataaaagaatggtttgtttgattggcatgttatcttgaatcatattctttaatttatcttcttttggtggtctaaggatgttagtttttgatgatttgaattggttacaaccatggtcaatatagcttttcatggaaggtcaacacattttatatgcattgaagtttggggttgctttctttgttgctaacttgctattatttacaatgacttggcaattgctttctttgttactgcaattagtctaaattattagttgctacttttgatttgcttttaaaatgctgtacatcaacttggaatattttattttattagcttctggggcttggtagaactaagaagggtgaggcttattggataatgggattctgctatctatgccactctatggtgtatttggctgatgtgaaatgcctatatctttaaggattcttctcagcttaaatctgacatgggacagaatcatttttatggcttctatttggtatttgggttatggtctctttatgggagtctccttaacagatacataatgggattgagagctttattgaattactgtctgtatttatttccctgtttatttattttctggagaagaaaaaaagaacagtttggttaagtaggaaatggcactcaaccagtgttgttaaatagtggccatggcgccaccatggcagaatggtgtggtggtttttttttgccaaccaccatatgcaatttgtgaagggatgcctgccatggtggtgccataaggcacactggcgtgtttatatggcggaattttggccttccgtcatccgccatccgccattgatattactgcactcaattgcaattgaattttattgatgtgaaacatggctactaaataaagccaaaatattgcaatgtccaagtactgctgaatttttttatctgagatcatattaaaagaaataagatttgattctaatgaattgtagctacatatttatatcttgagtaattggaaagaatattcctttgaatgtagaggaggcactttcctcagcaaatgaaaagtaaattcctgtcttgatatccaatgatttagtctgtgtgaatgctgcaagaaatgatggtttcaattgcctttaatattgaaagttctagaatatgattttactgattttaatattcaatttcttcttcataatcctaatatttatatacatggctcgtatttatctctttgggatttgcagcctgtaggggttgtaggtgcaattacaccttggaa

SEQ ID NO: 3087 - DNA, 4255 bp, Glycine max
  Intron number 8 from transcript Glyma01g07530.1 (locus Gly ma01g07530) derived from phytozome v7.0 (chr-ID Gm01; pos 8325370 to 8329624)
atactagggtttgatttcattgataaaccttcaaggtgagagaaccttctagaattttgccctggcagtttcctgacatttgcacatgtatggatatttatgtgatttaattgtttgttgataaattctctttatcttgaaaaataaagtgattgaagcagaagctagatattattcatattcagaaaggataagaaacatatggcatttatataaataaataaccaaaaattaataaaaattttatatacattattgcagaaatacttgtaggaatatttatccactggtgaagtaactcagaagaatctagagaccaaacctatcaaaatgttgctcagaccatgaacttgccttagaaattgtacctgtatagataaatatctatgaatctgattctgaaaactacaaaatattttaaactgtactttatcaagaatttttgcacccaatgaggaaacaaatttaggcggagaagtcctgttatataatgaaaagctttcagttatcctgcctaaaaataatcataaatgcatcgataggaagtgagacagtaggaaggagatgagtaactgatagagtgttatacattatataatgcattgcatttcaatgtcacctgaaatcatggtttaacaatataattagaaaatagagcctgcatttccttttttgatttggtgtctgtaagactaaataaccctgcctttcttaactatttaaatttattgcagaattattgattggatattgaccaaagtggatttttgttttatcatggggaattatggtttctgtaatgaccatagttatcaatagccacaaatggcactgctatatatcaagcagtggcggagtgttgtagctgctggctgttttatttttgaatcgtgcaaatggtagtggaaatcacgaccagattgtggaggatagtgccgttattccctgttcacacttcagcctctccgttttccagccaagcccattcgtgttgtggccaagctcaccccattgtctttctgtcttctatgataaccatcggtttgtcctttttttatttatttattcattatatgtgaccttatatctctgttatttgtcaatctatcttttagaacacgtgcatgctcagccagcttattgatagactcagaaattcagctccattttatagaaaacaactcctcacaatcagtgatgttaacctctgtttcaagtgtttgcaaactaaagaagaagaaaaccaaatagagctggactccttcagaattgaaataggaacaggaaagtcactggaaagtcctggcagagatggataaggacctcctccttacgcagcagagccaataccaccccaaaaaccactcagaaattcctcccttaaataatcctatctctccctcctcgtgtatgattcccatatccttttcccccaatctcttggtaccacctgtctattcagtcattctctctccctcattctgtttttccctttcttttagtgtcacatgtcctcctcttctcacatacactgatacacacacccacataccttgctgccctttaggctcatttgtgacttgacccaattcctccttcctttccctgcttctcctcttgtacagtttcattatgggcttatcacttctatttaatcttctttctgtttttagttgcttttttttttttaatctagattctataacacctaaacagcttactatttgaaaagatgttgctgtactcttcttttttagttgacttgattgtctctttacatctctgacctctgttttctatttaatcttctttctgtttttagttgcttttttttatttttcaatctagattctagaacacctaaacagtgtactatttgaaaagatgttgctgtactcttcttttttagtttttttttggaaggcaaaaatatagatttattaataagataatacagtaccaggggtactgtaagataaatacaaggcaccaagtgtgccaccttccaaaacagaaaccaacaagccctaagcccaacagcacccagcacgaaaggaatacaaaatattaaccaaaatactccgaaagattggaagaccagtggttaaattgagtatggaatcctttctctctagctttttgccaagaccaagcaaggaataaggcctcatccatcactttatgaggatcaaaaggaatgcccttaaagagtaaggaattcctgtgccgccatatagtaatagttaaggcgatccaccacccacaaactttgctatgctttcttcctgcaccaaaaccattgcagaattgggtaaagtgactagcagggtcatttgaaagagcaccaatagcctggatccacttcatggattccccccacaatcccctggtcaaattgcagtggaagaaaagatgcccagcctcctcctgatgacccccgcaaagagggcataaagaatcctggataggcacatttctccttagcagattggccctagtgggaagcctatccagcagcaacctccaagagaaaaccccagccctcggggggattttcagcttccaaagattctggaagagactcctttgaggaacagggctagcagaagacatgaggagcctataggctgacttagtagagtagaggccattaggttcagctttccaagacattgaatcctgcacctgatactgaatagatatggcagagatgtcatccatgaaagctattgctaactcattctcatggtcaaacagattccttctccacttaagatcccagctccataaattctgataaaacttccccattttagagatggggagattctgttgtctgctgatcaggaagagaggatggtacttttgctggaggttgcacccctcatccacccaattatcctgccagaatcttatttgatccccacacccaaccttccaagccatgttctgttgaaatatgattgaatcaggctggtgatagagctttttaagatccttccaccattgggaatggcaggctttatctctgccccacttcaggtctgaccaccctccatatttagaggttaaaactctgccccacagctgattgtgtttagaggctaggtcccaaatcttcttttttagttgacttgattgtctctttacatctctgacctctgttttgaagtttagaaaaacaggggagagatgacagggactttctgaatggcttcaaattaactatgacatatatgagatatctattcttttccctgttgttgtgtatagtatgttcttcacattacttctttgcattccactaatttttctgtagcatccatccatctcctttttttttaagtttgtttttatgttctcatttctctgattgttaatcatagctttaaattaatggtgaatgtgtgtctgactatgatttttttattattaattatataaatttaatattggattcttttcagtttttaagcatttatatgtgtatactataaaataattattatttatttcgtatatataatcttcagtatatcagccattatgctatgcactatcttgctatagcatatgtgagtattgtacccggttcagaatatgtaagctagttatccagctgtccttgacagctggcacctaactaactagaagcttgctgtgcaagccttagaatcttcctctagaagtttatgtaacttgctcttcaagtctcacagctctatataaactacagtgtaactgaaaacagttgggaataatattagaattcataaatctcacaagttctctctctctctctctctcttcactctctctctcttttcgattatccttttctaatttagcaattttggggttgtgctgcaatttcgaattgataaattatggtcatgatataagtaattttcacttgataccctttatgcttgcaaacattagtaccaactgaccagtggctagtcttaggaagaatacatgaggttaatatacacttctgtttaaccagatgtaatatgatagtgtataaaggatttggtggtctattcttttgcatcagccattactcattagggagttaaaatatttgtgatgttttcacatgtattgtactccagaactgaattagcatttttcatggatctttgttactataatttttgaaagtattttgaacttacaaaatattactcaaagctgcttatcacttgtctgaacagggcagctattataaaatcgttggagcagctatttt

SEQ ID NO: 3088 - DNA, 5523 bp, Glycine max
  Intron number 4 from transcript Glyma18g51060.1 (locus Gly ma18g51060) derived from phytozome v7.0 (chr-ID Gm18; pos 60027422 to 60032944)
tgtcagcaaaagtgtccagacactgcaagggctacgtaaggtgttgatgagttatctgcaccagaagctttctgatactagtgtgggttcaagatttgtggtttccagatcaccaaatgattgctatggctgtgcaactacatttgtaacacaatgtctggaactattacaggtgctagcaaggcatccaaattctaagaaacaacttgtttcagctggcattttgtccgagttatttgagaataacattcatcaaggtgctaaagctgcccgcgtccaagcaaggattgtactttgttctttatctgaaggtgatgtaaatgcagttactgagttgaacggtctgatacaaaagaaagttttgtactgccttgagcatcatcgctccatggacattgcagtgactactcgtgaggaattgctattactttctgaggtgtgttctttggctgatgaattctgggaatcaagacttcgtgttgtgtttcaattattattctcttccatcaagttaggtgccaagcatcctgccatatctgagcatgtcattcttccttgtctgagaattatatctcaagcatgcacacctccaaaacctgagacaccagacaaagagcaaagccttgggaaatcttctacaaatacaaaggatgagagtaatcaaaatgtatctgggtccttgactggtgcagtcactgtcagtggaacaaaaacattcccagactcatcagaaagaaattgggatgccacacccaagactcgagatattcaattattgagctattcagaatgggagaggggagcttcctatcttgattttgttagaaggcaatataaagtgtctcaggcagtcaaaggtactggccagaggtcacgaccccaaaggcatgattacctggcagttaaatatgctctgaggtggaagcgtcatgctggtaaagcagctaaaagtgacttatcggtgtttgagttgggatcatgggttaaagaacttgttttgagtgcttgttctcagtccattagatcagagatgtgcacactcataaccatgctttgtactcaaagttcatccagacgatttcggttgctgaacctagtgctttctttgttaccagcaacactttcttcgggtgaaagtgctgcagagtattttgagttgctattcaagatggtagattcagaggaggctcttttatttttgactgttcgggggtgtctacggaccatttgtactctaattacccaagaagtgagtaatgttgagtcgttggagcggagtctacacattgatataacccaggggtttatccttcacaagctcatagagcttcttggtaaatttttggaggttccaaatatcagatcaaggtacaattgctacttgaataagtttacttgtggttgagattttggtttacatgattttattaaattttttttgttttccagattcatgcgagatgacttactttctgaaattcttgaggcccttattgtaattcgtggcttgatagttcaaaagacaaagttgattagtgattgcaatcggctccttaaagatcttttagatagtctgctgctagaaagcggtgaaaacaagcgacaattcataagggcatgcatcaatggtctggaaatacacagagaggagagaaaggggcgtgcttgtttggtatggatggattttatttttcaatttcctaacttatttatcctctaaatcagttgcagtaattttctatccaacaaagtatcaatttggttacatgagaatatgattaacatgtaaatattgaatggtaaatttataatagactcttacattggctcattgtgaacttgatggaatctacacctacatttgcagtttatcttagagcaactctgcaatgtgatctgcccctcaaaaccggagcctgtatatttggtggtcctgaacaaagcacatacccaggaagagtttatcaggggatcaatgactaagaatccatattcgagtgttgaaattggcccattaatgcgcgatgttaagaacaagatctgccagcagttggatttgttagattttcttgaggatgactatggaatggaattgttagttgctggcaatattatctctcttgatttgagcattgcacaagtttatgagcaagtctggaagaaatcaaatcactcatcaaatgtgactaattccaacttgttatctccaaatgctgtcaactcatccagagattgcccaccaatgacagtgacttatcggctccaggtttgtttctatcattgaacatgtgattttccttatttgttaaacatctggttttgaatttatatactatattttatgatattccagggattggatggtgaagcaactgaacctatgattaaagagttggaggaagatagggaggagtctcaagatccagaggttgagttttccatagcaggtgctgttcgtgagtgtggtggactggagatactattgaggatgattcaggttagcacttttttctttgatatctgtagacttgaacattgttgttgtatttggaaatttgaactattaagtattatcataataatacttttggttgtagcgtttggaattgatgaattagtctctctgtttgacaacctgtatgtgaattttgacgtttaagttcattcctatctgcctacaacaatgtagcacactagcacttatagcagtagaagtattaattacaagaaatgaagcaaagcaatattaacatgtatatatcgaaaattttatccaaaatgagttgcatttctttagttatatggggcaaaaccaattgggtatatgatccatttatgatatatgtgccatatcaccatatggaattttattttgatttaattttacaatttaaaattctattttgttagttatcctttaaagaatactcaccaatttcaaatacaaggagatttatttaaggttaggagaaaatcctatctcatcactaaacatcatggttcttgtcaccgagaatggtgtagttttgaagtataattctttctctattttttatattattttttcttatttcacattgaccagaccatgccattgttcttgacagcatcatttagtagttgctttgatgatttattgtgttggaatgaaaactaatgcagtttgtgtaggatgttcattttcatttttcagatttttctcatgcattgttactgatgtttttgtaaaatgtctaatcctgcagtatgcaaccttaaaattgttaatataattttctcactttttcctgatgtacagcatctgcgagatgatttcaagtccaatcaggaacaactggttgcagttcttaatcttcttatgtactgttgcaaaatcagagagaacagacgtgctttgttgaagctaggagctttaagtttgcttcttgagactgcaaggagagctttctcagttgatgccatggagccagctgaaggcatacttttgattgttgaaagtctgactttagaaggaaatgaaagtgacaatataagcatcacacaaagtgcccttactgtcactagtgaagaagctgggacaggggaacaagccaagaagatagttcttatgttcttggagagattgtctcatccattgggccttaggaaatcaaacaaacagcagagaaacacagagatgattgctcgaatattgccttacctaacctatggtgaacctgctgcaatggatgcgcttgtccatcattttagtccttacttgcaagattggggtacatttgaccatttgcagaaacaacatttggataatccaaaggatgataatattgctcagcaagctgcaaagcagagattcacactggaaaattttgttaggctttcagagtcgcttaagacaagttcttgtggagagagaataaaggacattatcctggagaagggtataactaaaactgcaatgacacatttgaaagatagttttgccaatactgggcaggctggctttaagaacagtgctgaatgggcacagggtttaacactgccatctgttcctcttatattgtctatgctgagaggtttgtcaatggggcatctgctcactcaaaagtgtattgatgaggaaggtatcttacctttgttgcatgccttggaaggagtttctggagaaaatgaaatttgggaaagggctgaaaatttgttggacacattatctaacaaggagggaaaaggagatggattcttggaggagaaggtgtgtaagctgcgagatgcaactagggatgaaatgaagcgtcgtgctttgcggaagagagaggaattgcttcaggtatttatacaaatacctttagtttacttagttcgggtatataaacaacggtgtttaaaatggtaaaactaagttaactgttgagtttttttttttaccttgggtaagaatcatgttctatgactggaaacagtaattggggattctaagtgcttacttttgcaggttcttctctgtttctctttattccgacttccaaacataatgtttgatatgaaattggttattgtactttttgctgccttggtcaatttaagttcagcaaaagttttctgctgccttggttattgtactcctttccttcaccagattggattttcattcagatttgacgattcatatggcatgtgttgtatattctactttaaactctaatgaagtctgattttctgttcccttctgaattgtcctttatatctgatacaggggcttagaatgcgtctagaaccgtcttcagatggaggagaacgtattgttgtttcccagcctgtccttgcaggtttagaagatgtccaggaggaggatgggctggcatgcatggtatgccaggaaggatacagtttaagacctgctgatttattgggtgcttactcttatagtaagcgtgtgaatctaggggttggttcttcgggaagtgctcgtggaggagagtgtgtttataccactgtaagttactgcaatattattcatttccagtgccatcaagaggccaagagaactgatgctgctttgaagaatccgaagaaagagtgggatggagcaacacgtagaaacaatgaatgtctctgtaattctttattccctgtcagaggtccatctgttcctctggcacagtatgttcgctatgttgaccagtattgggacaaccttaatgctcttggacgtgctgatggaagtagactccgcctgctgacttatgacattgttctggtatgttattcagctgcaatatgttctgtctttcctgtttcttgagtggtgaatttgactgacaagattataataaaaaaaaactgatgaaggaatcttgtttgtgccatttacaactgatgtaaatggttcatttagataacttgcgtccctggtttcaaataatttctctagaaaaggatataactagagttatctttatagtgcttgaatcaagtgattttgtctcactctggtgttcatgcatcccccccaccccatctttgtag

SEQ ID NO: 3089 - DNA, 6657 bp, Glycine max
  Intron number 1 from transcript Glyma03g01490.1 (locus Gly ma03g01490) derived from phytozome v7.0 (chr-ID Gm03; pos 1286996 to 1293652 reverse strand)
ctgcaaccaatttcattgccaactggcttgacctagtaagtcatcactctcttaattttgctatcttaatagcccctcttaattaatttctgtatatatgtatgtgtgtttaagcttgattttgatgctttgcttccaagttttatgaatagtacttatgcatatatatatatatatatatatatattgtttatctctttctttgttcttacttgttaattaatttgaatgattgatcaattaatcccttcgcctgaagctaaggggtgctggtcttgtagttctactctctctttctttgttacgttcttactttcgaaagtaaagtatatggaatgaaaaaaaaaaggagatttttttaaggggtacgtacgtagggggaagaattaaacggattacgtaaatgactgaaatacgattaaattaattaataacacgtaatgcttttggattaaaaaaactattgacctttgacttcgttggtgtgtatactatgattccaccaattttttttttcaccatgaaattgttcgaagtactccacccgtttaatttggtgtgataattaatttttattggaaaatttaactgtttatattttgtgagatttttttttctaatcacatttttttctgtataaaactcgattttgagatttgattaggaagatttagtttaataccaatcgaaccatatattccattaccatcaaattaagtgcatgcttaaatttatgaaatagataatggctacagtaataagctgcataaactaagtgtcgtgatcgtaaggcagcctaacttaaaagaactgattattgtcaacttgatgtatttcaaagtcgatgcactcaattacttgttttgaagaaacatttgcaataataatttcttttgccttgtaaaaaaacttgtttttgaagaaattgagacatcttggcattatatttttctcatggtaggcatgataccacgactggatcattattcatacattgttataaatttatgcaacacttgagtttctagtggctattaatctgtgggtataatgattaaaatcttatttatatagagccaatatcatttgaactggaaattttcaatttcaatatatatataatataatataatataaaaaatcaaattaatagatatcttatatatgttttttccttcttttgattatagaattgattgtaatgaactaatagtttaaaaatattttatatactattatttaactataaatgtttatatacgataagtttttgttgttttttataataagtatttctttattatattcctacggtaattattagagatccaaatccttaatatgcaaacgagtagcaatttaccgaaattataatttgctttatagaagatttttcctttatatgttttaaagaaaactctatatatgcgttaataacaacgctcaagatatatatatggcgagtttacgttatgtgaggcatgtttgaatggtccaaaacagcaactaataacgtgtgttagaggtggggaataaattggaatataattgtaagtgctcttagaatcttcgtgagtgtttatcaacctaatatcaacctaaagatattttaagttaggttgtttcttcctacacctttaagtaatttagcttatcatttttataatttttttatctttaggatttattatttcaaaaatcaaaatttgtaatcaattcagaatataattttatattttgtattgatcatttcgaaagttaaaaaaacattgaacctcttggaggcacagaaaacaataatcttttaagataatctcgagtttgaaaaaaaaaagcacaacgaaatgggtcgactttatttatttatttggaggaggagttcacttatttgggacacttataagatacctgtaaaaaaaaaaatcatggtttttgctttaaatttagtgatcatatcttttgaagattatcagattaaagatatgagtagaagtaggagttttggaggaaaaaagaaaggacaataaataaatatcctctaatttaacattttttaaataagaataaaattatagattaacataaatttggtgtcttatttttttagacaaaatttagtgtcttaatcacttgggaaaaaaagaagataataagaagataatgttagatactatatatagtcccacttaaaattagtcttttatccgaaagccaataaccaaatagagtagttgcatcatgcaattggcacaccattgcctcacactcagttattaatagtcaaccacaaaattaagcttgtagaattctaaggctaacctctcgcatatgtatgattcatggtggctgtgagagtggtttagcataatgacgagatggacattcttctccgtcatcctcttggctgcatttgttgcaagcactttcttcctcgaaattgatcttgtaagtagtcttgttaattacccatgatatatatatctttgttcgagatattattgcatatatatgtcttaattaaaccttggagatcatatgcttttaattgtctctccttgacccccttattgattcatatgttgcctatctctctctctctctcttggtttggttttgttccctcccaaagaactaaagttttcaattctactcgtagttgtctttctttcgtgataaaggaagaaggaatagaggagagtttttgagttcggttactctttcactaataacttaacatctctttctcttggttcgatttgtcccctcccaaagagcctagacttcaattctaatcatagttgcctttctttctttgttgataacctatatacgtataagtttaaatgcaaataattgttattcttagttgtagtatattataacttgtaagaacagaagagtaatttcatcacgaaattcagctaggagttatatcctcttcaaatgttaatttattattatgacttttccaagcaagttaaactcgtaggagataatgaaaaggtaagtatgcatgggatgatgaatataatacttatggaagatttgacatacattaatggtgttgcttttttttaggagaaaaactcgttcgattctaatttacaaggaatatgtatataataaaataataatgaagcaacgtgtggggtgcggataaaataaaataaaatgctgcgttctgttctgtttgtttttagtattattttttttgtcagcctgtttgttttagttattttaacagaataaaaatgtattcacgtctagctagcaaatggtttcttagtactacagatggtaatatatttattatgaaagtgggaattatgcgattaagtaaaattatcgttatcattacattttcattactataatatatgtggtttcttcttcacatagtccatatctagtacttttaacaccatccacacgttgtgcacgtttgattataataatataggtgtgcatcgtggcacgtattcttataaaatgaagatattatgtggttagatacaaattctcgatccttgctatttttttagcctaaaataactagtaataaggatgacactgtgatgaatcggtttctgacaactatgttgtgtttgattgcgaagagaaaaatagaattgatggaaataaaaaagagatgattaaagaaaagagaaatagagtagaaattaaaaatagaatgtttggttgcttgatttgagtgaaatatgtgataaatagagtgaaaataaaaaagtgagattgatcgatcaaaagtgtctactaaagacaaaaagtaagtcattgtattatattgtattaataagggcaaaaaaaaaacatgttgctcactaaagataaaatcgtgggatcattgaaattttcaaatgaattctactttatcttactggtaccaaatgttcaggtgctattttcatcggtacaatatcatttttgtcgtcacaatcaaatcaattgctaatgtaaagttgatgtagaggggtttttccggtggtatttgactcatgagattcgctagttattcattttgagattcaccaaacacataaccaatttattcatagggctctcctaaagatggttcctcaatgccttgtaatttgggagcccataagaagtagggagggggtcctccaaataaagtgtacatgcataaatttattgtctctagaattgttatctagattgccttggatataaaggattccatttcacatgggaagccaagggtatcaaagataggttggagatagctagttgtaatgcgaattggcaccttagtttttcctttgctttactcttccacctcccaccctttaaatctaatcataataccttacttctaaagcttagtgaggataatcaataagggagaagggaaaggttcaaactcttggcaagttggattgtggattgcactttctaggaggaggtatatatacaagggcaatagaacttagtaaaattttagggtttaggctcaaagatgatttgtgccaaaacctttgtgtgttaatccttcatgaaagaaaacatgaagcaatgctttgtgtacatcttataccgtacttgtatgagactaacctcttagcatgcttcgacttcgtcactagccgaccaaattactttcacccaagttgttaatgctacccttccaaccttcaccatgcaaacaatgttattgcctaagactatttgtcataggttggagaaatctgcttggaattttgtttgaggtcatagggatgatgttagaggttgtcatactattgggctaggttttgtcattcaaaaggaagagggaggtgttgtgtttaaatatcttcatctctttaataaggcctttgtctctaagttaggatgggatcttatctattaaccttaggctctttaggtcaaaacgctctttgcaaagtatcagtgtgaggaaaaggtcattcccaacgtgtagcctgagagggaatattcattgtggtaacatgacaaagtattttaaaatggggtcgttggttgataagtaatggtatcattatgaggttttaggaggattttggaagttcatgatgagatttgtgctatgattccttcttttcaattcctagcttggatagatttgtatggagttctatagttgatggttccttcttcactaatagaaaccttgcaaacacatatggtgacacgtactcatgataggggtttggaagttgaatattcactaaaaggttaagggattcttatggaaagctatgcaacatggccacccaactaaaaaattatttagtagggttatcttaatttgcagctcgagcttattttgtatgtagcaagaggaaactaccttgcacattttaaggaattacaatattattaggcagatttggcttggccaaggggcttctctccccaatgatttctttggcatggagatggttgattgtcttcttatttctttgtaatataaaacccaggagaattgtcaatcctagtatgcattgataaattttgtttgaaaacatcctttactttatttgtgagcataaatgcaagcttattttttaatataatatttttaattgtaatgaaatttttcatgcttcccaaaggataacttgtggttatatagatattgttactaaccctctaagtatgttgtcatcacatggtcttcagccatatctcacattgttaaatgaattgtagaaggtttagtgtatatatcaactaggatccaaagctttgtgtgccgaggtctttagggaccaagatggtaaaataaatattagactttgttataaatctttaaatcacaaacaattctatggctaagttttatgctattctctttgctcttcaagtggtttggggcatgggctttcataggatcattgtgggttgtgactttatagtgtcggttatgttgattaatcaaggttgttatcagcttcacactaatacaatatggttcacatgatttatgtttgattgaatcatgcttgagaggtaataatctctcgttcccattgagaatctaatatgatacttggttggcttgctaacaaggctcatagttatcctattggtttgcacattctttattcccctaggttgttttcacctgctatgatatgatgttgtagggctttttattacccacattattttgattccttaatttcatgtatattgggatgtagttcctccactgaataaaaaaaatgtatgatatataatttataatggtggcgtgtatcccaacattaatttttatttattgctaccataattataacatttgattgagcaataaaacaacaactttttgcataatttttcttttcataaaaattttacaaaatttgtaagaagtaaactatgtgttagtagcaaaaatttatatatgagaaaaatagtatgtataatcataatataatttcttttaaaagtcatttaataataaattatcattatagtaagtttactactttgattataactagattaaaagtcattactaataatgatttctaatttgttgacctttacaatgataataatacccagtaaactctatatataatcatgctaatttttttttatttcagttcagaataacaaccactactattctcaagacaaatatag

SEQ ID NO: 3090 - DNA, 1752 bp, Glycine max
  Intron number 3 from transcript Glyma10g36060.1 (locus Gly ma10g36060) derived from phytozome v7.0 (chr-ID Gm10; pos 44255109 to 44256860)
ttgggcttgttccagcctcttatattactgtcagagtaagcttctgtgtctgttttgctgtcattttagaatatgcttgcttttatggtttatctgaaattgattttttttaaaaaaaaaaattcagatgtttgtattatacgtgtgccttgattatttttcgtttgagttcactttagttagtctgttgtagttgcctataggcttttgcaaggttgtgaagatcatgattttgcacctaggattgcaccattctactgtttctcttgtttctccatgctcgagccaatgcaggattgccacctgcattggactagaatcgatggggaaacttgcaaacccccagtgatttggagccccaaaaccgactgggtcagattttgccacccggtttgaataaagtatctgttgccctaatccctttgctcaagttgcatacatgtgattttgatttttgtgggttgagttgggcaagccggatgagacaaacatggcattttgccctgaaatctctttcctcttcgcccaacagcattgaaacctctctcccatctgtttcgacttcatttgaacccttctatctgtaatctcagttgcatttgacttgaatctgttcatcttttttattgcaagttctgtggttatttttgagtcagaaagtactctagactttgctaggtggggctgggccatgtgactaacagctgagacataggttttgtagaaaatgtcctcttttggtagtacaacttatatttatatacataaataaataaaattgtcttttgtattaagagttataacgattaccaagtttgtgagttatgactttcttatgtacttctaattgaagttttatttaattttatgtatgattttaaggttattctaagtaggatcttagttttgacaactttgagcttttatatttggaacttttaacttagagagaaatatttgagtttgaaatctcatcttcttacttagaaatgaagaagaagaaatgagggatgaagggtctttaatgtttcttataaaatgtattgggtggatgatcaacttaagatccatgtgactcaggatttaagatattttcctagtgtattagctttacattgacaatcctctgggaatatgaagtttttttttattgtaaactctatctgtttaaattggaatatgatgttttttattctaaagggaacagttcaattattgtattgaagtaattctggttcaaatatgcatatatatgagtacacaagataatagaaagagaaacaatattaagctaaggattttcgatgtcatagaatccaatctcaaggagaacatggggttgtccttggtttcaagacctttagcaagtgtttatcttgagggacattgaggaattggaaagattatactggcaatgtttaacattgaaaaggcaatgctaaggattcctgctgtacattctgtagttccattgaactgcaatattgagaaatgcatctaaattcttttttcacaactctgcttagaatgtgttttctgttgtccactgtttagctggattgtgtaattgaagttataagaataattcccttgttgattgctcacatacattttgtttcttctttcatttgaacggtctgtccatgcttttgttgtagctgtggttattctgcttcttttattacccctcctaacctctccattgttgtttaaccaggctggccttgcccttggggatctaaagtcaattaa

SEQ ID NO: 3091 - DNA, 2741 bp, Glycine max
  Intron number 4 from transcript Glyma15g13090.1 (locus Gly ma15g13090) derived from phytozome v7.0 (chr-ID Gm15; pos 9752867 to 9755607 reverse strand)
gaaggacaccttgtacaagaagtgagttctctttaatggatttctattcttaaagataatttatactcacacacttgatgtgaatgtacaaactagtgttctttttgaaacccctttatgttggatcgagtggcctcagaataattaagaaggggggttgaattaattattcctaaacctttactaattaaaaatttacttttctaaaacttttactatgttgttaagtaaatgaagaatgaaaaaaaaaacttaaccaaaagtaaaagcgggaattaaagtgcacagcggaaattaaaagagtagggaagaaggagataaacacacaagagcttttatactggttcggcaacagcccgtgcctacatccagtccccaagcgacctgcggtccttgagatttctttttaaccttgtaaaaatccttttacaagcaaagatcctcaagggatgtaccctcccttgttctctttgaacaacctagtgggtgtaccctccactagaactgatccacaagagatgtactctctcttgttcttagtcaacaatccaagtaaatgtaccctctacttgtaccacaaaggatgtaccctccaatgtgttaagataaagttctcaggcggttaaacctttgaaactttgtgaatgaggatacaaaagaattctcaagcggttagttctttgaaatcttttgtatatgggaaatagaagaatcaaaagaattctcagactgtgtcgttttgaattctttgacaagggagaagggagatacaaaaaaattcaggtgattagtccttcgttcttttggaaaagggagaagagagacataaaaagaattcagacggttagtccttgacaaattctttttgacaaagggagaagggaatgaaaaagatgaataacacaagttttgctttcaaggtttggaaaaccaaaaaactttagaaagctgttgacaaaagaagaagaagaagttcaaagagactcagaaatcaattggcaaaagtttgttgtctaaagaaagaattgaaagagatgcttgaaatgcaaatcaaagcgttgcttttatagactcttcatgtctggtcaagagaaccattagaagagttataaccttttagaaaatcctgaaaaccttttggaaaagttacaacttttagaaaaacttgaaaactcttggaagagttacatcttttgattttgttcagaaactatcactgataatcgattaccaaatcagtgtaatcgattacacaatgcttttttgtgaaaggatgtgactcttcacatttgaatttgaatttcaatgttcaaacacactggtaatcgattaccaaatcattgtaatcgattacaagattttgaaatcaattggaacgttgtaaattcagttgaaaactttttgaaaaatattttgctattggtaatcgattacaacaatctggtaatcgattattagaaagtaaaaactctttggtaaaaggtttttgagaaaaattcatgtactactcagtttttgaaaaaactttttaatacttatcttgattgaatcttctcttgattcttgaatcttgaatcttgatcttgattcttggaacttgaatcttgaaacttgattcttgattcttgaaatcaaatttccttttgatccttgaagtgttcttgattcaatcttgaactcattctttgattcttgaagtcatcatctttgttaacatgaagtgttcttgacttttgagctttttgtcatcatctttgttatcatcaaaactctttgaatcaatcttgattcatcataaaacttgcttatacactttatgtttcttttatatttttggtatagaaagtatgatatatttcttgattagaggatgaattttattattttaatgaactgatgtaaatgaaacattcaatgctttgaacaaggccaaaaattatattaaaaaaaaaaactgagcagtagtgatatgagcaagagtgatacattcttgcagaataatataggctatccatggttgattttttactgaattgacaatcttctaaaaaatgcttgtattgtctatttacttctgtgatttttattcttgacttatttgtcaaaagtcaaccttccaaagcaacacgtatttagttctcatgcaaaatcaaacaagccagattgatgtggaggacaataaacagttttgaccttcatagctgtttgcacttaggtttgcttgacaaatttgataattcaagtgattgactgtaaatggcgtttttcaagtcggggtgcataagtatgtcactacacaagccatggaacaccttttgtcttattctaaattttgccttgtgccttatcaaaatgcctacaatgctatcctgaatccctcttaggtttggtagttaatgattagtggtgaactgacatccttcattgcttaatgcatgatctgtttattgggatagctttgaatttatgacctacaaactacccaaggttcaagcccccaatcactagcccataactagttgtggcttaatgaatgattttgggtggtttcaagtgtcttgtatttagaatgaaatgatgatttgtaaacagtaaaatctaaattttaatttttgaacacaaactggtcatgctctaaagtatgaagtttttactgatagttcaagctttagctcaaatacattggtttagtcaagctaactgtttctgtacctaatttggtctgctttgcagttagtaca

SEQ ID NO: 3092 - DNA, 6904 bp, Glycine max
  Intron number 7 from transcript Glyma16g02850.1 (locus Gly ma16g02850) derived from phytozome v7.0 (chr-ID Gm16; pos 2416527 to 2423430 reverse strand)
cttttaaacagcaaacaacttcagcacactttcaggtgctgtagaaactatattctagtcacatcattaattatgttttgagtaattgtgtatctttctatatatattagttttcttcatactttataaaaaaaatttattacatgccaatttgaccctatagtgacatttttttatattcaatttgattcctatgaaataattttttataataaaaaattgtttttactaaattagaaagtaatgcaactataggagtcaaaaataatatttaaacctattttaaaaacataagacaatttaatactctctttattagtaagaagattaataaaaatgttatatatgacgttataaaattattatatattttgtagaataaatgcactaattacgtacttctaggtttttgaaattatttaaatttatatatttttttaatatttacagtaacgtctcttatataaattaaactcctttaggtttcatttatattttaaaaaattaagagaattagtgtaagaatagataaaagtcagagagtttaagatcacaaaacttcaagagtaattaattagtttaatctattctattttttttaatgtaaaaagtgttacactggtaaaaaaaaagggggggggggggggggggcacacaccacacatataatctgaaaccatgacttttgtttagactttagattctgatcattgtagtttgtttagatcatcccatcaaagttttcatttaacaaaatcagattaattggataggaaatcatccttaatagtgccactcttgtgcatatcacaagtgctgctaagactgtggtaaaagatcaaagtcaattccatgttaagcaagaaaatagaaaaaagaaaagaaaaaatgattcatatatgtttgttcaggttctattccctgcaatggaggacatgggctgcacgcttcttacaagcagcttggcgcagataccgaaaaaggaaggagagcacgacacatcgttcattcactgatctctcgtacaggcaagcccatttaataaacttcatattttttttatttagccatttttttagtgaaaacccatgtcatgcactaagagtttaacaacaaattaagtgttgaacttaatttcattaattttaaaagtacaaaaaattatttgagcaattgaaatcatcggaaccaaaccacttcatcagtaagatgattaataagaagatattatatcaccatatagaactattcttatatatattttttatgctgtagtgttaggaaacaagggacacacatgcaagtcatatgaagctagccacgacttttgtttagattctgattgtagtttgctttgatcatcctatcgaagtcattaattttaacaaagattggataggcatttatgttaaacacaagttagcaatcatatgattggaccaaccttagtagaagtcatcttgaatattgcactaagagcaagctgtttgtctaaatggaacaacatgaggttatttggacgaaagattctaataaaaatgatcagttacattaatttgtttaaatctaaataaattttaaaaactatttatttaataagtacataagatttaattatcagaataatcagaaaattatttttttaagcaaaaataatttagacaaattaaacatacttaaataacataaagttgcttattcaattgaaataaatatatattttcaacaaataaaattaaacaaaatgactcttaacaaagttaataaattcttcagtaataatatgataataagaatcttgaatagttgcactggcttatagcatgcaggtacgtacaagttctgagatttgatcataactcataagctagcaagaaatatatagtactgtacttgattcagcacaatgttaatttttccaggttctattccccgcgatggaggaaatgggcagcatgtttcattcaagcatcttggcgcagatacaagaaaaagtaggctgagaggttatcacgtgaagaagcagaagaaaggataaaagctttggaaaatgatgaagggtcctcacctagctttgttgccaccgtatatacagctaagtttgcatcaaatgcattgcgccacttgccaagtggtaaacgtaataacagagtgccaaagccacggagattgctaccccttatgcctcagaagcctgctgaaccagatttcactgctcagaaaaatcactgatcaaccctagttttaagtaaattaattgcaagtttataacactgaacttgaaaattttcacatctccttagcaattgtttgtgcataagttactgcgtaaaaaagtggtgatttcaggattcccacgactgtgcatatatatgtagacacggcagtgtgtaaaaatataataattggttgtttggatgaatggtttcgaaacatattttcacgagaagagcttctcggtgctcaaattaagccaagtttggagcataggtactaactaggagcttctagtaacatattatctaacatttttttctttctaatatacactttattattaattaaaatttaaaaaattataaaaaaatttattaaataaaaagtgaaactcactgatgtttatgtttttcaattaattttaattaataatacaatctgtgtttagtttttggaggagggatactcctaattcacccaacaagcatatgaagatatgcattgttaactaaatatagttaattcagttgcttcaacatgataaataacttattgttaattaacatttttcaaccaataataatatatttcactagattgaataaatattttagataaagaatgttaatcaaaatgatctaactcatttagttaaaaagagtatgagtattataagaaaaaatataagaaatgttagcaacatattatttagcacaatcgtcttaacacattctctattattattaaaaaaaaagttattaaaaactaaaattataagtggcgctagcaaatgagaagtaggactctctcaattataatacgtagtgtagagaaaataaaattacgtataatcaaagtgattgaggagaatctttcaagttttaatccgtttctgtataaacactaaaggatttcacgggaaacacgttggaagcgcataatggtgaactttattgttttttctatctttatttctgtgcatcttgtttttctttcttttcatgtcttctcctttttcatgttcaatattgttacatcgaacacctaagctgtccatggctcatgccctcaaaacaagtcatagagtgagaaaaaagttcgtaaacagaccaatattataagctgaagcccttgatcgagactccttctataatgcataacaaggattgatgaaaattaatgctaataataaatttaagttactctattcttatccattaagacactaaaaaactgtagaagtagaagatatttttatatggtggggtgatataactaaattatagttcaaggtttaaggtttttattgcaagaatatttaatttcataaagatatttaaaaagttttgtcaaataccactcggttcttgacataggcatatcaaaagaatactatgatttttgttgacaaaggcatatcaaaaaagcaatcctctgatttttctttgttagattgtagtgatttacaattccattcggggagaaaatttatagaatataattatgcacttaaaatgtgaattttttttacaatattatttaatttattaattataaattatcacatataatgaaatcaccttttgtaatacttatttagaagttatgtttatggtgtgattctaatatttattgatagtacaaatttttttatacataatactgtgataaaaaaaaattaatagtgtttcaatattgatttcacaaaaaaaaaattgataaaatatttggcggccgaaatggagaagtgctcttcttttactttttgtgtggttcgagatttttcttcaactttggtaggtaatattgctttatattgtgtagagtttgtttggtttgctggaaaaatcatgtttctagccataaaattcagtttgaacaatacttcggatttcatgagtaaaatagatcaatttaagtcaagttaaaaaaaagctataaataattaagtagaacgtgattttagaatcgagtctcaccaaattatgttaaaagaaataatctattttttttaatctcaaaacctttattttatattaaaacaaaatacttttaaattaatttttaaaatactttattttatattaaaacaaaatgctaaatattatttttaaatgcatcaatcttgattttttcaagctatagcttttatcttacatttctcaggttccttatgttttaattttttttattgtattccttatcatatttatcattattattattattatttcttaaggtgtatatacttttcagtaatatatactgtgatgatggaacaccaatcatgatttatgatttgagagaagggaggagatacacaagtctaaaatgctaaagagaaaaagaagaaaactaataagatagaatgttttattattcttacacatttttatttataactcattttttctcattatcttttacattatatggcccatcttattttatattgagaaaatgctaagaatgtaaagagtttttatattgtgatttttccatcacaatagtaagttcgttgtcctttttcttttctttttttcggaaaagcataagtttgttttcttttatgttaatacttaacatccttcatggtttttatttcctagctgtcccaaaattaaattcttttatactgtttttcatctttgttgattgtaaaaaaaagaaattgcaaaagcattgtagaaataaaatttctggaaatataattaggcatggcattataccatttcgtaggttcgtatttagtactgtatatatctgcatgtacttgactctatgagtctttttctagtcttcttacatcttaagtcatatcagtgttgttccgggtttattgcatgaaaatctttctctgaaggcttattattgttgtaacattttttgctttgtttagttttgaattcctcttcttcctgctttgttcctttacacttatcaagcaaccttgacctagctaataagtaataaggttggtgtttctttaaccttctactcttgccaatttctattaccttttctgaaccacttcacagctttttccaagtgcctttaactttgttagaaacaaatcacatctttgaaattttgtttttttgcttttatcttcagaagagagtttgtgaggttggctaatagtttcttccttggacttccaaagatgagaaaactttgaagttagatgttttttatattgaacaagttttgctatctttatatgtctatgttccacatgctgttattcatctgtttcatattagccttttgttacttgttcattgatccaatattcctataattcattctttcattgtattttttgtttaatttaatactagccaattgtttcacttggttcctatggttcaactcaacccctgtcccctatctctctctctctctctctctctctctctctctctctctctatatatatatatatatatatatatatatatatataataacatgtggtttttcccaaattcatttgattctggttgtggttgattgggctgttgtgtatttcattttattgttagaaaattgacttaattgatttgatggatttaaataaatatttgagtcgttgatgtttaagtgttataatttggaatttgtaacttatagaaagttaaagaaatcaaagattgtgtagcctagcagaaagtactggatttttgggagtcattctgagtttagaattcaaaaaatggaagcttgatgacaaaataaaagaaagccataaataattagttcacctttttttctcaggagggacattaagcgttaactatgctacctttagcaagttcttactatgtgaattatctccgaaattccaattctaattagaaatagacataagaattacttaagtaactgtatctaagttttgtttttttctttttcctcctgcctatacatacttctatgtgtatgtgtaatgagaattttaccttcttcttgctctaggtgccaatgtttgaggacatggataatcagttgtcggatgcactgtgtgataaactgaagccaatcctttacacggagaaaagctacatagttcgtgaaggggatccagttgatgaaatgttgtttataatgcgtggaaaacttgctactgccacaacaaatggtggaagaactggtttcttcaactcctttgagatcaaggctggtgacttctgtggagaagagcttctaacaagggccttggatcccaattcctcctcaaatctacccatttcaactagaacagcagaaactatatcagaagttgaagcctttgctctcatgcctgatgacttgaggtgtgttgcttcccaatttagacgtcttataaacagcaaacaacttcagcacactttcaggcaaggcttgttgacatgtgtttcaccctttttctccttgataatccatcactatatttcaagctgaaatgtcatgaataaataatacatatactaataatgtaaaagtctagaccattaattcttctaaataatacatatacgaatcataacttgttatatttagtaaatttgttgactttcataacaattttcttaaaagtcactcgaagatgatctttgcttagcaaacaattcaaccaatcagaaatctctcgttgatataacttttaagataattattgttgtttgttcaggttctattccttgca

SEQ ID NO: 3093 - DNA, 8136 bp, Glycine max
  Intron number 3 from transcript Glyma19g28430.2 (locus Gly ma19g28430) derived from phytozome v7.0 (chr-ID Gm19; pos 35914602 to 35922737)
aatcctgctaatgtgagtgattaccttttttagcattagtatttttgttttttgtgcatgaattgtatgcgtttcttgcatttgtcttttgcattttcactatggtgatttgaaataagttagatgttgagattgttcagacattttagtccatgggactttaaaagtcattcattttagtccgtttctactttattttctgttgttgctttgtaacaaatactataggactaaagtgaatgacgtggtttttaaaatctcagctgctaaaacgcttgacttgtacaatttcaaggactaatctgaggtttactcaattatcatcatttcttgtcttctttttcagttaaatcttttttaacaatttctgcctaggatttgttgttcttctaatcattctggaatttaacttttctccctggcctttgattatgagaaatatgctttgtttttgtagttttattctactattgaatatgtcaatcatatgtatgctgcagctattcttctcgcctctttgccccatacttattatgttatttaatgatgtcaaatcctgttgaacgtctgcatagtccctacagttttggtgttctataaataaaacaaagtacttacagaagataatgctactgacattatatattaactttttatcttgctctcttatgtgacatgcattttatatttctcaacattcctggattaagaccaagttcaataataaattttatggtttacaagcttgcttatttctttttaattgttgtgaaggttgtaagcacaaaaaagtgggagacataatggaaattgatagaaaacagagacttaattgctgtctcttctattcctactgtttctctttgtatttttgttttcttctatgtgcctaatatgtcaaactctgttaaataatgtatcaagttgtgtcaaatgcaaatttacaacatggctgaatattatgagccaaagaactataatcatactcatagtcgtcaatcgcaagctatagcaccactatagtggcattgtggctatgggcagctcaaggaagctcattacattgcagctcactgtcatgcctacagaggccagaaccacagctgctatatcagccaccgttgcaactgaatggaaaaccccttttttggccccttgaatgaggttgtttcgtgctcaggagctgtttaaggggggcagtcttagaaatgcacccccttttatttcatcagaacacaaaccctattttcccattctcactcctttgaagactaaatcattcactactcccggtattttctctcttcgatgcaaaccacctgaccctgggctctcagctgcattcctgccaatccaaatctatagaatcatatgatttttatctccattgctttgtatgatagatttgagatacctaaactgggtgacatgtggtatggtataattcccaatattcaccttcaaggcagtgctagcttgcattccatagtatctgttttacttgtgctcaaacagaaattttatttccatataatctttagcagaaggcatgcgttgaggcactggctcttggatatgtcgagtaagaacatcctaatcaaggaaaaaagatatgggttgttaacccttggtgtgaacctatagttacaaggaaatcttttgtggccattcttgtcctgttatatgaatctttttgtgtcctaatatgagaaacatgaacacgcctcttctctaggtcccatggaattacttcttagaaccttgtcataggccattttagggcaatgaaaaccatgtgtagatctttttgcttccattgacacctctctatcaaaccttgcattgccaaaggtatatataccagccaagcaaacaaccaaatcgtttctctgaaatgtgaatctcttatcttgatctccattttgttactctctcttgtagtttcatagtgtggctaatagtcttaatccctttgtagttagtacaattctgtacgttcccttttcttagaccttataatcctgttaaacaactttgtgagcttatttatacctttctccccttggcatttccatacttcaataggtatattatctagttcagtcacttttccactgtccatcctctttagtgtttcttttacctcaaattcccaaattctatgatagatagatatataattttggtcctccactgtaattttaatcaaagagcccattaaagttgcatttccttcatcaacttgtaaaatcacctttccatcattcctaagtatcttgttctatgaccaacactatacactctttggccttgtgcaaaatttatgaaccatttctcaatttgtgtcatcattccatatttcatatatttcttacatgattgcaatatttctctggtgataacttgtgtaccattattcctactgcaattcctcctccattatagtttagcactaatttggcttactcatccattatagtttggctcctaatagaacccttttaaagtgaaagacaatgagatcacggatttgaaatctgttggccattgtatgctaaaagtagattcaaatgggattcactcctgttgacaattctatcaagacaaagtatgaacatccttttcttttcctgcctatgtgcagctgtgtttatcggtttctcagcatcaacagcttccttaaaatatcatgaacttatatcatttaatatgagtgttatgatcgtcatgattgatctgcacttgaaacgggatcacatgcctccttgtcacaacaaaaggattacatgctgatctatgttaaataaaatagtaatctagttacacaaatattcagccaaattgcattttttaaattttgagtcaatataatggaagtacttgttgatgtatgctgtaattcagttagttagttaggagttagttagtttgacagctatgaaggttgttgtagttacatgtgcagtttatataaaatagtagtgatcatgaatgagaaataagagagtgcagaagttttaattcagaattctaagtttcctctattttcaaaatcaattttttcatcttctcttattctctaacatagagtgagtaagtgcatagtatgagtgtgagtgaagaactttatttgttccaacaaacagtgaagaactttatttgttctaacaaactggtattcagagctgaggttcaagatccttggataccgaaactgagatggcttcctcgaatggaaattttccagcatctatgcctgttctcaaaggcaagaattatgatgattggtgtgctcagataaaggtaatctttcgatttcaagatgtgacagaagtggtgcaagaaggggttcaagaacctaacgggaacccaactgatgcacagaaggtgactcaccgtgatttgatgaaaagagatgcgaaggcattgttcattattcatcagtgtgtagatgcaggtactgcaaagaaggcatgggatactctagagaaatcctatgcaggggatagcaaactcaagaaggtgaagttgcagaccttgagaagacagtatgaacttctacaaatgagtgatcaagaaaacattggtgagttcttttctcgagtcttggcaattacaaatcaaatgaatgcttatggtgacaagcaatcagacttggggatcattgacaaggtattgagaaccttgacaccaagattcgatcatatagtggtggcaattgagcaaggccagaatcttgaagaaatgaagattgaagaactgcaaggaatacttaaagctcaagagatgaggctcaatgaaagaaattcacaaagatcagctgagcaagctatgcaagcccaaacaaccaaagggaacaactatgatggtgacaagaataagaagggaaagggatagtggaagaacaataagtggaaggggtcaggtgagggctccagcagttctggaaatcataaccagaatgaagaaactgacaagaaaggtggagggaatcacaaattgggtaagaagaaattcaacaagaaagagattcagtgttataactgtcagaaatggaaacattttgcagatgaatgcagaaataaaaggtttccaagaaatgcagatgagactcaattggcacaagatgaggattctgcctctgataaagtgttactaatggcaacaacaaactcagaagaagacaatgttaatctgtggtatcttgacacaggctgttccaatcacatgactgggcatagagagtggtttgtaaacattgatgataaggtgaagagcaagatcaagtttgcagataacaactctgaaactgcagaaggcattggaaaggtgatgattcagaggaaggatggatagcactcatttatcaatgatgtgctatatgttcccaatatgaagaataatttgttgagcttgggacagttgctagaaaagggctactcaatgcagatggaggactgtcaaatgaagatatttgatagcaataggaggttgattctaaaggcctctttgtcaagaaacagaacattcaagattggaattcaaattgcagaatttcaatgtttggctgcttctataagtgatgaaagctggatgtggcatcacaggtttggtcatctaaattttaggagtttaagtgaattgaaaagtaagaaaatggttcatggtcttccccaaattgagataccaaaacaattgtgtgttgagtgttgtgtgtcaatgcaaccagggaattctttcaagtcaaaaattccaatcagatccaaaagaaagcttgaagtgatctattctgatgtgtgtggtccttttgaagtgaaatccctaggaggtaacagttactttgtgtcattcattgatgaatttactagaaaaatgtggatctatctcattaagcagaaaagtgaagtgtttaacatttttaagaagtttaagctgttgagtgaaaaacaaagtgataaagtaatcaaagtacttagaacagatggaggtggtgagtataactcacatgaatttcaagtattttgtgatgaagaggggataattcatgaagtgacatctccctatacacctcagcataatggtgttgctgagagaagaaacagaaccattttgaacatggccaggagcatgatgaaagggaaggaaatgcctcattatttcttgggagaggcaacttctactgctgtgtatattctgaacaggtgtcccactaagagattgcagggatacacacctgaagaagcatggtcagaaaagaagcctagtgtgaatcatttcaaaatatttggttcactgtgctttaggcatgtgcttgagcagaacagaaagaaacttgatgacatggctgaaccaatgatactcattggatatcattaaactggtgcctacaagctgtatgatcctagaatgaggaaagttgtgattagcaaagatgttctgatagatgaaacaaaggattggaattgggaaataaatgctgttgacaatggtgaaagaaaggtgattgtgaaccttgaagacaaacaaagtgaagaggatataccatcatgtggagagcaactcagaaggtcacaaagagagagacaagtaccacaaacactcagagagtatgaattgtatcctgatacaataatcactgcagaaggggattttgtgcactttgctctacttgctgaatcagatccaatgagtcatgatgaagcctcacaaagttcacattggagagcagctatggaagaagaattgagatcaattgagaagaatcagacttgggagttagtccatttgcctcaaggaaaaagaccaattgatgtgaagtgggtctataagactaaagtaaagcctaatggagatgtgtccaagtataaggcaagattagtagcaaggggaatctgtaaaaacatggcttggattacaatgaggtttttgctcctgttgcaagacttaaactgttaggctcattgtggcagctgcttgcaacagaaattggtctctatatcaactggatgtgaagtcagtatttttgaatgggtcacttgaagaagaagtctacataactcaaccacctggttatgtagttgcaggacaagaggataaagtctacaagttgaatacggcactatatggcctcaagcagacccctagagcctggaatatgaaaattgatagcttcttagtccagcaaaatttcaccaagtgcactattgagtatggagtttatgtcagaaacacagattctggtgagtttttgataatatgtttctatgtagatgatttgctagtgactggcagtagtaaagaagatataagagtgttcaaaggaagaataattgatgaatttgaaatgtctgatcttggtgaactatcatacttcctgggtattgaatttgtttctactagtaaagagattttcatgcatcaaaagaagtatgcagaagacatcctaaagaggttcaatatgatggattgcaattctgttatcacactaattgaaattggaattaagctgcaaatagatggggatgagaaagaagttgatcctaccttgtacaagcaaattgtaggctcattgaggtacctatgtaacaccagacctgatattgcctattgtgttgggttgataagcaggtttatggagaaaccaaagacacctcacttcctgacagcaaagaggattctgagttatgtgaaaagaacattggatcttggcattttatatccttacagccagaagaatataaaaggagaagtgtttgggtatagtgattcagattggtgtggtgataaggatgataggaaaagcactgctgggtatgttttcaaatttggaacatcaccaatctcttggtgctcaaagaagcagagtgtagttgctttgtcaacatgtgaagcagaatatattgctgttgctatggcagcctgtcaagctctatggctggaagctttaatggaagaactaaacttgagaaattgcagtcttatgaggttgttgatggataacaaatcagcaaatgatttagctaagcatcttatgacacatggcaggagtaaacatattgaaatcaagtttcatttcctgcgtgatcaagtgagttaagagaagcttgaattggagttttgtaggtctgaagatcaagttgcagacatattaactaagccattgaagtctatcaagttcaaggaattgagagacaagttaggagtgatatccttgacaaatctgaattaaggagggatgttgatgtatgctgtaattcagttagttagtgaggagttagttagtttgacagctatgaaggttattgtagttacatgtgcagtttatataaaatagtagtgatcatgaatgaaaaataagaaagtgcagaagttttaattcagtattctaagttccctctattttcaaaatcaattctttcatcttctcttattctctaacatagagtgagtgagtgcatagtgtgagtgtgagtaaagaactttatttgttccaacaaacagtgaagaactttatttgttccaacagtactcttgtgtgaactagaatcttgattatgtacctgcttgctagatttcatccagtcatatttggaacataaagagacttcactctttgactgtcctttttcaatactctctattactgtgtgaaatatcaagcaggccgcattaaataacattgatctactgtctatattagtggtgccaacgtgagatttcacctaattgagtgttgaaaagaatgtcaaagttagttatggttcgtatgaatctccttacatgatatttcttacccatctttcatattgtttctagtatgaatataaataatggagaagcaaattggtggcttgccttgaaatagtcaaggtgaactttttcatagcttgactccaaattgtcgtcttaaaatcagaatttggtgttactcattgaattgtaacttttttctttgatgttcctattatttattcctttgaagttcctatagtttatatatatcttctcttgtttttgaatcttctgattttaatttcagtttgattaggttctagacctagagatgccaatgaataactgtgatcggttattgtccctgcaggcttttggctgggcatacttaaacaactggcacaa

SEQ ID NO: 3094 - DNA, 7392 bp, Glycine max
  Intron number 5 from transcript Glyma10g22150.1 (locus Gly ma10g22150) derived from phytozome v7.0 (chr-ID Gm10; pos 28129814 to 28137205 reverse strand)
tgattctaaagcttggactatttgagaggtaataattcatggtaacaaaattgtgcaggttaattttttaacattcaaaattgaaaagagaaattgtacttttgttactagtttctgcctatttggtagattcatgtagtttcaatttaaggaatgagactgtaggatctagagagggtggatgtactaagctttaaccctgcaaatagagagtctgttttcaagatttgaatgacatctaaatcacaaggcatcaatctttatcattgcatcaaggttgggcctcccaaatgtatgttggatagagaaaaaattaagggtaaattaaatattacacaatgatgcacaaatatgatgtgtacccggtacataatgtggtatgacagtaagattattctaaaaatatatagaattcaatatatctataagaactcataaaacatatgcaattgcaactctacaaatccaacttaagaaaacatcttggatattattaaaaacaaaataaaatttataaatcattgtcatcataaatcacttcctattgtctacaaataggaatagtatcaatctcattttttttctcgagatcatccataaagaacatcttacaacacaacgtcggatgctcacaatcgtagagaccttccctttctctgaaacggagccttcactggaacagaggctccatcaaatggcgccttcattgaggcgcaccaaaccctgggttcaccggcaatgttgccagcggcagactggcaagagatggtgatggatcagcgatcttgacggaatagacagagtgagatcgttcccattctaataccaagtttagaatagagctagtttgaataaaatgcttgagtgagttaacacactcagcagtttgaatatattacagagaagaggtacagagaggtacacctagtctaatatctatgaagtacaatagatgcaacaaaagtcagcttttgcaaggctggacagcagacataaaatagctttcataacaagcttttctaattctaacaacccctttcggtgatgttaaccagttcctatcatattcatcttctattatggccagagaaggtgcagtgcacatcaactccttctaaagaccaattgaatcagttcatcttttaaaccccccgtctatacctaaaggaaagccaacatcagagaggttatggtagagaactctagattgaaggcttcttgtgaccttgggttgtaaatctaacaaaacattgtcacactcatccaagcctctggtttggaggttatatgttatgaagcaatgtctgtatttgaaggtgaccgggtgtattcatattttaaaaactaggaccacacaaagctttctgtcccaatgtgttcatgcgtcttgctgattttgagactagcagtcatctatttccacattgtcctgctgttagctatttgtggtgtatactatggtgaatgttggatttgtctatgaaactaggagcatatttttaatgtcattttaaatgttgttacatcctgagtgagctcttttagttggactgtttaaatgtgatatatggtacattactcagggttttaaatagtgcactatactggagcagagcaacccctacaagggctgctatactggagcagtttagtgtagcagccatagcggtgctatattggtactatatgttgattccaagagtccttcaaatagaggcattgggtttttttggggggctacctcaattttcaaaaatgaaattgtagtagtagtgtgaaaatgataaaaaagacttggatttaaaagatgatgattgattttcctatcttggaaacttgtatttgacttttgttgttatttacttgtatgttttgtttaggacacgtattattagaaccttgatgatggatactaggccaatagccaggcccacaatatggagagtgtactctaggagaaagggaacaaaagagtaagtgcagaggtggcagtgagagaaagtgagtaggtgctgtggtagtggaatttggttatagatgggtctgtgggcagggagtgggggtatgccaattgatgagttagttatgggcaaagagcatttgtgcctcggaaggagctgagctctgggcagtaggaatcgttattcctttgtatttccttttaggcattattaatataccatatatctacagtagtgattggttgatactactgtttccatatttgtgactggtttctaacaaattggtccaacctatcggatatggttagaggaaagggagatacaattcagtgcgattcatttttaaggaactagcgaatgccaccgaagaagatggaagcataggtagccgctttagaaagtgaggttgtgagtcttcgcaacgttcttaccacaatgcagtctaaggcagaagagaatcaggagaagctcatcaccatgctggaggagtggttgacaatgagcagtggtggaaaattggttgttgagcacccgtggacaccattttcgatgaattccggcattctatgaagattgtggaattacccatgtttactggtgatgaccccgcaggctggattgcacacacggagatttactttcagatccaagatacgagcccaaaaattcgggtgaccttggctcagttgtgtatggagggttccacaattcacttcttcaagtcgttgttggacaacaagagggaacttacatgggaaaaccttaaggttgggttgttggagcgataggtatcagcgaaggcaatgtgtatgaacaactcgctgcactccaacaagttgtcggagtcgacaagtacatctaggaatttgaacgattaattgctcaggtaccacgtcttcccgacgatcaatattttggatatttcatccgtgggttgaaagagggaatcagaggacgagttcggagtatgcggatgttggggactctatcgcgttcacatagctgaattttacaagggcagtagagcatgagttgtcggaaaaggatgtttcatcgatgcaaagaaatgcaagttttcgcaatgggtacaggtcgggtttcgtgccccaacccaatcacacgatgggtcagattgggggtctgtatgtagcaatagggaggtgcaatcaggagatgttaatgggtctgggcctcccaaagggcagcctcatgagcaatttcgaaatcagaacagagacagagtagttcaacacttgccttaccaagagtttttggagagacaacagaatggtttatgctacaaatgtggaggggcttttcacccccaacattagtgtcttgatcgccaactaaggctgatggtcctagatgaggaagatggagaagcccaggtgttggctgcggaaggtgaggaagagggggagttggagggcgagtgcagtgttgtgtttgggaagcttgcttgcagaaaaaggatggaggccacaggctatgaaattgaaggggtctatcaaaggggtacccattctgattttggtggacagtggagccccacataatttcatttcaaggaaattggtgacagtgctgggtttgttgatagaagagactagaccaatgagaatcaagatgggtgatgggtataggaacatagcacaaggaatttgcaatggagtggagctggaattgggaaccatcaatttcccagttgattcctttttgtttgatttggcaggaatcgatgttgtcctgggcatctcgtggctagcttctctttgctgcatgtgggttgattggagcaaatagagcatgcaatttcaattaggggacaaatggatggagttaaaaggggaggataatggtgttttaggacaagtagcattgcaaagtttgtttggaaaatcattccaagtggttgatgggctgttggtgtgcacggagttgcaggtcagcaacaccaagccgaatggaatggtgctggaaccctcttcatctcaaccacctctagacatcactgttgctggatcgttatggggattttttcaaggatcctcgaggattgccacctaacagaggtaaggaacacaccatcacactattagaaggccaaggtccagttaacgtaagactgtattgctatccccaccatcagaagaatgaaattgagaagcaagtgaaagagttggttgatacaggtatgatttgccccagccatagtgcttcttcaagtcttgtaatcttggtgaaaaagaaggatgcgacgcggaggatgtgtgtggattataggaccctaaacaaatttacggtaccagataagtttcccattcctgtgatagatgagttattggatgaattacatggagctcaatttttttctaaactggatttgaagttgggatatcaccaagtccgtgtttgtgaagaggatatacataagatagcgttcaaaacataggagggtcattacgaatacttagtaatgccttttggcttgatgaacgccccctctacgtttcaggcattgatgaatgaggctttcagagggatgctgagaaaatatgtgctggttttctttgaggatatattgatgtatagcctggattggatgactcatacgcaacatttaactgcagttttggatgttttgagaaaagagaaattggtggccaacaagaagtgttattttggtcaaacatctgtggagtacttgggtcacattatctcctaagagggtgtagctatggatccttccaaaatccaaagtttgcttcaatggccaaatccaaagaatgtgaaaggtgtgcaaggtttcttaggattgacgggctattactgtaagttcatcaaagactacggtacaatagcacatccccttactgatcttactaagaaggaggggttcaagtggggcattccagagcaggcagcatttgaggctctcaaggggcagatgactacaggcctggttttggcactaccagatttcagccaggaatttatcattgaaagtgtcgcttcaggtcaaggtttgggggctatcttaattcaaattgggcgtccagtagcgcacttcagcaaaacattgaaggacaggaatttgacaaaatcggcttatgaaaaggaactcattgctgtagctttagctgttcaacattggagacattatttactgggatgctaatttacagtgtgcacagatcacaagagcttgaggcaacttcttcagcgcataacaacaatgaaccgacaaaactgggctgccaaattgttgggatatcggtttgatattgtatacaaaccaggtttggagaataaaggagctgatgcgctctctcacatgcttttcatactatggtgcattatcccgtatggcgagagggcaaagaggagattgaagaagtcctccaagacgagagtcttaaggaggtaatagaagccttaaaacagaactgtgaaacaaaagcagatttttcctacagtgatggtgttttattttacaaaggcagactggtcatctcagctaagtcatcctggattcctattttactcaaggaatatcattcaactcctcaaggcggtcattccgggttctaccgtacttattgaaggcttgcagccaacttgtattgggtgaacatgaagaaagatatccaacagtttgttaaagagtgtaatgtttgccaatgccagaagttcctagctgtagctccaggaggcttattacagccctttaacattcctagctgagctctatggtggtcatggactgtttgcctaagtacagtcattttattccgctgaatgtatacagctaaggtgttagccgaaattttcactaaggagatagttcgcctccatggagttcccgcatccattctaagtgatcgggatcctattttttgtaagtggtttttggaggaaattattcaagctgcaggggacacatttgaagatgagcaccgcttatcatccacaaacggaggtgattaataggtttcttgagacttttcttcgatgttttattgctgttcaacctaagtcttgggtgttgtggctaccttgggctgaatattggtacaacaccacatttcatgtatccacgggcactttgccttttgaaatggtttatggatgcaaacctccagtgctaactggcttttcaataggggagacaatggaggctgctcaacgggaactgttagatcacaacgagggtttacggtagctgaagcatcatctcctaagggctcagagcagaatgaagtctcaagctgatcgcaagaggactgaaaagaattttgagataggagaatgggtctttttgaagttaagacctcatgggcaacaaacagttaagacctcaacagataggagcaattgcttataagctgaaattaccggattctgctcgtattcgcccggtatttcatgtgtcattattaaagaaagctattgccaactacagagttgaagaggagcttcccgcagatttgggcagtgacacaccacaggtttgtgaacctgctgctgttttggcagcagacaattattggtgcattggaaaggtaagccagtggaagaagcaaattgggaagaggagttcaattttcacagtcaatttcctcttttcagacttgaggacaagtctgttcttgaagaaggggacaatgttagaaccccagtgatggatactaggccaatagccaggcccactatatggagagtgtactccaggagaaagggaacaaagagtaagtgctgaggtgtcagtgagagaaagtgagtaggtgccaatttggttagagagggggtctgtgggcagggagtggggttatgccaattgatgagttagttatgggcagagagcatttgtgcctctgaaggagctgagctctgggtagtaggaatcgtgattcctctgtatttccttttaggcattattaatataccatatatctacagtagtgattgattgatactactgtttctatatttgtgactgtggtttctaacacgtatgactttttattgttatgaatgtcattgattttgagtaactttatatgtatatagtatacattatataaactaaataataaatttcaaaataaaaataacagttatccctctgtggtgtattttggggctaacctaattgccattgctgctattggcatgctgaactactgaggattctgttcatactctatagatcgtacccattgattaattgtatttaaaattttcatatattattccaaatagaaattgcagacgtaaattaaaatgcttgttacccaaggtaatcataaatggcatgcgtgtgaaattgtacctgacgattgtaaaatttcaaatgttagtcactttctatgtttcttgttataaaatctaaatgctttttgcagatcagatattgcttggaaag

SEQ ID NO: 3095 - DNA, 586 bp, Glycine max
  Intron number 2 from transcript Glyma11g33100.2 (locus Gly ma11g33100) derived from phytozome v7.0 (chr-ID Gm11; pos 34861762 to 34862347)
tgcgctttgtcaagggtcaatttctcgaatttcaggttatttttctatccttttatttgatttcgttcttctgattgggaaattcttcgaattttattgggtttgttgtgtatgatgaaaatattgcctgaatttcacgttttttcatcacagacgtgtgtttagtttagctaatttatgctgattcggctgtgaaattggccgatcagtaatggggttatgttgtttcaaatgtcttttttgttaaaaactatcatagaatgtgaagaattcgggttggtcacaaaagggtacaacctgatttgatcatggaggttatgatggcagtgattagtgagtgttgattgttataactttggagctttgaatgatgcctaaatagttgtggtgtggcgggggaaatggtatttttcttctgtttgtagttgtgtgttgatggttttgggttttgacttttaagagctgttgttttgggcctgatgaggagtctttaacttatggaaacgtggcaattgtgttgctgaatttatgttgtctttttgtggtgacaggaatcaacaataggggcagcgttcttttcacagac

SEQ ID NO: 3096 - DNA, 1252 bp, Glycine max
  Intron number 7 from transcript Glyma16g04110.1 (locus Gly ma16g04110) derived from phytozome v7.0 (chr-ID Gm16; pos 3500899 to 3502150)
gtggaagagcagtgcaggtatcttgtttcacctgttaagctttaagtggtgaaatatacattgcttactatatttttcatcccttaaagttatttgggacaatatttaagttacaggaaaaatattgtctgtctatattcaattttaaactaaaatcttctcagcattcatcaatcccaattatggtaataggaaagcaacataatgcaatgatcatttagggccttagcttcattcaacgacaatgttttgagaatttttgaaattgtagtagatgccattcttaggagttaaagctccactgagctgatttttgataggtaactatttcaaggctaactgtggggcaccttttttaaattggggatatagaagggacctaattatttgtatttgtccctttaaacatgcttaatattaaaagggaaggacattattatgacatggctttccccatttcagattgtaatgagtaaagtagggatccagggacccttttacatgcacttgaataataacatatatacattgttatggtagtttggtataggaggtaaagggaagactttgaagaataaaactctctatgtaagattcatgccatgatttctaggttattaatgatgattgatgactgtttcgtacattttggtttacctcctctgtccacaggggttgcctaagttcaaaactcaaaccagctttaattcatatttcatatatactttttatgacatgaattataataatgatttgatgttatgaggtgatattatattgagcttacgtataaaatttacaacgtatgacatggacatgtataagtttttgttggaggatgtgaatttgtactctttggttctccttctatgtgtccccaggggtcacacaagttcaaaattcaaaccagctttaattcatatttcgtatgtattttttatgactagtgataatgatttgatgttaaaatgtaatattatattgagcataggtataaaatttacaacctatgacatggagatatatacaattttttattacaagatgtgaatatattgaatttgcacacatgaatattctcattcatatgattaggcatcttaatattgctagcatgcaaaaaacatcacccttttctaatttttctaaattatctaatttgatggggtgagcgttataattaaggtccttagtgctgtaaaaagaaaatgctaactctgttacatgtttttgcagggtgcttttggaaaaa

SEQ ID NO: 3097 - DNA, 458 bp, Glycine max
  Intron number 2 from transcript Glyma15g13260.1 (locus Gly ma15g13260) derived from phytozome v7.0 (chr-ID Gm15; pos 9898704 to 9899161 reverse strand)
agagtataaaagttaagtgcataagttgattttagcttgtaggagttcaattcgttttatctataagtacttttggagatgtttatccaaacaggacctaaattttgtttttgctattttttttagaaattcttgaaggcgagttggtattttttgtaattattagtaaaagtatatcaatttaaaaaataaaaagcaagaaaaaatgaaacacaatgttaagttttttttattatgaattacaggcacgaggacaacaaactaggataacaatcttcattagagctttatccttataggcatccgatgtatatgtatataaatataaattattggaagtcttgtttattattatgtcgatttgttttttagctattaattttccttgcagattctgtagttcccaaactggaaaaattacagatatcgaaacagttacctgcctcaacttgtaccct

SEQ ID NO: 3098 - DNA, 1744 bp, Glycine max
  Intron number 1 from transcript Glyma08g01460.1 (locus Gly ma08g01460) derived from phytozome v7.0 (chr-ID Gm08; pos 925812 to 927555 reverse strand)
ctccgttcttcacgcggcttggtcctctcccacaggtttggttcccattccaacactttcgttccccttttctttctcttcattgaaaatgaatacgtgaatttcgtttttgtctctctaagtaaagcctgctatttgttggtaccaaattcctaaaattcgtgtttcagaaaaaccggtgtaacttgtaaacatgcttgacgttccttcctcggtgtgcttcatagtaatcacactactatgttgggtacttaattaacttgtaagttctaacatcaaattgttgcccaatagagtgtggcttatgtatttcactggataaagccacgttaggataatcttttccataatcacgtattggagaagaatataagaaagcataatgaattgagtatctctcgtaagctaaaaccaacttacgcacttcagcttttggacaaattaaatggagagggattctataaaagttaaatgcagtaattgctttttaactcatgggagaagttcaattcattttaccgtgctattttttctcttctaaaagtttatccaaacaaagcctacatttaaataataaaaacaagcaaacaaactttgatctcacttgttgcttaaagtgagcaattcattttagaggataaaataaatagtttcagtagttgatggtaaaatcagtggtcgatattgggtgcatatgcatgacaaattatgaatgtgttgaaatatgaagaatcaacagttgatttttctcaaatgatattgttatctctattcattttagaagagcctaatccaagaagctttgggtgaaatcatgtcacttgttttgtgtaaaacttccgtccaacagtgttgtaccaaatagtatttttgaatgaaatattgtttcattgcttggccttgagtccttaacttactagttggcatctgcgtgaatctccttaaatacttagagcaagattgcttttcctttcctgcacagataagaaggatttaataattttctaatatcattcaagagtgtaatatctatcttattcttatattgggtcaaaagaattgcgtaaatatttttaaagagtgatgatgaggttgaagtggagtttgttacacagatgcttgtttgatctgattactttactgtgacagggcttggatctttaggtggcttgggtggacactattaagtcaaagaaatacttaaatgtttttgtgttgtttgagaaatgtaaatttgtttggagcaacgatacttgtggtcatttagcttgttattttcagtctgcacctgtctggcactggggcaccttgtagtgggttttgtgtcccaaacaataatgaagtaattttgattctaccactattattggtctatgtaatggtccagtctgacacttacaacctcccttccaattttctatacatttataccgttgtgggctgagtttcttctagggttctagaaatattttttatgcttgttttaaaataatattagaatgtgatattcgttattcagccgtttgcttttaagtggagagttagtcatcagcatacttctttgcaattgtttactgttaagtggagttgaattacattgcagtttgctaatttaatttgcgatccttgaaaaattcatatgggataggcttaattacgacttgtgaatgtatgcttgttcattgtttaagctttcttctgagaaacaggccttccagctgacacttcaatagagaggtacgtg

SEQ ID NO: 3099 - DNA, 2254 bp, Glycine max
  Intron number 1 from transcript Glyma02g13570.2 (locus Gly ma02g13570) derived from phytozome v7.0 (chr-ID Gm02; pos 11890639 to 11892892)
tctcatcggcatcaccggtgagtttcacctccggcatcgttgtcaaactcgaagtgggttggttttgtttttttgtgttgtgttttgttttttgttttttgattttttgattttgtgttttgtgttttttttttttttttgggtttgttaaggttgaagtcaaaggttttagtcgttttgtgttgtgttgtgttcgtttttgattcgcccctttgaagtttggtcgatggatccgagggcaccaatgtggtcgtgttgtttttttttttgtgtggaattttcttgggaaaattctggttggtgggaaaatgggatagaaaataaaggggtgatgatgataacggtgagtggggataaaataaaagtagcggaatctgataaagatggagactttggagagaaacaattgtgggaattgaaggacactcggaaaagtgagagtgagagagatactactactacggaaaagttgcatatttttggtgtgaaattaaattttgatatgaggggaagaggtgaaaatttaatgctacaatataccctattgaatttggggtattggagggtagggtcagggtttcgtttcactgttgctaatgcattaattgcagaaggagaaggtggagggtgtaatgtgtgaagagggattaagagagagagagtcacagttgaccattatgaacgctataattacaactcatccattatctatctcttggtactctgtggttgcttttattattatgattaatttatttattattaggattaattaattgaattatttttattatatagttatatgtctcttccttgttttatttttatcaaccttaagcattgaagtacgtttaccgacataaggaaactctttctcttcttcgccagttttggactttggtaaattctcttgctgctttgatttcatctcagccgtgtgattctctctttcttccactctctgatgacttacatggcttgtgttcaacaaattatgtttttatttttctaaaaaaaattgctttatttttcatttttcaatttcaattctttttgtttcctacatggtgtcattctattttattcttttgagactttcatctccaggtaaagtcagaattttctcttaaattgtctgttctcaagggagatagatagagagaatcagagaataagaaaattgaagttttttttgttttttcttcttctgaatgtttagcaaatcctattttctcttttttatatgagagtagctttttagtcctttactattatatgaggataagaaggttttgggatctgagatagatctctattatggttttgaccatgttccctgattttccttcatgagattccagtgtgtaagtttcaactcagctgggtattttttccactgtacttttttatctggttttctaaacttctttattctgatgagtcagatcttaatcagagctaaaggacaaagtattttggtagggattttgtaggtagtcatcttgtttatgtaggccttgtgatttaaaatttcggtttgtaattttgtggttgaaaactttcgaaaaagtttgagaatttttaaacttttttcttgtcctattataccttcttctgtaccgtccttggattctacttaggcgaaatcttcttttacttataaaaagaaaaaggcaactaattggtacttgctttttagtacttaaaatattatgatatatgtaatatgtatgtgttgtgtggatattaaaagcttaatatagaatatggtccccagttttgctggtttaatctaaaccttgtccttagaaattgtggtaaactctttattcccctttcttatgctttctggtttattttataattagtgtcatgactagagttgggttctgttaaatttcattcctggtttggaatcaggaatataaggtaaatagtgacagaatcagtgtttcctttataccacaatccaaataaatattttatgatttcttatgattagagaattgacactttttctttctttttccttttccttttttttgttcttttaaataagattatctttttggagcagtagagtagaatcttattattggtgcttggctttgagtgtacctttgtagatcattgaagaaattattgctcttgttttcattatgtgcagttaaattttagttggttactaacctatcattgttgttgttgctggttttcagatccctgcagaatattgtgtaatcagactagtcac

SEQ ID NO: 3100 - DNA, 4215 bp, Glycine max
  Intron number 5 from transcript Glyma11g10860.1 (locus Gly ma11g10860) derived from phytozome v7.0 (chr-ID Gm11; pos 7750354 to 7754568 reverse strand)
ttattcagcgggtatgttgatgaaggcattagattttattatatttcccttgtgtcatggaacaataataatatttactcttgaactttgttaaatttgaatttgaatttgaatttgtaattctggtaatgcagtgtcacttatcacactttttgactcttttatagcggaatgtatacgcatggtttagagaggagagaggatcgcctaaactatttgtacctgcagttatatatttgcataaagaagttccagtgaaatgtttaaatatacaatttttgcaagtctataacaattaacagggaattaaatgttgacttggattaaggttgagtagagagagaaacaacgagtgggagagagttaggaacagaggtaaggcaatagagagggatagagtgagtttcagagaggatccttgacggacgcatgccgggaacagggatggccgatagcaaagctacaatcgagcaaattggagggataagaataacatatcatccttctacttcatacgattttctgaggatgtcacagagaagaacctgtggtaccatttcaagaagtgggatgatgtgaggaagattttcatctctaaacaaagaaacaagaatggtaggagatacggttttgatagattcaaaggagggaaggacgtgcacaatctagaaaggcaactggaccagattgtcatcggtggtttgaagctgtacattaacatacctaaatatgggagagagatggcgagaaaggtagcagcacaacccaaaccaatggggtacgaggagaaacacgaaaatacaacagcttggtggagacaaccacaagcgagaatgagttccacttcgtacgcgacagtggtggccagaaacatgtgcagttctgggcaaaggaaggtaacatacaatgagccccacagccctgttgcctcactatcattagtacatcttgacataccactgaacgacaagaaatggttcagtgaagcttgggtagggcgactgaaaaaccttgcgttgtttgatagagtcgaagacgacctattgtgggactttggagcagacataacttcaaagtacatgggggatgacatggttctgttacctagcctcactgatgccaaagtagaacaaatgatgcaggaggaaatggacggagaagattccttgttccattcgttggagaaatggaattcgagtctacgtataggtcacagattaacgtgggtccaatgttggggtattccgctactagcctgggatatgacgtatatccagaagatcgtggctgccatcggggatatggtggaggtagatgacgatgtcaaggaggttcggagggtggacagagcaagggtgctcatttgaacaccgtggaaccccgcaatccaacacacggtcaatgtatacataggtggggaggtgtacaaggtataaatagtggaggaatgtagctacagcacctatacatgtcattgtcggcgtaggagtgctatgctatcatcggaggaaatcaagtctgatgagagctgtatcggaactccggtattgggtacgagatgcgcgtcagacaacatagatgatgtgcaagtcataagggtgccgaaaaatattgttgagccacgacggatctccttcggttccaatgccgggagcgacgaccgtgggaccgtggtattacgcagtggtttaataagacaaagcggaccactgggtaaccacagtaactcgcggatacaacaccacagtctgacaaagggcagaacggccaccatcgtagacatggacgaggaataggtggcgagtcaagggttggtgacaaaggacacctacctagtgaaagaaagttgcaaaaagaatagggagcaggttgtcggagcaatgactcatctgaggaggagagtttcagtcatgaaatggggaaatatagcagggtggaaaaagaggtgatgtgtcaagggtgcaggctttgtttgggggaggagacacgtgacctacagctggatgaaggagtgggtaatagcgggttgggctttcctatccacacccctactaaagcaaaagttcactatagtaccagcccacagaaaaaaaaaggatgaacccaccaacactttgaaagttattctcgaaccaggggtgtcaaaagcaatcgaaatgggcttttcataggattgccaggattaaatgggagacagtctgtctcccaaaagaacaagggggattgggcctcgaggacattaacacctttaatcttgcactacttgacaaatggaaatagagtctatttcaacatcatcgagaattatgggctagggtattggagtcaaagtatggtggatggaggaggctagatgaagcatcacaagatactaatgactccatatggtggagggatctaaaaatggctcttcatcatccgcaacaggaacagacttttcaaaatggaatggtgtggagggtggggtttggtgataggattaagttttgggaggacaggtggattgatggtgaggcaacattattagcaaaataccctaggttatacctcaattcctaccaacagaatcaggtcatacagcagatgggaattcataaggacacaggatgggagtgggatttcaaatggaggaggcacttgtttgatagtgaaattgctatggctgttagcttcctaagtgatgtagaaggcaggccaattcaagcacatagaagggatgactgggcttggaaaccagacccaagtggtcaatgctcagcaaaaagtgcttatgatgtgttgaggggagacataataaaggggactgatgatgtagtttttgaggaactatggaagctaaagatcccaagcaaaatttcagtttttgcatggagattacttagagatagactgccaacaaaatcaaacttgtgaaggcgacaggttgaaatcaatgatttaagatgcctgttctataggagcatggaggaggatgcagcacacttattcctacattgcagcaaaattctccctatatggtgggaatctatgtcttgggtgaacgctcttggtgcctttccgcagaatccaaggcaacatttctctcaacatgtgactgttttggctgatggaattagggttaataggtggaagtgctggtggttggcttttatatggtccatatggcagctgaggaacaagatcattttctctaatgacactttcaatggcaacaaattgatggaggatgcaacattcttactatgaacatggcttagaaattttgagaaagattttgtaattcattttaatcaatggtcatctattcttagagcaggttttgttaattagttgagggtagcagccataggttactggtagtaattttatcctgtaagtagccagcttttggttcccatcgagactgttttaagtctgatctatggaatcaattgtctggaatattacaactttgtaatctttgtacctctgttactcggatatatatatatatatatatatatatatatatatatatatatatatatatatatatatatatgtaaattatctttgctgataaaaaaaaaggttgagtgtggggttgatactcattggtcatagtgatttttgttagtgttttcatgcctttgtctatgaatgtaaacatataattcactgtaagtcaaaccacattaaattctgtgtttatttcttgttttctgtttgcgcaccttatgtcagcactatctaggaaatttagataaaccaacttttttattccttcaagctgcctctttatcttaatactgttggaaaactccttaaatttcaagtatctagttcaataaatatcatttttgacctttaagaataagataatctacatttgcaaattgtgaattctacttgctattgttaaatacttattgttccttcagaattattagctgtctataatctatttgtagtttacatataagatttcccagtgtcatggcatgcatttccatgtgcattttttaaatcccgtgaatgattgtatgagcttacatataagattttgcatgtgcttttttaatttccatttgaatgattctgcatgttaaagtcttactgttttctcttggcactttgatttaatgtttgtgactacaaactgcttgatatataattttgctttcctatatcgcgtttgcaggcaactggtgccagaccatattctgggaaagttgg

SEQ ID NO: 3101 - DNA, 1055 bp, Glycine max
  Intron number 1 from transcript Glyma14g08090.2 (locus Gly ma14g08090) derived from phytozome v7.0 (chr-ID Gm14; pos 6120010 to 6121064 reverse strand)
aggtgagtttcctaatctaccctccctactcacacttacaaacaactaacatagactcacttgggtctgggccttcgctgataaaccttaatgggcttatcccatctagaagaggcaaggttcctatcagctactatccttctaacattttgaatgaatattgcataagtgttctttaaaattgaatacaaaagaagaggttttatgctgtttatttgttgatattggggttgattctgtgtgcttctattttgtttaagacatgtttgtattattgactactctgctccttataaaataagttaagagcaataccaaatagtagttagttctagggtatcatgttgctcatagtttttgactgtcagtcagtggtttctattttttttaaaaattattcaatggattcagtttgtttcatcttctgtttgaagttgttacctggtgaggtcatgtaattgttaacacatttataaaatgctactgttctcttatagttgtgcagctgatactctggcgcttatttagctgctctcatttttttccttatgcagaagccattttacaaagactccttgttgatgactacctaaaggatgctgtgcccatgttattaattacctctgaccaagtatacatcatattagtatttcttttctagtttgccattgtatgtcttcaaaacatcactatgcataagcaacatctttaggaaaaaagttttgaaggtaaagttagtaaaaattcaataatgctatcattgtttccttcctaacgatctccctccttctttcccatgcttcttgtggatgttaataaagatttttttttttgttcatggactattgactagtgtttataaataatctaaaatatgtccagtgtccgaacaaattgattcttgtatttagaaatcttaaatgacttcctttctctttaatgcccaaaattgcaagtttgtgcttgctacctcattaataaatggccttatggtgacaagactagtttgtagctgaaattgtcaagtttcttttcttcagagtcaaagtttgctt

SEQ ID NO: 3102 - DNA, 620 bp, Glycine max
  Intron number 1 from transcript Glyma01g01860.1 (locus Gly ma01g01860) derived from phytozome v7.0 (chr-ID Gm01; pos 1434552 to 1435171)
tttgcaaaagattgctccagaagcttctaaatgtatggagttttggtctgttgaatatcttttttcttctactgtgtattcactttaatattttgcactgataatatcgtaatagtaaaccgtggcattgacacacttacaagacaaccaggctttctggtgcttgtgtcacttctcaaatccagcttgagtgagttgagagggtgtggatttgtgttgtaacagaaaatcatcaatgatgaggatatagtattctgcaaaccaccataccatatgttaaaaaagttgtaggcttaaatattgatttatagacggtcattgtttttgtattagtttaatataatttagtagttaaaactgtcctttttaaagattttcttgattaaattatagtctatgaggatgtacttttggtttattaatgagaggattatcattgattatttggaacttgaaagtaaaagttgtagattctgcataatgtaatgaaaatagcctccttgtatgttgtatagatgtagatttctttcttttttggggaagggatagatgaaaccagttgagtgatagaatagtgacctaattgttttccatttgaatctgtgataaattccaggtat

SEQ ID NO: 3103 - DNA, 1353 bp, Glycine max
  Intron number 8 from transcript Glyma17g10280.1 (locus Gly ma17g10280) derived from phytozome v7.0 (chr-ID Gm17; pos 7698237 to 7699589 reverse strand)
gaattctgagttactttcagaggcatctgtaagtatgacaagttgacaactgggaaaacattaatgttgcattctgtttattttatttttagctatttactcgcttacttaagtccatataagtaatattcacgttgctaaaccagaaaatcttcattaaggaaagcttgcaataatatttcaaggttaaagttttgtcttgagatgaaaaaaacacgagaaatgctaagaacacattctaacacacttttttgaacacactctaatttgttattggaaatcataattttgtgggtcttgcatctcttatttaatgggtttctctcatgattttgtagttttcaataatttcgaataaataaaaatagtgggttacaaggagtttgttagcactcctcaaacattatttctgcagttatctttttttgacataattgtcttttttatgcttagggttatttctcatcaacttttgacttgtattgttttatgcctctcttaatctttcatatttaaagaaaaaatggataatttgttatcaaagagaccgcttaaaacttaaaagagtaagcaatttggtgttatagaataaaagaagttagtcacttggtgattggctcatgagaaataatcaagcttcctaaaataaataaactaggcattttctctagtccatataagtgttgatttatttatatataatacatttattttgctgataaaaaaaaaacataagtgttgattgatgccttaaatcttaaaacccattagttttagatgttggattgggttcccaccatgatttggtctagaaattatataagatttaggttaattaacacttcatatcctacactctacagtcttacaattttaaccaggaactgttaccgttgacctgcttattgttgcagtcttgctgtaatgagatatgcttctaaaaaatgttgaataaataaaaaatatgatgttgttaccccttggaaattggaatattattagacaaggaaaagaactgcttgtgtgcaaaatgaatctgtacaatgtgtattgtaaacttgtttgtgtgataaaattttgtgttggcatgacatccaaataaagttccatgtgtccgacttccttcctttagcagcagtagttgtgcttgctgtctttgcttgattgcttagaaattggatatttttaatgatcgatgttgctttcactttcagcatctgttattattaccaccatttgattattgctgttggtgttcctgttggcaacataatcttcttattgtttttttgtgtgtatgtgtgtgctctctttgcagtgatttccgagttaatacactacacaacagcagga

SEQ ID NO: 3104 - DNA, 1451 bp, Glycine max
  Intron number 1 from transcript Glyma08g41560.1 (locus Gly ma08g41560) derived from phytozome v7.0 (chr-ID Gm08; pos 41523764 to 41525214 reverse strand)
ttcttctttgttgcaacaagttggattgggactctgtaaggtctttttctcaattttcaattttacctctgaatagaaataatagatgatgaaattatatggccaatttgatttcttcttgttttctttcccatattttaacagaaggagaatgggttaagaatgtaaatgctgcctgagaaaattaggttagggacttcaatagatgagtgactctatggttgtctaaaatgaaaataaacttgtttttttctttttctttcatgaaatatatggtgagacagcacaaactttttatttatattctgagtattatttggtcaagctaactatgctaaactaacaatatttctaagggaatgaacttctaatttatgttcagattaatcatctaaaattctcatcttttaatctaaggtagatctgttttctcttatctaattatatttgtgaattgtgactgatatgttggtttaattttttaaactcgtgttgtgttaagctagtgttaaatggctagaaagtagaatcaatgctaatgccttctcttatcacttgataccaattccattaatgtctatcctggtctgatcatgtggcttccaagttattctttcaagtgtggtgatctcaaatctcaatgcttttctcagtctaggttgttcaagagaaattcaatgttctaccagcaccatgatttgtttgatagaaagcaagctcacattggttgagaaaagacatatcaggttttaattgcaggccagtcaataaagttttattacaaattaggcccaattctaagtatttcctctgttttaccagtctttgctttctggtccataagtggggttacacaactgaaaatgaagcacaacttggcctacaaagaagccaaaacatagcagatttaaaagttaatgtcatattaaattctctgttcatcgatatcagtttgtatttaaagttgacggtattttgtaaacaatccatctattttacagctgcgatgtttcaaacttactgcataaatatcaatcaaaggtagatgccagacagtcagtagtttgatgtcgaagaaatattaatctgaatttgaagtttaggagtataggtttctatccgcactagtatagtctatgtaatttgtagtttagattcactattctttttttagactttttttttatatctgatagtttattgagcttatgttatgttcaaatggaccatcagcttagaccaagtcaaaagcaatttccaaggatcacagaacacctcaaaatcatattagctttgaactttgagctatttgatttcatattagacagatttataaatttcaatgaataatagctagggcaagtgtcaaaaatgcattgtaacgtaaaagctttttcatttcttcaactgtagcattttggtagttgcaggtacagaactacgaaatcata

SEQ ID NO: 3105 - DNA, 1537 bp, Glycine max
  Intron number 1 from transcript Glyma14g02980.1 (locus Gly ma14g02980) derived from phytozome v7.0 (chr-ID Gm14; pos 1881793 to 1883329)
gcaacctaaagactgcaacttaccaaggtacatgtcctttaatatatttcttgtctttatgttcgttctcatagcataatactatttgatcatacctcacccaatcagattttctggtgatccccttccctccttttgtgtttatacccaaaattatatttggcatgtgttacaatttactttaatctatttccatgtctatgactattactttgaaactgcttaatattgttttccaatcaaaattgatgttttactttgatagtcagcatttacttttaatgaaatcctttatcatgtatattagtaaggtgaaactccaattctgatccttataattgcatttaagttttgtttgagaagaaataaccatatttagttctatttatattattatcttcgaacgactccacagtaaatacttgatctctccaattagaatttttgggacacaatagagtatacccatcgtccaccaatcaattagtgcttcttttatggaccaaagatattaacaatagttctggatttcttctatattattggacttttaattaagactttggacttgaatataacatctgatgtagatttcacatttccttgggtccacttgtgactaattaagagaagaccacatgttagaggaaagcgatttacttgctttctaagccacttaaaagggctaaccacaaatcataaagacactatagaaagtataaattgtagacttacacaacttatatggtattctttacaattttttataatattttttctatttttctcatcccatcatttacctaatcccacacttttctctctttttattatatgaaaatttatatattctacaaatatgttttttctttctttttttggaatatatatattgtagctgcatcctagacttagagacagagactgccaaactgggtcggggagcagtgcccgttgagatacatgcttgttgagttgttggcaaatcctcatgagctttaatgtaaatagtatgtgtgtgaatatatatatatagcaaaagaattttaatttgttaaaaataaactatgaatatatttttagtttacttttaaaaatgtttgtccaacgataatatatatgggtgggtttgtttaaatttagttcttgaaaaaaaaattattattttgattttttttaaaagtttaaacaaaagtaccttacctttgattaccagaagacactcatgttcttttgctaaaattaaagttgttaaacaccaaacggttggcttcgattggttgccaagctttatacacatttcaactaacaaaaaattaagtgcacaattccacggggacttagtccctaaattgagaggatgctgttgttatgttgctttcaccttttctgtcctagtagtaaattaatgcacacatgtcatattagatcacaataaaatggtgtttaaatgatcataaattattcgtcatgtaattaattttaaatggacccatcttggacttataaatgaattgggtgtgtacgtacagattca

SEQ ID NO: 3106 - DNA, 433 bp, Glycine max
  Intron number 7 from transcript Glyma04g10700.1 (locus Gly ma04g10700) derived from phytozome v7.0 (chr-ID Gm04; pos 8952423 to 8952855)
gcaattcaagacagcctgtagtactctgcagtctgctaccaatggaatatgactactcattcttagaatcttagttgtgtattttctcaagatatttttttctttctttctttacatgaaaaatgtccccccttagtctattatagtctatctatatagatgttccataacttagtattgtacaataaatcaattccatcctttttccctctatatttgtctctttcttccctctaaattcaacagttaagatattcatttgttgttgtgacagttttcccccctaaagcagtttgaaggatttgattttctcttgttccactcaatttcatatttgtcataaattatgcagaatagaattggagcagatatcattatggctcttgatgatgttgtaaagaccaccattactggtccaagaatagaggaagct

SEQ ID NO: 3107 - DNA, 1357 bp, Glycine max
  Intron number 10 from transcript Glyma10g30620.1 (locus Gl yma10g30620) derived from phytozome v7.0 (chr-ID Gm10; pos 39207172 to 39208528)
acaagactgcaggttagtgacaaagactttattcccttatagtttatctttgtagttatttatcttatggtgctagaccattgaaggaagatggttttcacagtcaactccatttaatatcttaatcgactcatgtagtaatgataattgcacatgtacaatgagtagttcatagctacattactgctttagttagactaaggatatgagtaatatttgaagcatctatcagtttacgaagcacgaacactcttcttgctttagatgttgtagtggaagacatgcttctaacatacctccccaacacctatgtgacattgttggacacttcttactaggcatcctattaaatttatattttgttgacttggacacttgagcaaacacctccgtacagccaaacacttcaagacactggtattttaaaaaaatcaattctttttaacattcagagaggtcagcttaaattgtatagaatattgaaaataatgagttgtttttctttttggtgaggctcattatcttaagaagttgaatatgaattatgaaatcttgattatcaaatcagatctttggtcacacacacttgagtgtgcgccacacatgcacccgcacacatttgtgtcctgtattttggacattagctatgttggagtgtccagtgtctgtgttggagtttgtgtttcttatcaatttgtagttatgccaattcttccactagtcaatcaaaataagcactacctgtccaaccaaataagttttcgttttcttaactgccatctttttttaaaagaaaatatatctttttattgcagaaaataggttgattacttttttttttattgaactttgcccccttctgtcttattaaagcaaaattagtctttttgcatatagttgtgtttttttcttcacttttttagtcatttggtattctgacatttttctttttgattttctagcctatgaggaaacattattatgtcttattatcttagtgaaactttcctaaggaaatcttacaaatttgaatgttacctgcattttgttatgactctggtgagacaaattacttgtttcttcctcatatttcactaaaaagttgttagtggctaatgaacaaagaataaaataagattatcaaaaaaacattatttttattattattatgtctcatccttatattgctttcagtcatcctttctttgttttggtatctactctttgacgaagatcggaaactaccgttaaccattctcttataattaagaaaactggagaggagctgtatttgaagttaaaattttgttattctcacactttatactttgttttgttttataattgtagttgctcc

SEQ ID NO: 3108 - DNA, 3578 bp, Glycine max
  Intron number 3 from transcript Glyma17g14350.1 (locus Gly ma17g14350) derived from phytozome v7.0 (chr-ID Gm17; pos 11110387 to 11113964)
acaggtgacttcatggttgcatttgcaaattagcctcgtttgagtctttgtttagcctctctctaacattgttgtcattcatttttgtttctatttgctttactctcatctatggaattattctaacttgtactaaatagatgtgtttgttttctgggaagatttaagagttttggatgattgctcttagactttttcatcccgctacttatgcaattgtactactagaactagcttttttaccaattgcacctagacatgtggaagccactgcttatattctctgtcttcaagtgaaactttcatgttcatcctccaagtatttgttcggcacctttcttatttcagttaaatgcctcagtctcggtaacttccatgctagcctcaactctggcctccaaagtccaaccctttaagtttttcctccaacaaatccatatgttctgtcaccaaatcatggttggatatctaattccctgacctcaaagatctcctctcaatctggcaggtcagaccaaaatgatataacaccaatttataaattagtgagcaattattaatttataaaaaatacataaaacaccttcttgatacatgttgtaaagattcaagaaagctttacattgtttatcaattgcctaacaaaaatgtcaccttttacctgggacctaatattaatatgttaaagaatgcaataaagcataccatggacaagtttatgacatgatttacaatagaacattatgctgtgtttgatccatgtactggccccacctagtcagaaaaggtttggtttgctaatgttgtatgcaaagtcaaaatacactgaatataatagtagttgctatccctgactcaggtttatatgcacacatgagttctctaccagcaaaagtagttctctaactttatttttttgttttggattggttctataacttttgtgtttcattttgatattttatttcttattttggtttcaattggtcctatttaccaaaatggcggtaaaaaccatcataattgactaattggaccaaattaaaaaaaaagataaaggaccaaaatggaataaaataaagttggaggatcaaacagaaacaaaaaaaaaataaagtttgaggaccaaattactaattattttgtttctaaatgagcagttatctggatctaacaatagatcttggttcccaattcccatctgtactcttgtgtgatgggatgctgaaactatgtattaatgataatatttttggtttatgtttgttattaacccttaattatatttatggcataattagcacattgtagttataaatcaatagaatatgataaaacatgctttgatttcttgcaaggatggtatctattatagatgtggtaaatgcccatgagctaaaatgactagaaatgttttttttgtgtgtgtttgttgctttagtgggtgcatgtaaggtggttgagtgaccagggtatttgttaatagaaatattgttttaatttcaaccaatgccatccatgcattgtaatatgatatgaaactactatgtctagaacatttaataaggtacacaatggaaaaacaagaaattagtttaaaggattaatatgtgagacaatatctgatggcataatcacaaatcaatatgtcaagtgcagcaatagcttggctaaccctatagaaaagggcttaataatgaattggtgaggtgagaatcaaatggaatgggattaaaacccttcaattaaaataaataattggtgaggaaaagatcaacataaatgggatcaacataaatcaccattaagaacccaacgtttcttttgcatactgtagttcaaaggctcaatggggtgataacaagtgattgattggcaacttgaagcactggaaagatacaaccattccaagtctagtgcaaattacaaagatcaaggggatgagccttgcattcttaatgaagttaactaacactaactgtctaaatgagaccttggagaatttatcttgtttgaacacaaggagtgatactgcttctatcaatagtttgggttgacttttagaatttttcattatttaggatgcagcacgtggcaacataagtgctgtttattttctgtgaatggtcttgatataggatcatgtgtgttatttctgatcttgacacaagataataattgttaaaagtattaagctactatgaattaaactgaaatacttacactatgggaaagctcaaattgggaaatactttggtttttgcatgacactatatggatatgagaaattatttgtctagcttttacaaggaggattgttatgataatttttagagcaaggaatagttatgatccttgtttatcgtctctgttcttcacgcctcaacctctgggttgtagtgcctctaatcgtcccagaatatcttgcatcatggtttcagagttccaacgccatgcgtcctcctgttggtgcatcccagcacttcctccgaatgacgattcaactccatcaaacttctttccaccgcttccattcttgtctccatcttcttccgcaccatgaaaaaataattctgcaagatcaacttgctttgataccaattgataggattcaatcagaatttagaaagaaaagatcaagaatcagatgaaaaaggaatgtttagtgagattttcttccgagtcaatgtgaccctgaagcatgacgatacaataggggtaatttcagagtccccaaaactctcccagttctgacttacaacagcaacaaccccttctctattctctctcctctctatttattacatctgtacagttggttaccaatgttattcctaatttgctagttacatttctctgcttatttcaaagagaagactgattacattacatagcccctgaaacaatatcaatgatgcaaggatgcaattttttaataattaacttgacaagaaatagtgacaaagctgaatgtttttgataaagcacaaagtaactaaatttgttgctttcaaagaaatcaagacttaagattttaagtttagggattcaatatttgtgagagaaccaacaacatcctcacatagtgaggcttatgttttatatatgagagaagtacatgacatgacaagggcagactacagctctttgttcagcagacaaaagagtgtaatagaagtaaaacataagaaaagacaaagcgatacaagcaaagagaataaataacacatatatctaacatgaagaatgcaactatggatgctcaattctttctctctctctctctctgtgttccttttcttttcaaattttcctgtgtcttttaggcttatagggtttcgggtaacaagtagggttgaatttgctgcaacttgctgaagtcgtatcatcattttccattcctttttggttcttgaaaagcgcaatatatgtctttaaatgcttcagttttccagtgaaaggaacccactggcattgctattaaggaacattataattgcttatgcatttttcttgttatattgtaattgcatatttaaagttgtggtttatcaagtatgtatgatgatattgtagct

SEQ ID NO: 3109 - DNA, 18525 bp, Glycine max
  Intron number 8 from transcript Glyma02g44000.3 (locus Gly ma02g44000) derived from phytozome v7.0 (chr-ID Gm02; pos 48681395 to 48699919 reverse strand)
gacagagtctcaacccagctgtggatttaggacaggtaagctaatatatatgtgggtgaaattataaatctgaaagactgaaactatttaactatacatgagatcaagaataaaagttaatagtacattactattttaaaaaaatcaagtacattttaaacatttaaatatgatctaatagtttatattattgagtttatatcttacaataacaaaactttatcacctgatatattccaagttcagcactagcatcatggacgaactcaacacaggctttttaagattttagttgaaggtagttcttatgaacatggctggtcatgtaaaactctttggacatgaagggtggacaaagcacaagcacaccatgacttagatgaaaatttaataataaagaatggataaagcaagatttgagtactaagaactctgtcaaaactgacttttataccattttagaaccaactcaactcaaaaagttaaagcttttaattgaggcccaagaatgtttttggtctcttactatcatttctattatgagggcgagccctggtgcagcggtaaagttgtgccttggtgacttgttggtcatgggttcaaatccggaaacagcctctttgcatatgcaagggtaaggctgcgtacaacatccctcccccataccttcgcatagcgaagagcctctgggcaatggggtacgaagtttttttactatcatttctattatcttgatcctttcaatccaaactttacaccttgcgtttttttttttaaatgtgagatgcactagtagtgatgggttgttttagttctttggttccttttcctgaagttgtcagcttgtcaaattaccaagtctgaataactcaattttgataacaaaataatttcttcttacagattgaaggatcttttatccaagggttgggttttttcatgcttgaagaatatgaaacaaatcttgacggtttgatcttggtagatggtacatggaactacaaaattcctacattggacactattcctcaaaagtttaatgttcaaatcctcaacagtgaacaccaccaacaacgtgttctctcttcaaagggtacgacatagtaatgctcaaaactaaattataagtattaaactatgtctgtgtttttactatcagtgcaagaactatttcttcatatgaatactgttataacaaagaatttaattagaatacactttataaatcatgtatcataacattattaattttcataataatcactttaaaaatcatatataagatcacttttaattaatagatagtgtaaaaatatttatatgtataatgtataaaaatcaaactctattacaacatatatgttattgtggactgttaataagattgagaaagcttcagttattgtggttcaaaaatcaagaattaatgaaagaaattgaaatttatttgtgcagcttccggtgaaccaccactacttctagcagcttctgttcactgtgcaacaagagcagctgcaaaagaagccaagaagcagcttctatcatggagcaacttagatggaccagattcaacatttcagttgaaggtccctgctaccatgcctgtggtcaaggaactctgcggactggacattgtacaaacttacttgaaatggaaaatgggcaacaagtaaaggaactcaactcactttgaatatagatcaatgatttcatttttttcttgggtgaaaaataacttgtgtttagatttcacgtatataagagacacaaaggccaggccaagactgtccagctatattgattttgaatactggtaggacatagttatgtactgtgattaggaaaaattcatatattttagtctcaactctcgggtataaatataataaatataagtaaattttaactaattttattatatttaatgagatcgtatttaaaatattttttattattttttatttaattgagattctattttcatttattcatttttttcttaatatcaaattccactaaaagatgatttgagaaagacatttatttttttaaagtgggattaacaaaattaaatgatattaactaatttttttaaatgaaaactagaatagtaatattagttactgaactaagaaaaataactcataattaagagatttttatgtataaaaaaactgatgaaaaagttattctaaattttttttattaaaaaaataatattaattcttaattataaaaatgaccggaaggaagaaataaaataaaatttaataaaccaaaaataataactcaaattactttaaacatgaaagttggaacggaggtagaactagtctttttattagattatagtatattttatgaaaggtaattttatttaaataaaatagaattattataaataattaaaagttttctttaaatatttaatacaacgttatattattcatatcaagattctaatacgaaatctcatattaaattggaataatttaacttcagttaaatcacgtgctttggttatactgatgtgatagtatatttaatcattatcgttcattcatattattgttaccttttcaatgttgatgtcaacaccgttctttcttctcttatcttccctgggccctgctgttctaatcactcttttctcgttaacttttgtccttctctaatctatctcttccaatataaaaaaaaattaaaaaaatacaagaaataaagaagaaacagtagatgtaagagaagaaattaaagaagacgagtacttattttttagaaaatacagtatactatattaactaattttatctccaaaagtataataataaataaataaataaataataaatttattaatatatttgtgtgtaactggaggataaatataaaatctagagccctagaacatagtaaaataattaaaatattttcaatatgtgtagtatatgacttaactgtattataaaaaaactacttttaatatgattttttaaattaaactaataactttaccatcttactaattaatagtaaaagaatatgcaaatccaataaacaaacttgttgcactttcatgttctagccgaataaattattacaagttataaaatttttcattcaaatatttaatacaattacatatttaagatttgaacaaaagttgttgaaacaatgatctgctctttaaattcaattccaagagatccggtttcaaagatagtgcttgtgcatgcacggtcaatgcatctaaaatagaaagatgattaacttatacctgttttttttttttgtcgggactcaggagaaggatataaaaaatattataaaaaaaaagatgtgatgaaactgagatagtgaagatgagtactcccgtttcaataataaaaaaaaatggaatatttaataaaatagttatagaattttttattttactcttttttttctttacacttcccagtaaacatatatgtaaattaattaaagattagaaaataagtaaatgtataattgataaaagaattatgagaaacatttttttaaaaatttaagaattaaaaaagaataaatttatttattctagaagattattatgagacgaaaagagtagcagttaataagcaatgaacatgcagaagtgcatagagaagcgtggaaaggtgcgtgagaaagtagcaaggaatcaataaagtatatttgttgaattattactgaacgcagactcgaacacattaatcaattatgagaattcaaagttatcttctgttgctcaaaactgaaataacatgaactatggaactggagaagacaccaacaagtttagtttttggctatatccattatatgctgcatgatataatatattgttaacggcaagactggaattagaattttttttattttttttacttctgtctttttatttccttcttcaaaatattatgtgctttatcttcttcctttttctactcaatccagtaagattgcagaaaagattgagtagtagagaagttatatatgttatgtatgcatgtgtgtctataatactaacaattggatcttgaaggttgccacatcatgtgcactggcagcaaagaaattacagcacccagttaggatgtatcaaaatcgaaagacggatatgataatggccggaggaaggtaccccatgaagaaaacttacagtgttgggattaggaatgatggtaagattactgcactagaccttcagatattgttcaatgcagggatatatgtggatataagtgcaattatgccacataatatagtttgcgcacttaaaaagtatgactggggtgcactatcttttgatataaaggtatgaagaacaaaccatcctagtagatcttcaatgaggggccctggggaggtgcagggatcatttactgctgaagctattatagaaaatgttgcagctacactttcaatggatgtagattctgtcagaagcattaatcttcacacatacaaaagtcttcttcagtcattctctgagtactatcatggcgaaccttacgagtataccttgccttcaatatggagtaagttagctgtttcttccaactatgaccagagaaacaaaatggtgcaagagttcaacaggattaacacctgttgtgattcaattgactctaagaccaactcctggaggaattgaagtgggtcaaggtctttggacaaaggtgaaacagatggctgcgtgtatgctctcggtgctattcaatgtgatggaactgaaggtctcttggacaaaatatgggttgtacaatctgatacggtgagcttgattcaaggaggcttcactgctgggagcactacatcagagtcaagctgtgaagcagttaggctttcctgtaatgtcttggtaaagaggctaaagcctcttaaggaaaagctgcaggaggaaatggactctatcaagtgggagactcttattcttcaggtagctagctactataaataaagtaaaagctaaattttgaacattgatagattttcctctcaaagagttatcttcatgattgtgggaggaagttccctgaagataaaaccagttctctttatgattgtatttcactactgacgttaccactgaaaggtttacaatgatgcatgtatattagtattagtatatgtaattgtagtacgtggtatggaagatggcacattggcacttaggcattctcacaatttatgggatcataattaactcctttttaattaggaaaatattcaattaccatgtcgctgacaatttattaacatacaggcatacatgcaagctgtgaacttatcagcatcttcattttatgtacccagtaatgactcctcgagttaccttaactatggtgctgcagtaagtgaggtaagttggtttgagtttttgttttctatgcatatctcaaattaaaatggtatgttaagtgcactggtagttacttttcttgaatcttaagtgcttatgtcttattttcagacaagccatgctactgaagtaactgacttatcttatattggcatgctaaacaatgggaattatttctcaggtcgaaatagatcttctgaatggagaaaccagatttctgcaaacagatattatttatgattgtggacagagtctaaaccctgctgtggatttaggacaggtaagctgactacttatttgcgatgcaatctcagccctaaccaaggaataatacaactatacaagagttgggcccaagaatagttttttattaacacatcccctaacatcaaggcactctgagggtaaaaaaaggacaaagaactgacacatttttacctatgctataatttaaagttagagcaaattacactctaattccatcagtttctctttatgttgtctatttgtggttatacctggataaagtagtgtattgaaagtttctatttgtgatcacacctagatagaaaggtgtattgaaagtctcacatgacgagtagtcatgagaaaaatgagacatgttgaagtctcatatcaaataaaataatgtcgagataaattatataagtggagagcaatcctcaccttgtaagtcagaaggtttagttaaagctcaaacccactttctaacatggtattagagtctatcctaaatggataggtagcctctagggagtgtgtgcaatttcacgaaaactcaaggttagttagtgtaatgtacgtactcttaaatttaatattccgagtggaaaaggcaagaatcaactcctgatcactttgccaaatgggctctaagtctgatatcttgttaagaaccaagatatcagagcttgataagccttgttatcaaccaaaggggcttcaattccttatgctaaaaatatcttgttaagaaccaactcagcgaaaatgtctgagatattagtaggaggtcctagaatgtctatggtctgttacaatgtaaaactatggttcagttattccaccatgaataatgtttatccttcttaacaatataattgtatcctgcagattgatagagcttttgtccagggtttagggtttttcatgcttgaagaatacgaaacaaatattgatggtttggaattacaaaatccctacaatagacactatacctaaacggtttacaattcaaatcctcaacagtgggtaccactagcaacgtgttctttcttcaaaagatatgaccatggagttaccaaaaacctgtttgtgtatttgtcttttttgtttattcattttctctgaatgcacatcacttatatatgaaaagggaagttttgtgattctctttcattgaatcatttataggtttattctaacaattcaattacaaaatctagggacgataaagacagaagaaaatacttgctaaccatgtattttgtggtgtaaactgttatatatttttttgatatttcataaggctaacatttccatgtaattaaatatagaaaatatttttaaattaatttagtgcttatcctaaaaaaaaaaaaaattgacttgctcatttagactaggtctcaccttaccttttgatttggtcttttgtgtttttcgaaacacttcttcattattataaatatacattggagaaggtttttacagagtctcgtcccttttatatccttacttctgcaaattcttgggttagtttcactaaaaaattagttagttctgttgtctcaaattaccgcagaaagaacatgttatatcttgagagacttgtgtatcatgtggataagtctttgaggataatgacaatgtcacgtctcaaactaattttgtttgctatcaaatgagtttgtaaattggagatgaatgatggtttgtgattgatcaattcaagatggaccgctttcgagttttatcgtgattttggacagcacgtttacgatatggatttcttccatatctttattcaacaagtaaattacactctatcttctatttttttcgaattgtgatggataccctccattatttgactttacttctacacaccttgtttgtgacgtccttaatgactctaccactaactgagcatatcaggcacaattcgtagaaatcaaaggggtattattataattacctcaataaattatatatagaatatttatataaatattatatcgctgataaaaaaaatatagaataattgaagatattaataaattaaattaaatactacattattacttgtgttatcatcacactgattaaaaatggaattcaacttatatatcataaaacactagaaaaatgtacattgaatgaattaatgttaatttaatgatatttttttgtattgttcatgttaattaaaattagtaagtcttgattaattctttggcacagctatggttgttttttattttatttatatgaaatttataatttggataagatgttcatcaataattaaaattagtaattaataattatgattagtgattaataattaataaataaaattttccataataataaaaatattccataaatttattatcatatcaaattatataagaaaaataatccataaatatcttttttaacttttatagtaattattttaaaaatcatattaatacttattaatatttttgttacaaaaaatacagtaattattactattaagaaggtaaaaaatattattccctttgctactaaatataagtaacaaaagtctcttatttttttatctcaaatataaacaaattttaattaactatgtcttatttaatgagattctttctaaaatactcttcatttaatgaaaccaaaaaaatatatatgttgatatcaagttccattgaaagatattttagaaaaaaaatatttatttttaattaaaaatgacataatttaatgaaattaattaattttttaataattataaagtatttttttcttcttataaacaagacaaaaggaagtatattggagtgtacatagccatcaaactttttttttattattttatggacttaagtacatttttcgtcatgtaatttagtgttttattcattttcatccttacaatttttttatgttttaatctttataaaatgtgtttttttttctttcacccttaaaacattttagataatacttttaactgtaaaaaaatgatatttaaagtattttaaggaagaaaaacataaaaatacattttacaaagacaaaaatgaagaaaaaaattgcaaggaggaaaatgaaaaatacattaaagtgcagagatgaaaaatgaatttaacatattttagtatcctattttttaaaatttgtgatgttagtccttttatttttaattgagacattttgtcccttaattttaaaaaattaatgattttagtctctttaatttttaattgagatattttatttttcacttttaaaaaatatgtaattttaatcttttttgtcaatttcatacttactatatattttttaatttttttaatgaattaagcttgttagtaatttaataataataatttttttcatgtgaataataaatagacatgtgtcaccctaaaaaaataatacatatcagtcaacatttacaaaatatatagatcaacatctgaaattaactataaaaattaaaattgtaaattttctcaaattggaagaagaaatatttctattataaaatagaagactaaaatcctaaattttttaaaaatgaaaaataaaatgtcttaattaaaaaataagaaaattaaaatctaaaatttgagattaaaattttgaactttttaaaaattgtgagtgaaatgtttcaattaaaaaataaaatgaataaaattatgaatttgaaaaaaaaaataaaaaaaaaaaaaatatatatatatatatatatatatatatatatatatatatatatatatatatatatatttgaccatttattttataattccaatttccaacttgaaaaactcgtgactattattcagtaaaaaaaaaaaattcggtccaggtgagaaggtgcaagaagaacgtgcaaaggaatcacgaaagtaatgtattgtattaactgattgagacggtagaatgggaattaattacggtaccaattgttcccacgtcatgtagacagatactcacactgtcgctgttcgaatacaatgctttttttaaactaagaataaaatttatcctaaaataatggttgtattttaataattttctctcaaaaaaattaatactaagtaaccttttatttatattttttataatattatgagtgaataataaaacttataaataagttaatattaatataagatcaattttataaaattaatattttttattttttaattgatataaaacattcaaaaataattattattttttaatggaaatataaaaaaacattattaatttaagattaaattactcattttatttttataatttcatatttttttatttttttagtttaaaataatatttttaatcctttacattttaattcttttttaatctttataatttaaaagtgttctttctaatctttatagtttatatttttttaattttattaaaatttaaaaattatagagattaaaaaattaagaatcattatgaggattaaaaatatcatttttaaaattataaaaattaaaaaaaattataaagattaaaaagatcacttttaaaatataaaaattaaaaaaataaaaataaattaagaataaatgaataatttaatcaaattaaaaaataaaaaaaatgagtaatttaaccaagaaatatcaagaaaaaaaaaatcagccgcagaaccgtaccaaatgttcccacgtcgctctcaagcagttgactacgtctttggtagtaagcaatgattactagcgagtgcagactcacacacacgtcattatataagagtgtaaagttctgttctcttgctcaaaacataaacataacagtttctgaactatggaactgaagaagacaccaacaagtttggtttttgctgttaatggtgagaggttcgacctctcccacgttgacccttcaaccactttactcgaattcttacgcactcgcactcgtttcaagagtgtcaagctcggttgtggtgaaggtatgcatgtgtttgtgtttattcaaccatttctctctcttttggtggttaagcagttgattgattcgcttgattaattgttaaattagtttttggaggttttccccttcatgggtatcttatttgaagtctggattttttattttttgttttgcttttcaatttcaataagcttggtgtttactgtagggattcatcttttccttctttctgtgattcttaatgtttacaacttgatgaaatgctgaatggatttttatggtcatggaatgattttttaagggccactttaaattgtccaatactctttttcttggcgttttaagaagtggaaacaatggaagacttacatgcaattcacggattactctgatcataagcctgtactgtactggatcctatcatatatgtgcgtgtgaatttaattagaatacactgacaaacttctatactgtcattcaattatagattgtcacgtatgctaagattgttggcttttgttacaagtacttcaaaagtaatttctagagtgatttccaattagttgacaatgtaaaaaaaaaaaaaaaagactgaaaatgtgaaaataaaactctctctctcattaagaaccttcttaaggacagatttggggggggggggggggggctctaatttttttattgtctcgtcatgactcatgaagtaggagaagatgttggcttatagtagccctaattttcttttcaatttggtacttatgttttgacacggttggtttcaggtggttgtggtgcttgcgtagttttaatctccaaatatgatcctgtgcatgaccaagttgaggattttacagcaagctcttgtctcacactactttgcagcatacatggctggtcaataacgactagtgaaggcattggcaatactaaagaaggattccacccaattcatgaaagatttgcaggattccatgctactcaatgtggcttttgtacacctggaatgtgtgtctcactctatggaacacttgtcaatgctgaaaaaactagttctccaaaaccaccagctgggttctctaaagtaactgttactgaggctgaaaaggctattgcaggaaatctttgtcgctgtacagggtatcgagcaattgctgatgtctgcaaaagcttttcagctgatgttgatatggaggatttgggtctcaactctttctggagaaaaggagacagccaggactcaaagcttagtaggttgcctcagtatgaccatactcaatcaattagtagatttcctatgtttttgaaggagatcaagcatgatgtgttcttggcttctgacaaacacagttggcacagacctattagtctaacggagcttcagaacttactgaaattaaaccatgccaatagtacccggataaaaattgttgttagtaatacaggtatgggatattacaaagataaagaaggttatgataagtacattgatttacggggaatttctgagctttcaaagatcagaaaggatcaaacagggattgaaattggagcagcagtgacaatatctaaagctattcaaacactgaaggaagagagcagaaatgactttctctcagattatgtaatgatacttgaaaagattgctgaccatatgagcaaagttgcctcaggatttattcgaaacacggccagtgttggtggcaatttagttatggcacaaaagaataattttccatcagatattgctgtaatacttcttgctgtagatgcaatggttcacataatgactgatacacaatttgaatggctggcattagaggaatttctggaaagaccaacattaggttttgaaagtgtgcttttgagcattaaaattcctagtttggaactcaataaaagtgaatcctcagaaccagaaagtagattcctctttgaaacttaccgagctgctcctcgaccccttggaaatgcccttccctacttaaatgctgctttcctggctaaggtgtttccatgcaaggactctggtggaactgtgatagacacttgtaggttgtcttttggtacttatggaattaagcatgcaatcagagcaaaaaatgttgaggaatttttagctggaaagcttttaaatgttagcattctgcacgatgctgtcaacttggttacagaaactattgtacctaaagatgatacctcaaaaactgcttaccgttcaagtttggcagctggttttatttttcagttcttaaacccacttttcaacacttcggtaataacaaatagttatttgaatggacatattaatcttcctttggttaaggatcttgaattaaaagagaatcagaagcaggttcatcatgacaatgttccaactttactatcatctgggaagcaagtccttgaagcaggctgtgagtatcatcctgttggggagccaatcatgaaatctggagctgcgctacaagcttcaggtttgtttggtatcatcaacttttgaattgagtcactgactactcttttctttgcattgttatcaacatttcaatttagtaaacttaaatatttacatgacaaaaggtggtatttcttcatattagaaagtaaaccttcgtgcagttataaggttgtaagcttgtgacctggtggtcaaattttctagtctcagaagcagcctctcttcttatggtggtaaagttgtatacatcttaccctctctatatcctacaatgcttgcaaacttgtgtattggtctacccatcattactcacttccattgggtaagtgacatcaaactcttaatcaggttcataaatgtctctctttctccctaaaagcttgtagcaagcaaacatgatgatggtttttccttctctaaaaactttcccctttttccctttgtctgttctcttgctttggaaaagtcttatattcattcagtagcattttatgatcaattgctacatagcagaagtcaaaaccactatgttcataaaaaccctgttcctcatgctcttggttcagatgaattgtgtatccatattttgcatcttacagtctctggtttccttctaactatgctaaaaagtcttctttccaggccagagactagtttttatgtgtgaaagatttattttatccttttttgatgcctttcaattatgacttctcatgtttaattgtttaaatttctgttcagtaacaagtacatttttatgaataatcatatataggtgaggctgtgtttgtggatgacattccatcaccatcaaattgcttacatggagcatacattcatagtgcaaaacctttagcaagggtaaggagtataaaactaacgcctgaattgcaactggatggagtgagggatatcatttcaagtaaagacattcccaatggtggggaaaacattggatctaagactatatttggtatcgaacctctatttgcagaagagataaccagatgtgttggtgaacgccttgcattcgtggtgtgttcttaaagccctctttttgatccaacaatgtatgagcttattttttatttcattttagtcactgaataccttctttaggttgcagatactcaaaaacttgcagatatggctgcaaactcagctgttgttgattatgataatgaaaatcttgaaccacctattttatctgttgaagatgctgttgaaagatctagcttttttgaagttcctccttttctctatccaaaacatgttggtgatatatcaaaaggaatggctgaagcagatcacaagattctttctgctgaggtacattagattacatttattgctctcctttgtttcccctcttcctctcatttcacacctttgtgcaccttggtttctgatgcaacgtttatgtttgctcctgattaattaatgtttaaatggttatgctgaacaaaatattcattgttgattaatgtgaaatacagatgaaacttgggtctcaatactatttttatatggagacacaaactgcacttgctgtaccagatgaagacaattgcattacagtttattcctccagccaatgccccgagtttacacattctattatagcgagatgtctaggaattcctgaaaataatgtccgtgtaattacaagaagggttgggggcggttttggtggaaaggctataaaagccatgccagtaagtatttatttatgtcttaattttttaaaattctaatttattattttatctctatctcttttttcattacaactaactaataaatattgtagagtgttgacatgaaccttcaaaacttctgtagtttggagaagacactaataatctgaaaataaaaggcctttattgtcatttcactgattttgtttctagataatattcagcaatctagacaatatggttttagtttttatcgacatgtgttacagatgttatagaagtataaaacgattccattattctcaacaacttaagcttttgggatatttagtttgtggcatgatgttgaagcctctatataaccttgtagtctaagtttgatccttgctgcctccattcttctaaaataatagttgaatttcagcacaaggttggtgggtgtgttagagatttataatagcataaaactatccaccaacttttacccgatagcttaagctttttggatggttcatgacaatatatgtccttcacttgtctttagcatatgttgctgcttactgtttatccaagtaatcattttcccttgtaatgtgtattttgaatacaatgaaatagaaattgggttcccaaagctattttatatttttcttttttcttggatcaaaaattaatttgttaagatggaggaacgatactgagctggaggacctaaaattgtctgataggcaaaagaaacaagacaaaaaaatataaaaacattaggtgaaaagatcttccgacaaaaaaagttcctttgaaatttgaataaatcatgagataatccccattgaaactctagaatcccaattctcaagggaaattcactaccagggactaaagggtgatttagtgaacgaggttcccacttagtggagtctgaggagggtagttgtatgaagccttaccctgtaatcggagaggttgttttccaaatttgaacccatggccaaagacagcttgcttgtaaggaatcttagctacttccctattgaattataccaaagaatcaaatgaaacaaagaaagaatgaaggatgtgatgaattatctattaccgaataggaagtacaatcgttcccttaccaagggaaatctcccttaccaaagaatcaaatgaaacaaagatttcccttaccaagggaaatctccctccaccaagcctaaggtcaaggttctataacagattttctaactgattgtacaatcgttccgctcttatttataggactaactacccccactgccttccaaattctcctctctcagtatctcttatacatgataattatatatttatgcatgtattgcatagtactaactatcggatctttcaggttgccatatcatgtgcactggcagcacagaaattacagcgctcagttaggatgtatctaaatcgaaggacagatatgataatggctggaggaaggcatcccatgaagataacttacagtgttgggtttaggaatgatggtaagattactgcactagaccttcagatattggtcaatgcagggatatatgtggatataagtgcaattatgccacataatatagtttgcgcacttaaaaagtacgactggggtgcactatcttttgatataaaggtatgcagaacaaaccatcctagtagatcttcaatgaggggccctggggaggtgcagggatcatttattgctgaagctattatagaaaatgttgcagctacactttcaatggatgtagattctgtcagaagcattaatcttcacacatacaaaagtcttcagtcattctatgagtattctcatggtgaaccttatgagtatacattgccttcaatatggagtaagttagctgtttctgcaaactatgaccagagaaataaattggtgcaagagtttaacagagttaacacctggaagaaaaggggaatctctcgggtaccagttgtaattcaactgatgctaagaccaactcctggtaaagtaagcattttttctgacgggtctatcgttgttgaagttggaggaattgaattgggtcaaggtctttggacaaaggtgaaacagacgactgcatatgctctcggtgttattcaatgtgatggaactgaaggtctcttggacaaagtacgggttgtgcaatctgatacggtgagcttgattcaaggaggcttcactgctgggagcactacatcagagtcaagctgtgaagcagttaggctttgctgtaatgtcttggtagagaggctaaagcctcttaaggaaaagctgcaggaggaaatgggctctatcaagtgggagacccttattcatcaggtagctactatatataaataaagtaaaagctcaattttgaacattgatagtttttcctctcaaagagttatcttcatgtttgtgggaagaagttccccgaagataaaaccacttctcttcataatcatgaagtacatgaagcaagtggcattttaactgtttcctctctttatgatccatatgaactgactatttctgattgaatttcactactgacctctgaaaggtttacaaacttacatttttcaattcacactgatgcacgtatattactattagtatttgtaattgtgcatgagatgtattgcttcaagcttttcctgttaaggtcttatagtttgtagcgtggaagatggcaaattggcacttagcgttctcacaatttatgggatcataattaactccttttaattaggaaaatattcagggagtttactgtggaaatggaattgagtgtagagaatttcttcttattttcctagccctcaagcattaatatttaatcaccatgttgctgacaatttattaacatacaggcatacatgcaagctgtgaacttattagcatcttcattttatgcacccagtgttaactccatgagttacctaaattatggtgctgcagtaagtgaggtaggtcgtttttattttttgttccatatgcatatctcaaatcaaaatggtattttctctagttcattaataataacttctcttgaatgttaagtgataatgtcaaattttctcaaaaaccatgttactgaagtaattgagcctacttatcttatactgattctaaataatggaatttatttctcaggtggaaattgatcttctgaatggagaaaccagatttttgcaaacagacattatttatgattgtggacagagtctaaaccctgctgttgatttaggacaggtaagctgactacacatttgctatgcaagctcagccctaaccaaagaataacacaagaattgggtccaaaaatagttttttattaacacaacttctcacatcaagatcctcgggagtgaaaaaaggagaaagaactggcacagtattcccaatgccaaaaataaatttaacattaaaagtggaaaagacaataatcaaatcctgatcagtttgccacataggctgagtccaatatatctagttaagagccaagaatccaagatattagagcttgacgagccttgatctcttgttaagaactagagaggctttaattccttatgttagctaaaaatttattgttaagaaccaactccaccaaaaagcctaagatattagttggaggtcctagaatgtctatggtctcttactacttagaactattgttcagttgtttctctatgaatatttatgcttcttaacaatataattgtatcctgcagattgaaggagcttttgtccaggggttagggttttt

SEQ ID NO: 3110 - DNA, 2388 bp, Glycine max
  Intron number 8 from transcript Glyma04g07100.1 (locus Gly ma04g07100) derived from phytozome v7.0 (chr-ID Gm04; pos 5518095 to 5520482)
aggagcctcctcctcctagggtggagttaaaaaaggtaagtttctatatgtttgtgtgtgtgtacctgtctgtgtgattgcatgcaagctctctatgtgtactctgcctaattattatcttatttttttaaattcatatgtaatgcattttctgttactatgttgagggatgcacacatgcacagatgtgtacacattgactcacccacatatttatgtggtttcaaataatcagagcatacaacaatcttttatccttctgaactaatttggaaagagcaatcactgatgattgaagctcttttctcacggtttccacttcattccatcaatagtctgaggaaactgagtagaaattctagggctttagactaaatctatatctgacattcagtctaatataacccatcaattctcattttgctagccttctgaattgcaaaattattttatttaggaaattctaatatttcttctcaatatataatatatgactaattcatttaatgcatcttagtagataaattatctcaaataggatttaaataattgtaattttgagaagtttctttcagcagtagcagcgattatagtgccttaacatatccttataggaaagtcctaatataaacctatccttataggaaagtcctaacatatacctccgatgccttttctcatttttaccttccaagtcattttcatcttgcttttttgataaaattgcaatgcatattcttttttctactggattaaaaaagcactcaaggctgagccctaatataaacctatccttataggaaagtcctttgtctcacctccaaggagttctaacactagtaattaccccatcatacatgtcttgtgtagccttaacataagtcaagaaacggacacttttcttggcattccatcatatgttttttcctatcaataaaaaccatatctaagtcttttctttgtttgttttgatacatttttatcaagtctcagaaaagataaatgacttgttgtataccttcctaacatgaaaccaaattgattctccaaaatcgtatcttttctcttaaattatcgctcaatcaccttttcctataatttgatggtgcgactcataagttttattcctccataccatagtttacacaactctgaatatctcccttgtttttaaatatatgaaccaaattgcccctcttctgaattttgctcatctggcattttcttaaatttcaaaatctcattaaatagatagttatgttgatgataaattaattttaaaataacaaaagaaaactgaatgcaaaatcagctttaataaaatttattactcaataacttaaattaataattagcaaaacttattaaaggtataaatttttcttgtggccataggtgacatgggagcattattaggctatttgtcttggctcatttgcctatggccgtgcacggtcctgggttctgtctatgtcttgtgtgttcttataaatacctgtaattaagaatgattgattattgtataaaaaaaatgcacagacatttgtagctattaattactctcccaagtcaaagtgtggtcttttatgcaaccaaaaagtttaggtgtgctggatataagaatgaaaggaaatatctatcatgtagatgtagattgagcaagtaattgtgacatgggtaataaaacttgtattttctaaatttgttagatcaacatatcagggaggtgaaataaaagataaacatattatattaatacatcgatgctcatttattatgatttcaatttcaactgatgaatctgatggtttattctataaaattagggactaattggaatgctgattttatttgcagttatttgctttcattgatctccatgttgaaaccttagatgtggtttgtgatttggtgacttacacatatcttatggattctaaaaattaggtggatttgctaattttccaaagtaagcccactggattttcgagtcctatttcattgcaaaaatattataattcttaatttgttctagacagctcttcgcgtatcaatggataggtgcttgatcaggttcatctgaactacttttatttagactttcacaacctttttaaacacgattctttatatgcatgtgcttctagatttctctaaagtgatgctaagacccagttttttctattcttttactttcactgttgaaattaagtcttgtttgctttgctatttgaacattcatttgagctcacagttttgatcttcttctctccctctctctgacatgtgatgtgactgctgatgtttttcatcctattttgagtttgcaagtttggtctttgtcatttggaaatttaatttcttgagcttttggacttactaatgtag

SEQ ID NO: 3111 - DNA, 2912 bp, Glycine max
  Intron number 1 from transcript Glyma03g32860.1 (locus Gly ma03g32860) derived from phytozome v7.0 (chr-ID Gm03; pos 40594108 to 40597019)
aggtaatactttactttttatcttcaaatcatcctatacaacttgaaaattgttataacccctcaaagttacataatatttcattttttggaattataagattcacttgatttaataataagtgacattgcttgataaaaaaaaatataaactcaaattctagaatacaccccaaatgctaattgaaagctagagaaaggaaaacaatatatatataatcataggtgatatttttttggtaacggagagaaaacaaggcaagaaaaacaaaattacaatctcatgaaagatatattaatgtgactagaagaaatatagaaagaaatattgaaaggtgatgattagctattcaaaagaaagagatgtttaaatatcaaattttttaaacatattttttttctaatttaatgactatatagtaatagcacaaaataattttatattgttatttaaatataaattattctttacttattttttaaaaagaaattacgataaaagttaataaaattatcacatataaattaataaattattagttgaaattaataaattattagttgaagtgaaattaggttcaatctttttaagtattcatggtattgagtttgaatcttatagatgtaaaaaaatgattcaaatccagttagaatgatcatatagattttttattaaaaattcatcatcaataaaattgataaatatttcatagtaatatttggtgataataaaaacttgtcatatataataatttatgattgaatgataatatatatttcatctttttctttttttaattaaaatttattaaaaactacaaaaattacgtaacccacacatttcttttaataattctcttttataattttataatttcaataatttttaagcaataataaaatattttattaaatgtgttgcagagcatgaatattccatggtatatatttggataaaatctaaacaatgattttggtgtacttatttttttataataagtgaatctcttctttcatctgtatcttaagttttataaagaaagatgaaattcacagactatataaaaaatatgaaaactaaaataatttaaagtatagaaattaattaagactaatcttaacaaaatagtaataaacttaaaacatattttactcaatatatttgttagaaaagcagaagcagtttaactgtaaccaacaactgaccatcccactaactaattagcttacaaatttgttattgtttttttatagattgtttttttggactcgtttttaatttttttagattggtttataaattactatgtgctaatcaatcaatttttgttttactttttaactttcctaaaagaaatagattatgtataaacgtgccaggtcgcagtcgtactcattaacttttggtgttaattattttttttattttatgatagatattttttgacactttcgattttttttcaaagtgtcttgtcgtactcgttaaaaaaatgttaatgttacagccaatctgtattttttttcaggctttattccagtttataaatatctttacaaactctgtcttatagtgtttgttttgggtacatgtacgtaatggagagacatttggttctttctgtccatcgtttagtttcatcacgagaaacacatgaacggttgaaaatctaagatcctctcgcgaaactcaagaagaataaaattggaagaataaaaaatcttgtaaatattttttcctattatgtaaaaggagttaatgtaaaaatagttcttttaacaaaagttaaaagccaatttaattcttgaaaaaaaatgagaacaaacaccttaatttttaaaaatataaaaaatgatttagttccataaaattactaatatattttcaaagactattaatgtgcatcggcaaaaggaattaatataaaatatatttatgattttaagaaccaatgtgtcttatgctaaatttatcaaaaaattgtttaagcttttactcttttaataattatataaacatatgtttataatattaaaaaaggaaaaagctttggatacgccattgctcacgctactttttaattttgagatgagtgtacggatgaaagagattgaaaagaagaaacaaaaggtaacggataatatcattaaaaaagtaaataaataaaaagatagagtaatatagataaattgtaaggggaatgtaacaaaaaaaaattgtaaggggaaaatgtgagaaaatcagaattagttcttaaagcaatttgcacatatgatacttgtgctcgtgactcgtgagatggagagagaaaagggaattttgcatttttgccgagtatggcctcattggcctgtccagcgtttgactggctcacgttcaaccgcattatataaacctgaaggaataacaataaaagtcaatgattcttttagatattctcgcttttgcccttcttttctcaacgagtttatttatatatcaataaattagaaataacttccaagtatgttacttaaaataaactaatattttgttttacgtaatgtataataaatattgattaaaacataaataaaattaataataaatatttttaggtatataaattacaatacaattaaattttatgataaataaaatatataaattatatttaaaattatagtataatgttattatagttattgatattttttaaaaacatgattaaaatttaattcaaagaaaaaaaaataaaacaaagtatattgaaagggatagaaagttaagaaaaattagtttgctgctacacatgtaaggaagatagctttcaatgattgaatgagaaattttatcattaattacgctcactacatagtcgggttaactcactttcagacaaggaagttctatcgactatacgctaagaatac

SEQ ID NO: 3112 - DNA, 3052 bp, Glycine max
  Intron number 1 from transcript Glyma13g16770.3 (locus Gly ma13g16770) derived from phytozome v7.0 (chr-ID Gm13; pos 20674000 to 20677051 reverse strand)
cctcatcaaatcccaaaggtattctctctctctctctctctctcatttattctgcattatcctgtctccagtagcaactcctaaccttaccgtgggatcctattggtgagttttaagattgttgtttactttttgcatgtggagtttgagctcaccttatgttcttcttaagttcaccactcactaatatatttggaaactagttctgggctacacttgttgctgttactattgttctgtttatggagttataaggttgacttggtggtaaaagggtaaaaggagaagggagggagggaaaggtcgtgggatggattcttcccgctaacaaaaaaaaactaacaattaaatactaacatttgtcaataaaagaaaaactattgttttgcttatgattatcaccttctcagtttgtttgttagttttgtgatggcactgatggggcattgtgttttctggcagagtttttcaaccaacttagaattgatggtttttttttttttttggtattctgtgtttttgtttttatttttatcattggaattctctggattataatgtgatccaactattttggactttcttcataaacatgctactacttcgggtttttggttgtctcggattgttttagttttgaggtgctaccatgttagcaaaatagtcttttatttatttatttttctttttatgaatagcatttgcctgattttggttccgatatggtattctataacaaaagaccccttgcccaatgtacgtcatttgcctctctctttttctgctagagtgtacactggacaggttgggtcagatttgattaaacccattatccaaattgatcaaaatactttggtttgggtgagtcggctttgtacatttttttctgttaaactctcgatcaatgacaagttgggttggattggatcggcgggtaaacaggcactttagtctctgaaagtggtggtaagtacctgagagtgggtgctgtgacatcaatccctaaaactaagaaaaatgtcaaataagtccttgaaataagttctcaaacttaggttaatcttagtccctaaacgaatgttaatattatcacttaagccatttgattttttgaattttggaataatataattgttgatttgcagtttttgagattttttttaagaaaataaaatcttttgacttagggaataatgtgagcacattttattttcagggactaaagtgactgcttactcaaaaaaatttaaaacttaaatattgctttagattttctaaacaattgtgaatactaataatatatatatatatatatatatatatatatatatatatatataataataattaataaggagcacattaatgggttttatcatctggttggccggttttaaaaaaaaaaaaacattacccaatcaaaaagtcattggatttgtacaggtcaggttgggttcgaccccaaacaactcttgaatctgaaccagtttgtttggttgtttggatttagttggttcaggttcatggattacgtggagaacacccttactcttttaagtttcaaaagctgtattttgtatattgtaccctgtctcgtctgtgagtagacatctttctgtcgtattgtattcctcactacattctaaaataattaaagacttggaaagggagatcataaatttgttgtcataacaaacttctatattttcttaaaggcttatgttttttcctaccattttttgtccaagatccagacagaatatattaaattcgatttaagaggtggagattgaaagttgtctatgctttatatattcgagtcttttatgtagctccttatatatgactactcactaaagaagaatgtcctttgagcacttctgaattgtttgcttaattagatgctcattttgtaggatataattgaaggttttgggaactaaggctgcaatattgtatacattctactcaaggaatggtatgctatatttcatcctaaaatactttttgtttagaattatccatttttaatagtctgatatacattctaaattacctaccatagctgaaatagtattgttgataactgtgatttaagtagattgaggaacaatgtacttatggcaatggtatagtgtaataggttatttatttttcaaatggagaaaataggtgccttggatttatctacatgataaattcttggtcaaacaaatatctcctaaaattttacaataaaagggctttaatctggttaaagttgtgaattttccattcaaatgagtggaagtactatctgaaaattgaaaatggaaacatcaagttctatggcatgtactctttggtaattgtaatttataaaacataatcatgtgataaactggttactctactcttctgttttccttccgggtaactagctgatttgagattggatatgttcttttctttttttggcgtctatctttgatccatcctatagatatcttatttctggaacatttcatccgtctctcccaactttttgaaataaatgtcgtgttgctatccttaggagtgtaaatgtgttctttctcgtgctgttgttcctcttttgtattttataggaatttgatattctttaccttacatcacctctaaaccagtcaaacttgaaactattcctgtcaggtcaagatctggaaatttgctatgtggaaaggttaaatgaagccattcttgttgagtcatcctgatactatgtacaattgttctcaagtttattgtagtcattcactggtatgtaaaattgctgtttatggatttgttgcttgcagttttagttattaactagttgttatcatcccatttcaggctcatacttcttatccttgtggtgatccttattttggtagttcaatagttgcttatggaacacaggctattgtaagttttgtcaagtacattttgtagtgcatggtctttgcatttggatgagattttagtatactttcatttaatggaataataatttaatgtgttgctgtatttataaatttattagactcaacaa

SEQ ID NO: 3113 - DNA, 1610 bp, Glycine max
  Intron number 1 from transcript Glyma02g40430.1 (locus Gly ma02g40430) derived from phytozome v7.0 (chr-ID Gm02; pos 45677732 to 45679341 reverse strand)
actctcttgcttggtcccctcgtcggaacctacacgtaagtctctctctctctctgaattagggtttcgctctatctctgttttgcgcgatgattatgtatgtacatgcctgtggttgtaaattcgatcgaacgtcgatgaacaattcaacgttttgttgttgattttggaaataacttgaccggaattgatctggttgaaggaacaaaattggagaggattcgggctttgtgttctgatctgttagggaaaagggaacgaatctgttttgataaatatttaattaatttattattctgttgagtttgatgtacttttcaatggattggcgacctcttcaggtgttaagaatttgtttgtttatttgcttgttttttccccttttgttttctgtgtcagaggaaatattaggtgattaggaaatatttgtttctatgtttttccgcgatgtttttgtttttgtttgtcgttggagattagtagctttgcttgttgcagaaaccatatttgaagcctaggtcaatttttaacctacattgtgcttacaaatcggcagaatacaaggttgttgtgattgagattggaaggggaggataagcaacacataaccagataataagattctagctaattaaatacaaagtttagattttttgaggatgggattttttttggggaaaaaatgggttgctcagccctgccacttaaatggccggtcgtttagatttatgaaaaatcaccccattcagtggtttgataagcctttccctatggtcatatatttttctcaccaatttatgttggtgtgaataattggattgaagctcccacacaaaagtgcaacattgcaccatccttcgaggaagattgtgatctcaacaacattggttcttttttttactattaacaatgcaattgtgcaaaatttgttggacatcacttgtaacttaggaaggaaataaaaggttttgggtggaatcaataggttcattccatgccatcctatttttaaaatttaaacaattacaactagtgtaatgtatgtctttctattccactgcattatatctctttccctcaatctgatttaccctcagcaactattgcaatttctatctattaaaagttcaaaggaagattaaaaaacagaatttggcttggtatttattttcttgaaacaagtctgttaacttagcatgagctcaaatccagaaaagcctctttgcatatgcaagggtaaggctgctcgaatgaccctcttccatatctttgcttagcgaggagccttatggtactggggtacattagtgcttgatgttaagtctgttagcgttggttgataagtaaaataggtgctggaattgaactgaaattagctacagtaattctctggagaggtggatttgaaacggagaaaataaatgctggataataatatatgctgccatgaatctcagagtccaactcatggtgaaaagttcaacctcttgagtgattctcctctccatagaatttctcattagctaagtagcttcgactaaaaaatgactctctttctctccccggctggttaaattgtatgtctaatatggcttttgatggatgcaggt

SEQ ID NO: 3114 - DNA, 1170 bp, Glycine max
  Intron number 9 from transcript Glyma11g10800.1 (locus Gly ma11g10800) derived from phytozome v7.0 (chr-ID Gm11; pos 7678006 to 7679175)
tgatcatacaaaacccccaatttattggatacgtaaatttttcttattcaaaatatagaaaatgacaatcatctaaatcttaaagctagctcccttatattttctatgtttagttgattgtttagagatactttttatgtttccaaattttagccaaactatcaattttactctgcatttttaaaaggttctcccttaaatcttcaactgaatttccgtcatttataaaaaattatcatggtcagaattggacctccttaattcctcattagtcttgcatatctgctctatttgtttctacaatccctccactcttgagtccttccttgtcgatgacatccagcaggccaaaccaattgttggactcaaaaaaattaacacactgatttctgaatgaaaatagaaatgatatagtttttagcccagatttgcgtacgaacgtagggtttccctctaacaagtaacaaggagttgccttctttgaaatagacagaataacaatcttacaccttagctcattgtcacaagtctgcaacacaacttatatattgttataactgtcacattgtaacctataacagcctaatccaaaattaatataaaaataataactgcccaataacttcctaatacagaattataactgctcaaatcagattatatttttttatcaacaaatgttagttgttagttttgttggagcgattcaaacctatgacctctacctcccccattctccctttaaccaccaagcgaaccttataactctttctcaaatcagtttgacctatcattttgttagaaaatatacgatattggctacaattgaaaaggtcttatcgataaaattttcatttatccaagatctaggtattggtgaaaaaatggaatgagtagatttttctagtcaagccataaggttacgttgatctttgtcaaatatatatggctcagagttttgatgattttttaaaataattaccagaggttgatgtagtagtttatgttctaggacttaaagaaagtttttagaataatacttgtgagctgtagcaactttgatataagcatgtgaacttgaacctccctttggatataaaaatattttagttctttttgtctataaacaactaagactttttaatttgcaaacagttaaggacattgaga

SEQ ID NO: 3115 - DNA, 1390 bp, Glycine max
  Intron number 1 from transcript Glyma18g47190.1 (locus Gly ma18g47190) derived from phytozome v7.0 (chr-ID Gm18; pos 56882717 to 56884106 reverse strand)
gaagccgttgtcggtgagctatcttctctttctctattgccccttatgcaatttttccgcctctcttatttttcaacctcaaaaatcatatatttcagctactgggtcatgttattgtaaataaagtttctatctttctattttatcctttctaatcaatttgctagtttttgagtttatcgtgtaattcgacccttttattggattctggtgacgcgttaattgaaagtgctgtggttattcatttgaggattttgagtcccctcctccccctttttacttgccctagcattgccattgaataacatgcattttgtgttcttgttgtattatgtatggagttttctttgaaaaatgtaacccctttggtttctgaccatttaccagtacagggaagagtaatgttaatagacagggtctttctctttctttttagttaattataacttgaggagaagaaacctagagttataactcagtagaattatatatttatgttgtgatccatgtagctgacctcacctaaggctttgttgttgttgttgttgttgttgtgggggtggtggtcatggatgtgttgtggccagatgcgggtgaagcagcatctgagatttcactggttggaaagaatagtccacttatttggttgtatgtggtgtagataacttgggagtagaaaacatgattgttcttatgcctatacactatgtcgtcaggggcatttaagctaggtttattaattgcttgatcttgtgttggttcttcataatatcgcatatttattaaaacatagctggcttgcctcaatgacatggtgtgtttggtagtatgaacaactccataagtatgtcaaattggatggatgtaatggaacatgtttggcagtgattcatgatgttacacagctcttttattgtggaaacttttgtatgttgctgaagtagtaaacggttgtaactaagtgcaaagatataaattagggagaaaaacagacaacaacaacaaagccttatcccactagggtttggtttgatgtatatgtgacaaactataggcctacctacacagaggcaaaagtgaaactgatgaaatgaatattatgaggagtagctgctcaaatctgaaacccaaatcttgatgcatgatgcatcttaatactcactgctgctgggattcaatagaaaaccctacaaccattggtctagtccctttgctaataccactattccccatgattttgttgtgtcatttggtttgacccagttttgactgtccaatattgttttcttatacttttttgttgtatttcactgcttagtcccttcaaaattgaaaataaaatataggatttaactgtttcatgttttcttatgatctattttcagggttt

SEQ ID NO: 3116 - DNA, 1413 bp, Glycine max
  Intron number 1 from transcript Glyma01g08540.2 (locus Gly ma01g08540) derived from phytozome v7.0 (chr-ID Gm01; pos 9915263 to 9916675)
aaactctttctcttcttcgccagttttggactttggtaaattctctttctgctttgattttattttagccgtgtgattctctctcttccactctctggtgacttacatggtttgtgttcaaaccaattttgttttatttttatatacaactttttttttgctttatttttcaattttcaatttcaaatccttttgtttcctacatgttgtcattcttattttattttttattcttttgagactttcatctccaggtgaagtcagaattttctgaaattgtctgttctcaagggagatagatagagagaatcagagaataagaaaattgaaggttttttttttttgttaaaatatttttttcttctgaatgctgagcaaatcctattttctcttttaatatgagaagtatctttttagccctttactattttatggggataagaaggttttgggatctgagatagatctctattatggttttgaccatgttccctgattttccttcatgagattccagtgtaagttttaactcggctggggattttttgcactgtactttttatctggttttctaaacttgtttattctgatgagtcagatcttaatcagagctaaaggacaaagtattttggtagggattttgtagggagtcatcttgtttatgcagaccttgtgatttaaaatttcggtttgtaattttgtagttgaaaactttcgaaaaagtttgagatttttaaaacttttttcttgtcctattacaccatcttctgtaccttccttggattctacttaggcgaaatctttttcttataaaaaggaaaaggcaactaactggtacttgctttttagtacttaaaatatatattgatatatctcatatgtaatatgtatgtgttgtgtggatattaaaagcttaatatagaatatggtccctagttttgctggtttaatctaaaccttgttcttagaatttgtggtaaactctttattcccttttcttatgctatggtttattttataattagtgtcatgactagagttgggttctggtaaatttcattcctggtttgtaatcaggaatatagggtaaacagtgacagaatcagtgtttcctttatactgcaatccaaataaataatttatgatttcttattgattagagaattggcactttttctttcttttttctttttctgtttttttgctcttttaaataagattatcttttggagcagtagaatagaatcttattattggtgcttggctttgagtgtacctttgtagatcattgaagacattattgctcttgttttcattatgtgcagttaaattttagttggttactaacctatcattgttgttgtttgctggttttcagatccccgcagaatattgtgtaatcagactagtcac

SEQ ID NO: 3117 - DNA, 4574 bp, Glycine max
  Intron number 1 from transcript Glyma05g23770.1 (locus Gly ma05g23770) derived from phytozome v7.0 (chr-ID Gm05; pos 29568429 to 29573002)
tcaaaaggaagctgaggtttgctatttacagtctattattgatttgtatatttgacaatgccacacacagaccaccaaaaagaaaagaaaacgtggttttgagcatttgcctatgtttgcatagagtaaggttattgattggacttacatctcgcatgtcggaataaaagtaacatacttcaaccccaggtgtagcttaatttgcaaattgagcttcttggggtggactttacttgctttggaaaggcttgaagttgaaacccattggaagcgccttgtggccagggacaagccaacgcccaaacagggatcagtccacacccaagagtgggtggaatcacctcatggccatagtgaaaaaaaagtgtcaaaatcagacatcaatatgacttagactagtgtgacagtttgctattgtctcattgaaatttatagtttctgcataaatgactttagtcattttaacctgagcaattgaacgcatatctatgttgaagattattcagtgtagtagttaataattgtgacttggaaaagatgaaaatgttgtatttttccccctccctttttgttttatttcatacatattgcatatttagcaatgtgccatgtatgcatggggatttaaaaagggattatgattgtgttgaacacttaattaacatttgtgtcagaatcaagtgcatgacaagatacttcaattctatgggacaattaaaattgtccacagccatggtcatgtttaatatgtatatatgcactgttttaggattgagtcctgtgaaagtacaacacctatcacaaacatttaggagtggggctccacttgtctggcaaaataacagcagctttgaccacagttattaatgtaatactaaacgactctatggcagtagacactagagaagtctttgacagttatgggaatttggttatgtcatgatttgctattgcagatttgtggccatgtgttgcggcctccatcccagaaaaatgaagctgttgcaactgctattgtacatgggcacgaaatcccttctttactcctggtgttgtcacttaagctgtttttatgttttttgtgatttttccttgttttacgtcagaattgcttattgagttgtgggctccatcccagaaaaatgccgctgttgcaactgctattatacatggggatgaaatcccttatttactcctgttgttttgtcactgtgtattattgaaggtgttttatggtttttttttatgattttcccttgttttacgttagaattgcttagggtttctaattatagtcaaaatccttgaattctcccttcttgagacaaacacaccaaagctggcatgtgttttgtttgtgccactgaccatacttttctggtcatcccgaagatcttcagtgctggttttggtcaacccatggatctctagtattgtttcaagtcaaccctctgttcatgcatcatgatacagctctttggtctctgttttttgttgttgccgcagctgttgttattattgttgttatttcttgtgttgtattcttcacacttcatggtccatatgtctttaattattgtgtgttcctcccccccttctccaactatttggtcttcttctgtatctaatgtgatcttttttaaaaaaagttaattccatcattttttttcttcattcctatgttctcatttttcttggtagccatggcatcatccacttgttaaattgtaatttggattgaggatgatgtggtttgtataaattagaaaaactctcaatttggtcgtctaaagttatatgcatcaccaaattagttcttcaaaaaatttgatcatcaaattattctctgaaagattcttttgattgacactttagtcctccaaagattgtcataaattagtctctaaaagattttttgccatcaatttagtcctctaataaggactagattggtgaaactttagatcttttatctcaaaggtttaatctctcatcaaatatactcaaagattctttttttttccatcactctagtcctttataggtacaaatatggtgacattttagatctttgagggactaatttggtgacaggttatttttagaggactaatttggtgacaaaatctttggaggactaatatgatgacaaattaaatcgttgaaggattaatttggcaatccaaatttttgaaggactaatttagtgacacataactttgaaggaccaaattgattgttttctctataaactactaatcttgtatttgtaatcttctatattatatagccatcccactatcttgttatcgcattttgggattgggcaattagctactacatgtcactatttggaattgataacaatgctattgacaagcctgaaaaatatgtatgtgtggtgtttcgggattatgttttggagctttaaataatttttttgtgtgatctttggaatgcctatgatgatagatgtgatttaacttcatcctgaaaagaaaatgcccctatgatattttaggaaataggataatgtagcttaaatatatactaatttcattccttttagttgtttttattcaaatatatatatatttttatagaacttactggtgatcagtgttgttaaatggcggccatggcggcgccatggcggagttgcgtagcggttttctgaaaaaacgccaccgaatagcggtggcgtgacgggttaaagatggcggcgccatggcggccgccatagccatggcggccatggcggatgtggcggggaggcggaaaatggcggaattttttttttttgtccgcggtaggagttgggctgacccgacccaaccctacccggaaacttaatgaaaaccatgacccccccccccccccccacctttcaaaacgctgctgcaaccccccaaacttcaacacagcgcgaccccggaaccagccacgaccactgcaaccagcctcgggaaccagccgcgcgtgacccgctgcacacagcagccagcagcgacgacccatggcgtgaacggcggcgacgagcacggcagcgacgagcacggcgtgaacgacggcgacgcgaacggagaagacgacccagaaccgcgacctcgacttatactggtgggtgggccaaagccttttttttgttttgctgcttgacaccccttttttatgtctgcagcttttttttccgtttttctatttgacaccccccttttactttcgacagtcccatttttattttttttttctatttgacaccacaattttttttttctgttcagtcctcttttaaatggctgaaccatcatcctctttaatgagtttatttggtgttggtacttgattattgtatgaactcatgaaacttttttagtttatttgaatgcaatcctttgtttttttcaatttcaatgagtttatatatatgttttttttttttttttggtccgccatgacttccgccattttccgctacgccatccgccatatttttatggcggattttttactttccgccatgaaccgccatccgccattaacaacattgctggtgatgatttgtctttgtagccaattccatctattggaatgaggcttggctgtgtttattccatcatgtcatgtggaatatatttcttatgatttggtaaagattttgcagtactcatgtaactctttgatttgagcttatctaacgaagcaattacatatttatgtgtgttgctctttgcctgctaattgtcaactttatattcctattggcaccttaccactgtctttctaaagaaacatcttctcatattttgagttgtatcactgcattgaaattgaattgaattaagggttaaatatatttttagtctttataatagaacaatgtttgcttgttgtctctaaaaaaaatcatctcttttggtcccttatttatggaaatgtgtcaagtgtgttccttgttactaacaccattaactgaagtggaaaggaaggacaaaatctacacctaacacatttccataaatgaggtgccaaaaagagacgaccttttttaggaaccaaaaatggacatttccttatttgcaggcactaaaagcatatttaacccttgaattaatgtcaattgaaaaaaattgctttacttcttgtatgctggagttactcacttatgtagattatttggttccagttatcagctatggcatactgtgcattcatggatattttatttcagtggacatgcgaaaaacttgtttccttcaatccttgatgatctttacataatattctctaggtgttttcttattcataatcatggaagtgtataatctagttattgatgaatattacaccagaacttttttctgttaattccattttatttgagttctcatttagtttagccagggttttgccatctccatgcaatatatttgtactggttccttctactcaccactaaatcctcattctgtgaaaactgcagttctgtgaaaatatgttactcctgaagcatttactttgtgtaataacttgttacaggtaaagtggaaggaggagttgaaggctaaagagga

SEQ ID NO: 3118 - DNA, 2968 bp, Glycine max
  Intron number 6 from transcript Glyma03g01080.1 (locus Gly ma03g01080) derived from phytozome v7.0 (chr-ID Gm03; pos 803036 to 806003 reverse strand)
gcaagaagaaattcggaggtatgtctctcatccgcacaagttagtacatgatgtaaagacaggcgttgaggtgccagacctaaattatgttctggaggggaatattggaccccttattgcagctcatattaatagcagagtcatgtcataaggtcagaatccatgttccttaggccaccacgttctcattttgcaattgtttagcaagatagacttattattttcaccttttcaatcctgcaaaattctcagggcttacttcaatcccttgatttcatgagccaaaaacaaaaaaacaaaaaagagtatcaattcatcaatttttgcctgtattgatagatatgttgatgagttgaatgccaacagcattatattctaaacatttttttttatttgctttggcatcaaactctgccaatgtttcttcatagtcaatccctagccctggttaaggaggagggttgtttaggccctcggcaaccaacgtaaaactcacggttatacctatcatggatcattcatgagagatttttgtaaatgccaggccgttaccaaaaagtatcatgctgtatcacctgaatatagtgtcaaatgagcagggactgctacatcggtgctctcggatgtagtgtaaaatgagcaagggtcctctaatttttctggatgaatatgggtaaagaagttcagatgatcagatttgctacttggaatattggtatcatgacaggtaagtctatggaagtggtggcttcggagaaggattaacattatgtgcctacaagagactaaatgggttggagaaaaagcgaaggtgatggatatcactggttttaagctatagtacacgaagaggaaaaaatgaagtaggtattatggtggacaaggtttggaaagaaagcatggtggatgcaaaaagaattggagacaaaatcttagccataaaattaatgagggcataggaaaagttttgggaagacttagaggggttggttcaaggcattccacaatagaagataattttcttatgtgaggatctaaatggacatgttggtagtcagaaaaggcattttacaaatgcacatggttttggagatctaaatgagaaaggatagacaattttttacttctccatggcttttgaccttctgttatatccttcatgtttttggatgaaacaatttcgaacagttttccatcatatcatttgcgaaaaagttttagaaatcacatacacactgttcaatttcctcttctagcgtgttccatctttttcaggattcaatgtgacaataacaacaaatcctatcagcttttctcacgattaagatgttggggaatccttacaaataaagttggatctaattatgagtttggagagggagaaaaaaagagtctaaaacattatgaaattttatgtaaatgttgcttacctgaattggctttaggaatagttttacttgaacattccatcctaccacaagggattggtgttaaaacaaatttatgttaaatttattaaagtaaaattagtatgttgattctttaattttaaggttggttttgatttcatccttcaactttcatttctttataataaattatacttgtacaacaaaatatacaactaagagagagaaaaagaaaaaggaaaataaatttaaatttgaaatgtaataaatgatacggtaaataagagagattcacacacaatattagagaagtaatatagatataataatttgtataatattatattgtgtgtttatctcttctacactatcatttattacgtttcaagtttaattttatctttctttctctttcttggttgtatatacttcctttgtattttttttataagatattttaaactaatttacaccctttaagaagatttaaatatgtttttggtctttttaagttttttttttcatttttattctctaataattgtaagtttgtgtttttcaattttggttcttattttttttattcatttttagttatctaagtatgcacctttttaattttaaatcctttttttttcatttttatctcttatatgggtggaagtaggtcgaattgcccattgggacctatgacctagttcatttaaagcttgggttggctcgactcatttaacaaaaaggtcatgttcaagtttttttaaaattttttttagttaaataagtcaggtcataagtgtttaaaaaatcataagcctaatgggttaacctacttagaaacaatagttttttttaataaaaatactattattaatatgatatataatattattattttaatgaaaataaaaaattatttttgttgtttgacaatttaaatcattttaatatttgaaataagttaattcctataagcataggttgatagtaggaataaagattatttttttgtggggcttaagaggctttagtagtttgtcacatgtaacatttgtagccaagttttgaccatatcttgtggtgtaaaattaccttattatttttaatgaaaatctttgattttgttaaagaatattttttttttacactttttaatatgaataagcctttaaataaacttatgggtccaatcaacttatataaagattatgcatatccaagcctaaaaggtaaactcttgatgggtaataggcccacgcttgggctatagaaatataaaaagtgttgttaggtgcacccaacatttttgctggtgcacctagcacttgtagtgaaaaggcagtaatacccctgacttattttttaaaaattaacgcgagactctctctcccaccccgcctgcgttttcgcttcttcttcctgcggttttcttctcttcttcctcacagcctttccgcttcttcttcctgcattttcgtattgttgttgctcacgtcaccgacgtttctatttgttgttgtcgttaagaggaggttgtgggaagaggttcttcttcttcttcg

SEQ ID NO: 3119 - DNA, 5845 bp, Glycine max
  Intron number 10 from transcript Glyma04g14280.1 (locus Gl yma04g14280) derived from phytozome v7.0 (chr-ID Gm04; pos 14170133 to 14175977 reverse strand)
gtatttttaaagcataggtaatctctaagtggatgtgatatcatgctttgattacctctgttttaaatgtcctttcttgaattccatacttctcttattttacactcttattcagttgttacatggtggactatgctatgtgaatgctttcttagtttttaaccaccatcagaggtgccattttcataaaaatatgtttttttcctcatacgttccattattaatgtgttggaatatatgaaaaatagtcaataatatcttaattgtattttataataatttagagtaccttagattatctcttaggactactttccttattttcttacaatctcttaggaaataaccttgtctttgatgaaatatgcagtttcctcatctcttaggatataaaattgtaatcatggaatcattttttgttggtgtatcataagggttttgttttctattgattcctctgattggcatcaaaagcatttcttgaatgaattattcaactccaaggattaattgaaaaatcactctgttggttctacctcctattttctaagaatagaatgaatctttttatctaaggattgtaagtgtatatgaataactaactctggttagtttttcaactgtagtcagttaacagttagccttagctgacagttataactgaatctcagcagtataaatactgctcttgtaagagatttcagtggctttgtattttcttcatcttaagtaatacaagtcctgattctctctctgtctctatatcttctctacatggtatccagagctatctgatccattttcatggcttccgcaaatcctggtgctactccggttaacactggcgcaggtgctgttctgaccggcaaagttctggccagcgagattccggttaactctaattttttgttctactctgaaattctgatcaattctggtgcggttctgaacaacttcggcgtgattccagtcaactcctttccgatgaatcaagatgttccagtttcttcagtcatgacaaatttttcacatcaaatcatcaaaaagttgaatgataagaattttcttctttggcgacaagttgagccagcgatctctgctcttggtctcaattgcttcgtagctagtcctcaaattcctccatgatacctttcggatgctgatcgtgatcttgatcgtgttaatcctctgttttcattgtggcagaagcaagataaatttctgttgtttggcttcaatctactctttcgattgattcttgcacgtgttcttggatcaactcactcgtatcaggtatgggataagatccacacctatttccatcattaaacacggacgaaagctcatcaactttgattggctcttcgtcacactactcttgacgattgtcctgttttggattttctttctcgcattaaggttctcatcgatgaggttttttctgttggggatgctgctacccatcatgaacacatggatttgatccttgagggtcttccttgagagtttgattttgttactactttgatcgaaagtcgcatccctcaaatcaccattgtagaggctgaaggatacatctttgcacgggagctgcagcttcacaaatttaccagacttgagtacttgtgtaattccttcatgccaacagttaatctcactcaaacgagtacatcacattctttcgagaatgacaactcaaattcatactcagacaccaatgctgtgaatacgaatcagtattcttcagattcgcaaggttctggtggtcataataaccatgcagaaggtggtttcaaccttggtggaggacgccgtggtggtcatggcagtcagagctcagttcaatgtcaagtttgtttcaagtataatcacacagctctgacctgctacaataggttcaaccctcagtattaagctgcaaatagtggtaacaacagcaattatgggagtaacaacaatcgttgtcagaacaacagttggaacaattggaatagtcatcaaaatttgggtcagaatcagaatcaaaacaacaactggaacaattcctctaattccaattggagtttgcagcgaagtcaaaatcagaatcataattatcagagtgctaattccaggtctccacaggctatggtggcaagttctgactccaatgcttcatcttcgtggtttccagattctggagcatcctttcatatgaccaataactcacagaatatccagcaaacttctccttttgaagatcagatcttcattggtaatggacaaggtctgaatatctcagcttctggtcactccaattttgtttctcctttcagtcctaatgtcaaacttattcttaaaaacatgcttcttgttcctcaaatcaccaagaatctgattagtgtaagtaaatttgccaaagataatcatgttttctttgaattccatgctaatcattgctttgttaaatcccaggattccaatatgatccttctacaaggagatgttggacctgatggatcgtatcagtttcccaatcttcaattcttctctgctgtcttctccagcttgtataaacactgtttcttctgttgcttgtaataacactgtgcctaactctatacatttgcaccttaggctaggacaccccaattctcaggctgtaaagcttgtactcaatcattgtaatttcaagtttcctgtaaaagatgaactgccctgctgttctgcttattgtatgggcaagattcatagatttccatctaatctttctcaaactgtgtataattctcctttggaattaatatacaatgatctgtggggtcctgctcctatgaattctcattctcaattttgatattatatgtcctttgtagatacttatttaaggtttacttggatatattttttaaagaataagtctgatgctttatctgtttttaaacaattcaaatctcttgttgaattgcaatttaacaaaaagattaaagctattcaaacagattggggaggggaatttcaagttttctcttcttttctgtcagaattgagcattcatatgctgaattgtccacatacacatcaccaaaatggtgtagtggaaaggaagcatcgtcacatagttgaattgggtctgtgccttcttagtcatctcttcctctttccttttgggatcatgcttttcaaactgctgtgtatctcataaacagattgccttcagctccacttaagtttgccattccttatactgttctttttcaaactgaaccttattatcagtttttaagagtgtttggttcctcatgttttcccttcttgcatccttataatgcccataaacttgagtttaggtcctctgaatatgtgtttttgggttattcacccagtcacgagggctataagtgcctgtcctcttctgggagaattttcatttcaaaagacgttattttcaatgaacatcagtttccttatcctacactgttttctacctctccttccagttctatacctactgagtccctttccaccaccttacctgttattgagtcagtttctcatcctcctcccacttctaatctttgtcaccctcaaagtcagatttcctcaccctctattgaggctcccagttcctcaccctctgttgaggctcccagttctgataatgttgcctcgccgtcatctgattctgcacaatctcccagtcaagcttcttctgcctctgttcatactgatacattactgtctgatgatcaacctcagttgtctgcaactgaatcttccaatccccaacaacctgctcttgtcagaccagaaaatgtgcatcctatggttacaagagccaaagctggaatagtgtagccaaggattcatccttccttgcttcttgttcatactgaacccaaatcagttaaacaagctcttcaagacacaaagtggtttgctgctatgattgatgaatttcaggttttccaaaagaacaacacttggaccctagtctctcttccacctcaaagaaatgcaattggatgtaagtgggtctttagagttaaagaaaactctgatggcagtatcaataggtacaaagctagattagtggctagaggctttaatcagaagcttggttttgattttcaagagacactttctccagtgattaaaccagtgaccattagggtgattttaactcttgccattactcacaagtggtccttgcagcagctggatgcaaataatgcctttcttaatggactgttagaggaagaagtttatatgactcaacctccagggtttgagtcctctgataaatcccttgtgtgtaaactgagtaaagcaatttatggattcaaacaagctcctagagcttggtcttggtttgagagacttaagctactttactgaagtttgggttcactgacagcaaatgtgacccttctctgttcatttccaagacttcctctcccattacttacattttagtatatgtagatgatattattatcactggaaattcatatgcaccgatgcaaaagttaattcaacaactaaatgcctcattctctctcaagcagctgtgctctctagactattttttggggattgaagttcattcattatccagtggagcacttttaatgactcagtctaaatacattcgagatctgttgcagaagaccaatatgctagaagcaaagcccattcttcccccttgcactccaacttcaggctctccaaacatgggtctgatttacggcaagatccttctctttagagatctgtttttggagctctgcagtatgttacaatcactcatcctgaactcagttttgcttttaacaaagtatgtcaatttatggcctctcctcttgaatcccattggacagctgtagagagaatttttgaggtatcttaaaggtgcttttcattctggtcttattctgtattctgcttctcttaatcaagacctttccattagatgcttttgtgactctgactgggctttagacccagatgacagaaggtctacctctggtgcagctgtgtattttcgtcctaacttggtatcttggtggtctagaaagcaaaatgtggtttccaggaccagcactgaagctgaatatagaagtttagctgctgccccagctgatattctctggattcagactctcctccaggaacttccagttcctcacactacacctatcgtgctttgtgacaattccagtgcagtgcagctagctcataacccagttctacatgctagaaatagacatatggagttggatgagttttttttccgggaaaaggtcctcaccaagcagctagtggtttagcatatacctgggacagatcagtgggcagatttacttacccaagcccttatcttctacaaggtttacctatttgagttccaaactcaatgtagctgagctacctttggtttctcagccccattgagtttgccgggggtgtaagtgtatatgaataactaactctggttaggtttcaactttaatcagttaacagttagccttagttgacagttataactgaatctcagcagtataaagactgctcttgtaagagatttcagtggctttgtattttcttcatcttcagtaatacaagtcctgattctctctctctctctctctctctctctctctctctctctctctctctatatatatatatatatatatatatatatatcttctctgcaaggatcataaaaaaattggtccagggctcttgtgggaataaattacatttttttatgcataactaatggttgtgttatttcaatttttgacatttagcatcttgcttatttaacttggcctttcttttgcatgatcattcaggtcat

SEQ ID NO: 3120 - DNA, 3641 bp, Glycine max
  Intron number 1 from transcript Glyma12g26980.1 (locus Gly ma12g26980) derived from phytozome v7.0 (chr-ID Gm12; pos 30318094 to 30321734)
atctcatctctcgtgtacaaatcttctctctctctgtataactttagttaatgatagtactgttttatctaacatttttctttgagaagaaggtgattgtgagataatctgaaacaggcagaacaacaatttttttgctaatttaaaagaacaataaatcattttatttcatttttcttttgccggtgtgtgaaaatttactgtctttgttatattgagtctgtgagatttgatagttatgattatgtgctagaaggatagccctgattggtaaaatcaagctttgatatgttgagccgtttgtttatagggagtggagtctttacaattgcaggagtttgttttaccactaatgtagagaacattgtttgacccttgtaatcagtttggtccacacaaggttttaaattgaggtcgttctgcagtggttttgtcacgatccttgatattgtgcgaaattgtggacaaatatggttcatgaggccacaattgcagttgcagagaccacaaaaaccttgacgttgtggctgaaatcgtggttgtggtccgtttttaaaaccttgggtcaatcattgaaaatgagcttaagtttgaccttttcatgctaaaattatcactcaatttttcatcccaatttccaaaggtgtacctagctgacccataaccttagagcctcagcaagctggaccttgactgctgccttgaacgtttctaatctgcagattgcattcttccaagtgaaatctagatgacagggttataatttctaaacccagtgataagatacaccttgaactaaatttgtcataggatttgattgagtatttgttgttaatccaacaatcttatgtgagttcttggcatgtgtatttatctggttctgctgaataagttggagaatagatgtattttgaagctctgatcaatggaaacaagtgctttttgaatctgattgagtggtcattgggatttttactgtggcaaagacagctgcaataaaagattcatataggcttggtgatactggcaaaatgtactcttatcttcagaactcagaacagcaccagtggcagtatcatattttcagctgttaggttatcttaaacaaactccatctgttgctcttttgccttctcattagcattcccattgcagattctacctctattagaaaaagaaaagaactttgtggccaatctgatgaaaaaagagaggcttatatccagcagttgtctgtatgcagagtggggaagtgtatactgcatggtaactcttaggctcatctgttcttacagttgaaggatgccaaataactatattggcaacaaatcatattgggaaatactggtttgttgcatgaattgttgttatcctttactttaatccttttgcttttcaatcctgttcatggataaatcaaagatatgctaagattgcatcttgcagtcaaagagtgtagttcacttttataacttccatattgaggatcaaatttcgaaaatggaaatcattggataatagtctgcagatgtgttgaaacaattattgcaaaagtgtaacctgttaggtgaagacataataatggctttacatgtctcctcacacaagaacccttccggcttgaagcatgaacaatgcacaggctcatctactttatgatgaaattcaactttttattagaacagtgagggtggtaaaggttgaactctacactacttgaccatagaacctctaatacaatgttgtgaaccaactatctcaaagttttaatctgttaggtgaaggaagacacatgaagggctttataattattgcatctctaacaacaggttgatattctaatagaggtgtttacatagtagctgtcctcatgatgggtaggaattgattatctctcaggcagtatgttgtgtctaaatgctcaagtcaagggaaaatagggtccttttttatgtgactagaaaaactgtaaatcatgcaggttttgatgatgtcaaaaagaatttgcttgataatgattgtcttcatcaaaaagggggagaatgtgaatgtatgaatacatgaattttgatgatgtcaaagaaaaatcaaacaagactactacaaaggataagcattgcttcaagattaatacaaaattgcttcaacaaacaaagttttgcttcaagattactttaagatcaaaccttgcctcaaaacaaagtgtttccaagacatgcaaggctctggtaattgattatcaggtagtgtaatcgattaccagtagacaaatttaaaaaaagatgttaaaaaggattttgattttgaattttgaacctgtaatcaattaccagatgtttggaatcgattaccagcaacgaaactcttgaaattcaaattcaaaagttatgatccttcaaaatataactgtgtaatcgattaccagaaacctgtaatcgattaccagtgaaaaaattcagaaaaaactttttgaaaagacacatctcttcaaactattttgaaaaggtacgaagagcctatatatatgcctgatttcaaaaagcaagagagatattacaagagaacttcattgccaaatgctctctcaacaactcttgggcaaacacttgcaaatctattaagagttcatcccggaacttcaattgtaatatccttctcttaaagagagaatcttcttctttttattcaaagagattgattaagggactgagggtctcttaagttgtaaggattcctgaacacaagggaagggttgtccctgtgtggttcagactttgtaaaaagagttttacaaagagagtgaaaaatctcaggtgggttgcttgagtactagacgtaggcacgggaagtgaccgaaccagtataaattgagtttgtatttatctcttcccttatctcatttattttattgcaatcaattttgtcttgcatggttaaagaacattattaaattgattattgcttctgcttccacattctgagcctatcttttaaaaagggggttaaaagtttgttagtggaaaattaattcacccctcttaagttattaagaccacttgtccaacaaaaacgacttaagtaaaagttgtagcatgtctttctgaccgttgactgcattttctgcattcttttagggaaaattacattgacattccttgtttcttgtaattttacatgatacccttgtctttttaacacctacagtaacccccaatgtacaattaagggtggttagtgtaggtgttaaaaaagttggagtatcttgtgaaatttgaagaaaccacattagatgtcagtgtaattttccctttcttttagttttaatacctgtttctttgtccatcttattgtggtgagtgttttttttttcaggaccctcatgtattaagagtaactattttagttgaatagtaaataaatatgtagatgacatgttaactttgtatggggggagagaggtggcaaagttaacttttttgcttctaattgaatgctttatctctgtcttgtagattttgcttggtttctaccagtacgttactataattgttctgctggattgttaaattacttctcatcttaatagctgctttctattcttctcagtcattttattgccagcggggaaaagcatatctctt

SEQ ID NO: 3121 - DNA, 3259 bp, Glycine max
  Intron number 12 from transcript Glyma13g24310.1 (locus Gl yma13g24310) derived from phytozome v7.0 (chr-ID Gm13; pos 27703499 to 27706757)
ccataccgaattgataatttctcaaaagaggtctgtctcttgtttcagttgcattacttcagtagttagaattctagttgaattgttttctgatccctgaaaggttactgcttttataataagatttaggttgtttccctatgttgatatgtatgctaagctttctctaaattatcatgtgaatgcatctatcttaataccgaaacaacaacaaagccttatcctcctatgtgaggccggcagtacatggatcacacgacgccttttggcttggttgaaaatcatggcttcaggaatattatttatcgtgtgaggcccaagtcaggcccaagtcaggcccaagtcaactatatatgtctgttttctttcaaccacaccattttggtgataagtgtgggggcatattagtctgtgagagatgccataagaagttaagagagtagagaaaggtctgtattcacccccctccccccccccccccccccaaatcagattgaatactcttgattttagtgttaagttgcaattcaaccatagacttgaaagcttgaaaaacagaaatagtttcagccttggactttataggaaatatccagatgtacctagagaaggcatcaataaaagagacataatatttataacctgcatatgaagtcaaatgagaaggtccccacaaatatgtgaaaataagctccattggggagtaaacaaaaatagaagtgtgagatggtaatctatgagattttcccacagagcatgaagaacaaaaacttgtgaaatttttatttgatggagaaatgttacaatgattgaagacaagtttcattacatgaccattagggtgacctaacctagcatgccaaagattagcagtactagaagaagaaactacactagagttattattaacaataacaactaaactaaggaagccaatatttgaaattgaggttgaggtagacaacagcagaggagagttgtcttgaagcttgagattatgaaaggagtaaactccatcagcaccaacaacaccttgaagaaggattttattggtctcctgagatttcacaagacacaagtgaggatgaaattcaaagaaaacagagttttctttagcaaactgactcacacttaacaaatttttcaaaattgaaggaacatgtattaatttgtaaaggttaaatgtaatgccaacatcattaggggacacaaaggaagagtaaccaacactagagatacttaaactttctccattgcctatgaaaatctgatcgggtccatcaaaatgagtgaattgtttaatattatgtgattcaccagtcacatgaaagctggctccagagtttggaatccaagtagagccagcaggaccactcccatgagaagaagaatttgtgagcataacactgggttgactggggtctggaatagcagccttggaattaggattaatccaggtattggaggctctggctgaaccaatggagtagggaatgggttgaaatgtggtaggatcaaagaagatgagtgactcatggggctgaaaattcatatcaaacctaaagtggcaaacattggcaatgtgtccatatttaagacaaatttgacactggaagttggcaaattgaccaccaccacgtcctctgttagagtcaccaccaccacgtccggcacctcgattagaaaaatcaccgcgaccaccgccatggccatatgaacttcgggaaccactagttttataagaattttggtgcgaatagccttgagtgtagttcaatgacggagaacttatcacctgtgcatttttacttccaaggcatattcctcttgtctagagagagagagagagagagagagagagtttttccatgtcaataaaaatcatatgcaagaacttgtgatataacatcttctcttatttctacttccaagtcatattcctcttgtctagagagagagagagagggagagttttttcatgtcaataaaaatcatatgcaagtattttcctatactttggtaccttttcatcaacctcggtaaaaggtaaatgacttgtttctctataaccttcctaaaaaatctcatttgatggacttagtgagcttgataaaaccgttttctccaacacactttcaactcaatagggataccttttggacaaactactttaccactatccatcttcttaagggcctttttaatgtctccaatctacgataataagccaaattccatttgtcctcttagatttctattccttccatattaggatccaaaccttgaccatcattgaaacgtttataaaaataattccccatctctgatatcatgatttgtgaccaaaacattcccttcatctttaatgcatcttacttgatccaaatctcatttttttctctatttttggtgagcttatatatgttacacattctccattctttgttccagtatctttgtaaaactcttcaaatgatttagatcatgcttcattcaaagttttttttcttctcattcttagcatttcaataccttgccctgttttcaacattgttgcacctgttagaatatgttatttttgttttatgtggttgggccttaagcccagtccatttgtctttaagtctatatccttgtattatatattgtgaccaatgaatgaaaaagcaagcaattcacaatgtagatctttagtttttacagcaccatgcaagattttaaagtatttttttatctattaccttgctttttagcattttcctttcacagtttctccaccaagattccttctctgttggcccaaaaccttttgaaatgcatctatctatctctatacataagaattttctttatcattctatatcagtttataggtgcaggtttagtagaattagacaaacatttcaacgaaatatacttctccaggaaatgaaacagattatcaatttttgaaaatttatgttctagtgaatacaaatgtcaatattggattattaatttatattgaatttaatttttttaatttacaaaaccaattcaaaagtcattccatttattttacaaagcattaattgttcttttacgacaccgctgtgtattgcattaatagacaaaaaattatgaatgtgctggttgtacttaccttgtgcagttactaatgttatgagccaaaaaagttcttaatcccgtgttgattgaaatttattgtgttgttcttggtactttctagagattgagaatatatcagcagaggtgtgaa

SEQ ID NO: 3122 - DNA, 1228 bp, Glycine max
  Intron number 1 from transcript Glyma03g32970.1 (locus Gly ma03g32970) derived from phytozome v7.0 (chr-ID Gm03; pos 40676861 to 40678088 reverse strand)
tgttgtagttgcagctccaaacgtcgttttataaggtatatttttttggtaatcttgttcaactttcaagcttaggtatcatttgctttccgacttatgttagtaatgtatgaagtgattgattttgtgtttgaacttaaccagctttgcctttgttatatgtgtaaaacatgtttctagttgataactatgtttaaattagtttttgtattcaaaagcatgtttttgttatctgatcagagtaatctgactcatagtgtggtcatttagctaagaacaatgcgattatgagttggttgtatttaatttttggtaattaataatattttatttgtgtactatgtatttgggtaatttatttctgatttgtgctactatctaaatcacctctaatctacttgagctgaccatctttcgggtacgaactctaccttgttggtcctttctctttttattaaattttacttataatggaaaaggtgaacattttattcgtagtattttgcatcctcgcagcactttcgtattataagtggcctgattacatgtctatataacttaaatagatccaagctataaaatgggtatccttgcctcctgttcctacttgaacgggttatgttttaataagagatgtattggccaaatagaagtgaaatgtttgttttgccaaaatggaaccttcggtttggatagttttgcattttgattctgattttttttatattgataactttgtatgcccttatatttacagtacaatgattttttatatactgtaatcaaatcttagattgtcatatagttgaaaattaatgacttttgtaataattattttaaaagtcatatagtcatatgtaatgatacttctaattgattgattgtataatttttttttatattgacataaaaaattaaaccctattttctatattctctaaaacaatattttatatttttaaacatttgatagacactaatcatgttgccatcttactagagaacattagtggtggactattgactcttatatgctagtatttcttggctcatcatctgtcatcattttaaaacttttttttttaaattttggtccacaatgtattaataatgaaacataactgtggaatgttttaatttttaatgcttattatgtagattagtgataattgtgttatttattctcattgatctgattgttgtttttttagttgcctcttagtacctg

SEQ ID NO: 3123 - DNA, 1073 bp, Glycine max
  Intron number 1 from transcript Glyma04g36880.1 (locus Gly ma04g36880) derived from phytozome v7.0 (chr-ID Gm04; pos 43376195 to 43377267)
tatcggtggttcggtaccaaattagcgattctgaggtattccgatgatcgtctttgatttgctctagtttttaggtttgaatttgatttcaatatttggttataaaatcgaagtaattaataactgtccgttgaatatctctctccttagtacaccgtttacacaggattttaagctcttgagttgagttattctgtgtaggtaatggttggtcagattttgaatgtccattttgaattgtttagttagttacttgggaagtaaagtgaagacttaagaggacaagaagatgaaaggattgaaaaattagcaaatttccgatgcatttattatgttaggattcaccttgtaccttgcataatttcccctcttatttgcttcccaacaaggcggtgttagctacatatttgtgctgatgaagtctatccattttacttcgttttataatttgtcatttaagcttcttgggaagagtgaaagtctcttattttttaataattgaaaaaatggatctagcttctcttctgctgttgattaacaggagaggatccttttaaagggaaaaagacaatttactttgaatgtaattggtggaccatataactgattatggtaggtccttgcatgacaaaatatcgcactattgctttccatgtttggggggattcacttttgctttcggggaggctgattgttatgtaattgccatctaatctgttggatttgtcagcctataattttaagtgttttacttaatagtattttgtttgttaatattgttcttcttttacttctttttttttcatttaagtttaatccgtgaataatttatgcataaactaagagatctagcttaagttgtaccaagtttttttggggatacttgattttggaatcaaataccaaccaggctgctttgcttgcactttaaattatcatcccctcctcagttgggtggttgagctcaaactaaatatgttatggttttctttaacttgttctatgtatttatgcatgtgcatatcttgcatgatacagagtgacctggaccgttctcagaattctagaagtcg

SEQ ID NO: 3124 - DNA, 4118 bp, Glycine max
  Intron number 6 from transcript Glyma13g28820.1 (locus Gly ma13g28820) derived from phytozome v7.0 (chr-ID Gm13; pos 31784823 to 31788940 reverse strand)
tgattcttagtcctgcaggtcttcctttgcgcccggtaatggttgcctctcaactttgttgaaatatatggcgccttttactgagttgtgaattacaaatgcatgatccatctccccgcttccacatagtaggaaaaagcttttctgttgttgatccatattccctccaacagagttttgtagtttccagagatcaaaatagctatttgtgaattataaccaaaagacttcttattgttttgttcccaatagctttttgggagatttaaaacatgtttactgaaacccaagcttagtttgcaattcatgtttgagaacaaatcataataggaaccattattccttgtttttgttctttggttatttttacgatacacttttatgggatggtgagcttttgtatttatacttgcatgtgtcaggcattcatgttgggttaaatcacacctgtaccatctttaaaatttagatgaaacatcatttgatgaaatgatatcaagaatgcctagtgaatgagtgttttaatcataaaattggaggatatttgaactcttacatctttagtctattggggattcttcttggagaatttgaaagcacggaggtaaaactgttgttttaatagtctccttgggcttgattgtacctttatgagagtggaattcccactttgtcatccattcattttagtgggggtaagttcagttagaaatttcttcaaaatgtctgtggatatgttctcttcctgagcaaggaataccgtgtactataaacatttaaaacttaccatgactctttaagtttgtaagaaaacactgaaacatcataaattcttgtgattgatattatcatgttctgttgtatttgaatgctactctgattagtttcttctgcataatcacgagggaattctctttctcacattaatgtattgataataaagggttattttttctgtgtactccttaaggcaatttcctgagtcatgcatattatagttagatctgctactaataatgaatttgtgtatttcatctttatccttttttggctggcatatatatctttcccacatatatggaagttttcattttttagtacatgaaagttttacaattcctcttttagtagcttgcttgtagattataatttatgatctcgtatatgttaacatgctattgattactgggtaatgatcttacgatacctatagtgcctgttacagtggtattatcaagatgtactttgtatgaagtcgtttttggagtatgttattcatacatagggtgataagttgctactttgaatcagaacaacactaagttgccaacctatttgttccaaatttcaagccttagcaatcataatctgtatgtcatatgcacatctagggcttgcaaactcaggagttagaaataaaatactgatcccaccaggaatggtttggtacagtacttgattgaataataggatcataggaacaaggttgagaatctgtgccttgtggcagtccaagaccatatttatcacttagatgtcactatcaaaaacaagttcagttggtactcaaagatcttgtaaatgaatatagtgtactcctatttaagatttttatgccaataattagtcctgcatacaagttgtcagtattcagatatctgcattccccactagggaggaggtgggggtgagagtggtcaggtgtgttaatggccgtatgcgtgaaattggcacgtgttacttaaaatacacatttaaacatcattgcacatagtcttaagaatgattatcatgaatggcagggactaaaactgaagtctgtggacgaatcaaattagggataaaccagccattgtctccttacattttctccagtagccaacatcaggttaggaatcatattcctatatttagatcagcttggcatcttagcaatttcttatttgaaaattgatctgttaacttcttttggctttaggaaatgtgtaagattgttttgattttgatggtcatctttgtccaaaattcttttttgtctttgttataaaatgctgctcgtcatgtcttatgcttgagactagtatgagtttttaggttcttcagagattaatgttcagccaaatataataaaacgttttgtttcctctgtaaattatggagtgtctatactcaataaaacttttaaatttaagggatttaagcatacggatcttggcatatgcatatagttgtctaaataaatgagtagaattatcataataatatacacccgtgaagtaaaatctcggtgttgatcattcaggttcgttctggtgagtcaatgaaactaaagatatctgtaatgtaataatttaagagagggttcaatgactagggtgtatttattttgctctatctgggattcttgtaaatggtatctgttgtaaaacatattagattgatatttgataacaaaaatttattgattgataatagcatacaatattccttggaagctagaatgtggaagaagtactataagcattatgggcaagatccgctaaaaactctggttttatatattccaatttcccttgtagactggtagagtctaagctaatttggtgttagtttgaacaggtttcttctttatgctcattgctgtgtttttagagttagccatgatgtggtatacagtaaaatattctaaggatcagcgtttcactcttttccccttttcgttgttttccccctataagatgtgtatatagtaaaatattctctggttgaagagtctcaggtaagcatgtcaacactcaacatccgtctccatatcagctgatttaagtaccaggaatttttttattaatatgttctactagttaccctacaactaagtcttatcccactaggtgaagttctgtactacgtggatcaatcaacactatttaatttgctttctgtaatggttttctgacaatcagttacgtgatttctgtgaaagaagtgttttaccagttttgtggtttgtttcattatgttttggtatttgtttcttaatttaatgttatttcatactattttctttattttctaatttttagttgccattgagtgcttttcaggtccttcttcaatttttttattcattgcaccataatagattcaccttatgcatcttccctggtatcactgttttgcctatttcagttagtttctcttatgtgacctccaacttaatttccctttattccttttggtttattttctgttacacaagattttgtctgtttgagcattgcattctttatcttgttcatttgcctgaatgttacttctgtcatggaatgcctgttaggtcaagtataaagtttttatgcaagaattatacattctatttgggtttgtggctttgtgctacttgccccatcagttgcatttgcttgaaatctatgaccaatactaggaaacaccttgtgctgcatgtttctttgtcgagcttggtgctcatgctgtcatcttttttgtctctcaagtctcaatctattttcaatactagcttgagttgttcaaacattgttttcatgggtaatatttatgtttccttcatgtgatttttaattaggattgattctagttttccatattctagaaattaggtgtacttcattttcttgaatgtgtcttttgaaatatgataaactagtctttaatgttcctctctgctgtaattgttgtctccttgtggtgcattagtgtttctcttaactttggttcaacgaaagtatcttaaaatatttaatttatgagaaatgctagacacgcactttctaacactatctctacttccaattaattttagtcaataatagtgttaaaaagagtgtaagagaatgtgtccctatcattcctctttacttattttaattttgtcactcctataaattcgcattgtgaagagcctttggcaccagtgtatgttttttttttgtcactataggtttacaaaactagcacttagtaacgataagattgcctattcaattgaattgtttttgaaaaatatcttgactgccttcttaatcgtctcaatctaatgtttgtgtttgataatcagggggcaccagcttgcactcatt

SEQ ID NO: 3125 - DNA, 633 bp, Glycine max
  Intron number 23 from transcript Glyma12g05640.1 (locus Gl yma12g05640) derived from phytozome v7.0 (chr-ID Gm12; pos 3751120 to 3751752 reverse strand)
gtacctcagcattgacagaagcagaggtcataaaggtgctattttctactgcatattgttagactttctattattttgttcaggtttcattttctttttcattattaagttctgcaagttgttataagtagttatccttgatagcactattatactcggtagtttgctatacaacttggttcactattgaagctccagtcctagatttcattagcatggtaaataaatctgttgtacttttttatactgtttttaaaataaaatacagaggacagacttgtgaaacttgagatatgactaaattgcttgagatttatattataatcactacacagttgaatcctatgattcaagaattagataatgtgtttacagaaactttcctaccctaaatatgtacagataatgaaatcctagtaaacaaggaaatacatgacttaggaaacaaggaaataggaggatctaatctaaacaaacctcagacagaatgttcactctaacatgaaatttgttcattctgtctgaaatctttcagacttgtgttgtatgatgttggccattctgtggtactaaacttagcttatttatcaattgtattacaggtcacaagggacatagtcacttgttttttcc

SEQ ID NO: 3126 - DNA, 3018 bp, Glycine max
  Intron number 1 from transcript Glyma13g06730.1 (locus Gly ma13g06730) derived from phytozome v7.0 (chr-ID Gm13; pos 6926005 to 6929022)
aattctgtagcaccaacaggtatgtgttatttttgtttgttttaattatttgcactcataatcatataaaaattcgaatgagtttctctaatctttgttttatatatttaagtgtgaatatatttaagatctacttgcttggctctcctttgatttgcttatatttgagatttgaggtgactatttttttttggaaaaaaatacccttttttgctgttttattatttctccacatgacttcttgaatcttatttcgtagtgtgagtttgtggattttgtaagttctactggcttgagaagaattttcatatttcttttttcctatgagctggagttgaagtaattaattaatctttcaactttgatatgatcttttgaatgtaagattgtaagatctggtgatgtagatcatgatctggaaaatatgtgtgatgttttgttttcttgtacggattttgttgattgatttcccttccttttttgttttcttttcccccctccaggttttagtgatttttgcttaattttatgtaattttttcctccatggattctttttattaaacaacaaggctaatagatctgttttattttttattttttaactggcctgatttttgtttaatttctttgtattatattttttttgtttttttgtttttgctttcttgttatttttttctttaaagtctggctatatctatgtatgtgagttgttgaccaagatgtgtagcagcagtacttgattgtcctgaaatgaagttcttatgacaacattgaacacatcttaagtccaatgaagcaaggacggaatgtaagcgtccagtgtgttgcaccgaaaacaaataaacactatttggttactctaaaacaaataagtttgacatttggaaagcaataaaggatgtttttatttcatcatcagcttaccactgtgtatctgtgtacgggactttttttgtctgaaattgctgcatttaatatagttagtatttctttttcttaaataaaggggaacgatattatatctaataagtaataactatctaagcatatgaacatctggtgaatataaatataatatcattttagtattttccatgtaaaagttctattaatttttctcttcactttaattcatattaactaattaactaattatactttctcctccaatccctctagtttttatgcttgagttgaaattgatgactagttgttgtcttacaatcttgtattatatatcccttattattaaagccaagtactttagtaatgaatttgttagtactgaaatttgaaaggacaaacatgagataggtgtgcccttacaagtctatctcattgaagttcaatgctgagagagtaagttggttatgctggacatttaatggcaataaattaaattaattctattcactttccttaatttttgttttccctatcctctcgtggggaatacggcagaatgatttgttgttgaaataaattctcacatcgacatgttcttaacatatttattagatcatttatatattttaagacaattgaacaacattgtattttcaaaggttattttctcatcaatatgatcatattactgcatgagtgttatatgagattgtttctatgtgttataaaaagccagtatgaagaatgcagatatttatctcaaaggttggaagatcacagcttggctagtaaatgagttgacaaagaaaaaatctgcctaacttgggatttaaccctagaaaagatttattgacaattagagattaattacatagcagcattgcaattattttttattcaaataatgtgtaaccggcctctaaaacatatgaatatgaatatctaacaccagctgttgtataagtaatgctatttatggatttatctcttttagttatgatgtggtttagttaagaagcgcagatatggggtcatgtacgaatttgtgtttaactgtattaactagaacaaatgtgtaaatgtcattcttcatgttgtatattctagtgctttctagtttagtctttcttatataattattttagcatgttgatcatcaaaaagagtaaattacacttttaaaatacatgagtggtatatttatttatcttgccatgcatcataacagtcctagagctgcttaacatgtggaaactatattatgttcaatcaataaccagtcaccaactccatctgatatagtaatatgttaatgcttttttgtttcttccaatatgtagtttgattttctagcttcccattgtattgcttcagaagatcatgctaatatactgcttatatttgatacttataggaaatatttggttcgatgccagacatagttcacttttttcttccttttaatcagattatattctcaattctacatataatatctgcagcactaaagaaacattacgtgtttattttccgcttgctttaattatatatttctattatcttcaacatttagtggaacttttgccgtgatttgtggtgttaccttccatttttctccaaatttacccaagaaatcaaggtcctcatacatctaacacaacattatattagagtctatatatagaccattaataactagtcactctgatatagatgattaataaaatataaatgcatagataaagtatattaattgctgatgttgattttgtgtcattaaagttttttgtttttgtttgttttgggtcggcaaaaaatagtgtcataagaggagcaaattctaacttttgggcctccaataaaattggcaccgcattttaaatgtaacgtaggcctattattcctgcacgtactttaacaatttcagcctacaccctttgaaaattccgaattagataatctggaatgtaaaatcttcgttccgaattatcctcttgtaaatttcggattagataacccagaatgtgaaacaccttttggtatggttatccatacaccatcaccaattttattagttcttcctttctctccttcttgaatctgcagc

SEQ ID NO: 3127 - DNA, 7092 bp, Glycine max
  Intron number 3 from transcript Glyma02g29580.2 (locus Gly ma02g29580) derived from phytozome v7.0 (chr-ID Gm02; pos 31336961 to 31344052 reverse strand)
ttatacttaacggttctcattgttactatcttcaggtttgtcacacccttacaatagagcatgcttatctactgtgcattagcttggatggtcttattgcttaacattatatctatttcgtttttctaattcagtgttgttaaatgacggccatggcggcgccatgacggttttccatggcggattttcgaaaaaacgccaccgaatagcggtggcgtggcgggtttgggatggcggcgtcatggcggccgccgtagccatggcggtcgtggcggggtagcggaactggcggaaacggcggaaattcgtttggcttttgtccgcggtaggagttgggccgacccgaccaaaccctacctggttattcattaaactaaaaaccctcccgcgtccctcccgcacagcttgccttcagaacctccccagcttgccttcagaacctcccttgcctgcgtccctcccgcaccccgccgcacccagccgccaccgcgacaccaccccttacccgcagttcgcacgcgcacgcaccgcgacgaggcccgcaacgcacgaacggcggcgacgagctccgacgacgaggcccgcaacgcacgaacggcggcaccaccccttgtttctgtctcgcgaaggaagaagacgaagaagacgcgcgggtcagctgatctgtttttttttttttttgggctttttgctgtttgacaccccatttttctgtctgcagctttttttttccttttgctatttgacacgcctttttactgttaacagtcccttttttttttttgtccgccataacatccgccattttccgctacgccatccgccatatttttatggcggatttttgactttccgccatccgccattaacaacattgttctaattaaggctttccattaggattcttgctgcaggaagagtaatattctacaatatttttttcctctttaattctcttggtctccaatattgatttaaatgagtgaatttttgtcaagtgaccttgattcattgatatttacttttgaaattgtaattgtttttgtgtcatacacaaggttatcaaactcgagagtttacgtaaactcgtgagaatttcatagactcgacttgtagacttagctcgtagattcgtaagagttcacttcatataaaaataaggtttaattactaatttagtccttatagttttaaagtgggttttttagtccctgtagtttacatgttaattctcttttagttcctataatttgaaagtggttttcttaaagtgatttttttagtttttataatttgcattttaattctcttttagttcctataacttgacagtgatttttttagtccttatactttatactttaattcccttttagtccttatcatcaaaatatgattaatattatcaattacaattaactacaaaatattaacaagtaattcataactaatttatttcaagataatttgtaataaaaaaatagttgataatttataactaatttgtagctaattatttttaaatatattttttttgtagtaaggactaaaagataattaaaataaaaattttagaaactaaaaaaattactttcaaactatagggactaaaagattattaaaatacaaactataaaggctaaaaaaaccacttttaaactagggactaaaagagaattaaaatgtaaactatagggactaaaaaaccactttcaaattataggaactaaaaagtacgaatcgtgaaactatagagatcaaatgagtaatttaacctaaaaatgataacaaaatatttataaataacatatcaattaaatattttaacaatataataaattaaaatagtaaatcataaatttcacaatacttaaatagtaattgttactagatagtaacttgcagatgttatagtagtgataaatcattcccatcgagggtttgatgttattagagaacaagagtttgatgttattagagaacaagagtttgatgttattaaatgtgagaatttttttatttgggagcaacacactaaatgaaggtatgttgaacactaaacaaacagaaaacaattcaaaatgacttatattttggtctaatttttttaactcgctgactcgttgactcggtggtaaattcgagagtctatcgagttacttaaagtttatagagtctatccagaatttactgaaaaaagagtttatacacgagtaaactcgcagagggtaagtgaatttgtaaattcataagagttagcgaattaactcaagagtttgataaccttgatcatacatacacataagcttacacgtgagaatgcttgggttccttgtctacatgtgttatgtgacctaaataaatcttcaaagtattttgtcctccaaaatcgaaatttgaaaaatatagaacataccaaatgtaattatgcaagttaaaaggatttgatccttttaagaaaaaaaggattatggatttgttgcatattaatataatcatattcttttaaaataattatttgacatattattaattatttacttgcttttggaaaaataacttctacaattctggttcaccaaattctttttatcggattaaattgaaaagatcatacttctatttcatgggagtgccatccttttttgatgattggcatcattccacttgttgtttttatgttttgaataataagttatcatatcctggttttttctttcctcttttctacctaataaaatggcttttcccaggtggaagagcatcattctacttcatttttattgttgtatatttgattctcattgaagaatcaaccaatttccattgttagttaataaattctatgtcatgaaccaagaaacaaaatgagaatttagagagacaaaaatagagaataaagaaagagaaagaatattgcccgtgtagtgaattccagctatatgtcttcccctcaatgtttcatcccacttgatagcttctccatcatcatccaactattcaccccctgctagaattgtcacctacaagctcttttctgggcattggttcattagaatagacagttggccgcagtgtaaatactgacctttctttagtcaagcatattcctcatatggaagctgctttgttcccctgtttccaacagaaatgaactacccaatgctcattgtgttgggggggggggccataccctactgggaaactcccctctgatgagttgtttgggcccattgtacttcttttattgccgtttgacaactatccataatctaaattggttggatccattaggtttgtgagaatgaatggaccactttttggtgatgatttccttttctaatagatgccataagcatgtattagagtattgtaatagagttgcagttattcaactcactcttggggagtttactctagttaatattagtatgttagttggctgagttagttagagttagttaatgacagctgttgacagctgtcataactaactgtctagcctatataattaaaattgtaatcctcaattcagttggccaatagtattttcatcttctcttttctaagcttttcttttctctcaaatattctctctttagaattctgttagcttgagtccaggcctcgagattggtgatttgacccaacaatttttgcacatagctgacagctcctcatccaccatggtgatactttgttgccccacagctcctccttgatgcccttggtcagattgttgacttcagtcacttgcttcggatcttgtctcggacagtcggacctctcaagaagtaatccagaagctaaactttggccacctcagcccttttgcctcaaggtggataatcactcatgcactgatcctaaaatacactcctcaaatcactgttagctgcttctaagaaattttgggagacttcttggcttcttgtgaaagaactgtgttaagacctcacaacaattagagatatgacttatgtagtccctatagggcttagacggttctcaccttacaagttggttttcttagattgagttagaccctaacccaagttctaagatggtatcagagcttatcctagattctttattgggcaacctgtatttgtttatgttctagatctctattcctaggtgtgaggaggtgttgttattgagccacatgcacttgttcatgctctagatggtcatgggtatgagggtgtgttgagatctcacattgactagaaatatgaccaatgtagaccttataaatcttagccaatcttcatcttataagccacttttgtggggttgagttaggtcatgagcccaaattctaagaaactgaaaccagagaaccattttgctgtcctagttgatgaaggctaattgtatcttctctgctgcttttgctatctaaccaagtgaatttttccataaaaaaacagggtagttccaccttgcctcttattgaatcttccccatactcagttcttcagaattaaaattgtctgttgcattttacgccacattcttattcccttggagtgacactgacacctaattgtgtgactgacgtgccttggtctcctttgtctcccatcttgggccatgttccacttccccagcatcagtttaatctcattgatgccatccaacatcttgatcttttttatatttgtttccaaggatcgcagctgaactctttgttaactggttatcttctccaaggcttcaatgtgaattcttcatctccctgaattgtggatatggtaggttagaccaatacaaactcagaaacagaatgtgagaatttagagagatgcacaaagaaaaaaataaagagaaggatgttgaatgacaataaagaaaagtttagaattctcctctaaggttttcttttaattaacggtttccccttaatacaatggagctaatgctcagttcccaaatgctgacaaatctaaatctctttcccttctatccctcccaagcccttgccttcctattctaaccacctaattttaattatactctgtttctaactctataacttcctgaatcctatcaaagtataagtgaaatttaaatgaaaggaaatatgataggtcagttagttaggttgtgtttgtttcaaggtatcaaaaaggaatcatgggaaagtgaacatgggaatatcacattctctcatgggaatatcccatcattcaaaaaggaattgtttattcccaggaatagtgtttcctattcccatgattgaatgtgggtttctttatattcccatgggaatgtaagttattttctacaataactacctagccccattccattctttcacttcttacactttattttttattttttaattaaatattttttttttctgaaattacttaaggccaaccaaacatgttcatggggccgaataaaaaaaatacactctgaataataaaaaaaaatgtttgttggaataatattcttaggattgtgattcgtgagagtacatattatacctttgtccttaaaacaaacacccctttagttaagttagtaattagttagttaggtttgaggttatgttgaaagaaagggaatgggcctgcaactgattaggttaggcctattcagggtgggtttatgttataccagtagctgcctctaaataggaagaggaattgagaaaaactaatttatactacaataaatactccagcaaaagaaaaaaaagaagaaattcttgataaataataagtcacaatttacgcacaaaattaccatcaatctaggagcaataacaacaaagtcaaaaaattgaaagagcatggtattattaacagaaaaagaacaaaataaattagataaaaattaatagaatgtgaatgggggagtttaaaggaagaagaaagaacagaacgccgaaaaaaagaagtcctatagaacaaaggttgaaaaagaggtaaccttttgtggaatggttaaggaagaagggtttaaaatcctattatgtttctgaagcaaaaaatgcattagaaaatcgtggagaaatcacaatgttatttctggggtaaaaatgggtgtttgaagcctatatcatagtagtcctgctataacatgtgaaaagctgctattgaagactgatacgcaatttgaatctcatagcagccctgggcgactccgcttgattactcctgtatagtgtgttattgactactatggtactccatggttaacctaatagtttatataggacatgaatccgtttgttttgcttaggcctaccttggagtctgtaattaattatttctccgacactaattggggctcttgttgtggatctctacaaacatacatttatgttttattttaattgaaaattctggtccctgagatagctaagttggtagagttgtggtttgtaacgactgtgtgcaggttgaaatctcactatgtgttctccttacttttccaactcctttccatctctccttcatgggtctccctgtgcgctacccccaggacccacctttgcggtagatcctccccttgatctgtggaaaaaaaaaaaaaaaagagatgagaaccttgaattctcctaattgctaaatgtattttggttataagcatgttgctaatatattggaaagcaagatagctttttataattaatcaaaacaataaacatttgtctgtgtgtgtgtgtttattttatcgggaccattgtatcctcctatttgttgacttttagaatttccttgacacaagaaataagttagggttttctgtgtctatctatcttgttatctttttgttataaaccactccagtcaatattatgccaaagaaatttaaatatgttttcacttgccctgacttaaaattggaatgcttttcctcctttttgctcttatggtgttttcttaaattttccttcccttgggaaaataaaatggacaatttcccttcgggtatctgaaatattctacgcttattcttgcaagcttcattcttcatggctaaatttttaactcccccaacctgaaggtaaacttttctaccaactttctatttgcaggcttacattaaccgccgtctactatttaggcatcg

SEQ ID NO: 3128 - DNA, 2156 bp, Glycine max
  Intron number 1 from transcript Glyma13g36640.1 (locus Gly ma13g36640) derived from phytozome v7.0 (chr-ID Gm13; pos 37872003 to 37874158)
cttggatctgctgccggtgaatttgctactccttctatctccctgatcattttactttccgcttttactcgtatttattattattattgctagcgatttcaattcggttgtgttttgcttcttctttccgatggcttagcattctcacttcagacattgtttctgtctcctcgcattggttcttcgatgtgctttttcgaagatgttaatttttttcaattcgatttttgtgatttgctgcgagtggagttgagtatgtgtgggatgtaagtaggtcatttgtttgatctgaatgtggttttcattgttattgcgatactgttggtttttgagaatttgaatttggatcgttgaattggctgaactcgcgattttgcagtgttaggtggttgaaatttgaattgaactgtgcaggcactcttttaaagaggttatgatatgatatgacatgtgctttcaaactatttaatgctgctgtgatttttcttgcggatttatgagagcaatctaccgtgttaggaagtttctgagtcgtatttttgtcatacaagtaactagttctgtctctgtgccgcgtgctggattgttactgacttattattacctttttctgttttttttttctcatgctgatttgattatgaaaatacataaataaactaatacagtacaaggaaatggtttaaaacaagacaaaataattcggagctttcccttttttgttgtttaaaacaaaatgtagaaaccataaaaaaggggcaagaattaatggaaaaaggtgaaaacaaagttgaccatggaaaaagaatagacttggcgttgagtaggaatactcaatttagctgaaaaaatgaggatggagattgtacgatttgtgctaataatacaggtcgaaatgaacatacttgaaagaagcaaggataggagagattctttggcatacaaaataaagggcaattataaatacttttggggaatttagttttgtgccaagagtttccctttggatgtgcaatgaatagtacaacaacgaattgtaaagagtgataatggtattgatgttgtcttattcttatgacctggtgtttattcatgaggtgaaatattccttcttgcttcagtggggcttatcttacttatttacttgtatcattttcgtatacagactattttggtcaaatataaggtgaccgagttattctttgcattggcactctagaggaatatattataacttataagttagtaaacaacaacaaaaagctttatcccactaggagaggataaataaaacagtcagaatatttaaaactagttaatatagaaattataagaatttcaatgtagatgcaataacatttggagttacaattgtaattaatagatgggagtggaaatttctgtcgtcaatacattatataggtgtgatgacagatttcacaagaatggtttggttatatgaatattccacagttacatggtataactttttctacacctccaatattgaagatatgttctgcactttaatctagatatttgatatttctcatatatgtctttgtcattatctgtttgtttgatttaggaggatgcatcatggtgattcctttgtattcattttttaatagtgggaaagtgctgagttgaaaatggtctacagaaggtttcaataagtcaacatttattcatgcatttttgtttccttctgagagagcaaataggttacataattgcgggtttggtatctgatgatgcttatagttttcatatgaataatgatttgttggaaatgtgataacttgcacaaagagacttactcttttattatgaatgatttggactgagatagtcattgcttcctggtgtcctgagctcaccatagtgataatatcagttctgaactttaccatctatggttgatttgggaatcatctaagtgaatgatccattagtgtcatgggattcatgcacagtggagctcgggcaatgctaacaaatttgctacttttgtttttgtatagtaatcttttttggctctttgttgtaagcttcagtttcatgtgttacgattttgaaaattttcattactttgaaatctggtgttttatttttttaatatgttatatccttggtttttggttcatgcaggttac

SEQ ID NO: 3129 - DNA, 6759 bp, Glycine max
  Intron number 6 from transcript Glyma09g08050.1 (locus Gly ma09g08050) derived from phytozome v7.0 (chr-ID Gm09; pos 7076222 to 7082980 reverse strand)
aacctttctcaaaaacttcaatatcttggtcaaaggtcaacataaattgcctatctccaattacatcttttttaaatccaaaatgatgcttctttaatcaatttattgtattcttgggaaaggttagcaacccatatgatccattttaggtaactagctatagtttataagaaaatgggagtatcaaatgatagacatatacatttgtcatcatattcgttttgagttgctttgtgtcatataatgacaatgtttttttcgaccttttttcataatgttttattaatagtcaatttacatgctttttcacaagccagttattacaagactgaggttctttctgtaatgtgaaaaatgtaatgttcaaaactgtgcaccaaatgaaatgtgcaaaaatgaagagacggagaagagtacgtatattgactgaaattaagactcacttcgagctagagttctggaaggaaattacacatatgcaaattctaggaacaagagagtatgggagagagaatagaatcgagataattctcacaacttgcttaaaaaaacaatactatcaattattctttatatactagctcaattgcatacgtagtccctcaacttggtgctagtcatgcgattcctcattcttttcctttgcctcatcatttcccgaccaatgctaacaacattattccctttttctccatgtgggtcccctttagctgacttggttgagaacgtgccttccctattttccttcattgcaataccatccccatttatgacaaccttgtcctcaaggttgaagttagggaagctgtctaacatctcattaaaacctcccatgtggcttcagctggagtcgtgttgtcccattgcacaagcacctgtggtataaaatttgagcctttcttgatggacctagtttgcagaatggcaattagggcaattactggacctgtatcggttgtgattagaggcaaaggcatgtactgttcttgtggaattcctttgaaaggcttcagttgagagatgtgaaaaactggatgtattttggccgcatgtagttgtaacttgtaaggcacgctacctattttggccacaataggaaatggcccaaaatatctcattcttctgatttcttcaaagtgacagagtgttgcctatatggttggagcttcactagaactaaatctcccattgcgaaggtgatgtgccatcactttcctcttatttcttaaccctttttgtcaccattttaattactgattagtcttaattgtcaaattaattatgcaattttatcatttgggcctactggactaattttgtgtttttaatttaatttcaggagaattataagtaattgggcttggacttgaagagagcagacaattttattctaccaaatcttatcttatccatattttatctaatctagatattatttcatctagattttatcttatcttatcttatctagattttatttcatccagattttattttatcaaatcttatcttgtccagattttatcttattaatgggcttggacttaaaatagatttgtaagctttgggggctgagaacctatataacagcaccaaggttttagtttatggagtttttttcgttttgtgagaaagaataattttaggttttgcaattccagtttttactattcacgtagcaatgtaatttcgttgtctgcttcaatctgcaatttcattttctactgattaatggaaggttaagtctccagcgttgttttctcttgaggatcaagcacaactctctttgaggttttattattactattgaattctgatcaagttttcctcttcaccaattactctgtatttgttgctattaatccatgcatgcttagtgcttgattaattgtatttgcgcttaatttaagtcatgcttaatgatcaatttcgttcatgattaattggtgtatgtgttgcttaatcacataatgacagccttatgttaattttcgcttagtaatttaatttaaggttggattaagtggttaaactgattaaggataaattctcgtaacctaggataagagacttgtttgtgaatcaaggggaaacaacatatttttaattctgttattttctaattcaaatttgcttgctgtttaatttacaaaaacaaacaaccccccccccaattcgttactgttttattactatctgttatgaacgtttggttgaccattgctcgttgggagacgacctaggatcacttcctagatactgcatttttaatatttatttgattcgggtacggcctcgatcagaaggacacatcagttctcttcttatcagcttggttcttcatgtatacttgagctctttccaattgttgtttcaattgctgtaaaatgctatccatgttgatcaattgttcctgtagagtaacagggtctgatgcctgtggattgtatcgagtcagagtaggtggatctctcccatataatgctttaaatggtgccataccaatgctggtgtgaaatgatgtgttgtaccaaaactctgcccagtttaaagccttgtaccaagcttttggattgtgaaaagtgaaacacctgagaaacatctccaagcacttgttcactacttctgataggccatcggattgaggatggtaggctgaggacatggccaatgtggtaccctgcaattgaaataagttcttccagaaattgctagtaaaaaccttatccctgtcagacactattgacttaggcatgaccacataagtcatgaataactcagctacagacctactcgtgtaatccccttcgagtgctatgaaatgaccatattttgataaatggtctactactaccagaatagtattgaagccatacgaatttggtaggccagtgataaaatccattgttatatcctcccatacttgagatggtataggcagtggttacagcagtccagcaggtttggtatgtaaagttttttcctattgacaaattgcacaagattgaacaaattattgcacatcatgcttcaaatctggccagtgaaactattgtgtcacccttgccaaagttctttttaacctggaatgtcccccaattggtgagctatgaaattcctgtaagagttgttgtatcaagtccacatccttatgaacaacaattttgtttttccaatataataattcacctttcattgagtaatggggatgcaataagggttgttccacacattggtgcataataacttgtaacttgggatctctctgcagtgcttttttcaatttcctaacaatggaatgctccggctcagaccatgataatgacattactctagagagggcatcagctgccaaattatcttttcctggcttatactctattgtgaaatcatatcccaaaaatctatgcaaccactcttgttgctttggggtttgcaaactttgatccatcaagcttctcaaacttttctgatcaattctaataataaatctatggcccaataaatagtgtctaaacttagaaatttcttctgccatggccaacatctctctaaaataagcggacttcttttgagtgtgtggtgcaagtttttttggagaaataggcatttgggtgaccattttgatgtaacattgcacctataccaatccctgatgcatccgtttctaagataaagggttgttggaaattaggtaaccccagaacaggtgttgtcatcatagcttctttgagtctaaggaatgttgtttcagtttcctcagtccataaataaccatctttcttgagtaattcagtcaaaggggcatcaattttggcatatgctttgatgaaacgcctatagtagcctgtgagacctagaaatcctcttaattgtgtcacatttgtgggtggtggccactcatagattgcctgaaccttactactatccatagatactccttgtccggaaactatgtgtcccaagtattcaattttcaatactccaaatgaacacttggacaacttcacaaatagtacatgttgttgaaggactcatagcacattttccaaatgtgtcaaatgttccagccaagtagagttgtatataaggatatcatcaaagaaaactagcacatactttctcaaggcatcatgaaaattttgattcattaaattctgaaaagttgttggggcattggttaatccaaaaggcatgactaaccattcatagtatccatgatgtgtcctaaaagttgttttgtgccgctcttcaggttgtaccaaaatctgatggtaacctaatcttaagtccagttttgaaaaaagaaattgcaccaaataaatcatctagtaattcatcaacagttggcataggaaaactatcctttattgtcacaacataggccctataatcagtacaaaacctccaactatcatctttctttttcaccggtacaattggtgaagaaaaaggactagtactaggttgtataataccttggtctagcatttcatgcaccatcttctcaatttgttctttttggctatgaggatatctatacgatttgactttaactggttgtgtaccctccagaagtggaatagcatgattctgacttctaggaggtggtaatgatgttggagtttggaacactgaactataagtgtgcagcaacagggcaatctctggagctatatgttgtggtaaatatttcaaagcatcatcctcagtgtggaactgaaatagctgaacggtaaatgaatcagcaatagcatcagtatttcgcatcattctataatgattgaattgagccagtttaggtggtgtgcctctctctccttgtaatgccataaattttcctttgttgaaaaattttagtgtcaaagctgcatagtctgccacatgtgggcctaaagtagccaaccatgaagatcccaaaataatgtcagctcctaccacaggcaataagaatacaggtattgtcaactcatgtccttgtaatgtgatggacaaattagggatcactccctcagcaatcatagattggccatttcccaccaaaactttgaaacaaggacctggttccactgggagtttaataaattcagcaattcggggttgtaaaaaattgtctgaacttcctccatcaactaagacttgtacactgatttgcccaatttggcttgtgaatcgcaaaatacccatgctatcggtccctttcattgcatttagagaaagatgatggtcatttgtggctaggtcaggttcaaggtaggtcatatctagttgggtttttctggttcaggttgggtatcctcttcagggtcatcaaattgtagcatcatgatttgacggttgggacatttgtgggttagagaaaattggtcatcacaccaataacatgatttgatgtttgggtttcgttgagcagggttcatgggtcgtgttggtggggtttggagtataggagtaggattggttttgtggttattttctagcttaattgaattgaagggtgctctgtggttgtaataattggatgaggtgaattcatgtggtgtaatggtggatgtatatttttcttcataaactttagcaagggacacaactttaacaatagaaataggtgagtgaatcatcacctctcgtcagatctcaggaattaaaccactaatgaaacagtctatcaatgcatcattactcaagccataaactttgttagctaatgacataaattgcagataataatcagctacaataccaatctgacttaatttgaataatgtagctctttgacactcataaatggaaggtccaaaatccagctctaaagctcgagtgaactcgacccaagagtgaaatgggtgagagcactgcatcatctagaactaagggactacctccttgtccaagtgcacaaaagcaatggttaatcgatctgggtctagtgtaccataataatcaaaaaattgttccgcacgaaatatccattccaagacatttttgccattgaaatgagggaattcgagtttaatgttcctcacccgaaatgattgtttgcttgagttattgtcaccgtgggaagatttcttggggctttggttcagaagcaaatcaagtgcattgtggatctgagcaaatttgttgtttgtctctgtctgcatcgcttccatccgtgcaaatcgagatgcattcgcgacttccattttgtcaatctgctcatggaaatcgttgtacatcttctggatagtgtcagcgttgcgcttgacatcggcaatgagctccttcatccgggtattctctgccatggtgagatgaaagcaccaaatgtaatgagcaaaattgtgcaccaaatgtaatgtgcaaaaatgaagagacggagaagagtacgtatattgactgaaattaagactcacttccagctagagttctggaaggaaattacacagatgcaaattctgggaacaagagagtatgagagagagaatagaatcgagataattctcacaacttgcataaaaaaacaatactattaattattctttatatactagctcaattgcgtacgtagtccctcagtttggtgctagtcatgcgattcctcattcttttcctttgccccatcatttccggaccaatgctaacagcattattccctttttctccatgtgggtcccctttagctaacttggccgagaacgtgtcttccctattttccttcattgcactttccctgctaaagcatcacacagtgatctatttcacccataccgattc

SEQ ID NO: 3130 - DNA, 431 bp, Glycine max
  Intron number 5 from transcript Glyma04g02650.1 (locus Gly ma04g02650) derived from phytozome v7.0 (chr-ID Gm04; pos 1886261 to 1886691)
attctggcagatttttgctactactacgtcaagaggtggataataaaattatcagaatatgcaatatatatatacacacatatagggttttgctaatatacacaccaactacagaatatcttaaaatatacaataatatagcttgctaacacactcataccgaaaaacaagggtgtgtatgttagcaaatgcttgtggggttggctaatgtacacactcttattttttagtatgagtgtgttagtcagttataattagataatatgttaaaatacaccaatgttgtaacttcttaacgcattcatacttaaaaacaaggatgtgtacattaacaaatcacacacacatatgctcttgtcaactttctgaccattttttcttcttttttggctacagtcttgttgggggacaacttgttcttcgacttcctt

SEQ ID NO: 3131 - DNA, 3187 bp, Glycine max
  Intron number 3 from transcript Glyma18g14400.1 (locus Gly ma18g14400) derived from phytozome v7.0 (chr-ID Gm18; pos 14214544 to 14217730 reverse strand)
atcgatctgcaatcatttgggaggtaatatctgatggtgaaacatatgctactgttctatttttatcatcagatcctcaatgcacagatcatttgtgatattttattcatgtcacacacaaatagaatatgatgatgtggactgttccttttataactgggaaagatatctgcatccatcagcattatcccaagttcaacaatgttcaattctatcataccttgttctttacttttgcaacatgtaggtcatgtttcattgaaaaatagtgaaagagcataaccctaacactgtatgatgtgttcaaagacagtaaatcatgtcaaagatacaacttctggtggttaagattgagtgtagtctacaggtatagtgaaaaccagagcacagagaaggtagaccaaattaatttctatctaaaagggaaaaaagacaaatggaaaaacattggattttttaatgtatagatggtgatcactgtgtgtcctacttttttcatccagtcaaagggaaataaaatcttgtgacaatgtactgtttatggggttttgtcatttgtggttggaaaggaatgcccgtgggtctttgccacctctgaatttttattaaatggaaccattttagtaagagactaacaatttgaaatggtaatggtatatgtattatttacccatatgaaatatgtactacccccttataatataatcccagagactagctcctttagagaatgcaaagcacaactgcccagtttgcagccataagaaaataacagaatgcaaaactgactcttcctccaatctctacaggtttacacttgacagtcccctttcccatagctagctgtgacagctcagcctactagaatttcccttcctaccccttttagtatatacttgcaaaatctcatgaatgagttttaccacctcatgtcctgttttgctttgattgggtttctaaattccctgccctagcgtttcccttttgtttaaagccttgttctcaaggctgacatggtaaaggcctcttcccatgtagcttcttcaacaggtttgctgctccattgaatgagccattcaattttcacttttcaaatcattctgtagccctcccttagctctagacaatgcttccaacaggtgtgactttatctgttgcaattcctacaccattcactgtttcgattcatgtctctgcctggtcttctccctctactcgtttgccgcagcttccaaagaagttacatgaacatctatggcggttacattgacaacctatgatgcatagatattatgtgtgtattagatacaatacatattcaatatgagaatacaaatattcttaaaatatctaggatacaatacaagatacatttctacatataaataggatttgaaacatttcttcccagatgattccacaaaaagttacctccactttgtgttctgttctatcttcctgtaaccatcgtagttcacattctgctaaattttacctaattttttatgctccttttccttttaatatcaccatcatctctcattctttgacttcattactatgttcttatagctccatgatggtgattgtctgtgaaaactgtgacttaatagtttgcacgaatttagttatttttggttgagtatgtgtggtataaataattagtttataaaataatatttagaataacggctatcctgctatagcgttttcacagttggccactacgcacagctacctgacattgataaatttgttatttcaaattatttgagtaatataccactgtaaagcactcctttgtccttactaaggccaaaccctgttgaaagttaagtaattgttttgaccagtgttgttaaatggcggtcatgtcggcgccatggcggattttcatggcggttttttgaaaaaacgccaccgaatagcggtggcgtggcgggtttgggatggcggcgccatggcggccgccatagccatggcggtcgtggcggttatggcggggtggtggaaaatggcgtttttttttatgctttttgtctgcggtaggagttgggctgacccgacccaaccctacccggttattcattcagctaaaagaccctccagcacaactctgtgattcagaacaaccttccatctaagagagaacccaaccgcgagcctcccctgcaccagccgcgtccctcccgcactccacacgcgcacgcagccgcgacacccggcagtcgcacgcgcatgcagccgcgacgacctccgacagcgacgcaccggcacgaatggcggcgacgagcttcggctgcgacgcacctgtcacgaacggcggcctgcagcgagaagttcacgcggagaagacgaagctaccaatcactagttcccaaccatgggttgaatggaatcctatacataaatcagttaatagaagaatagaaaaagcttttattgtgtcacttaaattatatataaattctcgaaccaaagagttaataagaacaagttcttgattaccaagaatagaataaccgcttagaataaagaaacaaattatatttgtcgagaagtgcaaaatcgtatttcttagttttatttttgctgtttgacaccccctgttttctgactgcagttttttttttccttttgctatttgacacccctttttacttttacagtcccattttttttttcgtatttgacaccacaatttttttttctgttcagtcctcttttaaatggctgagtttatttgaactctttaatgagtttatttggtgttggtacttgattattgtatgaactcatgaaacttttttagtttatttgaatgcaatcctttgtttttttcaatttcaatgagtttatatatatgttttctttttgtccgccatgacatccgccattttccgctacgccatccgccatatttttatgatggattttttactttccgccatgaaccgccatccgccattaacaacattggttttgacacattctattaatgatgatgccattacttgactatgtgatttgttggtaggaattatctatttaggtgcttcatgtgtacatcatgcttctgtaaacattggtcaatgcccccccacacataaacaaactaaatgtacttaaaacttgcacattaggtttcacaatttgtgctttttgccttttcttttaataggttgac

SEQ ID NO: 3132 - DNA, 1244 bp, Glycine max
  Intron number 3 from transcript Glyma03g33410.1 (locus Gly ma03g33410) derived from phytozome v7.0 (chr-ID Gm03; pos 40988539 to 40989782 reverse strand)
aggtattttgctattttctaaggcagtttacattgcctaacttcaacttgtttgctaaagacttaaagcaaaaggtctattccaagagttatgacatatgagttctattttagtattttatacttctaggtgtagttcttatgatacaaaccccccatgtttgtgcactcttttgctcttgctcttgttctcttaatttaacattcatagatatatctaatgcagagcaatcttaatgaatatgaacactgcattgaattaattggcattttcaattaaaagttttttaaaagtattgagctaatcgcttgttacattgtagtacagatgaatagtaaatattttaggacaatagtgttacacaataaggattgttttattgttacctactcagaaattttacctctccaatcaccatggttttgttgaatatgaagcagtaaaaggcagcattaaagcgcaagaaccctgttggatgggaaatgagaagagacggcaagagagttggtattattgatcaaacaactagtactacaattatagctacaaaaaatggcccaaggcttatagtttgaaaaatgtgtatctaacatatcaaacttatcatatagagaccaaatcatactatatttttatctggatttaatttggattcagtgaccaagcttttacaccgatagtgaatttgacacactattgtttgctacagcataaaaagttttataggattgatcatattcacagaatactctcactatactgggttctctttaaagaaagccttgtaaattgtaataatagtgtaaaaaatgaacagcatgcctacatgaaccatgtactcacactgcatagttggtaatatggggatagggtagtttatctagttttagctttttattttctccttgctgcccttaaattgtccaaaagaaataagtaatacaatgggagattatgtcctcaggccagggatacagaaactgtaattaattttttattatgttttggcttactcagtaattttggcttcacatgtttcctaaaatgttgctgtcttagaatttcaaaatatgaacttttattgttctgaaagataaataccatattagtggtcatactgttgactgacaagcacaatacaagttttgtattatttattctcttctcagatgtgtattataacattcatttgcacaatgtctggtgcaggatttgcataatcaaaatatcactccaaatatata

SEQ ID NO: 3133 - DNA, 1070 bp, Glycine max
  Intron number 6 from transcript Glyma08g03970.1 (locus Gly ma08g03970) derived from phytozome v7.0 (chr-ID Gm08; pos 2811138 to 2812207)
agctgcttcgtacacgagacaatccagaatacaaggtatgacgacttcccctttaatgtaattttctctgtgaaataatgcaattaatatgccttgtacataacagttaagatggtttaaatttaggtttatgagattgtgaaaattttgttacgtatacttcatgacacctattctggaaaaattaagcttgaggataacagagttcctttctaatcaatcctaaatgcatattttgttattattgaataactactattacaggcttgattctcacaaaatatgctcctttagcttcttgctatttgattggtagtgtacaaaaatatattcagttcagcattatacttgttttgaatggaaattccaagtatctgttttaccaaatgccactttcatccttttattttactctgtctgaaatcttctgagggtgcaacaatgaatgtgaggtaaatatattaatgtgtttggattagcttcatggtgagaaataataaattattttttcagggtgaaggtaaaacagcaaatagttgcttctgctttcatgtatcaccatgattttgtgagatagaattgattcccgtgtgttaccctaacacactgtatatttattatttaggttaacagctggtaactggaaaatgacactgtttatgatctacaaaattttccttttggttcatgaatgtctacaaaactgcagcctgcaggcataaattgaccaaataaccaatagaataagtgtcttacatacaaatttttgtcctgtgcaatataattatgaaaatgtacccttgtcaaagtcctttcaatttgttcactcatggataataattcggtggaatcttctgcaaatgcaactgccttctgctcattttttctgatttatgcttgttttgacatatttgtatgatggatacctttaaaaaatttaggttttcatcttgctttctttaatggcctcaattgtttcccaacaccttatttgatactttggacatgtacttaccttcatttcacccgtgtttctttgatgaccttcttttgggcagtacaccatagca

SEQ ID NO: 3134 - DNA, 752 bp, Glycine max
  Intron number 5 from transcript Glyma16g29740.1 (locus Gly ma16g29740) derived from phytozome v7.0 (chr-ID Gm16; pos 33449278 to 33450029)
taattgtcaagggaataaaatccatccattgagaggcaaggttttagtggttttccttagtagtttcaaattgattttctttgttgattacatgcatgcatggcatttttatggagtgttgttataaatataggttgtgctgaatgtggcatataatgtatactcagtgtgtactttatgacagttgtataataaaccctacactatgtggggttgaattaacttaattttcaatcttggacatggatgattgtcttatgcaccaaaattttcacttgaattatgatataactgaaatgctcaaaattataagctgccagcttttatttgaattcaacggtactctaaataatgctgaaaaattgtatattgctgatattttctcatttggtatcttcaatttatttattattacatttgatggaatcctgtgtccaagacatatcattttaaaatttatgtgcttcatggatgaaaagctgagtgtaatttttttgtgactcatttcatctaaatattcatcatgtcttgaaagttgtttgagtagctttctacaaactcccactttgacccacttacagacagacttgcaaaactccttataaaaaatcatttttttcttgtcatccaagtttcctttttatagtatattagtattattgattcttttatattaattattgtcttgattttttaattaatagttaaatgtttttttcttaatgcagttcttccagattttactcaggtat

SEQ ID NO: 3135 - DNA, 9542 bp, Glycine max
  Intron number 1 from transcript Glyma11g27360.1 (locus Gly ma11g27360) derived from phytozome v7.0 (chr-ID Gm11; pos 27061934 to 27071475)
aaccctcatcagcttcccacgctcgagtccatcaggtaagacacaaagttttccaaccaatataaactcttgcattattattgatttgtcttcttccacatttttctatgcattttgtttccttttggtttattgcgttttatttttttgtttctttcatgtgtacaggccatcgggtctatctttttggattgtgtgtgcatgtatttgtgttggaaaattataatgtttttaaatctttttataataatatatattattactccttaattataagaaataattgattaatttatatttattgtaaatatttgttaacttagttatcaatattaaatttatttatgattacaatattttttaaaatttatctttaaccttaccggaatctatttatttttgtataggagaaaaaaagagataatttatgatattttgataaaaaaataattaatgaaatattataaaatggtattttattttctaaaactataatgtcttagaaataataaagacaggagaagtatgtataagtcattggattacaaacataatatatagttcattgattttcataataatttttttaaaaattataaaaaattacaagtaaaacaatttaaataaaaaaatttataattttattttttgtgtttatcttttttcattatgacttgaaagagataaataaataaaatatttttacaaattattatatctatatcacatatcaaaattatgtggttaacaatttctaattggtttaatattaaccctttttttttcaaaaatgcaagtcattaaatacaaaaaagtactgacaatgtatggtaatttatatattatttggagattgggtgatagagtaaatatttttatgttttagagatttgttgttggtttggatgttttcgagatgttgaattgatgtatcgtataaaattaaatattactaaataatttttttttatataaaataatagggaaatattattaaaatataacccagtgttgaaaatagggatcgatggatcttggccattgcctcatggttttggttgtggggtaccccgtacccgtcacctttttgagattatgacattgatggcactgcatgaacggggtgtttcgaccaattgaattgtgttattgcatatatggagaaagattatcagatttgatagtcgcgtttaacgtataatttccttaattagatatgaaagaccaacaaaactagaaaaaaaaaaaagaacaaaatgatcgaacacttatactactagcaatcacatctgttcactactacaatttaactgaagcttttataatttaactgaagcttttattcagtaatttatataataaaatttacatttacattgaaaataaacataagctacccaagtaaatttttaattttaattaaaaatgacacagaataattaataattttgcatctaaattttgtccttaaataattattgatctcatcacttaaattcttacgcacttaagcacaaatataagctaccgcatgcgaaagagaaaagtatgtgattgaaaaactttttagaattatctagaagtgattatctaatcaaattggtcccaaacctattaaatcatgagagggaaaggaaacaattagaggagagagagacctatccattgggtgctttacggttcttattagtatataaaaattgataggataaggttgaatcttattatatgtttcttctcataatccatataaattaattacttaaggaccaacaagcatagggtacaaagtcatatatttaaggggtgaaatcaaattgtaaattctagtgactcaacttatatattaaaaaattatttgaatattgaaacgccctaaaattgttttaaactaaatatataattagggacagatttaagcaatgagccattgaggacccggacccggtcctccacatttgtttttcaaaaaattatatataattaagagctgttgtatatgacaccatatttgtgaatattttcgaaaattcacggagagtacataagtatcttttttttaagaagaaaaaaaaactatttatattatgttacaaacatatagatacatgagataaatttatatgtaccatgtaagatttaaaagcatattacaacaacactcctgaactattatcaaataacacataatttcacttttttttattttcctatactaattccttttaaatttgaaaacattacactaacatccttttatatatgtttagaaacattacattggcactccctagacacttcctgaaattttacaataatacccctacaaaagagataaatataatggctaaaaaaatagataatacatgtataattacatgaaatctcgggaggtgttgttataatatgctttaaaatttataatatttttatatcatttagtaattttttatagatttctagaattaatatatattaaacgatacaaaattattttgacttacattagtataaacttatcatttctcgtttatgtgtgtaatatgcatatatctttgacttatttcccgacaactttttattttggtttttgtcattcattgtgagtgttttctttataattacactagttaaaaagaaaaacttccctgtctctatctttatttttaaaaataagaagaaaaatcagttaaaaaaaagtagtgatagtagtttttttaaaagaagtaacaaaagttacatcttaaagatttatgaagaaaataaaaaataattatatgtattaaaagataatttaagaaaaagaaatatatacgtcaaatgaaataattgtcttttttaaagttataaataagaaaaaaatttatacatgataaattaagatcatatatatatatatatatatatatatatatatatatatatatatatatatatatattaattagaatacaaaataaatctatgcaaagtttagtaattatctctctatttatcaacctttaaaaggattatgtttactgctcaagattggatcaaaacataaaactacccggactcacatatagtttaatgaaaacgcctaataagataacatctttaagaaaaagtgctttgacgataagggcatgatcattgcatatgtccttcatgataaccacacacacactccaaaaaaaaaaaaaaaatggaatatcagtaaaacctctcacataaaaggtcatcacatctaggctgaagggtcctcatataaattccttgcgtgttatgggcttatggctgaacaatttaaaatgtgattgaatatccataaatgatggaagcctgggttagttgttgagatttggatggttgactatttaattttgtttcgtaaaatgatatataaatatataataattaaatgagagactatatgcatgagagtacatgcagtcctgtaaccaattacaagatccatatatacttacaaaaatcttttaaaaaaaatacacaaagttggtactatcattaataaaaaaaagtgttttttacaatttttgaaggattttttacaacgacttttaatcgttattgaagttgttatggtggaaagttaagattttttataatcgtttttaaatcgttttaaaatggtataatttttaagataatttaattctgaaatcttcttagaatattttaaaaaaatatataaaaattaaaaattctaagattattttttgaaaaattattttaaaaaatctatattctaagataatttttgaaaaaatcatcttagaatatctttttttaaaaaaaacaaatattttaaaaaatacattctaagataattttctaaaaaataatcctagaatattttttctaaaatttttttttaaaaaataaaataatatttattccttatgctttaaaaataatagtaaaagaatcaaaagacacaaaacaataaaaaaaaaaaggaattaagctgaggacccacaaattttcttgaactaaacacatgcaaggatatgttttatcacattccaacctccaaatacagaataggaagacaatacatataatggtaattaagctgaaaaatttgaagttgaaaacaaaaaaacttaaaagaaagtaaatttacgacacaaagtgggcaaagctcagtacagaacatagatcatatcattatatcctactagctagtaggatataatgttgaataattataaggactgaaattaattaattagcagaaaatatcccaagtcatattgaaatcatgatccattggaggaaattcattttctgaggaggttaaggtatattggaccaacagaaaggttacaatttttctctgcaccgcagagatttaatattgtttctaagaagttagaaccaaccataacaacacatcatatggctattggggaactcaggatcattattctccatacacactctataatatccttactacatatcaaaaatctgtaatcatagtagctatagcctataaccatatagatgcatactttatgatatccttacaattcaatatctgactatattgttcaaaataccaagaattttcttgaattaatcaagtaaaataatcttaccataatcttctcggggacgctgtccacggtctccaagaaaaacagttactagtttcatttatatgcacatatggtttctttgaaagataaggtaataataatgtccatttcattggtttgagcacgaattaaaactaaaggttaattggaattaaaaaatgcattaaaaaaatcctacaagagtataaacttatagttacaaagtgaataccattaacagccacatgtactgaaaagtgcatgtcggaagggggtgaaagacattagtcaaaattatacacaaaatgtaagtatgcctagttccataatcaagaaatagaaaagcaaatgatcataaaccgcatgttgaaagagtgtcacattagtcacaagctgatcattattcatacatttttaacatcaatcctgcaaatgagaaagctgaacctaaaaaagaaaagaaaaattcagagactgggcaaattttgaacagatcaagattggaaattaataaagatattccagttaagatatctttaataattctcctcacacaaccaaaaatttaacaaggacaccctgaattttgcagaaaaaatagaaggtctgaatgtgcacaatgtgaccaaatgtttgtgataaaaatatttcaatctttaactaaatttattagaacattgtaaagcaaaatttaagaaactgaaaaaattcttgtacattcttttctagttttatatagttgcaattgcctgaaaagtttgtaggaaaaattgttccatccttggagatgctttttctgacactaccacagaatcctagagatgctattaaattcaatcctctttgttctttatctataatttataattttccctcaagaaaattattaaattcaacctgcttttttgaagcttcagttccccaagcctcacgaaacatccgtccaagaacaaatacactaacagcagtataactgttcaaaaataaaatagtatagccaataaataacaaaaagtagttacatataaaatagtatagccaataaaactaaatcccccactgaaaatcaatcaaataaagttcatccaactagtagttatcaaccccaaaaaaaattataaaaaaaatgtaacatgaagtacaatcaacatacctttatcgtagccaaaccttttgccaccaactcaatcatcctggtccgaacctacagcaaaacagaatatacacaatccatgtaacagttttaaaactatataatatacaaaggtaattaaaggaaggagaacaagagctcattatcccgaagaaaataattgtcacttataaaaaaattcctaaaaaaaatgcaagagcctgagtgtgatacaggcaagtaaaatttgcctttaatattgtttccaagaagttagaaccaagcataacaacacatcatatggatgttgggaactctggattattattctcttagaatcaatatttaaaaatcttgtgattccttcatttgtgaaagaacttgtggtgctaggaaatgtgccaggattgcttgcagggctatttcagctacgatagagcaaagtatttggcacgagagaaataaacacatcttcccatagcaaacataaatccttcaacgagacaaaagttcctctctagaactgtttattactttatttcatcctctctctgaatcctaaaatcctactctccccataacttccataaaaaacttcttcattttgtcttgaactattctagaaggctaagattaaacacatacttcaaagttcaaacataaatcgcagaaatcacatgatacatttcgaaacagggaaaatttgtgacagaaagaatatgcctcttgatctgccttctcattttcaaatttaggatagaaagtcgctctaacttgtgcacgtgagtaggtgaaattcttcaggaaattaccgcaaaatatcttactcaaaccactgccactgctcttttgcgttgaagccacacctgcatcaactccagctccattttcaacttcagtaacattgcctccactcgcagttccataagatttacgtttccaaatcacagtcgaaccttgcgccgcagttttcccactgttttcgccaatactcaatccaccgagcttgttactaacagtttccacagctgcgtctaccgtaacagataattgccccttcattttcgctttttctttccatttccgctcgacatgcgcgccacttcgctgcaaaacaaccaatcgttgattaaaaatttagctcgttcgatcggaaaagcataagatcatcgaattttagtttcgagctacgaattagagaaagaaaagcgacgatttcgaaaatcggaagaggaataaaacacctgattgtgacgaattggcgagagagagcgagggagttagggtgcgataagagtgagcaaagggagacagtgtagagaaatctctgcggtgccgacattgaagtgaggacaattacacacgcgagcacaatcatgattccgtcattgtcagaggcggcgaagctggcggcgacgaagaaggcctcgtcaggggacattgtgccgtagcacttggagaagacggagcgagaggatagggttttggtgaggtgagtgatgacgatgtcgcgcgtgcgctgagtggggggtcatatgctgaaggagacaacgacaggggattggtcttgggcgggcggcgacggccgcgaggctccccgtgacagcctccacttctacgtggacctggtcgtgcctgtctcggttgtgtcatcgagcctcgacgagtcgtgggagttcaaacgtttaaggagcaggtggaggagatagggtagaaagaacaggagtattgtttattggtgtgttggtgcaaatttcaatgagacaaaatgatccaattaaaatgttgcgggttgggaaaacacatttttttagaagacagtcttttaaaaccatctttaaaatcttatatttaacatcttttgtttaagaattgatttcgtaaaatatttttaaaacggttttaaaaatcatctttaaaaaattacaattattaataaaaatgttattgttttatttatgacattagtttttgtacaactgttgtaaaaccaacctcataaagatattttttctagtaatgtgtaattgaaaaaacaaaatagaactaaatttccttgctttgctgaaatcctagctcaagatctaggttttggaaccaatagtcattaaaaatggtttcatttctatatatgaactcatataaatggatcaggttgtggttaataaaaaaattgtagtaaataagttataatcattacctttttaactgtaatcaatacgaggacgaggcattaaattccagctaagagtgtatatgagacgtgcatattcatgtgcagagagaccaaagagtgtgcaagtgaagaaaaaaaaggtgattgatggattcctcgtggacatcatatatatatatatatatatatatatatatatatatatatatatatatatatatatatatatatatatatattgggcagagagaaatatgaggttcaaaactaatgttcttctagtgggtattctgtcaggaacattaaccaagtgaaaaatctgaaagttaggtgggtcgatgaatatcttcttgaatagaggattcatccagtgtaatgggaagatcaacatctgactgatattgtaacaagaacatgtagggttgattttatagtaaagagaccatttacactgtcatagaatatctccaaatccttcacatagttttttttttttatagataaatgctagtttttagttttgttaagatggaaaagaggctattaatattatcatttgtaaaaaagatttgaacccattatttcttcttcctttcacccttaacttctagttttccaatcatccagggcaaccttatatcttcctatatatagtagagcacctagattgtttaagggaggacaatcattttaataaattcacatgttttttcttaacattttatattttgcatccctaaacttttatattttacaccttattttatgtatttgaaccacttcctcattttaatatgttacatttttttttaaaatagtttgttcccccttacctgagatcttagatctgccactatctatatagtaaaagttgaatgaatctaattagggtgtacacaaattgtgtttggtaaaattcaatatatacttaacacgaacaaaatatatactccaatttaagttgggatgaatttgtgtatttttttttttttttttgtcaaatttgattagaatcaactctgccaaatgaatttcggatcaatcgagttcaaaagaatctgaactggaaatttacattttaaaaaaatattgtaaataataaatgaatgaaaaaatatatataaataataattagaaaagaaaatatcacattaattaattgcatcatcagattcgcaagatttcaaaataaaatctattacccaaactcaaagcaattgggtttgaatgggttatgttgggttcgacccaaacagcataaaaacccaaacctttatgtttagatcaatgttcgatctgttctggttcacaaatacctttttaaaaaaagaaaatcggttcacaaatacataaacttatgaatatccctaaatctaatgtttcttacaaaatattattatttgattagaaagcttaatgacaagaatttatggagtaagttttgttttactcgaaatgaaaaataaagccatacaaaaagctaatggtcttgaaatcatggaattaaagtgaactatttctatcattttctatttgaagccaatctattaagttgtgctcatcaaagttaattaattaattaaccaaatgcatgtatgtttccatgttgtaagacttccgataaaggactacaaaactcatctgtcaa

SEQ ID NO: 3136 - DNA, 4705 bp, Glycine max
  Intron number 3 from transcript Glyma11g26740.1 (locus Gly ma11g26740) derived from phytozome v7.0 (chr-ID Gm11; pos 26113897 to 26118601 reverse strand)
attacaatattaaggtaatttgtcttgaaattggttgcacctttatagttttacttttaaagttatgatgatttatttctatggtctttgccatctacatataaaacaagactctctgtatttcacaaaacatacattctctgatgagcattggtttggtttggcaaaacatggagctaatctgttgatattgttctattctggttgttctgcatctgtcatttgctttgcctttctttattccaactattataattttaacttttggtattcagctgttattactggttgttgttagagagcattccatgaattaattccccctccgctaatgtttgtagacatccattttatcttagacttaataatatttttgaaactttggtttttaactgtactgaatggcgttgtgtgattaatgtagccaacctaacctagagtgataaggctttgttgttgtggttgtatagatatgactgtaaaatcaaataaatagtattaatttgagttaacataaaatactaggtttgagattggtacatatcaacttgaattaaaattgttacttgcaaaacaaagtgaaggcagcaaaatgtgtcacaagaaagggagagagggtttaaatgtgacttgtcaaaaatttgaaacatgataactcaatttttattgatttctaacgtcttattgtttaggatccttctctcacttcaaaagattccgagtaacttcagcttttgcactttcagtatttgaacttataagattttaatatatttaagagatgcttctgaataatacttaaaaatcgttttgatgattttcatgattccatccatatagacattttcatttttgctgctaacctgtataatgataagaggagtgatagcaacacactctctaatacactccttcaagcacactctctaattggtaagtttattgaaaactacaaaattaggagatagaatcaatgaatatgaagtcggacctacaaaattgtcattttcagtaaatttttacctataagagagtgtgcgcaaaagagtgtttctaatatttctctaatgataaatagtattttcaatatagtttgttaatcatcaaaacatattacaaaattctttcattcaaagggactttggatcttgtttgccaaaaattgttatacactgagcatttattattcttgaagatcagttatatgtttatataatgatatttgtcatttttcttggattttattagagtattgtaaagagagtagcagtattcaactgcactctcgggtagtttactctagttaattcagttaactctagtgagttagttactgacagctgttgacagctttcataactaactatccaagtctattaatatcaagctgtaatacagtattcagtggccaataatatatcccatttctctcctaaagtttttttttctcaaaatatcttctcttggattctgttagaaatctgttatggtatcagagctcggtaagatcatcaatggcggcactaaactacgcattcctcacttcttttcctcatttgattgctcataaacttgatgattcgacttttcttccatggcgccaacaagttgaacctgttatcaagtctcattgtcttcaatgatttgttgcaaatcctcaaattctaccgtgatttctctccgaagaagatcgtgcagttggagttgagaatcctgcgtatgaggtgtggttacaacaagattaggtacttcttacttggcttcaattgacgatttcaacgtcgattgtctcgagttttaggatttgctcactcctatgaagtatgggagtggattcaccattacttccacaagcaaactcaaggcacaatgtgccaattgtgcacttagttgtgagctacgatgcttggaggaaaatcggtgcgagaatttttgtcgcagatcaaagcggtttccgactctcttgcctcggtcggaagttcaatcatgctttaggagcatattgactcgattcttgaaggtctctcgtccgattatcacttgattatcgagataatagagagcaaattcgaacctattcctatcgcgcaggttgaatctcttgtcttagcttatgaagctcgtttgaacaagttcaaacaaactctaattcttcttcaattaactacacacaagtgcacaagtcctcgatggttacacggtgccaaacaagtcctttcagcaaatggaatctcagtttttcttactatcatggtggctctagtcatggcgttgtttttaacctcggtggtggtcgaggccgcgatagtggtcgttttgctgactttcagtgccaattgtgtcgactgaaaagtgacggcggccggtggtggccggaaaaggagctgcaagttgaagggcccactagaatgcataaaataaaggaaagaagttcactggaaaaggtgtggtgaatataaagctccagcggggataaactgttttcgttattctctcaacctggctctagataccatgtataataagagacaataaagagggatatttgactgaaactgtgtatcaaagcacacagcagatgctctattatatagtgatcattacaataaatattgataatgagaagatattcagtttcctctaaatcaggacgaagactagggtgggaaagataaatttatttcccactgtaggaaaggaaaatgtgatgtaatatggtctgttagatacaaacaatcaacggttaagaaaagtgaggatcacggtagaagtgcctacactaaattaaattaaaaaaacatcatttttttgttctttctctttctttcgaatgcataaaactgtatctctagccattttgaagccggcaataggcgacgactgaaacatttgcaaggttggattctgacgtgccgacgacaaatcgacttagtaggcatgtggaatgtgaggcagcggtagatgatcacggtagaagtgcctacactaaattaaattaaaaaaacatcatttttttgttctttctctctcacgtttctttctctttctttcgaatgcataaaactgtatctctagccgttttggagccggcaataggcgacgactgaaacatttgcaaggttggattttgacgtgccgacgacaaatcgacttagtaggcatgtggaatgtgaggcagtggtagatgggcgcgtggcaaaggagaaggtgaaaatgagatcattgattccagatatgttgtgtgcgaggccatggatctgaggtgcgagtctgttttcagatctgaagcgtgaattgtgtttatagatctaacgctcaacgtgtagcaatgtcggagagggaggtggcagtcttcgacacgctggtgccatcacaaggattgacgaggatcttgattattgttcttgttgttgttggggtgtggggcttgagccatttgccgaaaggtttgagcttttagtgatttcgggcggtggtggaagattttccggtgaaaaatatcgaactgcaagtgggacatggcttcgtggatgacaagtgatagatcagtagtgtttcctagaagatgaagagcctcgcggtgggaggccgcacttgatcatgaatggtgtcgacggtgctggcaaaaacaatggaaaaaaggaagggaagaggagaacgacacattctgtttttttctagtttatttcattgtaagcattttcattgtaagcatgcccaccgtaatccccacttattttaactgttgattgcatctaatgccctatattacaccatgtttttgtttcctatggtgggaaacaagtttacctttcccaccttagtcttcgtcctaaatccgatcctaataaatctataggcctgctggattttagattctcactggattgcagtgaaaaaaatcttaattcatcttaggcttgctgttttgtggcaatcctactctcttagagccctctgcgatgcagactgcgaatctgatattgatgacagacgacctacttctggtgcagctatctgctttggtcctaatctcatatcatggtggtcccgcaagcagcaagttgttgcaagatccggtacagaagcagaatatcgaagtttagcccaaactactgcagaaatctcttggatccagactctgttgactgaattgaaggttcccttgagcgctcccattgtcttctgtgataatcaaaatgcagttactattgctcacaatccagtccttcatgcaagaacaaagcatatggaaattgatgtcttctttgttcgtgagaaagttctgaccaagcaactcgttgtccatcatgttcctgctcttgaccaatgggcagatgcactccccaagccactctctcaagacagatttgtttttctaagaggcaaactcagtctccaaccaccttgattttgaggggggggggggggggtattagagtagcagtattcaactgcaccctcaggtagtttactctagttaattcagttaatcctagcgagttagttactgacagctgtcataactaactatctaactttataaatatcaagctgtaacacataattctgtggccaataatatttttcatttccctcttggaaagtttttctttctcaaaatatcttctcttatattctgttagattttatttgtctttttggtgcagcttgttttggagggtgtacgggcgagacagaagca

SEQ ID NO: 3137 - DNA, 2277 bp, Glycine max
  Intron number 1 from transcript Glyma16g28620.2 (locus Gly ma16g28620) derived from phytozome v7.0 (chr-ID Gm16; pos 32545210 to 32547486 reverse strand)
ctcaaacggccgcgttccgactacggttcgctctctctctctctctctctctatgtgtgtgtgtgtgtgtgtctatatatatatatttcctacacgctctctttgtttcgtgcaatttgccctctttctctttcgttgtttgtgcaagtttgtaaatttcgattttttctttatagattctttgttgttggttttggcaatttgattgggtgttaaacgacgccattttgcttgcgcgttctcgcttcttagggctgcgtttcgagtggtgttgttgtcgtttaagggtgcctggctttctgggttcttatatttgttgggtgtttgttaaatgagtctgttatgatcacggtgttcctgtgattgatcaatttttgttctgtcggaattttacgaggttttgttgatgtagaaaaacaagggtgttttggactttatgcattgcatagggtttatatttggtgtgtgaattccatttaggtatggggtactatttggatttcagtttttataagatattggagagcccaaataagttgatgcctctcttttattttgtctgtttcctttgctatagggtatattcgaattaaggagttttgggagaggggagtaattttttcatttgtaaattggaataaaaatatttaatgtttgattgtttgtagagatgaataaggaatgattagaacttaggttgcatgataatctcatttggaaaaagaatttgtcaaataaaatgaaccttatattaaaggtatagttagttacaaatttatttgcaagttagttacttctcatattgtatataacagccacctagatggtttaatgtaatcaattttttctcattgaattagttccattttgaattccattttactagttctatcattctttgttctcttaggctctgccatgaggagggttcctcttccattgctgcattgagagagctctttctctctctcaccttttatccagactgttatgctttttgtttgagaacagcatttctggtggaagattataattatctgcaatgtatttggtggggttattgtgatgccatgttgatggagttgaatttccaatggatttatgggttaaacttaagggagctgattatttggccttacaaagttagggattcatgttaggtttgttagattttattgtcttaattactaaattgatattgggcctcattggtgtgccatgtttgtctgacatctgcatatgtggccttattcaatttcctggtgttttcaagattttatgggttgaatataatgtgatggattgattaattttttgacatcataaatatcttaatgttttttccttttcaaatattagcacaatgtcaaggataatgtggagtatcagtgtatttgtgctttgagaatagaggcataattataaactaagctagttggacaaactaggaatctagatgatgttgcagggctacaagcttattcttgtttctatgctttttagattttagtgattaagttcttactaggcatagtttccattaaaaagaattgaaaattattctgggtatcatttgcatttctaagctgtaattttcagatagatgcaacaatgactgagtgacagcaacaataagagattctgctcctggaattccatgctgcctttacagtgtttctgttttattgtggcttgtatttatttttgggcttgactttctacatcatgctgtttgggtcttgttagctttaattaggtcagcagagtgtggttaatatctttatagtgaaccttagttgcatagagggcaaaactcaattacatgggtatcccaaatggagatgaggtgatgactcagaatctgtttgatttccaaacattgtttttgttttctattttaattttaatttcctagcagtagattttatttttaaatttttttacttcaggaacaatggttggcatagatttattgtaatttcaaagttgccactgcattttcaacttccatttcctgttttgaaaggaaacatatttttttttacatctgatattattattaaaattcactgagcacattttcaaatgtgtttttttccccaataaaaacagaaaatacatgaaccgtgaacagccttaatttcctattctttaaaagtattttgttattgtttatggaaatgaaaatttaattaacctggaatgtactaataactctactaataatattatacatctttgtcaaatctgttattattttatttttacattgcagat

SEQ ID NO: 3138 - DNA, 2086 bp, Glycine max
  Intron number 2 from transcript Glyma09g14860.1 (locus Gly ma09g14860) derived from phytozome v7.0 (chr-ID Gm09; pos 16859033 to 16861118 reverse strand)
tgtgtgtgcagggctggcgaatctctctgtctcaggttagagtttctttcctctcctctctgttggatttggatataagttttttttattagaggtttactctgcctgatgtagtttttaagatgagatcagtgagggtggtaactcttgtattctcaattgcaaagagctgactattaggagcgtgaataagttagatcagctacgtactccaaaattggcaaactatcggtgtgcacgatatatatatatatatatatatatatatatatatatgcctagatagagacatatgacttccactgacatttctaacacaactaacattttccgattaaaaaaagatacatatggctctgtaccacacatttatggcttatcaaacaaacatacaatatattgatattaaacctcaaattttcttttaccatttcttagttcttacatatcactgccatagcaaaatgggaaaccgatagagttcactggtcttgtacatatcttttgggttttttcaaatatcacatatcatagctcttatagttttgggtcttgcactttgtgtacttctttgtcttgcaatatcactggtctcgcatgccctctagaatcaccaatcacatctattagcatcctcttcactgaccattgaacaaataacgtatgtttctggtcattcacattctcttcactcgattgaagtataatctccttcctctgtcattcgttttgcagtaatatatataaataagcagtgggatctaaaccatattatatcttgaattttgaagaatcttctctattcctgtatttgtgttgtatcataccgtgtacctgtactaagtttttgggttcttaggtagacctttatgccatgtgatttgatctcttggttgcattttaggtgtaacactttttgttcctaattagttatctataagtttagatgattagaaacctctcagttgaattaaaattttaaaacgtaaagattttttttttttttttaaatcagtcctcactcctcacacttacaaatttgttcaaaataatccccatgtgcagtttctgttataacaccgtcagttgcctaacctattaggcatttctttgtctagtatgtgctgcttcttgtttagatttactttttatcttgaaaaagccactaggtgctcctttcaccagtatgtgctccattttttatttagtagatgctcctttagatgttctatgtctcactctcttgtggtaaaatgtccaatatggactatattggcagtggggactactttcaaaacattttcaagtgggagtgggactactgatttgagaaaggatcaattaaactaaggtgcccctgtgccacaggcccaggctcctcgctttgcaaaggtatggggagataattgtatgcagccttccccttgtatatgcaaagaggttgtttccagatagaaatccatgaccaaccggttaccaaggtgcaactttacttgccctcagtgaacggcagataaaaaaaaggatatggtgactaaatgaaattaaaactataagcacattttaatttaatcaaatatatattcactgtagtactgacagtactgtatactgttaaaggcgaaataagtagtagaggtgctatttgctttgaccatgaggaaatctaaatcttcatcatctcatctcaaatttcttattttgtaattagtgtcatgaacataagagtatgttaagaaccaacaattgaaatgagaaggaaaaaaacagaaaataggagagaaaactctcctccaagggcttccccttcataaagagccaatgctctacaaatgataagatcttcctctctcctatccttgttctcctatttatatctaatgaacccctcttactaactaactaactaactaatcaatatcctaactgtagtaactaaatcattaatagtctaagcatcttaactaactctcccttctcatatcctaacagagtatgccagccatttgttgctaattttgctactgataactgcctagtgcatgtgaataaaatcttttatgctgataaacagattgtggaagta

SEQ ID NO: 3139 - DNA, 1597 bp, Glycine max
  Intron number 2 from transcript Glyma17g14820.1 (locus Gly ma17g14820) derived from phytozome v7.0 (chr-ID Gm17; pos 11593961 to 11595557)
aatttgcttgatacaataaggcagctggaggtaaatttcattagtgtgctttacctttggaatgcttctgactatttctttgtttgctctatttgaacactattgcgtattagctcactcctcacacatcaactcctccatctcaaatttggtagaataacagatggagattctctaaattttgatatatttccaactttagtttcttcactccccaaattaatgctaagttgacttttttttttttaaggatagataaatattaattgttaatttattatgttttattaatagtgtatatcgaatttgtaatattttttttcttgattattcaaccaccttatatcttctgagctgactaataacttcaatattttatttccaagtcccaattatcttatactgtgtaataagatttcttttttttatcatgggtctatcaaatggtaaaatgtatttctggtctttcccaatacccctaattctaccttgcagtgtggagatagagttttaacttttcaattgattttttttctctaaaatttttgttattttttttaatggactgctgctaattggatttactgtattagtgcattattatattacattattgctgtacttttctaagtttgtaaaacacgtgggcatattgcttaagatatgtatggctctagcttcctataataagataagctattttgtattggtgctgttcaaacttcaaacatatgaagcatcaaacgaggatatcaaatacaactgatgtctaaaatacaaggcattgggactctatatatataaaacaaaaatttaaaaatttactttctaaagttattctttacaattttcatatcataatgactttcacaaagagaatactaagagaggtcattttgcactacaatcattaaaaaaaaataacaagaccagaagatgaatcatatctcttaaaagttaaaacagctggttaaatcatgtgataatgagcctaaaataatgctaagagtctcacaatatatataagttgagtctttttttttttaataactgaagtttttaagaagggttctactaagagtaagtgtcaattcactctcttgtccggtgtccaagtcttgttaaaaaggtgtttgagctgaaaaaaatatattctttaacggtgtccaacttgccgattctctattttgtagaggtgtccatgctttattggctgaaactaaagtgggactttttttttatactaattgcgtatgttacatcacatgatatgcttggttcatttggtcatgcatcttgactgatctgttggttttgatggcattgtttactgatcctctctcccatccaaagaaaaatcataatcatgaaccatggtactcataatttattaccatccccccttcatagttattcttcttccttgctttttatttgaattctactatcttttctgtatgttgtatctgtctgtcagcatgtgtttagtttctagatgtggaagcttctgttcccctgtatgtgactgactaatctagtctattgttattgatcttgaacaggctgctaatattgaacctgaggccactgccttgca

SEQ ID NO: 3140 - DNA, 1241 bp, Glycine max
  Intron number 11 from transcript Glyma10g35280.1 (locus Gl yma10g35280) derived from phytozome v7.0 (chr-ID Gm10; pos 43516588 to 43517828)
taagaatcttgcggggcaaagtgacacgaatacaggtatgatgatttcatacttaataatacggctcaatataagccataatgtaataaatatcttcctatttttaacttcttaatttgacttccactacttttatctctcattttaagacttagttagagaaaagggtataaatgagaagatagtgattgatgttgtcttgaacttcttaatggacgataagaagaaacaaatttttctttcaaaagtggacatataaaaagagagtattgatgtgaaaaaataaattctttatgactttatggaatacaacgattttaacgaatcatgaatatccggacatttacttctttgattttgtcattagaggtttccacttgcaatttacttagtgaccgaatcttagatcatccatttcatataactacccttcccaagtcctggagctagaacaataagcaactcttaatgtgacagcattgataaaaaaattagcatgcctggatgaatatgaacactttcaaacaattactataaataagcttgactaaagagggatctttacacaaattatgagcctgaggtgaaatgaatattaaacatggtaagttggtaacagactaataatgtcccctcaaaattaagtgtgaactactcaaaggcttcaaaaacaaactattttgatatttatagaacttaatgataaattttgtacaccacaaaaagcataacagtatatttaatttaatcacaaagaatacttctaccctttaacatactcaccttggatggatggaatggggattgtttctaatgtgtttatagggatgcctatttatatagattagattttatccatcataaaaataaaaactgattccataatatcaggatgtaaatatactttcaacaactttataattaaaactgaaatcgtgttaataacttggaatcgtgagaaaaattaggaccactttcatttgatttcaaaatcaaaactaacacttaaaggatacaaatgaaaaggaattttgaatagaaatataccattttgaaatcaatacgacttacaacgagacacccaaggatttttaagcaatgctagaagaaatatcaaaagatacttttgtttcccactaattagtttaaaacttacttgcatagtttatgattaatactgtgactatttttacttcatgtctacaggcagcactttgcattacaattatcacagtaggtgt

SEQ ID NO: 3141 - DNA, 6284 bp, Glycine max
  Intron number 1 from transcript Glyma13g17840.1 (locus Gly ma13g17840) derived from phytozome v7.0 (chr-ID Gm13; pos 21536013 to 21542296 reverse strand)
cgtttctgctggccggaggcgtggcgcgtaatagtgtacttcttcgaacaattcattgttgccattaaacctgcaataatatttggaatgtggatttggttgttgttgttatgatgatgatgataatgttgtggaatttctgctttgcttttggttggttggttggttggccgggtgctgattgttgcaggtttttggttagggctagtggttgcatggttggaatattgaaatgtcaagcattggtacttgtgttttacctcatacgaatgcagtcgttgcatgccatgttgtgatacttacgatgcacttatttatcatttaaaaaagtgaattatgtggtggataattggatattggccttgcgttgtatggaatggatgctgtatttgtgtcatggttgatctatgcgtttgtcaatctgcttcaccagtaattgtgtgtctggttacctccaactcagagacccgttgcagttggtggtaaaattttcagctcagttattccttgccctgaattctcattgattagatgaaaataacatctttcttgtaacttgtctcaattggatttgaaatttctgggtttttttcttttcctcttttttggtctctggggttttggtgttagtaataaataatataagagttaaagacttacttttagtctggtttatgataaaattgatatgtaaatataaataagaaaagaatgttagttggtttgttgggcagctattatcagttaggattttataactgtaaactgttgggttgctgccaataaataatgaatggctgatgtattttagatagagactgaactggtaatcaagaagtgcagtgcacggtttctctgctacctgtttctttccgctctctctcctctctgttccgttattcttctctcatcccctctttctttttgtttctttctcttccccacctaaattctatatcaaaatcagtgattaatgaccttatgtgagattactcaataaattagtacaaacttcagccttctgaaaactgatagcaaatgaatggtttagtgcaaatatgccaaacatgttagggatgctactttaggaatcaaggctgctgataaagaagcatatattgttcttgcaggctgtaggttttttcctttccctcatcattattacacttttagtttgggatatgtactagtgtgttgctttcattagattccaacatttagcttattttcagatttcagttcatttttttatataaataatataagagaaaattgctggaatgcaacagaggttggctttgacatgtaactggtttggctggtggaataagggtcaattggtggcaatgctggtggttggctttgacatggtccatatgacagcagaggaacaaaatactgttttccaatgaaaccttcaatggcaataaattgttggatgatgcagcattcttactctggacatggcttagaagtttggagaaagattttacaacccattttaaccaatggtcaagtaatcttagagttggttgtgtgtattagccgaggatagcaaccataggataacagtagatatagactcttgtatgtagtcagcttttggttcctatcaagattgtattaagcctgatatccagaaccaattgtatggactatcacaattatgtactctttgtacctctggtacttcaatatatacatatattatatttgctgataaaaaaaaaaaacagtttgaagataaaaaaagatgaactgaaatctgaaaataagttattcctgtatgctgctcttccttgatatcaagtggaaagttaacctctaaggcaggataacatctaaattgggaaaagctctttgtcaatggcttttctagtgtgtttcatggatatgggtacaagtgcaggtacacaacgaattttctaaaggtatgggtatgagaggatattatcataagaaatttaaaaacataaagtattaaagtcataatataaataccattctcttattttcttactcaaatagcaaaaacatttaaagaaaatacaagttgaagggagtgaaacagtaatttgtttggtttagtaaggaaccaaacaactaagcaacaaaacttggtgttgtgtatggactgacttgttcttgaggcataagtgagtattgggtggggtagccttggtacccaataagtactggtactgaatatgtacccagtgtgggtacaacaacttttgggagtacccatgcataataacttttctgtatgaagttcaatatgtcttggctcctacttccaatgtcttgtgtagaatcactttaaagaaatgcaacagggttcttcacataataagatcaatccaaatcattgggagtgatcaagtgagggtataaatgcttaacatatgtcctggcttcattcaaaacatgagtggatgaactggggatattgccttttgaaaggttatgtggatgcccaacagattggatttgtttaccaccataatgttgattttttttttttataaagtcgggttcaacctttcagttcatttttcttatcttcaaactgttgcattccagcaattttctcttttgatactagtgcttgtttatccatctgctttcttgtggttgtggtagacactagacagtactaccccctgttgttaggatgtataatgagagttgaataagaacagctgctagtcagttattccattagttagctagttagtttgattataaataggggcattctgttaaaccgttaatcttccacaaggtgacaaaacaatatgatgacttaagtcaacataaatatttactcactcataagatttttctttttaaaacattttctaaagcttgatattgtagttgaaagaacatttgcttattgaatgaaactagggaaacagtacacaattccatatattttgagaggtgtggattcactccttacactgctttcttaatcaccaaaagttcccttttgtaggcaactactggtctacaatttataatcgaaatccacccttaatggacctaattagctgcaggtccattccccttctttctaacataaacctacttgatcacaactctactatctgttttaaatatgtaaatgtaattagcattaatttaggacagaatatttcctgtgcatatctttgaaatttatagcctgtaagtactagatcctatttatattatcattaacctttataagtggataagttcttgtatttcgaatcagtaaatgatattcaaaagtttattccttttgaacttgtcgtttgagggagggatttcttttgttttcatagtttcatttgtgtactgtctggtccgacaggcatctgtggtgggagttgttgtaaagtcccacattgcctatttaattactgaggtgcggtttatataccttttgggaaacttctggtaatgtcaattagttttaagatgaaatctaacactataattttaagtgcctaatattatcccaaatcagagatgcttacccaaagaaaacttgaatattatggtcccatcaaatgcaatagtagcacatattgcatataaacttagcctctttacttccccactcaaacaactaaatgtaataacaaaaaattgtctaaaatgcttagcctctttacttctaactaagccattaatgttgttaatgagaatttgatccaagcagacctaacatttgccataaaagcataacaaatcatccataaagaacacaagctaaattttcaaaacattcatttaaagttatatttcatttctcttaatttttttctctgttgaaatgggaaattttcttattatagatcatacaacaggttatgatattgaatgttattatattgggattgtttatcattccactatatgctaattattgggtgtgattccacaatatgcccagcatataccataaaagcataacaaatcatccataaagaacagaagctaaaatttcaaaacattcaatgaaagtcatatttcatttcttctaattttcttctgttgaagtgggatattttcttattatagatcaaactactgggtgtgattttgaatgttattatattgggattgcttataattccactaagtgactaactatttaaattgttaatacttaaattgattcatggcctataatacattttttgcttcaatttctctccttaatcagttcatggatattgtcaatacttaatctgctcttccagatgagaaattcaccacgtaaactaataatatcatctgtaagcgaaacttacatcttaaaatgtagatacatcgcaacccttgccttttttatttcctttcttcagtaaaggcttaacctatgtgtcattagtcctttctgctttatttaatcatacatttctatgtcagtgtcattcttacaccatttagacttcagagggaagtaataatccgggttttttttttcattattatctggtttacactttataaccatttgctttaatttaatttacttgtgcctgccaatgatggaatgtatatgtttcatacccatgtcctattccacagctcaacctgataaattgtgttcaatgttagcaaagaaaagccagtacaagacatttaggaatttcagtagttggatgattatgtttaatgagaaaacttgcctatttgcaatacttacagcaacttatgctacaatgtggtagaggagatccatagaaagggatatgcatttgattggaatctttagacaccgactctcagtcgattgtcatatgcattacaattcaactaaactgcacagaatcacgaacaaggttcttccttttatcttttttcttcttgttcctaattgtagctttaaaaaaaaaacacacacacactcacacacaaaattcattaagattgaaaagataggtataaatgttttaggataagaaatcattgagaactataccatgaaaaaaaggaaaaagacaataaactaataacaagtaaaatgcaacatgacactttgatctctctgaaggtctaataaagatacccctttaacaagaccattagcagaacaccacaaagaagctacatgaactggttgatcctgaatggactcaagagtcaactgatgaccgataaagattctagcatttctgtctgaccagatacaccagataactgcaaattgagaaccacacaggaactgctggtgtcgaatgctctaaaattaacacatgggcattgctggagattgtgtaaattgtttctgtgattcttctgttaacacctgaacaggtacagatctttttcggtctttcctgataacgggtttgaaagtttcttgttgttaatactcctccttgcttatcgggttttcgaaatgatttgtcctaatgttcaatgtctgagaagattcaataaagaacctccgcacaacttttggcatttggttaactctaacattttaatcattatggtgattgattgagttttatatgttataaatatgtttgtactttgtacttcccattctccgtgaattttccgagattacaaaggaaggatatttagcattttcagctcttcactttgatgagatacctggacttggattcctggctggatagatgaggccagtgtggttcctttgcaaataatcctaaccctataaatctgtttgggtctatttatttacctttctatatgcggtcttgatttttcccttcataatgactgaacaagggtgtatgcttagtgctgtgattgtctttatgttaatggggtagaagaaaaatcaactccccagtttcttgagttgttgatgtctcaaatgcagtgattagttttatgaatactggtataatatgatagagcaaaggcccttgggtcaaaatgttttatttttggctaaatcaagatccattggcaaagatatggggcgagattgtctttggtggcattgactgaccacatttatggtccactttctcgcaaagttcattggcaggtctattatatttcaacctcatttgcttcattttagctcttcttatcaaccatgttggtgtaatcggctttgtccaattttccctcctagtttcatttattccttttcatacaaatgcttgacaactaaatattagcagggtttccgttggctgttgcaattcatttttgcctacaattacttaacatttcaaacatctaatattccttttttcttctcagtatatcctaagagttgaaggctgctgtactgtttg

SEQ ID NO: 3142 - DNA, 2543 bp, Glycine max
  Intron number 7 from transcript Glyma08g22950.1 (locus Gly ma08g22950) derived from phytozome v7.0 (chr-ID Gm08; pos 17467612 to 17470154 reverse strand)
gtggggctgattggcaagaagaagtataccagaaggtacaatgccatttttattatcacttttatttcctcactgaagctttgctagaacaacagaaattagtcaagcaaaccataatgtaaaataaaaagttatatgatggtttttattgtgagaatttttaattcattgtaaaatcatgaacccttctctagtcttggtggaaaaatcactttttttaaaaaaaatatccatatttctgaaatcttctatgcattttgtgcaatgtttaaatgagttatatggaaagatgtgaactacaagaatacatactcttgctgtttgacaacaacaaattcaatgttgtaggtttgcataattagcatagggttttgatcccattatttctttttatttgcagagatgtttccctaaattctttaattaggatagattaggacagatttgtttccctttaaatcctatctatgttaaatattctatatatactataattagtagttgtactgtaagtctataatcaattaatattcagatattttctctttcaagtttgtataagagctttgaatcttggaactgggagacactatttcctcatcccagaaccctagaatgcattcattgaagctgccttcttaactgccacatcttcaagattttttttgctctcgctgccttttttttctcccaatgattccattgagcataactgccactttttgctgccaaagttgctctgatcaaatcgaaatcgccattagaagatctactaagcatttttgggtcagatctagaagcaccactgcccaacatactcccatgtgccctcacacactttctctgcacaggattattttctgcctgccattagtcctattcaacttgcctgggctctctacatggatctgaccttaccttgtctaaccgattctcatgggtccacccttcttccaaatagctgtaacttttcaacttggagttagtgtttaaccttttttgtatgtagagctatcaaactaatgatatcatgtctgacaaatctctcaaaaactctcagttacccacttacccttatggtaacctttttttctttgtccatcactggtaatggcttttttctcaatcctttaatgctttcaatactatttcaaacaattcttaacttcggtgccagtttgccaccatgtatgacctaaaacttgtcccattttttattaacctttttttagtaatcataccacaattgtggctaaaagcaccactcctcaatcactggttgtgcacacattaaaatccaaacttccctatttctagataatgtcctacatgtttctcaactctccaataatcatatttccattcacaaacttactagatatttaaaatgtgaagtaacccatcatttccactgaaggtggtaccaattataagttttctacttcctatcatcaaatgagctaaaagactgatgcttttcaaattaggctccaacataagcctcgtgggcatcctccatttcttaagtcgttgtttctatctttgttctcaaaagaatttgtcaagtccttttaatgtgatgatgtttgttagtttgctaaacatcattgatcattttttctcccaatattgataaagtactaaatcttttgaaatgattcgttctaatgtgcggaaaagcagaatgcaaaatgttgttgcaaggttgaatgctgaggcaaagtttaagctatggcacaaaggatttgtgtgctatcatggataaagatcatagttgatgaccttaaaatatgaaactcctataaatttatttggcaataacaggccagccattagtaatttagtattgcacacaactttatgataggataaagcacacaaagatagactattcatcaaggagttatagaccaagaaacttcttacaaagcaattccaataactcactagcaaattaggaatgatagatatcccattcactagcttgaggggaagtgttgtgttgcataattagctcatttattgtttccttgtaaaccagattagctttattagaattagtctatacatattgtaaattgcagcagtaccataattcagaaataatacttagatattttctctttcaagttttagttttatgtcgagtgaaatttcttttgtcactaccctttttatcctcttttagtttctgccagcctgccattaagaaagactctttgaaattattcatctgatgctatattgatttgaactagtgcaagttggtgttattttttagagatcttgatttaagcacaaatgtgaaacttgtgatttatgaggccctgccaaaggggggaaaagaaacttctagttatcatcttcgttggtgtcaatgcaatagtgatatagatgtttttacatgagagatctccaagttactgatatttatttgatttcattctgctgatttcaacctagacatccagaccatgcaaaatctcaaggttactaatgttttgattatttgatttgctgatttcactctacagctccaaacc

SEQ ID NO: 3143 - DNA, 2365 bp, Glycine max
  Intron number 8 from transcript Glyma03g29230.1 (locus Gly ma03g29230) derived from phytozome v7.0 (chr-ID Gm03; pos 37208364 to 37210728 reverse strand)
ctttgcaggtaaatctattgttattccatctgctatagctttttctttttttttttttcctttttttacagtcttacactctgtcaggattaatgagttagatgggtggggagccaaaatggacggaaaggatgaaaacattggatggaaaaaaaagtctggggatgctgatttgttgccgaagagtttaaggaccaaaaccataaatgttaaaaagtttgggaactaaaaatcattaaatcaaacacaacacttaggttacacgaacccccaactaaaattcgtaccatagaagtttagaagagagcttgttctacacatttcttgaagaccctccctaagcattctcaccctgtctgattctagcttctctccttgtaaggtgaggattgctcctcacttatagagtttatctcgacactatttttagttgatgtgggactttaacatgtccccttttgcccacgagtacttgccttgtgaaactttcaacacaccccttctatctaggggttaccacaatgtaggtggcttttccaacacaaataaaagttgcagtcctctcaaagccaaagcgttacccaccctctatttttttgtaactgtcaacacaatatatcctcacctaattgcttcttgtggagccatatactacttgcgggagctattccaaatttccttttaaaccttcttttgttatactatattatatctaagcatttgtatgtatgattgttgtttttctcttgtatatattatgtatataaaaaacaatctcttatttttaacatatatattgtgtatataatataatccaaacatataattatttatataataaataaattattgtttatatataacataactgtaaataaataaaaataaaccataaatattttatttaaatttttatataattatattccttcataaatatattatataataaaatattttatccaaactttatatataatattatgttccttcctaaatattatattatgttaaccattttcaaaatctaagaaggaagaaaactatgtaggaatcaaaagatgtttcaatattacaggtaggggacttttacatggagctgtgacttaaagagggaaggtttagatcaaaagtgctcaagagttattctctcacttggcacccacttatattaataatatatgatgaagtacaatagaaaggaaagatgtgacaggttcaggcctaagggagcctgccctatacatagccccttttagggtacaacaaaagcaaaaaaaactttagagagtaagacaaatacaataaccattacaaaataccaattactctaacactgtgaaacactctagacgatgtggtgggaaataaatcatgtgtctctataatgattcaataaaatttctttgctgtttcaaaagcaaactaaatttatgatacatcatttatcttatttttggctactttaggagcacctaatcaccctaagcttgtaattacgatcttatttctaggagggacagattcaagagtgtatcaaaggggggcaaaattttttttacataattatttaaatatttaagttctaataaataattatttaataataattttttaaaatatgtattattaatttatggataaaattagatatatgatctactactaaattttttaaagcaaatatcatctcaaatacatattttcatatatgtttttcattattaatattttaattttttttcatatatacacaaagggccttgcccccccttggatttgtccctgatttctggtacataacttttttctggatgttatactttctaataaattataatgaatcttttttgaaaaaaggaataattttttgcctctaaaaaatctaaatacttttaagttgttggtttattgccatcattgttggtgagatatgagatataaagtacagggagaaatgtcagtgacacactctttgaactcattctttcttattagttgaaattcgttgaagatcacaattttgtgggtcctacatcatatttattgattctttctctcctgtttttgtagttttgattaaattccaaacaatagataagagtgttagtaatactgtgtttctagcactcctcaaattacaagaaaatgcttgagtgctccattaatttgtgttgaaactcaattcctttatttcatctcctaacttaaattgtgttgtaagttggaaattagtgtatgactaatgttgtgatgaatgagttgattcttaccatttctagatcaagaaattgtcattttctcatctttttattatttattctttacagtttgcaatttcttctgggatccttacagcttgcac

SEQ ID NO: 3144 - DNA, 1225 bp, Glycine max
  Intron number 1 from transcript Glyma09g28030.1 (locus Gly ma09g28030) derived from phytozome v7.0 (chr-ID Gm09; pos 35022787 to 35024011 reverse strand)
gccggggcctccctcgagctcgagtgccactacaggttccgcctctgtccccttgctggtttctgaaatttcaattgtgcttaggctagcttatttggaagaaataataatattttgaactgtggtagttgtgtggatttgctggaatttagaatgtgtagtaacaataaggggttgggtctagcatagggggttagtctcaataatgtggcgaatcactaacgaggttccgattcccgttgagagaggtgctcacatttagtgtctatccacttgttctggaatctgaattgtgattagattatcttattttaaagaaatagtagaagtagcgattactttctcagaaatggtctcggttagacatttgagctgtggtaggtgtgtggatttgccggaatttagaatgtgtagtaccaacaagggttgggtcttgcagaaagggttactcctatcaatgtggcaaaccaaggttcaattttcaaaagagaaagatgctcacatttagtgtctgactatgcttcaaacatctttgtctctgtaggagtatacccgggagaaataaaaaagaaaaagtgtagtgaagaatagagtttttatttctcttttttttttttttctaattcttgtttgcaattgatggtacattgtggattgagtagtagttagtgataattctatgtgtttggttaatggtgctgggatgtagatttggttattttcagctttgttagtgcagaatttactgaaggagttgagtgtggagcatcttatgctgcaatgtaaatctaattgtgttgctactgctggagcatatagtgtaaaatttgcaaatatttatgtttctttaaatattgatttgcaattggtaggtatattgtggattgagctatggaaatttcattagtgatcaccaagtgggttttcttaatgatgctaggatatagattagattgtttttagcttcttttagctgttaagttttctgattgactgcgtgaatttagaatgtgaagtctggaaattttcttgttttttttttccaattaagtacagtgtggattgatataaggggatttagttagtgatgataacatgggtttccttgattataatgggaatgtggaaaatgtccttgactacgaacttctttaatctgttggatttagtgcttgattttggcatcttacctcacacatactattatacacatgactcaggttgc

SEQ ID NO: 3145 - DNA, 1388 bp, Glycine max
  Intron number 1 from transcript Glyma16g05850.1 (locus Gly ma16g05850) derived from phytozome v7.0 (chr-ID Gm16; pos 5255985 to 5257372 reverse strand)
gccttgccttcagtggtacctctctctctctctctctctctctctctctctattagtttttttttttttatgggaaaatgttagtttgttagaatgttagtttttgttagcgaaggggatggaacctgcgacctttcccatcttcccttctcccttaaccacccaacccatctctctctattagttacttgcttgattgttttggattcaattgttaagccttggtggttgaaaggagaaagggaggaagaagtcatgggtttgaatccttcctactaacaaaaactaaaaagctaacattaacaattaagggagatataaggttggtttagtggttgaggaagggtgaaggaagaagggaggggggtgatgtcacgggtttgagtctcgccaactgacatttctaacaaaaagctaacaaactaacatttgccacatcgtcaaggctttttagagtctttgtccataattttactgcaatatcaagattggaaagtgaatccttgatgggaaatttctgtggatttgttgctgttgaattcaccttagaacttcacgaatcttgaaaaaagttgactttgtttgttttctactatttggatgtgtttctgtcttctttacgtgttatgtgctgcatgagcttggtggtgctttgttggaagatatgtctcagcttggagttggttttgtgaaggttaaaggctttgagagttttgtggaagagataaggtgaattgactatggagtaggaaatgaacatagcttccttctgcactctagaagatttaatttgtatgtttttagttttattttcttagaatagtaataaactaccatcaatagcgtggatcaactggcataatgttgtttcaatttaatcaggggtcttgaaattgtattttggatatacaactacgttaaataccctcgaggaagacctttattcccatagttacctgacttaaataggattgttttccgtagaagatacctttggcttataccataacagaataatagtaataataaactaacaagatttcatttgtgttcaaattcatctaatttaattaccttagtaatgaaatctattgaaaagctttataacactgataaaatctctctgccaaagggaaaaaaaaataagtagtgaatgttgaaatgaaatgtggttatttacttaattgtacaaggtaaaaatactttgttagacatgattttctgttgttctattgctgtctcaattctagttaagcaatctggtttatgttaaaatcccttggtcatgaaagttgctacttatattagtgagattttttcacataaatttctctaacgtgcaaactgtgatgttgttgacaggggggtttggttcatccttgattgcc

SEQ ID NO: 3146 - DNA, 8391 bp, Glycine max
  Intron number 2 from transcript Glyma14g27900.1 (locus Gly ma14g27900) derived from phytozome v7.0 (chr-ID Gm14; pos 34226158 to 34234548)
tcaggtacgcgtgtggtgtgggtatttttatttttattttattttattcttttcggtcaggtgtgtggctggtcaagcagacagcaaaatataaataaagtgtagcataattattaatatatatttattgagcttaattttatacagaataaaaattaaaaattcttaaccaataaaaaatcataatatttataaattttataataaataatataaaaattaataaatttattatacatatcaataaaaataaattcaatgacaaattgaaccaactaatatttccaccccacctttgaactccattagactagacttttaggtttttcaaccaactaattaaaccatttgaatattatcaaaataaatttttttttttgtaatgcagcaaaaaaggtaaacaaaatcaaataaataaagaatttattatagattcagccaatatacctaaaaaatacatctattatttaattaatcatctaggaaaaatatatctagaaatacttaatagatactcatacaaataaatcatgtgccaagaactacatttgaacggatgacacgaggaattttagtccttatctaccaattgagctatccgaccattcttgacgcataagaatcatttttattttaaaagttcctcaggaatttttcaatgaatctatcccgactaagtaaaaaaaacgaaaaataaaagttgtaagttagtttcattagtaggaggctgaaatatttttagaattcttcattgatacaacatgctacttttcccattcatttctttgtggatctgccatggttttacaagctctaccagtggtggtatggacgaatcgattgcttatctcgagtgtccctaacccattagattagaaattaattttattcataaaaattttgtataaaatgaaaattgaacacaagttttcagctaaataaatcacactaggtcaatcctttggattcttttatatatatatatatatatatatatatatatatatatatatatatatatatatatatatatatatatgtatataaaatgtatgtattgttttttttatatttatttcatcttttttaattactctctctttcctaaaataagtattgtatttgaaaaaaaatatttattccaaaataagtgttatattaaaattttatgtaacatgaactatttatttttttactaatattcctaataagtactattatagtttttcaatataatattttttattagtatgtataaaataatttagtatacatatttattttgaaactatgggagtatatacttatcaattcattaattatatttttactcttacacaatttgtcacgagttttttttcccttcatttctttcgtttctccgctcgttgatcttcagaatcgttcaagacattcttttttcttgtttttatctaactctggtaccatacaagagaatctgatatttccaagtccatgtttttgtgaatcttgctccattttattgatatcagaattagaataagaatatgaattattattttttgtaagggatgttagtaagattcacaggaaaagtagagtaaaataaaactattattaaatatataaatattatttttattcttcaatttacacggttaatagaaaaaagagtttaaattaatagtaagcacttttaggcaatgataattgtcatgataagattttataatgatttgataaatatatatactaaatattatatttaaacaaacaatgtgtcgaaattgtatttaaatatataatattttataatttgcatacagtatcaatgatgggtaggatttttttatttgtttacaattctgaattattatcttcgtctctatatataaaattctattctaattgcttgatgtattaattatttattttctattatatctttaattaattatattctctcttattaagattgaagaatagaaaaagttgcgttaattaattaggaaagaagtaattaattgaagagaggaatgaaggataatcataaaaaaataatataagttaatgataaatttaatgtaattaattaaattaattatttttattaaaaaagagagaattatttaaaagtatcttatatataaaaatggaagtggtaacttatataatttgcttatcactcctgtttatttattcatattatacattttataacaacttttttgaactatcctcaaataaaaagtgaacagacacacagagatactataaaaaattgtcagactgacaaataaaatttatcaattctgaccgtctttgttagcataatttttgtctgataaaaattaaaatattaccatagtctttgaagatttacaccaacatttgataaataaaaaattatatcaatataaatattaacatagatagtactcctcttaacataatatatacttataatacttaaactttttgtgtgtgtaaaacacaagacgttaattaaagagtaatacatattaatttgtagcggatagtttcgtctttaaaagtaaaagaagaatgttactcacattctaaaacattatttttaatattttatatgattgattaaaatttattaaagactattaactgaataatttaatagatctcacttttaagaaaaaaaataattaaaaagtgagacacattgggatcccttatccatgtgataataattgtcttacaattaggccaaataaattggattcgattttggttaaaaaatattaataaaaattgagacacaacaaattaaaatttaaaatatataaaaaattaaaaattaaaatactagaagacaactactactactactattattattattattattattattattattattattattattattattattattattattattattattatggtcccgtgaatgagaggtgtccttttgcgaaaatgaaagaagacatatcattttcttatgccagtctgtgtttgttttggcatctaaatcaaacgtccttctaagtagagcttgcgcatgcccatgcgagcttttcaggcactgggcgtactttttgtccccgacgtcagatgttgtgtctgtcttaccctcaccaattgattagattgctcatgtgagtgatactcataatttaagtcaacctttgattttagggtaaataattattttttttaaaaaaaattattaaacattaataattaagttttaaaagataaaaaattaaaattttgtttctaaattttaaaaaaatgttacaaattaatcttgtattaatttttttcattaactcagacaattattattacatgatagctttgatgatgatatgacatctaatagttataatgtgttattcttgtggttgtcatgtctcatctatatagttgttatgtgtcaaaatttaatttttcaatttgatttctgaacttaataatttgataccattttggttcctgaatttaattatttattgacatttgatccttagacttaacatgtattgtcattttagttcctgaaagtacttttaattttttttaattaagtcatatgttacatgaaattattagcataaacattatcatattgtttcactttttattctttctgcaattttgttattaaaattatactataaatacgtgaactaaattatgagtgattacatcacaataataagtgttaatctagaacattactaacaagattttataaaattccaaatcatatattttacccaaattaagttatcatcttatatcctattaatatgtgtagaatgttagattaattaattaatctattttatgaaataatattaatgatgaaaagacaaataaaaaaagcttaactcattataacgattgagtataagaggatatgaaaaataaaagtgttaaaaccattttcttacacatcctattataattttcccatcattgttcaacaattgagtataagagaacatgacctattataagttaaaaatatatgacctacaaaattcaacatcaactataattcatttattatattttcaattaatggaaaagctaattgtggtttgtcacgttagagaatacaacatatacaacctacaaaattgagtataaaatatagttcaccattatattagtcatgttgaaatatataaaataaaaggtgaaaaaaacgaaaaatatctacactactagaaaataggtttttaacatcagttattaatgactttcaatatcaattatttatcgatgttgaaactgccgacgtaaaagatatcaacgttaacatcagttatcaaaatcgatgttaaactaaacaacaccacatcgatttccctgaaaattgatgttgtaacgtaaaaaataacaaaaaaaatgttaaatatatataaaccaacatcgatttttgacaatatcagtttttcgtaaaattgatgttgtgaatgcacgacaacatcagtttttctaaaaaccgatgttggtgagcataaaacaacattgatttttagaaaaatcaatgttgttgtgcattcacaacattgatttctctaaaaatcgatgttttttggtgaacaacatggactttctaaaaaatcgatgttgtttctactcgatgttgtttattggtatttttttaatatcctatctatttttttaattactccaaacctgcaaattgaaaaacagaaccaatctagacaattttcaaatagtttttatcatacagttcaaattttgtccataataattgaataattactatcaattaaaaaaatatttaaaataataaaaacaataatgtcaatacataaaatcatttgtaacctaatcaaactaacataactctacaattgtaaaattacttaaacaccagtgtttcatttttaacttttagatgatatcttgcccactaaatgtgaattgcattcattctttctggtttcaatgatcttagatcagtaaaatacaacatgatataacaaaatataagttaataagtataaataataataattataacaaattgaattagttttgaagtaagcaattacaatttcccaattatccttcaaacctcctatggttatcgttgatatccagtgcattatgtaatacccacacttagtgctttccttttcttcttacactaaattgaatacaagatattcaaatattcaaagttaaccaaaaattagtgtacggagtaatttaaaaaaccattataaatgaataaaaatttaaaatttgagaagaacatgcctaattctaaactaaaccaaatagttacactagtgtaccgataaaaatgccaatgcaattatagtgtctacaatttttttatcctttggaacaaatacgtgagacatcatgccaaactctatataattgaatccacatcaaaataagattagtccaaattttgagaccaatgacaagcttaaaaaatagtttatggtagttttgccaaccctttattgagaatcaatagttatcatcttattattgaatctaagaaccaaacataaccaatggtgctttgccaaaaaaatgatgggatgaaattgaagggtacgtaccatatgtgaagtccatttcttcattaaaggcccaacatgtatttaatgaaaacactcccaatctaagcaatgtgagaaacccaaaccttcccaatctcaaacccaaacaatagtggtcaagaacagagcagaagagaagacattaaacctgttatcgtcaacacacgaggagaccaaacatgcaaagaagaacatagaagcgatggcgaaagagagctagagcagcagtggcatgagagctcaagcgacaacaacttaagggacctaaagcgacaacgactttaaggtttcactggaactgagaaagcgagggaattgggaaagttttaaacgaaatgagacaacgagggagtactaaaaacgtgcttcaaatttaaatatataaaagtgtcaacatcaattttataaaaagtcattgttaacattaccctctagagacatcgatttttcaaaaatcgatgttaacaaactaatgttaacatcggtttttttttggaaaatcaatgttaacaaactactgttaacattgattttttaaaaaccgatgttaacattatttcattaacatcggtttttcaaaaaatatattaacgaaatcgtgttatttatgaatatataatatatatatatatatatatatatatatatatatatatatatatatataatacacattttttattctaatgaaaaactaatttaattttcaaacgtttatttatttttaattaagttatattgttatccgtcattgttgtatatattatttgttagaattttaacttaataaaatataataaataaattaatagtaattttaaatataaaatataatatttttgatttctatgcttgacaattattttcattcaattttcatcaccataaataattgttatcattatagataaatgtcattcattattactatgttagtaatttatatgtagtgtgacacttaattaaaaattcaaaaattctttcaaagactaaaatgataggacgaagttaggttcaaggaccaaaatgtcactaaatagttaagttcaaagaataaaatgacaataaattgttaaatttagagaccaaataaaaaagtcaattttttgatatatgacaaccacataaatgacacatgacaaccgacaactatcacataatcacttgaattgtcacgtgtgcaaatccatttgaattaatggagataattgacgataagactaatttgtagtattttttgtaaatttgaaaacaatttcaattttttatttttcaagaacttaaatattagcatctaacaaatttttaaggacaaatattatttgctcttaattttttagttctttcatagatttggttaactatgtttatgattggatgaactgatgaagccaaataaaattaattttttttataaatatttaattttaatattcatcttatatttttcattttgtacttttcttctcgcatcatttttagtatttgttaggttttttctttcctttttcttcttgacatttctctcttctcctatttactttcttttaaggtaatgaagagtctttatttttagttaactcaagattaaatagaataaaatataaatataatgtattgaatttcctttaatatgatatctgtcacttagtggcgggcgagttaaaatagtatgcataaaaaattgctaggctaccggcaactggtaattagcaaaatcgtaatgatttatatctttaatcaaatggtgttataaagtatgaattctagttttgaatgcaaagtaaatcatgttaagagaaaatattcattgtgtgtgtagttatagtccttaacaaattttaatcactactttctccagaaattatttcttatcaacacctttgaggctaagcatgagtttttactgcaagagaaacttgtatttttgagctctaagtacttccttgacgaaattacaatcctaactattgtaactttagttattctatgagcgaataatcatttcttttattatgttccgtcataattaaactgtgaactttgcactgagaaatgacttatgcatattaaactctgaaaaattagacgttaataggacggcttcataatttgattttagatcctcaagagtactatcggggcactagacaggtggtcccttccaccctttcacgccatctttaaagtgagaaaacatttagctacttaaaatgtaaaaaaatacaagtggtcaaagcattatagaattgtttacctttatatataaatctgcccctttgcttagtcagaagcttaattgacagtagccatcatttggaagagagcacgtgtgtaatgatgatcaaagtagtatgatgccctaattggtggtgaaaatggtgtacagtcttccaaatcataacaccgaatcataggcacctaaaatttcatttcataacagtgttttaattagtttgcatgtttttcaactctcctttatatttaaaataaaatattaattctcttgaaagataaaataaaagaaaaatataagaatttaatatttttcactgccattttttaacatcttttttatattttttttctctttcttcttttcattagtgcgacacaaatattgtttattcttaattgtcatctaagtctccccctaattattcacaatcaattaagataatgcaggtggcagaagattgagattgatttctaattacaaattattgtttttctattataattatttttgacaattatgacagataaagaaatcagcttcagagacagcaccaaagtc

SEQ ID NO: 3147 - DNA, 590 bp, Glycine max
  Intron number 6 from transcript Glyma09g28200.1 (locus Gly ma09g28200) derived from phytozome v7.0 (chr-ID Gm09; pos 35213050 to 35213639 reverse strand)
gcctggtatgtaaatttctcaattttaatatttatttgtagtcattgtcaatacattttttctcaacataagaaatattattacaaaaaaaaggtattatttattccactgaaccttccatatttctgaatgaagtgaattagtccattcacatcaggactgtgttcataaatttgaaagaatttgtaaaaaaaaatgttaagtgtgtgtttggataaacattagcaaacttaaattttcgatgatcttgatttttttaaattgatacttggctaaaattgagtttgaagcagagttatgtttagaaacttaataataaaagaaagtttgtagtaaagctcggcataaaattctcatgccaacacaaaagctacatttttttggcggttagttaaatgtcttttaacaaacttgattatagtaaacatctaaacatatttttttccacagaatccctttgacactttcaaaagcaagtttgtggagcatgagcactccttcgaacacgcacttactcatttgatttactaattgtgacctatttattttgaacagaacttcgaagacaaacttcatccaggtggtccatt

SEQ ID NO: 3148 - DNA, 1431 bp, Glycine max
  Intron number 5 from transcript Glyma14g08090.1 (locus Gly ma14g08090) derived from phytozome v7.0 (chr-ID Gm14; pos 6120010 to 6121440 reverse strand)
ttcttaggaagaaattacgaaatattaacctttccgtaagtacagaccaaatgctgtcatggtgagattaccataaacacttcagttttcatccgtatttctgatggaactatcaaaatttatgatagtatccttaagctatgatatgttctgtatctatggtacttgcaaatcacaagaagaggagaagacagcaagatagggaagcgatattagccaagagccaaggctctccaagcaagagagagggtctctctgctccccaaattccactaaggatcccaaaatcgatgatcctgaatcatatcattacagaatcatatatgacagaatgtcagaatgtgcgcacacacatactccactaactaactgaatgaggtgagtttcctaatctaccctccctactcacacttacaaacaactaacatagactcacttgggtctgggccttcgctgataaaccttaatgggcttatcccatctagaagaggcaaggttcctatcagctactatccttctaacattttgaatgaatattgcataagtgttctttaaaattgaatacaaaagaagaggttttatgctgtttatttgttgatattggggttgattctgtgtgcttctattttgtttaagacatgtttgtattattgactactctgctccttataaaataagttaagagcaataccaaatagtagttagttctagggtatcatgttgctcatagtttttgactgtcagtcagtggtttctattttttttaaaaattattcaatggattcagtttgtttcatcttctgtttgaagttgttacctggtgaggtcatgtaattgttaacacatttataaaatgctactgttctcttatagttgtgcagctgatactctggcgcttatttagctgctctcatttttttccttatgcagaagccattttacaaagactccttgttgatgactacctaaaggatgctgtgcccatgttattaattacctctgaccaagtatacatcatattagtatttcttttctagtttgccattgtatgtcttcaaaacatcactatgcataagcaacatctttaggaaaaaagttttgaaggtaaagttagtaaaaattcaataatgctatcattgtttccttcctaacgatctccctccttctttcccatgcttcttgtggatgttaataaagatttttttttttgttcatggactattgactagtgtttataaataatctaaaatatgtccagtgtccgaacaaattgattcttgtatttagaaatcttaaatgacttcctttctctttaatgcccaaaattgcaagtttgtgcttgctacctcattaataaatggccttatggtgacaagactagtttgtagctgaaattgtcaagtttcttttcttcagagtcaaagtttgctt

SEQ ID NO: 3149 - DNA, 1387 bp, Glycine max
  Intron number 9 from transcript Glyma10g35190.1 (locus Gly ma10g35190) derived from phytozome v7.0 (chr-ID Gm10; pos 43387855 to 43389241 reverse strand)
cttggcaaagttgcagctgctggagctattatgtttgttaatcttcataatattttatttttattgaaagacactcttattataattttattcacaggtgtttctagcataagcatcaatattgtattattttgcacatcccctgcgtttgtattattttttctaactgcatttcataattgcaattttggagattttggaaatgcttttttaagttaagcttcttttcaaactaacttgcacacttctgttgctagcatgatctctgctctccatctgagtttatgttttatatatgttcaatcatcaacaccatttctgcaaaatttttttccacttatcctattaaaaacaattaatccattgttatttgcatttttaaagctttttatcataataatatcattttttttttatccaaaacaacgacatactatttcgtgcaaatcatactttatagatgctggtaccctcccaattcgaagaaatgatgtgaattttgtagctgtcagtcttctatattctcttaaatagcagtgtatctaaaattctgttattattctttgctttttatgaaaaactatattacattatgctcaacctaaatggtgatatctggtgctagtgtttattagtctaagaatgctatcactgaaggaagatacatgttagatgttgtgcaatagtctgcaaatgtatggaaagaaagtttggttcaatcctaattgttacttgtttgggtttcttttctttctgtgtgtgtgttctagacttctagtggtttgttttgggacaaacttgaaattaaaatgcaaatcaccttattggcgcaaaagaactgtactcaaaacatgcatagtcagattttttcattgcatcttcaaagtgcattgcacagtggttttgacatgtctgtgtgttactggacatatcatatcaatcctctcttctacttggctgttcaatcttcaattcagataccaaaaatagtcattctctcttgtttgacacatttggagctctagtcttaagtgccatgatatgaatgtggaagttctgattatatctgtatatgcttcctaacatgagtcaacctgaacaaggaaatgattttgtattgactaattattggtgatctaaatattgttgtgataacatgctgctaaactgaataaggatatttgaattgtaattttcttcttcttctgctattacttccctattattattatgtctttgggttcatgtatgtgtgtggactgtgtatgtctcaccttattttattatcttttttttttccatatttgcttatgttggtgtatataagttttgctggttttattgtataccagccaaagattgcggccaacacttcacgagataatta

SEQ ID NO: 3150 - DNA, 1061 bp, Glycine max
  Intron number 4 from transcript Glyma09g37020.1 (locus Gly ma09g37020) derived from phytozome v7.0 (chr-ID Gm09; pos 42598086 to 42599146 reverse strand)
gggatcacggtaaatgttcttctaatatattcatttggtggtttaattgtattttgtatttgttgcatggaaactgcttcatatgttgtcacgtttctctagcttaagagttgtttaacctgtttggattcaaagaatgcttattttcttatgattcaatgcaatttggctacttaccaaatcatatcataagatgaatcttaaatgagtttgtatcttgcggtacataaatgaatccgtgtaattttatatcatcgatatgagtcacacattcattgtgtgattcatttttatttttattattatttaaacttttctttcaccaattattgtgaaaaaattgaatagtcatactagtttaaatagttaaatgaaaaggaattgaaggaacacttctgaatttatcctatttgattattcaactactttttatctttcacacaattgttcaatgcatgcactctatttacctatttaattgctttgtttctattcttcttaaataaacttcacaaactcatatataactaatattttttggtatgatatatttgaagtagtttttcttgttgaaagaatgcttcttctttttctgttgttcaaaattctttgtgcatgcataattttactcaaattattaaaagaaatctcatggtgaataatattactgagaatatggtttttggtcaagtctaatagcaggcgatgtgtgatccatagagccaacctcacctactggaatgaagttattgatgttgttgtagtctttcctagaatataatgattactattagaggcacctaatataaatgtctcactgaaaatttgcttggttttcaactgaaaaattgaaatggatatcttaaatgcgaatctacttgtcagttgatagaataaggacataaggtggacttttgacattttcaatgtgtttatttctggtaggtttttactgttgtcttgggcccttgcaattataaatttataattgttatagatttgtcatatatatgtaacatactttccctttgatgaacagaccactgtaattgatccagcag

SEQ ID NO: 3151 - DNA, 1983 bp, Glycine max
  Intron number 2 from transcript Glyma11g08140.1 (locus Gly ma11g08140) derived from phytozome v7.0 (chr-ID Gm11; pos 5743831 to 5745813)
ctcacttcattgagctcaagggtgcacaagttaaggtaggtgcttatggtaaaaatgaaggctggctaaatatttttgcaatttatattagtagttattttagtaagtgtagattttagtattttaagcacctgggagcatagtacaactttggcatatatgtgaacatcaaaatcctcccaacccccatgttggtcatggcgtacccactattaggattttgaattttcaacatctcacacataaacttggcataagcaagttagcaattactagggaaattaatctggtgtttgatttgctttctgctttaattttcagttaatttttttgcactaataattaaaaaagcgccactttgttttcaccttgtgaaagaaatggtgaagaccatagttgtcaatagcggcagggcggagcggatcggcacccatccgcgacggacacgtgtgtagcggcacggttttgggtcgcggcggagcggtgcgggttgcggagctgtttttcgcgccactacttcgaagcactggaggttctgttctgtgttgtttcgtctgctttgttcttccaaagagaaagagggaagagagagagggagggagggaggacgagagagagagagagggctctgtgttgcggcgcagttttaatataccattaggggattcaggaaaaaaacatatataccactagggttggcttacgtagaggcaaacaatattaatatataataataatgttaataattaaataatatagaaataatattaaataaatataataatatcataattttataattttaaaaacttatatttatatatttttgttttcgaacatatatatattattaattatttatatatttatatttttgttttaaagtttaacatatctagttaaatggtagccaaacaatattaatatataataataatgttaataattaaatagtatagaaataatattaaataaatataataatatcataattttataatattaaaaacttatatatatatatatatttatatttttgttttcaaacatatatatattattaattatttaacatatataaaaaaaaacattagaatagcggtcatcccgctatccgctatcccgctatcccacttttggggttggccgctccgctccgctacgctggtattgacaatggtgaaaacaacatttttttgtcactatttcgtcatttccttctaaactaaaacaagttggtatttttgtagttattagtgaaaacatattaattgaaacagaaaacaagaccccaaagatttccatttatcgagggcatcatagaacttatatgacaaataatggtaaagatcacattttcaaatgaaataaccactgttgttcttgtttggtattctctcaaatttcatctgcaaaatagttaaattttgttagttaatgagttagtcaagtgaggtttttgaagacaattcttttactcttaattgctattattttttcactctctttggtccctttttgtcttatgtagtcagattaacaagtcctttaaaattttcaagtatgaggtgaaagtcacatcacgaggatggtcagttttggcatttggttcacctgtggatatatatcctactttatcagttatttgggggtgaacaattgaaaacgaaaagccacaaatttttcattaactaatccttctcttgatatcatctaattatatacttactagtttcattttttgttattgcagacagtttcctttttaacttatctgttgaagagctatgctgattatataaggccgcatgaagaaagtatatgtaaaagcattgtgaatttgcttgtaacatgctctgattctgtatccattagaaaggtgatactgttgttgcttttgtcttttttttccctattggatttctttttaattgatttaaagacaaagatgttggatgcaggaactattaatatccctgaaac

SEQ ID NO: 3152 - DNA, 973 bp, Glycine max
  Intron number 12 from transcript Glyma13g27810.1 (locus Gl yma13g27810) derived from phytozome v7.0 (chr-ID Gm13; pos 30948649 to 30949621)
tcctgaagcacaggtgaattacatactctaattattttgctactgctataataagattaaaaaaaaagatgcatcttgtatgaactgttatctgtaatatattggatcaaatacttgacttaattagttcctacacttaattattactttttagtaaaggtatgtttactaccagtaatatgttgtgtgtgtaactttctttagctcatgaagtactgttcatatctgtgttatgagaaccacctggtttggaatttggttcttctctaataacctagagtgtccaaaatgaccgtcttcttgagattcttagcagaagtgttaataatgtgaactaaatgtcaaatgatcaagggaaatggattgtgatgaaactgaagaccctggagtgagaaagaaatattttctaagcaatgtcaatgatggtatatagtgcagtacttcattctcaaaggatcagagaagtggctttggaaggttttggaattattatccacacttttgaaattcattcagaggaagtaattgaaatgtttgtgtatttggaaaatcttatacttctaagaccatttaggccttctttttggtattaaactccattctttgcaattggactttagtttcaacgttcaagctattttatggtagtgggtgtaacagtagtatactatgtaaatgttgaagataatgttataatgctttactgtaattatgtgcaagtttacttgtgatgatgtttataatcagaactacaaaggtagaatgctttaggaaactaatgtaaggctttacatgatgaagaggtgttgactttacatgattttaatttctatttcttctggaacttattcaattatttacccttcaagataaaaaaaaatcttgataatagctttttataataacgaaccaatattaattttactagcttgattgattttataggaaggtggtccaattggcttgattcaaa

SEQ ID NO: 3153 - DNA, 4494 bp, Glycine max
  Intron number 1 from transcript Glyma19g06960.1 (locus Gly ma19g06960) derived from phytozome v7.0 (chr-ID Gm19; pos 8201278 to 8205771 reverse strand)
gggtacttttccctttttttgtattttaataattttcttttcgtcttgtcttgtgattcatgtagctgagctcacctattaggataaggctttgttgttgttgttgttgtaataatttcctttttttgtattttttgttgaaaaaaattagcttgatgttttttttttttttggtgaataacttagcttgatgttgatgttgctgtgattgcttttggtttgagtgttgtttgcattaattggttgtgtctgggatgatcttggaggaatcagaatgttctggtctgtatttaattggtttgcttttctttttctttttttttcttactttttgagttttagttaattaaagtgttaagttgcttcctttttttactaaaaaatatgattattgttatgttaaattaagcatctgggtgagtttcttttgattaagctccggttgcttgctcctgcttttctctgtactttttaatgatgttgttttatgattggagttggaattggtaatggtgatgctatttctgtgatggttctgaagggaaaaaagtggtttaaggaaggttctgttttctttgggtaaagggtagttggggaatcaaaatgagggtggcgatgtttaagaggaaggtggtttaactttttctagagaagtcagccacagtaatggaaaatttgattgctggaagaacattcttttcctgttaagatggtttttggcataaaagataatggtgaaaagaaaagttttgagtggatcgatgcttacctgttatctatctttgtggtgttgaaacttgaaagttctgtttgtgtcttcttagtattgctattctgaagagctgaacttgccttgttgtcttcgtttttacggtgcagagattaggctgcttataacatgtacctgtgtcatagttattagtaactaggaaattggaacttactatctcagtagctcttgatgctgacatgttttagaatatggccagttattgtttttattgaccaaggttgtgaatgatttattcttttttatgatactgaatgtttaacctatgtacgtcatagcatggcagtgtatacacaatacagtattatgtgttgttactgttacatgttctattactgttatgcttgttaggtgcaaccttttactgttacagttttgttgtgtcctgttgctgttagtttgttagttgtagactgttactgtagttttttacagtctgttgtagctgaactcaatgcagttacagcttcagttactatataagtttcagtctttgcatcagagatgacactttcgaatactaacattatcgaatagcttttcagtctacgatgctgaaaaatatggtatcaaacctgtttttttgtcctggtaccatgacattccatcaacatcgtttccattttctagaagccccatattttgtactagttacattttcccacacaatccctatcaaactagacaagaaaaattttctcaactggaatcaacaaagaggtaatatccaaggccaccaactacaaactatgtaggaaatcaaacaattcctttcagattcagaacagaagaagatcatggtcaaggcctagtgaatttagcctatgttgagtaggagcagcagagttctgttctcttagcctggctccagccttatgttttaattcatttcttccctgggttgacgggtgtattcattcttggcaagtttgggaggagatccataacctttttcttgaacaaatactagcaaaatcttgtcactttagatctgagctgcactgcctcaagaataaaagtcattcttgattccatttcttgctttttattggagattcagtctctcctctagatcatcttggaccaattcaggaggactcccaaatgagtatgattttttccctgctgcagtcagtggtagatttgatgctttccttatcaaggaagtcaaccgactccttgatcaggagggcggcttaagaagagctagaaagctgtactagctgatgcactttcaatcaaccttactcaaggttctgattcctttttgcctccagcagcagttccacaaacacctggtccaattactcaagattttgtaatcaatgactgagatttgttactttaccttctaagtgagttgctctctttaagaggagctggatccagtattatggcggacatcatggttccttttgtggaggaggtagccactttggctgttacagaggccaagggtggtcttttggttgtagggcatgatgccagatgccactactgctaatctcatggatattctccttgctttaaatcttctcagtactatggattttgtcctgctacatggagctcaggccattctgtatgctcccctgctcattatcctgactacactccagctcattatcctgctattgattcactgatacaggttacaatctctatttaggtctgcttcatccaacaattgcttcacgccctcttatcatataggcagaacatctctccaagcatttcctccactcgcttttgtgacttttcaaagctggctcttccctgtgacctaagattaggtcatgcactacctgctggtcttgaggatctttccacagaaacatggtgtctgatttcaagaacaactcatcctgttactcctaaatccaaaagattgcttcatggcactccattttagagctttgacaggatcctaatgggaaatggtcatggtttgtccatcacaactattggttctacaacttttctcacttctctcaggccacaaaccctctatcatttgtaattctcactgagatcttctctatttctttaactcactcattttctcagatgtctttttttggcaaattatttatggattcaagcaaagttcttcaacagacaacttagattctagaagtgacctttccaaagttaaatcataaaccgataacaatactcttgtttaagactgtaatatttttgagaaaaatgccttgaataatttatgttttatttgttccactatatagattatgttagaactttttaatgaaataattatttttgtagttacttattgttaactcacgagacaatttcagttactggatatcactcagggaaattgatatttttgtacattgtgactaggggtgtgaatgagtcaaactgagtcaaaaactttaagttcaagttttgctgaccaaaataatatggtactcaagtttgactcatttaaatcaaccaaatttaaatcttgagtttgacttgttagaaaaatataaagcttaagattggcttatttatctcattcataacttgagcagggaagtgtttttcttttaataattttaagcacattaattaagtatttaatatatattttcatgttagaggataagataaaaataagaacaaaagagaataaaagaatatttgaacataaaaatgatatatttaaggttgaatcatctatataatcaagctcaagctaataaattaacaagcttgaatgagcatttgatgagtcaagtttgaataattcactaataattcaacttatttatacaattataccggtaaatgtaactatcttgaagacatacttggcctcaagttgtgattaatgagtctcttggagagataactcttgttcacttgagtcatactcgtttatagagaatagttactttggtccaatttcacatggcaatcatctttcatattggaaatgtattttccatcatgattattcccatacttcttagcaaaacttggttctgtttaaggtaaaagtatgaactgaacaatattacatcttgagtttctgctatattattttgttaaatcaatatcaggaaccttacaaccatcctctgcttaaaattttgttagctatgataatttatgactgtagtctgtactcttggtaattattactggcatcatcctttactaattttgtattcattgatattagtagtattgatttcccctatctttccctccttcctccttctcctaaataggcccaaaagatatgaagaatgagtataccaactaaaataaattttatggaagcacaagtgtcatattatatgcactctttttaatcattcattgggagtttgtgtgtgtatgctgtttatacagcaaaagatagcttgtaatgttcttctatgctgttttatttttcatcagtttgctatcctatactgcaatttatttatcttcctcagtatatatttgtcttgaatttctctaattgtaaatataagaaataaagttgtcttggttcttggctacttataggatacaattacatgaaatttaaaagtgcatatgggaatgcttttgttattctcagatgtcacatatacaatattcccatgttgtccttaaatgtcctttagttctactactttatttcatttcattgacttattttaataacttttctttctacagttacgattactctggtt

SEQ ID NO: 3154 - DNA, 1576 bp, Glycine max
  Intron number 2 from transcript Glyma15g22480.1 (locus Gly ma15g22480) derived from phytozome v7.0 (chr-ID Gm15; pos 21117954 to 21119529)
aacacctcaatattttctttcccagattgagaaaggtcacttatttaggtgtttgtatatcatgtcttcattttttagaatatgcattttaatcttgtgggttagtattgtgatggttgggtatggtgagggtaagggtgatgtgtaggcaaggcaataggattggaaggagttagattggttatctttaggtgctgtgaatggtacgtgtggacctagcgattgaggtgttgtgtgttttatggtaaggggaaaacttagatgcacttacttatatgcttttggtgttgttctctgaccaaaattggagtttcaccttggtaacctatgctgactttcaatgcaagttttttgtaggttgattatcgaggtaaaaatctaattctgaatagataacaaagaccaaaaccatataaggaattgcatccaagttttcttcttatgttaaattgaaggaagaaactttcgttgagttaatattcaataacgtgtagaaaatcaagataggcctgttactgttaggatgggccctgttagttcggccttgtaagttgagagtaggacttataatctattagaataggtaaattagtgcagctctaataaatagtcagaaaatgaaagggaaagggagttagttggtgaggattagttttgggtgggagaaactaagctctctaattcctggggcagtcattcttttagattttgcccacattcattctgaattcagataccacactggtacggattaacaattagggattcattcaataaaaatctcatttcattctagtttctatcagagacaaagaacaaagatttaggtttgattgcatcgcgtatctgggtaaatgaaaaattattgagatatcatagagctgaattttaggtctgaacgaaaccatcacatatgtctcccagaattttggattagagacataatcccataatgatggagacaatctaatagtgtaaataaaataacacctaagtaagataaacccaagcccaaacacagccatacacaaggggacatgtggaaattactgcatagccctgggatgggactaaaatataaaataatgccaaaataaaaatttcttatcttgactacgatcgattgtggaatcagcctataattgtcagtagtgcagaatgtagaaaatatttgctctttagtttacactttagatgtgcaagatccaactatgaggatttacttcaatcaactaataaatggtgctcccctctgttgctgcatccttaacaaggaaatacattatcaccattttttgcacttggcaaaatttgtaggcactcataatggtaaaatgttgttttataagttgtgtacaatgcattttctgtgcaatgattttgatttttaaattgctttattgatttattatgtataaatacataatcattcaattatatagaatatatttttgcctttgcattatttttaattatgtataaatatattatttctaaattatttgacttggtttttacatgttacatataaacctgtgtaggtgaaatccataccattcagtggaactggcaagca

SEQ ID NO: 3155 - DNA, 1732 bp, Glycine max
  Intron number 9 from transcript Glyma17g37540.1 (locus Gly ma17g37540) derived from phytozome v7.0 (chr-ID Gm17; pos 41271723 to 41273454 reverse strand)
gttcctgctgacagcactacatttaaatatcttgaggtttgtgcaactgagtagatgcactgaaattggtatcttgcctctaaagttatatgttctcattggctttctcaatggattttttaagagaagattgtattagcatttggtcattgttaaagatttcataatatcttgattgtatcctagaataattttagatgatcacttagtaatggtttctgtatttcattatatttcatgatttgtttcgttatttgattaggattaggagtctagtataatattatgtacaagtttaaatagtggttggtgctgtgtattgcctcatcatacacaatatcagttttatgtcctattatgttgagtctccattctattttttcttccttctctatctaaaactgttattttaaacctgacatcatcctctgtaacctgtcttgttagtattccactatctagtttttcaaaatttggaattttgtttgtcaaataaaatagataatttttttataatattaagatccaatagcaaggtataggacttgagtctcacattggaagtatgggattctagtgtggggtttataaaaccttgggctcttcaactacaacagttagcctttgtggtgtagttttcccaaggttctcgtcaaagaataactaatcaaataatttaatcatatcctctttatctttccattggatgtgacaaattctggccaccaaaatcctggaccaatatcattttcttcctcttatgcagctgcaaatgtcagatctaccttgcccatgcagcttttcatgtaactgtttttgccatcaactctagtatgtccagattgtccaccttcgtcactatttgtcctaccgcaccatctccaggcaggacaagccccatcacccttgtttgccaccttgatgtggctgtctgcctccctttgcctgtgttctgcttctgcattgtttgatgtgatctggtatgttctttgtagtaccatcatgagatttgagttatttttggtaggcttgggctgttttttgagatttctaccgtggttatctctgtttttttgtgcattgggctttgtttggtcttccagttgcgattatggtgtgttagtcatctttctcattcccactgatgaatcatactagcatgcagcaattactcttcccattaatgatgaagttgccttttaagctatgatttatgggaaccacttcatatttatgttattttctattttgtagaatatttttttgtaataaggtaaaagcttagcaagctttagcttggggggcttggtggaagatctggtaaatatttcataatatcatgaagtatctcagaatcattttaagtatcttagatgctcttgacactaagattcaaaatttgtaattgtctggctgttatcttaagatgaatgtgcagtattttgtctatcgtggataatcttgattggtatttggtattgaaagaattctgtttttctttttttattggtttgggtggcttctgaattacatctcattcagttttgatgtattaacatagtgggtgcctatgtgtggttcctgatcaatcataatttccctttgcatattatgcccatgtcttttccagcattggttttaatattgtttcccgttgcatattatgcccatgtcttttgcagcattggttttaatattgtttccattttgcagggcaagacatctctgccat

SEQ ID NO: 3156 - DNA, 916 bp, Glycine max
  Intron number 1 from transcript Glyma10g30880.2 (locus Gly ma10g30880) derived from phytozome v7.0 (chr-ID Gm10; pos 39467730 to 39468645)
ttgctttgcttgctatcttgttggaggattttctggtaaattaacaactcctcctctgaaatttcatcgcacaccatcatcacgttcttgttgttcctttctcaaccactgaaaccaagtaatatacaaaatgctttaaaaggaaaaccagacagagtttgatttctgtacttcatggcttgtcttgcatcattgcatgcgtcatgtccttactatagtgtctttaactgtggtttttcattcttaacttgagagagagagagagagagagagtaactagcttttccgaaaataggaaattggacagcaatttgactccgagaacagcctatcgtgtaatgctctatttcgtgatatacctttattattattgttgttgttgttgtattttttcttgaatttcgttctgagtggagactatttcaagatcaccatcactcctctcattttgcgggaaaggtttcggtgatttcttttttccttgctttttcttagtagaattgttcaattcgactccgaaattcttgggaattttatgatttttttatttgtttattatttaataacgtggattgcagagattactactgatgcaatgatacatatacctgtgattctgtctgtaatttgtttttgctagaattttgtgaaagctgctgttataataaaaaaaatcatttgtagcttaggaaactttttttccccctgtttttttgtcccttgaatttataagtgcttctcaatcattgaatttgaatccaacaatggttgcagagaaatgccactgtaagcatcagtttgcttaaaattggtgatttgattcttttgaaattaaatttgtggaaatgatgagagactgagaatggggattgacttttttttttttaacttttggcttgttttagttcaagagaag

SEQ ID NO: 3157 - DNA, 4389 bp, Glycine max
  Intron number 1 from transcript Glyma19g00250.1 (locus Gly ma19g00250) derived from phytozome v7.0 (chr-ID Gm19; pos 58988 to 63376)
tacttgaagaacttctctcatacaaggtgagttgatgttttcataagtcttgagcattgttgtgaccttgtctctttgagctattattgaattataaccaattttctcttctgtagttgtcttgcctcattttttctaaattaataaacagttccatttccatatcgtggagtcattagcatcttacaatctacatgatgaattgtgaatcattgttggttttcatgggtagttaattttttttgggccatcctgtctaatctggagagggtgagccttgtagcatggttagggttgctatcttgtgacttggaggccacaagttcaaattttgaaaacagtctctctgcatgcaagcataaggttgcatacatctacccatagcagtcaataatgcactatagctgattggtggaactgagtggccatggactgcaatgggattcaaattgcagaatggtttttattagtggccaaaatagtgggttttcatgtgctatggctctatagcggcgctaccatgatatatccttcaataacctatttttacccctggaactctgttttttggggtattttcgggtaaaatattccacaaaaagttacctctgtttcgacttttgatccttcacactttatagggctgttttttcatgtgttctgttcttcttttagattgcccagatctcattttgctaatttttatctaatttattatattctttttctattaatttcgccatcatcattttttatatatttcatcacaatgttttaatgctcttagattgatggtgtgtgattgtgtacagtgtgactttttattcatcttgaatttctttaattttggttattctttctagtatttatatattttttttaatcagcgaaggtaatattgtattatatataaagcagtacaagttgtactgtgaaatttacacatggaggccaatttgagcagtaatatggtgccctaatacaaggtatataacatgaattaagaaaccataattctaacaatatagttggcccaaaactacccacaattagagttatcccaccctaatcacaaaatgcctccctcatattactggaccagtgatgaaaaggtatgttgaaacctttatccaaattttttaaccaagtccagcataggaaaatagcatcctccagcagcttactagcattaaagctttcatctgcaaaaacaatcctatttcgatgctgctagatgctccatgtcaaggagatccaccagcactgccatttctgaaaactgatgctagtatccctcccaaacacatgctggaggaagtgctgtctcggactttgcggaaatgctcttgaaatgtttgtccacgatattgatccccaccaaagtggtagaatttttctgcaactaaagaaaaggtgtgctgcatcctcttctttatttttgcagaatgggcatgtgggatcatttatttccacatttctcctgcgtagattcattttagttgacagtctgcccctgattagtctccacgtgaagaaaaaagctttactagggacctttaccttccacagcacagtaaaagcaccatcctgattttcatcattgtggtctgtcataagcatcttgtacgcgttccccactgtgtatacaccagatgcatcttccttccaaattcacttgtcttctcgatccgagtgaatgttgataccttctaattcttccaagaactttgcagccatatctatctcatcatcaaaaagttgccgtctccattgaaaatcccactcccagcctgtagctgtgaaacttcccatctactgtatgacatgttgttgctggtaggaaatagagtaaagtctagggtacttcaacttaagtgatactccatcctccttccatccatcctcccaaaatttgacctttgctctacaccccacttttcattttatccctttatctagccagttgccatcttcaccggaatgagttatgagattgatgtccttccaccatgctgattcactgctgccccttctttccccatccaaaatccgccatccaccatattttgaaatcagtatccttgagtccccttggttatggaaaagcttccatctccactttccgaggagtgcataattaaacttccttaaatccctgattcccattccccctttctcctttggtagacacactgactcccactttactcatgctatcttcttttgctccattcctccaccccacagaaaccgcctgtgtatccacaccagctagtccaaaactttattgggaaccctgaaaaaagagaagtagataggaacaaaatttagaactgacattatgagagtgacccttccaccaaatgaaagtatttcaccaactttctctcacatttcttgacaataggatcccaaacatcactatgccttgggtttgccccaatcgggatacccaggtaaaggaaaggtatggccaatagactgcaatttaaatacctagcagcatccaccttccatatctccgacatcccaattgccccaaaactactctttgagaaattaattttgaggcttgagacaagttcaaaacttctcaaaatcaccttgatcgcattgacatttttcatggatgctttcccagagaaaatcgtatcatctgcatactgtaagatactaatttccacttcatttcttcccattaggaaaccttgaaacatgtttttctctgttgcttctctcagcagtccattgagtccatccacaacaacattaaataaaaggggagctagtgggtccccttgtcttatacctctttggggaatgaactcagacgaagggctaccatttaccaatatggagatagaggcggattttaggcagccctcaatccatgatagccatctatcgcagattcccatcctccttaacatgtactacaagaaattccaggagactgaatcataggccttttcataatctactttaaacaccaagcacaacttgttgcttctctttgcttcatgaattacttcatttgctataagggtgctgtgtaacaaatgtctgccctcgacgaatgcagtttgtctctcatctattattaatggcagcacccccttcatcctcctcgctagcaccttggccacaattttatatatgctacctattaaagaaataggcctatattcatttaggttcaacggatcattcaccttaggaatgagagcaaggaatgaggtattgcaccccttcgggaacgttccatgaacaaagaattcatccatgaaccgaagcacatcagccttgataacttcccaaaactccttaataaatttgaaactaaggccatctggtccggggctcttgtcgctcctgcattctcacacaacagcctttatttctttttcattaaatggctccgacaatctgacattgtgttgctgtccaatggctctaaatctgaccccatctagtttgggcctcacccaatcttcctcctgaaatctgttcttgaagaacattctagtatttatatgtgtagcatatactatattctttttggtttgtattatactagcagtcattgcacttactgctatcctgcagtagcaatttaggaattggccactacatatattgctatttgagattgataactatgcatctacgcttcctaattttgcatatttttagcagacttgtcattgcagtcaatttgcaatgatattagttcatgaaatgaaataaaattgtgtatctttgtgtaaaaaaaatagcagttttaatttatattgtatgaaatataaggcaaaagactgatggctgtatatttattcttcaaacttagaggaaaatgctttctaaaaaaattatgcatttaaatttttaaactgatttcatttacatgttatgattctttcctcttatgaagaaaataacagtttcttattttaatctttcaatgattgcaattttgcttctactaattttgtctcaactctttagttgtgtaagatgtataggtggggttaattgagcagcttgatcaccctaaaaatggtaatatggaaatttgggtactgggatggtaaattctttctacaactataatagtgccttaatacatttgcaataatattttaccaaactcaacaagtgatctgtgtggttcttttgtgcatataattgctccttttttaaccatttacctatgtcattttgtttcttttgttctactgacatctttagacttatttctgacatctttaatataccatttgcatattataagattgactattgtgttacacttacacatgtcttggttttggtatttttgttttcatatttgcaggctctggaaagttctccccaaccacagcagcgaat

SEQ ID NO: 3158 - DNA, 6048 bp, Glycine max
  Intron number 7 from transcript Glyma08g25420.2 (locus Gly ma08g25420) derived from phytozome v7.0 (chr-ID Gm08; pos 19727698 to 19733745 reverse strand)
cgcatccttcaggtattaacctatacgctttagatccaactggagtcttatcagtctagaactattttattttaagcaatttctgatactaccgaagttaaggttaaggttgaatcgttcaaatactattcgagttggatccttagctggaacaatttttagttaggttttacttatctcctggctgaattccggattagttagtgtcccttttttttttgaaccggaggctatgataataataaaattctgatagatcacgacacgagtttaatagtcataatagtgtccctgctttagcagcagaggatgattttgaataatgaaagaaaaatgtttagtgaaatatttattatttgtttgataataagttatttttcaaaagctctttaaagatggtgctaaaagaaacaattatttctctaaatgtttggcccaacttttctttttttgacttgagctattttaaaggtaaagttcaaaatactagagttttaaagatagagtaaaaattgtttcatagttgtagctttaaaactcctattaaattaaaacctttggttcattgtccaacattaagttgtagctttaaaattcctattaaattaaagcctttgtttcattgtccaacattgattagttcaggatgagaggaaggttaggagttaggacatgcaacttgaatgctatttcaattcgtgtttttttcaaacttatttttcttttatataaattaagttctttaattttttaagagcttttctaaaaatctattgtacctaacttttttttttttttttttttataaaaagaaacctaagccaagcagttggtgtgtttgggatagttgaaaaaaaatctgatcattccaatatttgattatatatgcaatctattatagttaaaatcaattatgattagaattaacttttatttgagtatggttgctgaaaagtgattttaagataatctatttcgtatagtgcaaaaataaaatcaattttacatagtaattataaaaaatggtacttagttatttaattttgttagtaaaatataacttggtgactccaatggacctaacttgtgttgctggaagcaacagagtcatatgatgtgggggttctattaaaggatggaggtgattggatgcattagtggtttggggaagtttcaccttggaaatcaagtattacaatcataaacaataactatcattaataataaagggataaaaataaagagaaatttctaaataaatgttcttacatcaacaacttgaaattagacgatctacaaaataaacaacaatgcacaaattcctagttttctagaaaagctttaacaatttcatctttaattgaatctcgaatacgatctatgtactcagaagacaaaatccttgcatttatacagttatactacttaaacaaaatagattatcttcaaaatgttcttttagattattgaaataatctaattcttgtcgttgtcccaaataaggtctacgaaattatcgctttcttaaagtgttggtataaattgtatggttttgttttgatgagaaaatgtatatatggttttgagatatttgtttcagatttttccatctcaacctgattttggaatatgtgaatataatataatgttttgtaccactcacactttctcttccattagttttttataacacgtgcgcaattattgtgctggtgagatcttgcaatatgcttattaacctgcctattccaagttaataaaatattaaaacatctccaatgaagaacttaacttaatttgagttagccaatctttttgtttttatacgatttaagaactaatttccacttcaatggaagaatttaacttatttttagtgaatcttattttatcttttactcacaagaacttaattttttttggctgaaatatattttctttcctgcaatttgatgtttattaattttcgttcttaaagtgctttagatagtgttttgatccgtcaaaaaagtgttttgaacaataaaaaagcattaccaactttaaggatgaaaaataaaataaatatattttgcaaggactaaaatatttttcttttgcagggaaaaaaaataaaaaaatgttaaattgcaagaccaaaaatgtatttagaacatttttttaatggttaagcaagtttgcttgtaaccacttataagcaacttgtataaaggatgaggttgtttaaacttaaaataagtgcttttagaataagtgatttatctataaatttttttacaaaagcaaaatatgcttttatgtttggttacaattattaaaaagtgcttttttaattaaaagtcattagtaacttgtttgggtatgacaagtggagaagtatttttttatttcaaaattacataaaagatcttataagcacttgtaaaatcactttttttttatacatgcatcatatgtccattttttaattaaaaaagacattcaaatatgaataatagataaatgaaaacttcaaatattattttttagcctaatagtcatgttattacaatattttattaataaaatatttccaaattttggtgattagtgttggttttacacatgaatttatactagagaatattaataacattggtattatatttttattttaaaaattaccttagaaaaatcaataatatgtattaaaaatctttattatatttttttacaagtactttataaattatctaaaaaaaacaattaagcaaaataaataaataagactataaaacataaatactcatgttaactaaaacttacatgtctattaatatgttatataagtactccaattgcttgtagaagcaagcaatcaaacttaatttgtcaaacttatttcaaatagtaaagagtaaagaccaaagagaaactaatgtcgtattcgtcttgacaattgatctttgaaagcatttcttacttcttccgtgtacctgacatctgcttgagatggtttttgccattcttcttgataaggtatatcattcatcaaaattttgctctgtagctcataatgcttcaacattctctaagttttcaagaatatctaaatatcctgaatctatccttctaacttaattatggagtgcaatatatgtccatatgataaaaatttgagtttcatgtttaaaactaatcatgcattgtaatattctccgtcttgttttacaaacaccaaaagttctttcaataactcttcttaaactagaatgatgaaaattaactatttcatcattgatttgaaatttggagccaatctaaaatattgaaaatgatatgttgtatttctctaaagtcctaaggaacctttgaatgatggatatctcaaatcaacaagataatatttacctatacatacataaatatgtcttaagaatattgtaaaaaaatagtcatcaattaaaataaaaaagattaaagctatataaaattaccttcaggaggatacaagaatcttatatttggttttcgaaccatcatgatataaatgaagtccctcattcgtagttgttcaaagaatctattctcattttcttattaattctatagaccacttgtgacgggtgagaattgaagtggtttttgcttctttcacaatatgtataaatgcatgatttgtaactaagaatgcagtcaaagtaggtgtaacatgcagtgaaaacatattagtattattatttaacacattaattttcacgttagagttatactcactttcatctgagttatatgtcatcctgtaaatcaaaatataaatctaatcactacttcaggaatgtctctagctttcagctagtgtgacctctagtagggtgttgtttctgtagggtggttgttttttcctgttttacagatctagctacttgtatcttgtagtacctctggtacttttttaattaatatatatatctttgctttccaaaaaataaaaaaataaaaatggtaccaaatagtttagatgaaaatgagtataactctgacttgaaaattgaagtgtcaaacaataatactaatatgttttcattgcatgttgcaattactttggctgcattccttattacaaatcatgtattgaaacatgttgtgaaagaaactaaaaccacttcaattctcctcggtcacaagtgatatttagaattaatacaagcgaatgagaataagatttctgagcaacttcgaatgagaaaaaatgtgtttaagttattggtatgtgagttaatcaataaatatggattaacacctaccaaacatattggtgttgaagaaaatgttgttttgttcttatatatgattggtaatggagcctcatatagacaagttgaagaatgagtacaacattctcatgagatcattcataatcatttctatcgagttctaacagttatacacaagctgggaaataacataactagataaactaatcctatgcatgttgatgtttctgattacatcaaagatgatgaccgttattggccttactttaaagattgcatatgggctatagatggaactcatattactttacatcttcctacatataaacaattgccatttttagtaggaaaggatattcaagcacaaatgtgatggttgcatgtgattttaacatgtgttttacatttgcaatgtgtggttgggaaggatctattcatgatggattttcactaacactcttcgaaagccaaatctaaaatttccttatcttcctggaagtaatttgatatagcttaaattattattttctaattgatgattattttttcacaatacatatttatgtatttataggtaaatattatcatgttgactcgagatatccaccattcaaagatttcttaggatcttagagaaatacaagttatcatcttcaatattttaaattggttccaaattttagatcaaaagatgaaatatttaatttttatcattctagtttgaaaaatgttattgaaagaacttttggtgtttgcaaagtaagatggagaatattgcaatgcatgatcgattttaaacttgaaactcaaatttctatcatatgagcatgttttgcactccataattatgttagaaggataaattctagagatttagatattgttgaaaacttagagaatgttaaagcattatgagctatagagcaaaattttaatggtgaatcatatacttcatcatgaagaatgatacatggaataagtaagaaatgctatcagagatcaattgtcaagacaagtgtgacattagtttgtctaaggtctttactttttgaaataagattaacattttaattttgattgcttgtacgaataattgaagtacttatttaacatagtaataagcatgtaagttttagtcaatgtgaacatttatggtttatagtcttatttattttgctgacttgttttttattttattttttatgagataatttataaagtacttgtagaaatatattaaatatttttaatacattattgatttttctatgaggtaaatttaaaataacaatgttattaataagctctaagtgtaagttcatatgtagaaccaacactaatcaccaaaatttggaaacattttattaatagaatattgtaataacatgcttgttaggctaaaaataataatatttgaagtttttatttatctattatttgaatggctttttaattaaaaaaaatgggcgtgtatgaaaaaataatttttactaaacaaacatgtttatttcataagtcttttatgtaattttggaattaaaaagcacttctccacttgtcatatccaaagaagttaataatcacttttaattaaaaaaaaatgattttttataattgtaaccaaacataaatacatattctgttttttaaaatcacttattttaagcctaaacaaactcatccaaaaacttattagttccgattatattctcaagtggcttaacttagagaatcagcataaataactgcattgaagttgctcttctttcttttttaccagggtgcagcatct

SEQ ID NO: 3159 - DNA, 4189 bp, Glycine max
  Intron number 1 from transcript Glyma14g09180.1 (locus Gly ma14g09180) derived from phytozome v7.0 (chr-ID Gm14; pos 7178856 to 7183044 reverse strand)
aggcttaataaggctcttgttcaaatttctaacaggtaattatccattcgatcatttcttttctcaccattatgatcattcatataagttgacaggttgggaaggagggttttaggatccacggaagaaggagagagatcttaatgtcgaatctccttatcgaattctaacaaaaactaataaataacattaactggtagtataacttctcgatatatttacatgtttcaattctttggatagaatataacattaatattcaatctgaaagctaatcatatactagtttttttattcttcaataatatgtattctataaaaatcattctcatatttttttctcacaaactcaaagtaacaaccattgaataacttaattaaagtttgttaaacaagtgcttaccatattaatatttatatataattaagttgataaattatcttcatataggttgtaaattgctttcataagtataatcataaataccttatgagttgaaaacatattttatgaacatataagttattttcaaaagtaattctgttagtatatgataagtcttttgcatgagaattaatatatgatttgtggtgcaggaaagatgaaaacaccggaaagatcatcggcagcattcttatccgtggtgggcatcactgacacacgagttgacttagacaaaacaattaaggagaatgatgccaagtacaaagggttcctctcaatgatggcttcaaaattagcgtatgagaatgaagaattcgttagtaacgcagtgcaaaatcattgggatgtaagttctctaatctctgtatatgtatgcaatattggtttgctagatggagaaagaattagcgtaactaataaaaaaaatagttatatatatattagcgtaaatatgtaacttttttttagttttggtgattaattttgatgtctgactcgggtttaatttacatttgttttccttttataatatgattgcagatggagtttttggggtcacacagcttctggaacggtacgtaattaagaagcatcctttgtaaattttgcttagaagatacgaaaatttacagcagatagataaaacatcttttcagtactgttactagaaatatgttttgctaagctggtttcctgatctgaaaattaaactaacaatatcgaagtgcatagcatctcaacatgaagaaaaggaagcacatttattgcataaaatatttgcatgccatttcctctattatactaaggttacaaaaatggtatatccatacatcaattattctagcttagttcatacttgtttaaattcatttatttagttatatatgagcttgagcttaaagttaggctcaatttcttaaattaataaaacacaaattttatagacttaccattaatagtccacaaataattaatttgtgtttgagtcttatttttaaatagattaacaacataaaattttaaatataattatcatcttttcttactttttaacaagaaaatatatgttaaatatatataagctaatacaaaatatatttaaagaaatgccattaaaaaaaaaataaacaagtcataggcaagctagtaagttaattaagttcaagttctcaaatttttattcaattcaagatcaaactttagtttatataaatttgattgttcaaatatgtcaagcttgaacaacttttttttttctttctacaagttaaatccagactcttaattgcatggaatttgaacttgatctgttcaaatataaattctgaaattggtattacacagttaataaaatttaaacgtaaatattaacattattaagagagaaaaaaaaaacaatggcagaatgtttactacggaacacagttaatttcatggatccctccctccatttaccaatgaatgacaagtcacattttgcttccgacctaacctttggttttttaatggtatgcttccaaattttttacactgccgtagaattttagattattgcaatgtgctttttttttttttttgcttgtttgtttgcttgcttttgaattcatttgtctcgtgtctttaaggaagatgcttccaccactatataaatacgtggccatggttgcaagtcgttaatttggagtgaattacaaatttcttacaagttgcaactcagaagtcaggattgaaattttctctcttgacttgatatatcctaggttacgtagatttcaaacagagactatcatagtatcttaataaattttatttttataatgtctttattatttatgaatgataaaattttcagaaaattatataaaaaaaattattgatgaaatatgacataagtgaacttcaataatttttcaccttttatatcacaaatcattcattttaatcatttttctcttttatatttttccccgacatctacgtacgggctcacttctcattaacattcactagccctttttcataaaaaaaaaatagtgctattataaaaaaacttttattctctaaaaaaaaaaaaccttttaaaattttaacgtgtttgtttaaactttttttagaaaaaaaatctgtaaatgaaaatagattttatgttattttcaaaagttacttttaaaatgaatctttaaaaaataattcaccttttctataaattcttaaaaaaaaacacttttttctatataataaaaaaatccttgaatttctatcatcctgaatacgagtgagcccttttggctaggattttgctaaaaaaaattgtgatttcgaaatcatatatgaaattatgaatgatgatcaacaagacggccgtagaaaaatgcttggctttaattaattgcgccaatctatacttaagaaggaattccatttgctaataagtttagaaaagacagccaaaagagagaaatttgggaagatctcttagttaagtttgtgataatttgtttaaaaatagtactttttcctattttttttaccatcgtcaatctaaaatgctgaaacagcctgcttctttaaaattacaatcactctcatcgccatatataaatgaaatggccagcaaattttcggtatgtggatataaaggatcaatgaatattaatgtgttaagacgtacgttttaatgttttttttttccttttctttatttttcttacgccagctagcttatactagtactcacttaagatacccacaaaacatttaaaaacttctttcaaattaagaattggaatctgttttaaagaagaaaaaaaagaataattatataattggttgcacatagccatagcctagacatgtctgactttttttcttttatttaataccactatacatgggacatgtttagtatataaagtaaacttaatttgtataaaagaagaaaaatatctgtaaaacaaagaaatctacacacacaaatactcccttttggatccattataattgtcatctaaaaaaatttgttcaaaattaattatcatcttaattttttaatataatattaattatctttatctacttatattcctagtgatattaatgatatggactactaaaataaaaaataaattaataatcaaaaggttaattttataaaattgtcattatttttcattgatttattgatttttcttagtatgagtaaaataatctaagataataataacaattataatgaaatgagaggagtaacaatttgagatattaatctttattgatttttcattgatttattgattttattgtttgtttttatcttatttattcccgcaatatttgagataagtacttagttagattcttggataaaatatgttttcaattactgtattctcggtaaaactaaattttctttatgtgatgagagattaaaaccactatttttctaaaatttaaaaataggatcgatcgaaactaaagtagaagactagtatcaattttaagtaaaagtatgggaacaaaaaccatatatggagatataaggttggttagatggttaagaaaaaatatggtgagtttaatcttttttactagaaaaaaaattaacaattagcatttatgatataaaaaaaacaaactaaaatcatattttaccctggattctccattttacatgtttatcttttgcttgaatgggattgatgggatgcagattaccaagaactctggtccacacgagcaatcata

SEQ ID NO: 3160 - DNA, 612 bp, Glycine max
  Intron number 10 from transcript Glyma19g26880.1 (locus Gl yma19g26880) derived from phytozome v7.0 (chr-ID Gm19; pos 34028411 to 34029022 reverse strand)
atctgacctggcttctcactctagcgaaatccaaggtaagatactatttgttgtagttctcattattggaattttttttttataaatttgaatatgcttttcaaatagataatattctttatgattgctccttaactttattttaaatagttggctaaattacaattttggtccccccccccccccccccctctttttttttgcgattttagcctccacattttagaaaatctgcaattttagtccaatcttcaattttgcatacgctttatttcttgtattttggttcaattgaaccccaaatctaacatttcatttaagatgctatcaaaaaagtaatttaattaattaaaatatgaaaaaataaatgtatgaaaaattgagcattggatcaaaattgtggattaagaattaaaggaggattagaattgcaattaaacctaaataatttaagtacaggctttttgtagacttccaagcattctttggcaataatgtggtctatggcatgtgtgtttggcgtcaacagtttccattgttatttgtattatggtttaccttgtcagcttcatcttgatgggaaacaaatgtgagtatgaggtttttcagtgg

SEQ ID NO: 3161 - DNA, 8136 bp, Glycine max
  Intron number 3 from transcript Glyma01g34340.1 (locus Gly ma01g34340) derived from phytozome v7.0 (chr-ID Gm01; pos 46712261 to 46720396)
ctattcgaatagctacagtttttgcttcattgaaggtattacctatacacctcatatatttacccaaaaaaaccctacacacctcatactctatatttgtaattaatccaggttaagattttaatgaactactcttgactcactgtaacgagagagttgcatgtacttattaagttatccccttttcttcttttctcccttgttttctttttacatttttttatataatataccctttctaattttcattcacttttggtgtgtgcatattttggtgcaagtctaactaactttttgagcagaactcactcaaccaaataattactacattatgattcctagggatccaatcagttccctatttgtgacaactgttacttttccccattatttttgttcaagcatgatatggttgtttgcatgggtatcaaacttaagtcaaaataaaactagattgctacttacttgtaaagtacaatataggtcattcttctattgattaaattgagttactctttcccaggagagttaggaaggggttttcatcatgacaaatcaaaatgcaatgaatatatataatagaaattcaattgtctaaaacatcaacctaagaaattgaagctcgtgtgatagttctatgacgtgaagaattccatacatactttctgaattgaaatacatggaacacattgtgaaggttatacaatgagggaggtaaggcaatttgataggcaacaggcctgactctcttgaggatttggaatggattgatgaaacaaagatttagcttctttgtcttgatggcccttagaaatacatgcttacttttatcaaactctagaggttgtctatggtttcttatttgaataaccctttttgtctatttttagcaacttgcaactcattcctaatcattttgatcttttcaatgatttcctagactagtcccaaaaggttcctttcccaacctcaaatccacataagggagtcctacatttacagccataatgagtctcgtagggtacatgtaggaaaactcttagggtctcataaagagtcctatacttacagccataaagagtctcttttggtgctctatattaatttgttgacaagttaggcatctagacacaaactctaccatttccttttcatgtctaaccaccaaaacattctctaattaaggtctaggtatataatggtagcttaaatatgtgctgagaatccattctgctaggaaatcaacgctttgataccactatttgaaaatcaacgctcccacaaacaaagttacttacattcataaaggattgtgagaacacaacaaagattacaccgtagaaaaataataacaaacacaagaatttaacatgttgcggtacctcttgcatacatccacaaaaccgtctcaaaaagtatttcactatcacaaaaatgattacaagattgtaactcaccccaaatagtgtatcactctacaaacccgagtaccccactcaatggttacaagaaatgataacactctcacacaaagacacttttctctcaacaaagtgactttgtttcacaatctctcttctcacacactctctctatgtgttgtgtttctccactaattatcttctctatttatagtgaagattgacaccaactataataaataagctctcttgaaagttgaaacaaaaacaactttcaatgcatccatttaactaagattcatctaataaaataaatctttcactttgcatttaagccacttaaaccttagtgataaaaattcaattctcaatgtacatgcaccttatcttttgacttgaaattctacacatttttatgggtttctcttaagatttgaccaattaaaccctcattcttaggaacacaaactttcctaggaaaaaatggccccatcattagccacttccattttgccttgtcatcgttttgtgtcattgacaagaaattatttttaccgtacaagaatctccattgaagtttcaactcaaacacaatccttgtctacttttgatcccttgtttataaaaatgaggaccacatatgaaacgtttttataaatgaaatactaaaattgagcgatttatttttaagggactaaaaatgaatatttaactcttaattgtttgtaggaactaaaaatatatttaattatgaactagatcacctattatttaattaattagcaagagacaacacaaatatgacaatcacaatcttgtgtttagatcaatcttgatttaaacttaattcagttaacctaggttaccaaatctattaaactagcatcaagtagatttcaaattaatcaatcctgatatttgccaccacttcaattatgagattaaagttcaaatcgtatcagatctaggtaaacaaaattgtgtttgcaaaagtaactcataattggagaaagagaaaaaaatagaaagtaatatttaaaacaaacattaaccatataaactcaaaactaaattcataattattgaataccttagattgactaggagtttagctttccatagaaaccaaaatctaagtttctagaaaaatgcagaaaatacagaagagaagggagaaatccttaaacctaaaaggtcaaaactaaacatgattcaagtttttgcactctggttttcctatatataatattcaattctttgctagtgcatactctaactctagcccaacttctatcccacgaaattggttttttaaagacacctcatttgccttatttcttaatttgagtgagttgtgcgtcaaacactaaggcagtgtcactcatataaagaacctcatcaagtcgaagttcaaggccaaattctaccattgaaatgtctgaatagattctggatgcatttcacaagatttttagatttctctcttaattttcctggcatataaagaacattaaaattagaaatccatagctcaatttatgtgttggtagttggttagatgatagttgatagttgatagttttagagaattgttttagaaagaaggctatgtcattgatttcttggattgtcaattacaacataccaattgtctatttataggctcaagtcaccaacttctcaatggtggtgaatgtttctacattactttagatctttctagagttttcatgatagattagtatcatgatagttctagattcttctatcttatacatacacttatagttctagattgttctaccatattctatagttctaggatattctactattttcatacatattatatttaagaatattctagaaatttgtagcaatttcaacactcctccttgatgcaaatttctgtgactccgagtatagctcgtaattcttcaaatcttggtctcgacaaagccttcgtgaatatgtctgcaatttgatcttctgttctacagtagtcgagtttgatctctttagttgcttcagcttctctgataaagtgatacttgattgctatgtgttttgttctgttgtgatgaactggattcttcgcctttgcaattgctgatttgttgtcgcagttgattttagtaggcttatcttgtttttctcccatgtcttcaagtatcctacgaagccatatagcttgactcgctgcttcagcagctgccacgtactctgcttctgctgttgattgtgctactgtagcttgcttcttcgacgcccaagagaacattcccgatcctagtgagaaagcatagccagaggtactcttcatgtcatctgctgaacctgcccaatcactgtcggtgtagccaagtaattctgagttggtttcggtagtataccatataccgaactcttttgttccttgtagatacctcaaaattctttttcctgctccaaagtgtatttgacttgggctttgcatgaatcttgatagaagacttgtagcatacattatgtcaggccgtgtagctgtcaaatataggaggcttccaattagacttcggtatttggatgcatcagcttctggtgctccatcattcttctgtagtttctcatttgttatgagtggagtagcaacaggtttgcaaccatacatcttgaatttcttaagtaagtcttttgtgtatttcttttgcgagatgaatatcccttcatttctctgacttacctctatgccgaggaagtaactcatcaaaccaaggtcagtcatctcaaaggtctttatcatgtcttctttaaactccatcatcatcttagtattgtttcccatgtagataagatcatctacatatagagagagtaagagagtgtactgaccttgagacttgatgtaaagtgtaggatcactcttgctcctcctgaatcctcgatccatgaaatactgatcgattctgctatatcatgctcaaggtgcttgcttcaaaccgtagagtgtttttcttagtcttaacactttgttttctttgccttcagacacgaatccttgtggctgctccacatagatctcttcttcaagtacgccgttaaggaaggcggatttgacatctagttgatggatactccatcctttttgtgacgcaagagctattagagctcttatggtatcaagacgagctactggtgcaaatgtctcattgtagtcaatttcgggttgctgtgagtaacccttagctactagcctcgccttgtgtttctgtatggtgtcatcaggattgagctttgtcttatagacccacttaaccccaatgatatcttttccatggggatgatttactaactcccatgtgttgcttttctcgatcatctgtatctcttcttccattgccttgacccatacttcctgctttgacgcttcttcaaagcttctaggttcaagtatggccaagttacaggtttcatatatgtccaccaaagatcttactcgtcttggagtagactctggtgatgatagttcttgatcttgttgttgtggtggaggtgaaggtggttcacctgggtcttcttcctcatcttcttcttgaggtagttgagcaggtataagaacgttcttctccactttttcttcatcccaattccaagaagcatattcatcaacttcaacatctcgactgatgacgagtttcttagtttgcaagttgtagacacggtagcccttagagatattgctatacccaaggaagatacctcgtatagtcttgtcttcaagcttgtgcctcttcatgtctagaatatgaatgtagcatatagatccaaagcccttaggtgctttgctgatggcttcttcctgttccaagcttcaatcggagtcttgccttttacagacttagttggacatctgttgagtatgtaaacagcagtgtagactgcttcagcccagaatgtgttaggtagtcccttctccttgagcatcgatctagccatctccataactgtgcgattctttctctcggacactccattttgttgaggagaatatgcgactgtaagttgtctctcaatgccttcatcctcacaaaatctttcaaactcgcgagaggtgtactttttgccgcgatcacttcttagtacttttatccgttttccactttgattttcagcaagggccttgaactttttgaatactccaaagacttctgatttctcttttagaaaatatgcccatgtcattctagagaggtcatcaatgaagagtatgaagtacctgttgttcccatgtgatggcgtcctcattggtccacaaacgtccgtatgtatcagctccaatagatctttcgctctccatgctccgtttgttgagaaaggaaatcgttgttgcttaccaagaagacatccttcacacacttcattgttctcctttatgcttggaagatctctcatcatgttcttctcatgtaacaacttcaaggcatgtgagttgaagtggccaaatcttcgatgccatagccatgaatcatcaacttgtaccttcatggcaatgtttgttgcatattttaaatttagagggaagcttctattgctcttattcatctttacttgggctatctcagaccttttatctttgttgtctaagatttttcatacacctccttcaaagtgaagtgtgtagcctctctccatcatttggccaatgcttagaagattttcttttaggctgggaactagtaagacatcatggatgagtcgcatacctttatatgtctccaccatgacagtgcctttgccttttgattcaactacactttcatttcccagtcgaactttgactttggcagactcatcaatacttttgaaaatagtctcatccttggccatgtgattgctacatccactatccaagtaccagcttcctcccttttcttttattgagtcttgagtggcgtagaacatacattgttattgatcatgctcctctacgatattagcttgatgcctatttttgttgtgacaatttttctctacgtgcccgaacttcttgcaatggttgcattgtggcatattacggaaccaacaattttgctctgcgtggccttgccttttgcatatattgcatggaggatttttatctatgttgttcttaagaaaattcctcgaaccttctattcttttggaagtttctccataatttttctttcctccattttctttgttttggggctgaaatttaaactttaactggaaggcattttcaattgtatcttctttatgcctatatagtctttgctcatatgcttgaagagagcccacaagttctgtctctgatagagtggacagatctttggtttcctcaatcgttgtcacgattgggtcaaacttttggggcataataattagaattttctcaacaattttcttgtcaagaatatcttccccaaaagttctcatttgattaactattcctttaactttagaatagtaatctttaactgtctcagactccttcatcttcaatagttcaaaatctcttcttagagattgaagtttaacggcacgtaccttaacacttccttgaaactcctcctgcaatgtgttccacgcttctttggcagtcttagctcccataattcttgggaaaattagatcagtcaccgcttgttacaaggtgaacaacgcctttgaatttttctgtttatttttcttcaactctttttcttgagatgcattaaaagctgaagtatccgcgggaatggtgaagccttcttctactatgtcccataaatcttgagatgaaaaatatgtttccattttaacacgccagaaatcataattttcaccattgaagataggggcagaaatagttgacaattgagtagtgttatccatagcttaaaaaaatattattagagtgggttaatagtacaaaggaaatttttgaagtagttgggaggattttgaaatggtaggtaggtaatataactacgcccaatgtatgaccgaaccaggctctgataccactgttggtagttggttagatgatagttgataattgatagttttagagaattattttagaaagaaggctatgtcattgatttcttggattgtcaattacaacataccaattgcctatttataggctcaagtcgtcaacctctcaatggtggtgaatgtttctacattactttagatctttctagagttttcatgatagattagtatcatgatagttctagattcttctatcttatacatacacttatagttctagattgttctaccatattctatagttctaggatattctattattttcatacatattatatttaagaatattttagaaatttgtagcaatttcaacaatatgaccaaaatgttgaaacaactgtgtcaaaatgaaacaaatgttgttaaaaagattcgaagtccaacatgacccaataattcaacttaattagtattaggactaatcaatgaagataaaaaaaaatcatttaaaaggtaattataagagtaattaaatgtgttaaagatagtaagtagtaactatcactgatcaagatgtttaaacgtggtgtcaatcttgatctattgcatgtttctcaaattctaccacacaagttatacttgattttcctttaattccttatcttctctatttaaggtatatgctataacttctgaaagagactattcaaatgtttctatctttttaggagttgcc

SEQ ID NO: 3162 - DNA, 879 bp, Glycine max
  Intron number 8 from transcript Glyma12g03130.1 (locus Gly ma12g03130) derived from phytozome v7.0 (chr-ID Gm12; pos 2042318 to 2043196 reverse strand)
ggtcacaagcaattctcttttattccaaaggcaaggttttacttttaataagaatggtatttaggtaaatgatactttgtgaaaaccacttccccagtcccccccttatttttcaatacgtgaaatattttatccatcattccttttggtttgctttgctcgagtcttgagtgatacacttgtcttgaatgatatcttgcttatttaagtttgtaaagtttttgtccatcataagataccagaagatcttgtagtatgcatttttatgtatagatcaatagatagatttaaatttttttatgataatctgatatggaaacttgtccattagcttcttcattgaaaggcagttacctttctttggaataaacttttttgtagtttttgatttgattattgggtgtgcttctttaccatggagcaatatttaatcgttggttttaaacttctaatggtttaggaagaaacaagtgactaaaattttgtggcattaatttatgtaattatctggtgagattggtgcattggtttgacattcttagaatctgggcttgggcctaactcaaccccaaaagctagctctagggtgaggattgtctcccatttatatactctatattggctttatctctggctgatgtgggacttgggtgttttccaatagaaatgatgattgcatctttaaggaggtcgtcttgcttaaaggaggaaatgtcttaggggtttttgttgtttgggtaaccacctattgtggttaattttttgtaattggggatggcagtttctgccttgtataatatgttttttcagtacatctagtactgacccctattaatactatcagatttttgctgtgcaaaaaaaatctttaagggtgtc

SEQ ID NO: 3163 - DNA, 2449 bp, Glycine max
  Intron number 2 from transcript Glyma13g39770.1 (locus Gly ma13g39770) derived from phytozome v7.0 (chr-ID Gm13; pos 40297049 to 40299497)
caaggtacactgcatatgcacttcactgtagtgttcttttattatattgtttgattcctgtggtagttagtgattaagaaaagatgtatgttgtctgatgtggagggagaggttgtggtaacccttcattgaatgaaaattcagaggccagagtaattgtctcattttattgcatttgaaggttagatcattagtagtggaacttattccttaggctggacatgttatgtacatctggtttaatactgtgcttgaatctgcatgttctgcttttaggtgattcagcttgactaggtttagtctcagcagtatgtatacaactatacatttccctggctctttcttgtctataaaacactgatttattttaagtttggtggcacttgatattggcttgtagggataaatttggaagcagcatggattagaacaaaattagctctgtcataaccttaaacatgttagttgtatatgataacagaaaaaaggacatggtctggattctaaaatgtacattaagctgtttgccaacagactaccatcggttagtgttcttgttaggcttcacgaacatatcttttactttctcttccaaagaaactggtccacctagagataataattgagttggagctccattctctaaaagatactccctgcttcatgcatggaaaataattttttctgatgtcaaattgcatctgatcactaatttgtatgagtaattctaaactgtggtgtgagcatcattgtggtttgagtcttgaagttttcttctgattttctaactgggattgtacttcaggctctttgtttcacccagtgtttttcatttggatgtggatgttcaatatattttatgcgtgatattagataattcattattgataatggcagatttgtgctgaattacaagtgtgaactgcttcatagaatgttgccaacagaaactgtttctctttgggtgaaaagttatccagagaattggaaaatagtcctgcttagtgctttggctgcttccttcacgtttctgatcgttgcatttcctacttccttatattaggcacatttccactatttccagactgcggctttgatttcttcttctcaagatggttgtctctcttggttcgtttccctcggactattaaatcttcaccactcacagaaaccttttgcttatttctttcattcaatacctttgagttcagggctgattgaacctctaccagggacaaagattctctctcacacaagagagtttctttaaaatgagagaaagactttggtaaagcacacaatagtaacagggcctgatcttcatcatcaatagtcacatctatattttctagatcaagaatcagtttattgaagacatccagttgagattccacagttcagtcttcttgcatcttgaattaatataagacttgtttaagataaagacgatttaccagaggtttgatcatgtacaaaccttccagtttcgaccaaattccagctattgtcttctccttcgagacctgtcttagtaccttgtctccaagactcaagatgattgcactgtgagtcttatccatcaagatcttcttatccctttcctccagctttgcatcaagagcggtttcaccttgcaaagcttcttcaagaccctgatgaacaagcaatgctctcatcttcaatcgccattagccaaaatcatttgggcctatgaattttttaacctcatactttgcagatgccatgatttttcgttccacgctcaccgcaccaatttgttgtgaattttgagagaggagaatatgaagatcagagcaatgatggataaggcacgcagatctagttacgagccaacactacaacactgtttctttattgatgaatataaatccacattacaatcttgaaacaatctgtacaatgtaaagtctatttatagacaactagacttaactaacatttctaagaatagtaaacagttaatctgttagaaacagaattgaacaggtcagcataactgactggaccaaaacctccatgatgcttccatgttcttgtcttgaaaaagtgctgatatacgttatatgtgcgtatagtcagcaccggatgtactcattaattgagtgattcttttcttggagtatttggttattgccatagtagagccggtatacagagcatacaaagggccatgaatttaatttagtttgaaaaagataaaagctaagttattacttgaattagatttctgctgtgatgtatagaaatgtgggccaatgtttttatatgtcttttttttgtgatactgtgcatagggtctttagtttacttcgtatgcagtttggctttaaatattattccatagggtcttttcctatatgcaatttaataaaagttattacataaattttcaggttatcacaacaatccacaagccacaagattgact

SEQ ID NO: 3164 - DNA, 2979 bp, Glycine max
  Intron number 1 from transcript Glyma06g47200.1 (locus Gly ma06g47200) derived from phytozome v7.0 (chr-ID Gm06; pos 49704455 to 49707433 reverse strand)
tcaaggttaggcaaccactagagaagctcatcaaggtaattaatttaatcaacccattttttttttctcttcacttgtggattttgcattggtgtgttacttctgatgattgctatgttttttctgactactattttggtgagtatggtatgtgaaattattgtatgatgtgacattgttattatcatcccttgtctaagtctaaggtcaattttcatgtggcatgtactgacaattttattaactctttcttaaatgaaaaaagtggtcatgctcacatgaatattagtcaaatctaaagatactgatgattttaaatgagatataaagttaacttgctgtcaatgaaagaaggaataagttatagattcaaaattttttattaacaaaaatgaataaaatgaataattaatatttgtcaataaaataaaaaaaatttaatgatttcaaattatataataaattttctcttttaacactattttttaaataatattctttctattggttaaattcgtgtgaatttaactagttttgagaatgaaattcacataagttttacccaaaagaagagagtatataaggtttaaaattatgattgtggttagaacggtcttttcatcgtaatttttaatattatgagaaattataaacaaatacaaccaatatactacaattacgatcacgataattgtagtcacaaaccgtttagtgaaacattgaaagagagtacgttggaaaaagagtttgtgtctatgttctaatgttatgactaggttagcatcactgatttacttttatttgcatgggagacggacatatcttcaatgggtttttcgtccattcagtcatctgaaccaagcgcagaaaacatgattcattgaatggtttaattgattttagtttatgcttgattttgtccatttcttttatttcctctcatagttctttgtctgctttatcataaagagtttgacttttttcttttttaaagtaaatctcttcaagtatgttttgcccacttctattccagaatgaaatctttactactttttactttttggtacatacggtttctttacaacatggatattaaacactaaaaaacatatattttttttttaaattttttcttatgtgatgactattatatatctaagaacaagaaaacatacaacttgatatcaaataataataaaaaaatttgatcgatttaaattgccataacatgtccacgttgcttgttggtggagtcaggactcagaagtttattcttttcgtaagacaaaattaacttcctccatacagatttcaatagctgttatacacgtttggttgtgtaacaacttttgtcttaaaagtatctccgttgttctatatctattgatgttaagaatcatttaataggaaaacattactatatttagataaaatatctttatttaatattttgataaattactattgaaacaattattaaatagagtataaatgaatcattatcatagtaattgatagattactatttttataattgttaaatagggatatagttgaaaagtacttaataatattctggatttttaaaatatcaataattaaaaataaaaaagactagaacattagtagatattaaacaggggtagaatataacaagctttaaaataaaagtgaaaaactagtttgcaagggaacaaaaaattgagaatttgagtaggatgtgtctctctaatgtcaagtggggaagggaaggataaccccctttttttttagtttaattcatacctttcgtttctatttcttcaccctttctattattctgtcttgttatctctaaaactttcaatcattaatagtccactattataaactatatttttctcaaaattttaatgagaagttctatttctagggtaattcaagattaatcctctgttctcttcatatttgacgtcattataatatacttatctagtttcttatatcacatggagatggggtgaaagattcgacttacataaacaaaataacttgacttagctagtttcaacttctaagatgacctgctttacttagattaaaaagcaatgataggtcaagtcaaccacattaaatgggttgacctagtacgctctgttttcctctgttttaacgtgaacgccttaacataatgtaacaactttatgatcaatcacgtgaagtcttgtttgcttatgccattggcacccttccatacacgtgtcatatacctttaaacttcttcatgccattatatataccatgtattaatgagaacttgtctacattttgctgatcaattcatgagcaatgattcttagattttacaaattttcataaatgacaaaaaaattattcatacttatatcatgtttcttagcttttttttagtatcataaaacgtataagattcttttcaattattgtcttagctttcataccaagtttgcttagaaacaaatgtgccagtgcccattatttagctagagtttatatataaggaacttgaaaacaaagttattcaaaggcatattcaataatatcatttcaagaataaatgtatcagaaagaaatggaacatttcatatatatcatgagctttcctttatgcctgtcaaacaatcatgaatgctacaacatatataaatacataaaaatacaagagcatataattcaatcatatggccttagtatttagtaagaaacaataaagttttattatgataatttatgcatgaatgtggtcttggtgttatttaatgcaataatttatgagaatataattcaatcatgtggccttagtatttggtaagaagcaatgaagttaattttgagaatttatgcatgaattttgtcttggtgttacttaatcagagttacatttgattatatataaggtaaaaattgaaatattattttgttgcagcttcttcgcacaaagtatagttgcgccaaattatc

SEQ ID NO: 3165 - DNA, 1470 bp, Glycine max
  Intron number 4 from transcript Glyma02g09470.1 (locus Gly ma02g09470) derived from phytozome v7.0 (chr-ID Gm02; pos 7419532 to 7421001)
gtggactgtgttgttttccctcaaaaaggaccaaggtaaatatgcttcttaaatatttctatttttatgcatgttcaacactattttatagagtgatgtaacatttaaaagttttatccaataaaaaaattagtctctgaaattgaaataaatgaaactggtgaaataatggttacttagctactgtctacattgcttttgtatgtttatgggtgttaataatatgtatgtgataggtacctcttttatatatcttgaagactgggactagaacttagaatttactggaattaaaaggatttagagaaggaacagaaattaaagataacccaagcttgagagaggcagaggctttaaaaatcttaattcaatctttgcatctttgttccgaacactttcctctcactaacactcctgtctccactgccaggtgtgtctaggaagatacaagaaaataccttcgcataaacctttcaatttatttttcctctgatagactctagaaataggagactagccattagtgtgcttaatggatacatgactttactgcctaatatggatgacttttccatattgaaaataattctaaataaatatgatgtgctgtgttgctgctacttgatgatttggatagaagtatggtacttgatagaacattatggcggaagttgatccatgtagccgaccccacctagtgggataaggcgttgttgttgttgttgttgttgtgttgctgctacttcaaaccaaagatgcatccatattcaaaaaaattgttttattttcttctttttttctggactaggtgtcaatttctttgtttcatggagcattgctattttaccctagatggtggcaccttttagtctgtcaagatactaatatctatattttgttactctgtaaagttaatttttcttaggttttctttcatactagaaaatcggctgaatgtataaactgctaggcaatttcagtttattagtttcctgtaatatcatcctttttttttctattggcaatgttacttaagcaactatgagtatgaaatcacacatacaattacatcttatctaaatagagttctgaaaaatatttccatccattaatgtaatgctctgacttctgcctgcacttggcataatacttgttttgtaagttttgttccctgtgaaatgtccagagaattagattgagttccagagaatttgcaagtacctaatattgttttgcaagttttgttgtcatttataatgttattttgcgaagatttctcctggaaaattgaaatgttaatttttctggtagtcaaatgatttataattttcttttaacagacttttttacaccagtcagcagaaaatagactggtgttgatgttgataaactcacctagataaggcttttgttgtttttgtgttatctactgacaccagtaactaattttttatatcagacctcatccaa

SEQ ID NO: 3166 - DNA, 7234 bp, Glycine max
  Intron number 5 from transcript Glyma06g24870.1 (locus Gly ma06g24870) derived from phytozome v7.0 (chr-ID Gm06; pos 22671661 to 22678894)
tggacacctgccaagcctctactctgttctcccaggtctcattgattttgtattttactattcttgaaaactcccatgctttatgaaataacagtatgtgatcttgattcttgagtgttccttgtccagaattaattaacacttattgttgaagtgcatattggagtacggttctactctatacattttttttacctgtacagcagtagttcagtacactctctgaaattcaattgtgcaaaatgttagttttagagttgatatctgtccaagtttaatgcataccttaggtattcacctcattagatttattttcttaaatggtgttttttcccttgatggaatggtcatattttctatcattggtaaaaacagtgcctgggtaatcaagggctgagctacttttcttaggtggccaaaatttttagatttcattattttatatgtatatttttcatacaaaaaataaaattatgaaagagttttgttaaaattcagtcaattttccttctgtataaatgatggttactttttttttttggaaggcagaaaatatataatattattaatacgaaaaacagtaccaggggtactgatgatagaacatacaaagcagctatgctgccagcctcccaaaaacaaaacagaaacccatcacaaaacccaaccaaaacagaaacaacccagattaagcaaaggcctccataaggttggaagaccaatggttaaaagggatattaaagtctttatctctagctttagaccaggaccaagctaggaataaggcatcatccatcactttggaagatacagaagaaatgccctgaaaaatcagtaagttcctatgcttccaaatagcaaaagttaaggcaatccaccacccacaccatctagaatggtttctccctacaacaaaatcatcacaaaatagactgaaatgacttgctggagaagaagggagggctccaatagcctggatccacctcaaggattcccaccacaagccaatagtctgattgcagtggaagaaaagatggcctgcctcctcctgctcaatatgacaaagagggcagacatactcctgcaggtccacatttcttctatggaggttagctctagtggggagcctatccttaataagcctctaggtgaaaatggcagcctttggggggatttttaatttccaaattagctgaaagttcctcccatctgaagcaggtctattctgatttgacagaagcccataagctgacctggtagaatacagcccactaggatcagctttccacagcaagttgtctttcagatgtctctgaataggataggcactaatctcttccatgaaagtcacagctactccctcctcatactcgaataggtgtctcctccatttcaaatcccagctccaattattttgggagaagtttcccatggtggaaataagatcattctactgcttactaatcataaaaagctgagaatatttctgttgcaagttgccatcctcccccagccaattatctttccaaaatctaattttatccccacagccagccttccatgccatattttgatggataatcttgaagtcattgtgctgatatagcttcctaagatccctccaccattgagaatcccagcaatgaactctgccattctgcaaggctgaccaccctccatatttggaatttaaaaccctgacccagaattgattctgattagaatataaatcccgaatccatctacccatcagggctgcattaaacttgagcagattcttgattcccagtcccccttctttcttgtggaggcagatgtcatcccatttgacccaaggaatcttcttttgatcatgctccccctcccccccacatgaagttcctttgcagagacaccaatctatcagctattctttgaggtagtttaaagaaagataggagataaattggtaaagcattcaagacagaatttatcaaggtgaccctgccagccatagataagcttttctgattccatttagagagtttagcttcaaatttactgatcaacggctcccataccacctgacttgaagatttgacaccaataggaatacccaagtaatgaaagggaatgcctacaattcaaaaactgagcagcttcatgagcccaaataacagaatttccaaagatcccaaactggcttttagcataattaatcttcagaccggaggccatctcaaaacctctaagcattgccttcaagacaagaacattctcccaagaagcctcaccaataaagacagtatcatcagcatattggaggatattaataggctccttttgcttcccaaccaagtaacttcgataaagatttttcagaatggcctctctcatcaaaccagtgagaccgtcacccactatgttaaaaagcaaaggggctagagggtccccttgtctcagacctctagtgggggcaaattctttagtagggcttccattgactaagatagaaatggttgctgattggagacaggcagcaatccattgtctccatttagtgcagaagcctactcttgacagcatataatccaagaaagaccaagatacagaatcataggcctttttaaaatccactttgaaaaccatgactggctgctttctcttcaaagcttcctcaaccacctcattaaggatcagaattccatgaaggatatgtctatcctttatgaaagctgattgtctttcatcaacaataccagaaatgacactcctcagcctgtttgccaaaagcttggctatgactttatacatacacccaatgagagaaataggcctgtaatcatttaaagattgaggatgacttgttttaggaataagggccatgaaggaagcattgctgcctctagggaaccttccatgatagtggaattcatccacaaatctcttgaattcaggtttcaacaccctccaaaaagctttaataaaattgaaattaaatccatcgggccccgggcatttgtctccaccacaactccaaacaacatctttaatttcttggtctgaaaaaggggcagtagtcccctctctttgattctgatcaatggaatggaagaagaccccatctagagtaggtctgaacagattatcttcagtaaatctatggagaaagaagttgagaacttcatccttgactaggttaggctattgaacccaaacaccatcaatgaagagaccctgaaaagcattgtagtttcttctgaagtttaaaactttgtggaagtaagctgaattactatcaccttccttaatccacttctctctagatttctgtctcaacagggattcataagcatttgaagcctcccacagctcttgttgaatggtcttcttggctttgactacatcttcagataagggtctatcaccagctataatttccaagtcatggattttactagcattaatatcagcattgactatactccactgtttgatggtgtttttgaggtttctcagcttgtttttaagaacaataccccccccccccatccaccctactgatccttagaccaagcctccctcaccatcctttggtaccctttttgattgagccaccaatccaccaccctaaagggcttgggaccccaagctaccatcttagttttcagaagaacagggcagtggtctgaataatctctatggagaacatgctgagaggtatcaggccatagggctaaccattgatctgagaccaggaatctgtcaagtctgctcttgacagatccattggacctaaaccaagtgaaattaccaccaaagcctctaatttcctgaagatccatatctgaaatccaagcattaaattctgaaatgtcagaattgtctgtcaccctttgggatgatccaatacgttcctcctggctccttatgctattaaaatccccaaggaagcaccaaacaccattaggattagacaacttcagctgtcttaactcctcccacaatattcttttcccagctagatcacaaggggcataaacattgactatgaaaagcctctgatcttcactaacccatctcccatctaacaatagaaagctatgacctttaattcttctatccacatgaaaaactgaattgttccataaacagagtaagccaccagctgcctaaacagaggggacacactcccaagagacagtggaatccccccacattgactggcaaatgattttatcaaatttctccctttttgtttcttgaatgcacacaagatcaatcttatgaattaaattgagcctccttatagcagcccatttaatcccccttcccagccctctagagttataagataggataatcatgattgatgattcttgatacccctctcaactgccatggagttgtctctctgctccatctgaatcatcatgtccctgaccttctgagtttcctctccataggtgaggcccatatcattgactaaagccaattgattttccaaggtagcctggttacaaatgttggctctcgggtccttcttacaagctttctgacaggcctcataaggctgagggtttatttccttgggaggttccagagcagattgggcctcttcactatattccttaaattcctttcttttaacataaaatttcataacagagttaaatgggcctagtgtttgctggcccaactcccccccttccttttgaatattagaaggacatgcagataaaggagtttgactctccaaaaaattagactgaccccttctacaggctaagctttccttaaaagctcctttttttgcttttcaccctccagattaccagctttagcaccagacaaagccaccaagcctttttgcttctgatccacttctgccacctcgataacttcttctttctgctcctccactacaacctttgggttgtggtttactttttccatttgcatgtctacacaactcccactatgaggcaaagcatttaatggtttcccctcctggaacagatgaccgttgctgggtacctgaggacttttgtcctccacgaatttgttgtcgcggttcgattgggccacgtcgtccttgtcagcgacagcccagtccagatgatagctgtcgatgggttgggtccgatggtcacgtcccacgtggaccggttggatatgtctccagtgcctggagtacccaccgtcggagccgtctgacccgccgtccatggaggctccatcgatgtcggcccctggggtttggcctgcgtgtgttaccggggtgtttggctccgttgaaaggggggatggaggaaaacacgtgatgggttgtttgaaattcgtcttcattccaaacccatgcatgtcttcaacgacatgaagaacgacgtccactccgtcgatgacagctggcaccgccgtctcgattcccggcctccgcttcgttctaatcaaaattctcgccgcatccatcctccatcgctcctccaccatttcatctacttccaccaactcaccaagctccgccaacaccctctccatatgaactacctcccatgcgaatggtggtaagccccatagcaggacctaggccaacctgtgtgttggaaaaatattttgggaccacttctgaaggtctaggataggtgtggagccgttcatcctttcctcgttcactaaacggagcgccttatcatcttcaaggttaggtaagataacccagtcatcaacccagtagcgagggttgatatcggggtctaaaacccatctcagttcctcctccactctttcaaacatgcccctattcttcaatctacccacccaggccttctgtaaccactccttgtgttccgtggttgggttcaaaatcacagggctctggacaagtctgttatcaccctgaaaggccaccttctggttagaccaggtatcctctcctggtgtcaccccccctagccacctcgacataagaccgaagtcttccacctatgtcatatactttctgatcacctttgtcatgttgcagcacctcctgtattctctcctttccgtgtataaaagtaccatactgatatcttctattcaccttgtccctttcaaactttggtcaattaacaaacattttgatcccaccaaggaaaatactattatccaactgcctttccaacctctgtacgtcatgaacctccttgaacctgacaaaaccaaatctatggcctgccttgtttttagctttatggatgaaaacctcccacaccttaccccacctttggaaagtctgtcataaatccttctcatttagcccatcagggaatcttgagaagtagaaggatgtgacatcatccttatctctccatgtaccactcctatcttgctgtttacaattattgagcacagaacgacctctctttattactgttttcttcttcctcctatgagatacttccacccacccttcatcagttctagtagggctgttatcctcctcgtaatttgccctcctactctctgcaagacccctgtgttcaccatatctggtgtttcttctcctttctctaacagcatacttcgccccatgttggctagttggggatggatgatggccttggccccccttttcccattctctcactcgaacgcgccctcttacactgtcacgaactctccttcgtattccccctctctgactcgctcgttctctcgttctaccctctctcatgtgtgtgtgtgtgtttctttgtagataatcagcagcatgttatgatggaataatacactgcttatctaaatgatgatggttactttgctttctgtcatgagcatttttgtggcaattacataattttgatgaacggagatttacaactttcctatattgagggttgtggttttaactaattgtacaacatattttccttcccttccaattaaacatcatatcttgaactacaaagaatatgaatttgaatagtctgctttttgtttttttgttacttttctcctccttccataggttttatcttcctggattaaatcaatactcttagcacttagtgtcgattaattattaaaatgtatagctcatgccaagccagtctgtttcaatttccacctggaatttataattgcttatatgtgataataagaaattatgttttctgtctagctgattattcttccttaaggtttgttgctgactgttctttttctaaccatggcagcttcattcaccaggtgttttggcaattggaagtag

SEQ ID NO: 3167 - DNA, 844 bp, Glycine max
  Intron number 3 from transcript Glyma03g38830.2 (locus Gly ma03g38830) derived from phytozome v7.0 (chr-ID Gm03; pos 45108740 to 45109583)
attgaggtgagttctttacttttagcacaatgtgtaaccttgtacagcattttaatagattttacagttttttttttgaaaaaataataaattgtactgttggttagcatgtggccctatttttgtgagttaaaagattcaggattagtaccagttacaaacaaatttttatttcagctaccataaaaaaagagctatcatattttgtcttacattagattatttagataagaaaatggtctgctcaccagaaaacatattaatatggttttcattttcactaaaatttatagttttatacatcatattttttagattattttaatcgttcaattttatttcctttgagtaatttatttactgctgaaactcacaataattggttgagtttatttcttatgtgtatttgagggttgcatattaagttattaaccttcatttattatgcttcatgagcatgtatcggtaatttgtgcatgattactttcatatagaatgaattctgaagaattacttttagaagattgaattttattttgggaatatttactcaaaatgagttttgtagaaatgggtttcttttggatattgcaagaacaaaattgtcctacataaagggcaagtattaaaaatgaaatttgcctagaagtaacatttagtcatttacttcttcagaaacatttatgggcaactttgggttgttggatgcttttttgcatttgaggttaataaattaacaattcgtcccaagtcccaactatttctgaggtgtttagtgcactttatttttcgcgctgatgatgttactgtcgtaaatgcaggttgtagccaatacaataaagtc

SEQ ID NO: 3168 - DNA, 1533 bp, Glycine max
  Intron number 2 from transcript Glyma05g26690.1 (locus Gly ma05g26690) derived from phytozome v7.0 (chr-ID Gm05; pos 32609819 to 32611351)
atctaaggtaattaaaatgtctttatgttgacatctcaatctagtactataagctcctttcattatcacaatataggcataggataaggattatcttgttatacatgttgattttgtatctaatattcttgttgaagtgcaatttgtctaacataaaattagtaattagttgttcttggggaaaatgttagatgagccctgctctaatgttacagaacttgaaagccctaattggccagctacaaattagctatacctttagcccttgtttggcataccaagaaaggcctaataggatagaataattaatattgtcctgatttatatgatgtttgaagctcataatgaattgctcttccatgctggatactttatggatcaagatttatcatctacattactatgttatttctaatgtttattttaagtagtatactgaaggtcaatgatgatgttgagtcatttagtatgtaggtatgtgtgatgtagaagttagttatgataggttagttacaaattagttagtaaggagttgcctatacataagaggggttgagagggagagtttatcttgtggtttttgagaaaattcagattgttgtgggaaagttcatacctcttaaaatctcaagggaggaaaatggtttaatataccatcaaaattaagagaaaatcttcaatttggtcttccaaagttacatgcatcaccaaatcaatctttcaaaaatttcggttgccaaactaattcctcatcatattcttgttctcaccactgtggtcctccaaagatttatcaccaaagtaatctttaaaaatttaattttgtcattgaattagtcttttaaagtttatttttattactgcttgagatctatgggcatggggaatttttttcttcttttcacttcactttgcttaaataatatgttactttgtaagtattgatgtcaaagtacatattttaatgctaaaaattgatcacgatttgtgtatcacgtatttaccgttgcctaattggtcacgattagacaagtatattactcaaattaatatttctttttcgtgattcaactttgcacataattgtctgctattctaaaatgtgcgaaacaattgtacaaggtttatcagatttttttctaaggatgacaattattcgactttttttcatggtttatccttccagtacgctaatggaagattcgttgtttctttgtttctcctttccattaccgtatgaatattgtggtctttgacacttttgtaggagtaggatagattgcatgtaaacattttctttagcctgtctttggtgaattgagaaatcttgttctaaattttgaagttcttttaaaatattttaaaactttcttctagataataatctctagaatcctcacttgcttaaaaatgctttctttgcccccatatatcaactacaacaagacttcctacacataaacttcttaaactccttttctcttttgctttgatgaaggtgtcttgatagagcagctatagtgtccgattcag

SEQ ID NO: 3169 - DNA, 3628 bp, Glycine max
  Intron number 3 from transcript Glyma06g41140.1 (locus Gly ma06g41140) derived from phytozome v7.0 (chr-ID Gm06; pos 44425460 to 44429087 reverse strand)
gcgtctatatataaggttgcatccttcataactaggtaaatactatattaactttttaattaatctttttattattcttctcaccttagtttcaatctctgagaatttaatcttggtccttcaatgtggaatttaaccattgctgttttgtttgatcaaattcaaccggaacaatgccggtaaaataataataataataattgtaacctccattgttgcaagttgtaacctccattgctgcaagtttaggagttgtacttgctatttatttcatctactgaaggaacaatgccggtaaaattattcttttcgtctctcacatttcactattgttaattcccttaattaacaagtgctgttattggttttgtagaggatcctttaaaatttgtatagcagggttctgttatgttcctctttgacaaaatttcatatttatacagtttcattaataatgtaaaggaatgaataggcaatttaatccctgagattgtacccattttgcatattagttcctaacttaatattaaattcaaaatagtccctatctttgcataagggttgcaaaataatcattccgttaaattttaaaataatgcagttagtgagttcaattttagtgtcacatggactatccaacgtgacactaaaggatgacgtgacatgacatgtggacgtgcctcctaaaagatgccacgccatttgatgataacaaaacgagtaaatagacaatttagtccctgactttgtaccacagtgtgcgacactttctacaccttgaaattagttcgatccgacccgataatggcttggggccctaacttgtgtggaagatgatttcgacaacattgcgcgaagggtggccttcgagaagttcaatgatgccatgcgacgaggttgttgttgtcatagtgctgctttgagaatgtgtcatggtggttcgtgcttcgaattcaggttgcattgttgatgatgggtatttcgagcttggttttttctctccaaaggtggcttggagtgaggttgtgactggggttgttgtggttttgggggtggtggtgatggtgaagaagaatatgggtagtggaagaaaagacgacgtcattttttactctttttttttttaaattgtacgtgtcatctcacttagacaaagattacatgtgattggttaacgaacacgttagcatataacgaattccgactaatggcagagacctcaagcaatttttacaaaaaatgttttgttaaatcagtgaggtaaaataaaataaaataacattatgcaattaaaataaaaaactcatccccaatgtcacatcctatcagagcattgtgtcccaatgtaatctggcacgaggtttacacgtaatccccaatttcaacattaatattataatcaaacactgctcatgaattatacaatatctatgaccccacactcatgtttcaaacatgtttaacacattgcgctacattttaacattggttcctaactaggaacctacactttctctttaacaatgtgcataaacacttttctcaatataaacactcgtcaggttattatatacttcacaactcacaacacaagtattttcatatcaagtgttaaccacacacttattcacaactaaatctcatgttcacaatttcacatctcataatttcaatataacaatttatacaaaatttttatcagaacatgggaagtaaaacccctcaaataattttgcacaattatatcaaaaccaattaatcaaaatcataggtatgaaaaatgaaaacactaggagaactcaattttatcaaccaatttgcatcatgacatcgatattgtatttataatcataaaggaaaaattcaataaacatcccaaaataaacccaatttaatcctctaaggatccctaaagatgttcattctaaccttaattgcgataaacccatcccttacctctaaacggactcacgtgtgtattctaacagcgatagtggtatctctaacaattttctgagattcttcaagcttttcctctgaatgttctcatagggtttctaagcattagagagagaagaagggattgaagccttcattttactgtctatgtgcgatgagtatttctccatctgcaaacattattttgaaaatcctgacggtaaagatctgagaaaatgaattgcgaatgacataccaaaacttacaacaatccaacagttaacgagttcaggattgtagttttactgagatagttctgggtttctgcaagaaaggaaaatctatgatgtaaagggtatttttctcatctctgacatgttttcataattatcaacggtgacaatgttcggaaataagttccgaacctgatgctcaaatttcacaacgatccaacggtgaatgagttcaagatcgtcatttttatgagataggtttggtggtatacggaaaaagagaggattttgggagagaaaaaaagaaaacgagattgagaggaagagaaggcatataaactatcattagtctcaaactgacatcacatgtttctatttataggtagggtactcacaacctatcatttactctatttatttatttttattattttataagaataaactctattttattctctatcaaatgaataaataaaatattctttttattttctctcaaaccactattttaattaatataattatttcttcctatttatttgattataaaaatttcatcattttctaaaattctatttatttataaattacaatcatttttaaattagtttttaaaaaatgagatgttacaaatatttatcagagaccaaatatatattgaatccaaaacaataagtagaagcatttgttacatggagttgtcaattcactatgctgaatgagctagtgttttttcaatatattctcaaaaagagaatttttctgtcgcaaaactagagcttactatggcaagaaaaaaaatactttatgattttcgaatagatttttggagcaaaaatataaatcaaagagaaaaaggtttgctggctctaattctatagcattcaacataagtgattcaatttcaaatcattttcttaggtcaatgcaaagaagatttaactcaattgattaattataatttcttaggtgattaatccttgattcctatgttaaattcctaattcattagttaacttaacctagaaattagaattgcacagtgaatctttaatatgatttcatccctaaaattaggttctcacacgttttcaattcagatctagaatcaaatttgtttccacaaaattcaatccctaaaattaaagacaggttgatcaggcagcatctaagcaaggatttggaaaaggatcacatgactaagaaaaatgaatcacaaattgagaatcacataaactacttcattcaatccagcaacttcaagtttagcttctatggatcataatttgatccaaaataacaccaaaatcaaagactacaatgaagggagaagaggcaaaagagagagagcaaaagtcacaaatctatcactgaatctaaaaatgtgacaaaaggttctgatattgatgttacaagctcttttaatgagtgctggatctatatttttttttgcc

SEQ ID NO: 3170 - DNA, 7709 bp, Glycine max
  Intron number 3 from transcript Glyma10g23420.1 (locus Gly ma10g23420) derived from phytozome v7.0 (chr-ID Gm10; pos 29569812 to 29577520)
ggaagcgccaattttttcattcgcacaaagctcaggtgaagcatacccgtatttttatagtatttttttcccttttatgtttttctttactgtttcttgttctgttaattgctgcagaatattggtttagtttagaagcgggagtttatgatccgacacttcttagtttggcacctcaaatgttttgaaatcagttgtttcttttaatgaattggtcaagtgcattcataatcttaattaatattttaaaaggtgggctcctcatccctatgtgcccccatttactcttggcctagtctcaagaaattccatgtaaatctccccctttaaattcaacagctgtttgtacctttagcggatggaagtaggagtttactcttgtgctgttttaattgttatcgtgaagtatatcctacccaaacttgtgttttaaaacaatacccatattcagacctatacttgtgagggtagcaatttagttccatgccggtaccctatggttacctaaatagtcagacccaaaagcattacctgcacttgaagctgaagatggtccttgaagaacaattgataattgctcctttaagatgaagatggttgtgaaggagactttgggttttcaattttgagatgagagaattaaacattaagataatttatgagttgagtgcacattatgacagatataggtgtaattagagttcttttaatttaaacctaatatatttaataatgtatgggtatggggtaggttggacattgaagtacccgaaactgcattgattaccataaaattttatgggtaaatattttcctattcccaaactcatttaaagggtaattccactccccatgtgggtctttttttctagtgtccctcgagtttgggtccaattgctgtccctactatgggattaccaaattaattaaattccaacttcccttggttgacaaagagaactgtgtgagccttaaacgcaaatccaagaagagggttgcagttgctttaggaaaatcgatgggttcttccaagaagcaaaaggtaatggaaaagatcaactgctcgtccaatgctgttgtcccactggagaaaccaggttcacaaattcacatggggagaaggagatcggtcagaaaacgaaatcctgctgttgcaacgacatccatgttggagaagttggtcgattcccaaaatgactcagatatttatgagctccttcccaagatggagaaacaaggttcccaagttcacatggggagaaggagatcggtcaaaaaaggaaatcctgcgattgcaatgccatcatccattttggagaagttggtggatccccaaaatgattctgatatttatgaacaccttcccaagatggaggtattgccgaattgcaattagatatgatatcctctaaaatagaaaatttgaaagaaaacagaaagtcaagttgacttagatatgtagcaaaattctcatatttctttccaaaatagtaaaaaaattctcataaaacaaccatgaacagagcaataggaaaatgttgagtgtgtagaaactgtttgatccactaaacatcagttgggcagtagatgtgatttaagatttcaaattcttaaaattttggttagctttttttatttttttatttattttctaagactcatcttcacttgacattgtccattagaataataaatttgaaggttttcatttctgtagtggttgaatttgtgaaatgtatttttgtctgatgaaagtgatttttgttctgatattaatacaacataacaacaatctgtttgtgcagtgaagctatgagctctattgaactatctgtgtatagaattatcttccaagagagttgactgttatagtttatatagttagttacaagagtaactaactgaactaactaagctaactctagttacaatgtaatcaatctgaattaaccgtgatcaaaacagtatctatgcttagatcccccctctagctatttctagcttggaatacaaaaattgaaaagaaccaggcagcagagccttagtatatatgcctgcaagctgattagcagaggtgacaggaagcaatttcacaattcctttctacatcttttcccgaactagatgacaatctatcacgatgtgcttttttctcatgaaaaactggatttgcagctatgtgaagagcagatcgattatcacaatgcaaaacagcaggttgatgtttgaactcttcaagtaggaaagtaagccattgtagctcacaagtggcactagctaatgctctatactcagcctttgaggagcttctagatacagtagtctgtttcttagactttcaagaaatcaaagaatcaccaagatatattgcataaccagtaatagatcttcttgtatcaatacaaccagcccaatctgaatcactaaatcctttcagcttcttgtgtcaatacaaccagcccaatctgaatcactaaatcctttcagatgaatgttgctatcagcagaaagaaaaatccctgcacctggggaccctttgatatatcgaagaatcctgaaagcagcttgttgatgagctgaggtaggttcaacaacaaactgacttaaatgttgcacaacataagtgatatctggtcttgtgttagtcagataaatcagtctgccaattaatctcctgtaagaagaagcatcctctgcttaaagagaggagcctgaaagctgatggagcctagttgtacaatcagagggagtagacactggtttagaaccaagcttgccagtgtcattgaggatgtccagagcatatttcttctgacagagattgatgccagcaggagttctagctacttcaaagtgtagaaaaaacttcaaatcacctagatccattattttgaaagcactgtctaacaattgtgtaatattttttatttcaatcaaatcattaccagacaaaacaatgtcatggaaataaaccagtagagcagtaatggacttggattcatgcttaagaaacaaggaataatcagatgtacactgattgtacccatgtgagattagaaaggaagacaatctggcataccattgcctacttgcttgcttcagaccatataaagatctttgaagtttacaaacttgtcctggcttatctgactgcatacttggaggaagaaccatatacacctcattcaaatcaccatgtagaaaggcattgtttacatgtagttgtttcagataccattgatttacagcagctagagccaataaaagcctgacaatggtcaacttggccactagagaataagtatccaaatagtcctggccctctatttgagtgtagcctttggctaccagccttgctttatatctttctatggaaccatcagacatgtgcttgattttgtagacccattcacatccaatggcagtcttatgctatggtagatcagtaaggaaccaagtattattaacctctaatgctttaatctttgcattcatagcttcaatccagttaggatctttagaggctacactgtatgattgaggttcaacttgttgtgtaacaaacaagataaccttttgataggaagtagatagtctgttataagaaagaacagaacagagaggataaagagtagtacctgtagagagattggcaacaattgatgatggatatgtgatgtgaaagtcttttatacttgcttggcctttgtctctgtctcattggccttctaagtgtctaagtgtctctttgtgaagtatcaggatcaaaagcagtggtagtaggttcagtaatatgatgatcagttgttgattctgacggaaagtcaccaaactgatcaatgatagtattaagggaagaaggtgacacaggtaagacagtaatgggatcaggtttattttggacagtgaaaggaaatcaatcttcataaaaaatgacaattctagaaaccgaaatggccctggtcttaaggtcaagggtggcatatccttttgtgcttggcttaaatcccagaaaaacagaagtagcagctcttggatcaaacttctttctgttggtagttagagtaccagtgaagtatagacaaccaaacactcttaaagaagtactatcatagggggttccatagagtatctcatagggtgttttgttaccaagaaagggagtaggtatcttttatacttgcttggcctttgtatctgtctcattgaccttctaagtgtctgagtgtctctttgtgaagtatcaggatcaaaagcagtggtagtaggttcagtaatatgatgatcagttgttgattctgagggaaagtctccaaactgatcaatgatagtattaagggaagaaggtgacacaggtaagacagtaatgggatcaggtttattttggacagtgaaaggaaatcaatcttcataaaaaatgacatttctagagaccgaaatggccctggtcttaaggtcaagggtggcatatccttttgtgcttggcttaaatcccagaaaaacagaagtagcagctcttggatcaaacttctttctgttggtagttagagtactagtgaagcatagacaaccaaacactcttaaagaagtactatcatagggggttccatagagtttctcacagggtgttttgttaccaagaaagggagtaggtatgcagttaataaaaacagcagtgtattaaagcataagaccaaaaaatggaaggtaaattagattgaaacaacaaggatctagtaacattaagcaagtgttgatgctttcttcctacaatgccattctgttgaggagtttaaacacaggaaatttagtgtataatttcagtttcatcatagaattgtcttagaatgaattcggatccattatctgatctaatcattttcacctttgtatcaaactgtctctcaaccatggcaacaaatttctttaagtgtgtttgtgtttcagcctttgagtgcataagaaaaatccaaacaaatctcgaatgatcatctactatagtgagaaaatatttgtaaccatttaaagatgttacactacaaggaccccaaatatcagcatgtataagggcaaaaacacatgaagaatgagatatactagaaggaaaagactgctttttctgttttgaatgatgacaagtatgacatacaaactgtttatcagttgtgagaagagggtaacattgttttaacaataacatcctttcagaagatggcggatggccaagcctaaagtgccacaagtctatagctattttattacatgaaaaagatgaaacactagtagaaacagcaggaacaaaagtagcagagacaaaagctgtgatagaactaggagcatactccttgagaggaagcatcttcagcctataaagaccttccaccatatcaactgtaccaatcctcttcaggttctgcatatcctggataaaacatttatcattcatgaaaattagcttgcaaggcaatgaagaaagaagcttagattagatatagagatcaaattgaactaaaagctaggtatgtatagaacatcctctaagtatagaaactgagaaaattgcactgtgccggcatgagttgcagtgactgtgtggtcagtgggaagcttaacaattatgggatttattttcttacaagaagaaaataaatgaggaaaagctgtgacatgatcagtggctcctaagtcgagtatccattcatctgaacctgtcttgcttacactacaagtaatggataagacattacctctgtgtgcattgctggaaccagtgattgtactaatttgattcacatgtgaattgttgtgacttgagctctgttgctgcagcagggccattagagccttatattgttgaggagtcaacttcatttcagtattctgttcatcttgattttgttctaaagcagaaccatctccctcttctttcaacacattcatattattgatgtttgagctttgagacttttggtatttatgtcgaggaggatagccatgcttcctgtaatattcatcaactgtgaggttagtgaaaccacaatatgtacaaagtttgcttcctttcccactggaatttcctctacctaagccactatgattactttttcctcctctggaaccatagttttgagggaaaccattttcctgaaacatctatcaactgtatgattgtctttgccacaataagtaaatgaaagtcctgaattcgatgaacttgtgcttgctgcattgatcatgctattgtttcctatcatatcaacaacaacaacaacaacaacaacgccttatcccactaggtggggtcggctacatggatcatgctattgtttcctatcatatcattgctattaatttgtctttcttgttgaactgcataagaaaagactttagctatgtcaggtaaaggatccatcatcaatacattggatttgatagtgctgaactgatcattcaatcctctaaggaattgtattacttgatcttgcttctttctttccacaacactaacaagagcatcacatgtgcactttggattgcatgtacaaaaaggatcaggctgataactttctaattcatcccaaataatacgcaatcttgtaaaataatcaattattgttttatcaccttgtctgatagatgccatgtcctgttgcaattctgagattcttaacaaatcaccttgtgaatatctagactttagatccttccatatgtctcgtgcatcatccatccagagaatgctttgtctgattgaaggtgaaactgaatggaccatccaagaaaccaccatattatttgtccttttccaagctgcatgaagaggatgattcgatgcatatccttgaattgaaccatcaacaaattcaactttgttttttgcactcaatgctgttagcattgatcgactccatgaactatagttcgaagaatcgagaactggagaaaccagtgctgttgcaggattttctcctagatgaagataatatggtctatgaatgtttaatgactgatcttgctgatcgctactcataatgaaagatagtgagaggaagaaatcgaacagatatagaagaacaaaaggataaggagtgtgcagcagagctcttcaagagaagtgctctgatactatcacagaatccatgtctgccatggatgaaaagaaaacttgcagaggaagataaagagaaaagaaattggaggaaaatctgattagcatagaatgagaattagcttccaagagttgactattatagtttatatagttggttacaagagtaactaacttgtaactaactaagctaactctagttacaatgtgatcaatctgaattaaccattatcaaaacagtatctatgctaagacatagcttgccttaattgtgacctctttggaggttgccttaattgcagcagcctagagggggtgtgtttaggccacattgcctacaaatatggcctagatagtgcttacaaggcttgggcaatcctcacattacaatgcggtgttttggagctgagataggttctaagctcaaattctaagagattttggtggcctgaagactgaacaacattttctgctgttattttgttgtttcttaacgacgtttcttttccagtattactcgattctttgtatttaatttttattgacatcatatgccaaataaatctgttattcatttttctttttcctttgcttgaagcca

SEQ ID NO: 3171 - DNA, 8265 bp, Glycine max
  Intron number 6 from transcript Glyma05g21280.1 (locus Gly ma05g21280) derived from phytozome v7.0 (chr-ID Gm05; pos 25857598 to 25865862 reverse strand)
ctatagcaatcagctcctgtgccagaaaggtaacagttatctacttgggggtatctacctacgcttcaaaatatatttcaaattttaacatcacatatgaaattgctctttgaatcttagtttttccttttgctagaatcaaatgttatcctagtgtttcaattatgaagtatttgcactgtcaatatgatttcatgtttttcattttttgtattcagtatatttttttaagaattataatcttgcaccttttgaaaatcttatactcacatatattttgtagtgctattatttcctaaatttactggtaagtagtgagatcattgagttagtccttaagccaaaaatctaagatgttatcagagtttgtcctagatccattgttgggttatttgcattgccacgctccagggacatagccttgggcgtgacaggatgtgttgaaaagttgccttagttgtggttacccctagccctccttagcccttaattgtggtctctttgggttgccttaattgcagccttaatgggggcatgtttagtccctcactgcccagagatatgacttaaatagagcttataaagcttggacaatcctcaccttacaagttgattttgtgggtttgaggtagggtcttaagtccaaattctaaaataatatcagagcttatcttagatctattctttggtcacctgcatcttagccctggatgtaacagggtgtgttggaaagccgccttttttttttttgaaaggcagaaaatatatatatatattaataagaaaaaactacagtaccaggggtactgatgataaacatacaaaggcagctgtgctgccagcctcccaaaaagagaacaaaaacccttcacaaagcccaactacaaggtatgacacctgattaatcaaaggcctccattagatgggatgaccagtgattaaaagggatattaaaacctttaactctagctttagaccaggaccaagccaaaaataaggcatcatccataactttggaattaataaaaggaaagccctgaaaaatgagtaaattcctatgcttccagatggcagaagttaaggcaatccaccatccacaccatctattctgatttcttcctgcaaccaaaccttcacaccatagactgaaatgacttgttggggaagaagggagagctccgaaagtctgaatccacctcaaagattcccaccacaggccaacagtgtatctgcaatggaaaaaaagatgtcctgcctcctcctgctcactgtgacagagggggcaggtaagatcctgcaactccacatttcttctatgcagattagctctagtagggagcctatctttgatgagcctccaggtgaagatggccgcctttgggggtatcttcaatttccaaacaagctggaaatttatcccatctaaagcagtactgttttgacttgatagaagcctataagcagacctagtagagtatagcccactaggatcagctttccacagcaacttatctttcaagtgattctgaagagtataagcagtgatgtcttccataaaagccacagctacaccctcctcatgctcgaagagatgtctcctccatttcaaatcccatctccaaatattctgtgagaagctacccatggtggagataaaatcattctgctgcttactaatcgaaaagagctgagagtatttctgttgcagagtgctttcctcccccaaccacctatctttccaaaatctgattttatccccacaaccagccttccatgccatattctgatggataatcttgaaatcattgtgctgatataatctcctaaggtctttccaccagtgagaatcccagcaatgaactttgccattctgcaatgctgaccaccccccatatttggaattaagaaccctaacccagggttgattctgattagaatataattcccatatccatcttcccatcagggcagcattgaacttgaccaggttcttaatacccaggcccccttcccttttgttgaggcaaatgttatcccatttaacccaagggatcttcttttggtcaaggtctccaccccacatgaaatttctctgaagagagaccagtctatcagctattctttgaggaattttgaagaaggagaggagatagattggtaaagcgtttagaacagagtttatcaaggtaaccctgccagccatagataggcttttctgattccatttagagagtttagcctcaaatttactgatcacaggctcccacaccatctgagatgaagatctgacagcaataggaatacccaaataatgaaaagggacacccatctgcctacaattcagcacctgagcagcttcatgagcccagctaacaggcttcccataaatcccaaactgacttttggcatagttaattttcagaccagaggccatctcaaaacctctaagcattgccttcatggcaagaacattcgcccaagaagcttccccaataaaaacagtatcatcggcatattggaggatattaataggctccttatgcttcccaacgcagtagctactataaagatttttcagaatggcctctctcatcaaaccagtgagaccctcccccactatattgaagagcaatggtgctaggggatccccttgacgcaaaccacgagaaggggtaaattctttagtaggactaccattaactaggatggaaattgttgccgattggagacaggcagcaatccattgtctccatttaccacagaatcctaatctggatagcatataatcgaggaaggaccaggaaacagtgtcataggccttttcgaaatccactttgaagaccatgactgggtgctttctcttcacagcttcctctaccacttcattaaggatgataatcccatggaggatatgtctattatttatgaaagctgattgtctttcatcaacaataccagaaataactcccctcaacctatttgccaaaagcttagctatgactttgtacatgcacccaattagagaaataggcctgtagtcatttaaagattgaggatgatttgttttagggataagagccatgaaagaagcattgctgcctctagggaaacacccacggaagtggaattcatccacaaatctcctgaattcagctttcaaaaccttccaaaaggccttaataaaattgaaattaaatccatcgggccccgggcatttatctccaccacaactccacacagcctctttaatttcttggtcagaaaaaggggcagtgagctcctctctttgattctggtcaattgatcggaagaaaactctatcaagagtaggtctaaactgcttgtcttcagtaaatctatgtaggaagaatttatgaacttcctccttgactaggttaggctgttgaacccaaatcccatcaataaaaagaccctgaaaggcattaaagtttcttctaaaattgataactttgtgaaagtaagctgaattactatccccttccttaatccacttctctctagatttctgtctcaagagggattcataagcatttgaggcctcccacagctgttgttgaatggacttcttggcttgggcttcatcttcagataaaggtctatctccagctgaaatttccaaaagattaagtttgtgcttcagactctggattttgttaatattaccatcagcattaactatgctccactgcttgatgctatttctgagatttctcaacttgtttttaagagctatgcccccccatccgccctgctgatccttaatccatgcctctttcaccatcttctgatatccattttggttaagccacgaatccaccaccctaaagggcttgggtccccagtcaagaatctgagttttcagaatgattgggcagtgatctgaatagtctctatgcagaacctgctgagtggaatcaggccatatgtttaaccattggtctgaaacaaggaatctgtcaagtctgctcttgacagaaccattaggcctgaaccaagtgaaattgccaccaaaacctctgatttcatgaagctccatatttgaaatccaggcattaaattctgaagtgtctgagttatcagctgacctttgagatagtccaatacgttcctcctggctccttatactattaaagtcaccaaggaagcaccaagctccatcaggattggattgtttcagctgaattaactcctcccacagatttcttttcccagctagatcacaaggggcatagacattgactatgaaaagcctctggtcttcactcagccatctcccctctaagcataagaatctattgccttttatactcctttccacatggaaaactgaattattccataagcaaagaaggccaccagctgcttgaacagagggaacgctttcccaagagacagtggaatccccccacattgactggcaaatagatttatcaaagtgctctctttttgtttcttgaatacacacaaggtcagtcttatgtataaaattgagtctccttatagctgcccatttaatcccccttcccaaacctctaggattatatgatagtataatcataattggtggttcttgatacccttctgcactgccacagagttatctctctgttccatgtgaatcaacatctccttaatcatttgggcttcctgaccatatgtgaggcccatgtcactggctagagctatttgttcttccagggaaagctgcttacagatattggtacttgggtccttcacgtcaagttccaggcaaggttcatgcggctgagaggttaagactatggggggggggggaggggggtgtagagcagattgggccacagttttggaaaccttagattcctttcttctaacataaactttggtaccagagtgaattgggcctactaattgctggcccaactccccctctacattttgaaaatgataaggaccttcgggtaatggggttgagctttccagattattatatgtaccactactacgggctaacctctcctcaaaaggggctattatatatttttctccctccaaattacccattatggaaccagacaggaccacgtcagcgtcttcttcttgctcctcaacacctatatggttctgatcacagtctgccacctccacagcgtcttctttctgctcctcctctgcatccattgaggtcaaaacaaatatttccttttgcatgtcaacgcaggatttacttttggtcttggcattaaaaggtatctgtttctgtcgaagaggaccgttgctgcgttccttcgggctttgagcctccacgcccttgttgtcgccgaacgattgggccacgtcaggtttgtcatcaacagaccgctccatgtgatagtcgtgggtaggttggatccgattgacccgacccgccaggaacgactgggtacggcgccaatgtccagagaacccgccgtcggagccttgtgacccaccgtccgacgaagctccttcgttaacaacccctggggtacgacctgtgaaagttgtgggagtgtttggctcggtcgagaaaggtgatggcgggtaccacgtgagggcttgcttgggcttcgtcttcgttccgagcccctgcatgtcttcaacgatgtggataacaacatccactccatcaatgacggctgggaccgccacggcaatgcccggtctgaggtccgtcctaattaagattcgcgccacgtccaacctccagcgttcctcaaccattacatcaacctctaccagctccccaagctccgccacaatcttctctaaataaactgcttcccacacagttggcggtagaccccataacaggacccacgccaacctgtgtgtctgacgaatagatggggaccatttctggaggtctagtaaaggtgtggagccgttcgtccgttcctcatccactagacgaagtgccttatcatcctcaaggttgggtaagataacccaatcatcaacccaataacaagggttgatgtcggggtctagaacccatctcagttcctccttcactctttcaaacattcccctattcttcaatctgcccacccaagccttctgtacccattctttgtgttcgttggttggattcagagagaccgggctcaggactggtctaatgtcatctaggacagtccccttctggttagacaagttatccacagatggtgttacccccttagccacctcaacatatgaccgaagtcttccacccgtgtcgcgtgttttatggccaccgttgtccacctcctgtattctcccctttccatgtgtgagggtaccatgctgatagcctctattcgcattctccctctcaaactttggtttattgacaaacattttgatcccatcaaggaaaatgctattatccagctgtctttccaacctctgtacatcttggacctccttataccttacaaaaccgaacctatggcctgccttgtttttagttttatgaatgaaaacttcccacaccttaccccacctttggaaaatcttccataaatccttttcctttactccgtcagggaatcttgagaagtaaaaggaggtgacatcctccttatctctccatgtacctctcctatgttgcctttgtcgcttactaagcacagagggtcctctgtctgcgactgatttcttcttcctcctataggaaacttccacccatccaacatcagtactagcagggttgttatccacctcgtgagatgccctcctactctctgcaagacccctactttcaccgtaaacagtgactcttctcctttctctatcagaaaacttctccccatgttggccaccagaggcgtggtgatgtccctggcctcctaccctgtcacgggcactccctcttccattgccatgaacactcctacgtaaactccctctcagactcactctttctctcggtctaccctctctcacctctctcactgtgtctctcgttctaccttgtctcactctttctttcgttctaccctctctcatctctctctatgcttcaccctgtgagaaaattgagagagaagttcacactcatcatcaagaaccaccatggatacaaccccttaagagaagagaagcagtgtgcggtgtggattttggcgtcgttgagtagctgagttgaagctgaacaagtgcaaaggtgttggaaagccgccttaattgcagtcaccatgcctcgccttagctgtggcctctttagagcatcttcattgtgctgagtgtgagggagcatgtttagttccacatggactaaagatatggccaatgtaaccctcataaaacttggccaatcaccttacatgcctgattttatggggtcgagttacacccttaaccagagtttaagaccttgtaaataatgttatgaaatcttaatcgtttagtccatgctgatgttagcaactaaaattctatttatacattttgaaaaagaggagagagctttcattaattgtcatgcaaagaacaaacttttaaagctttgtatatcggttacggttattgtacatggagtagagtgttttctttctaatgccaatctccccacccacattattctaagtaagaattttaagcaccaaatgtgaactaaaacttgatcagacttgtgagttgtgatcaaagaaaaactaagccatgaacaagattgtgattgaagaaaaactaagccatgaacatgattgatatattttataacaaggaaacaagttttgtcttcaagatgatgaaacaaatttttactgccagactaaagattcttgatgaggcttgtcaataataaggtgagttgaatggaaaaaatttgatttcaccataagtccttcagatgattgttaggaaccaagaattgaaatgagaaagaaaagaaaagattttatcgactagtagtaagaaaataacagaaaataggagaaaaaactctcctccaagggtttccccttcacaaaggatttctcctttcacaaagagctaatgctcaattactaatgatccaaatctgaatctcccctatccttcttcccttatttatatctaataaacccctctaactaactaactaactaacttaatagtctaactatgttaactaactttcccttctccttatatcctgacagtttgtttgttggttagaaagttattcaaattattccaaaattttaagcatgggatgcttcttttattgtgggtgtgatagttacctcaatttgcaggggatattactcaaaggtgggc

SEQ ID NO: 3172 - DNA, 894 bp, Glycine max
  Intron number 2 from transcript Glyma01g04560.1 (locus Gly ma01g04560) derived from phytozome v7.0 (chr-ID Gm01; pos 4135548 to 4136441)
cgggtccctgtgtcccctgcctctactctgagaaggttccttttttttttcacccctgaatttggagtttgatcttatgctagttgtagtttttttttttttcaattccctaagatacttggagtttctcgtgaatagggatttgatactgagaatttggttctatttatttattttattgtcatttctggttgcattctggggtttggaggataaagcatttgattgtttgctgtgttactacggttgttgaaagagaattgaacggaagaagtatagttattccattttgcagctagctagatcatgaagctgtgttagtgtgaaattgaagattgatgagatgtatgaacagcctatgaatatagatctgactatagtttctgttgtatactgttgagttatttgttgatttaggactactttaacataagggatttgaggagattatatatgtttgtaagacttgttcatgaatcctagcttctttttttttatcggcaaatgttagttgttagttgttaacttttgttagctgggggattcaaacccacaacctcctttcttccttcaccactaagtcaaccttatatctcccgtgaagttagcttttaaatatattgatgttatgtctaagggctatagaatgaatgggttcatcaatgaaatggaattcaagttcataatattgaatttccctaatccaaaagaagttttgtgaagcttttaaaagatttaaacctctttttatgtctatgtttaggattgcacttataagctctttgttgcatgtttgcttgggtttttctttttgtgatctacatggtattttctccctagttgtttattctctttatttttatctgcaagcttttcttggggggttgtagggtg

SEQ ID NO: 3173 - DNA, 1100 bp, Glycine max
  Intron number 2 from transcript Glyma09g06050.1 (locus Gly ma09g06050) derived from phytozome v7.0 (chr-ID Gm09; pos 4821945 to 4823044 reverse strand)
gaaagatcctgtgcacagacttgaaatacgttcaggtatgtatatatgtagggaataactgaattctgataggttctgtgcgtggtgtgtatggcgaagacttagtaatttgtaagtcaatgtccataatcttaaaagcaaaagataatgactcgtattttaatattataatattctctcgtgtttgacgaaagagggtgagggctaacttgctgcacatacctagctaaatgacacgttgcaagttgatatatatgatgatagaataagacacagtcatgagcacaccctcctttgttattttttagtacaaactaatttcctgattgggttgagtaacattaatatagataataagattctttttattttactgtctaaaataactaagtataagacatgaattttaaatcattaattaaatcaaaataaacttacactgctactactaattaatctacgtgattggtgatatatagtcaccttaatgatcaccctgacctgttccctgaaagtgaaaaggatggcccaacacatcatagcaacggctctatctaagctctttcgtgatttcagttcaaacgtaagaatcatagtgcattggaactttataattaatttgcatgcgtatatataaaactaataaaatcttatctagactgaaaatattactattactactagtaaaataaatattattaattagtgtgttggtttttgagtttggactatatagtgtatgatgttaaacaaacgaaagctacgtgtgggccaccattaaacacccgagccacgatgaataattgaataatgtattcaaaagttaatattacatcatttgtaaaagaaaagtaatgtttttaaaataaatataagtacataatatgtatgtaaattaaataaaagactaagacaccaaattcttgttagtttataatatatcactttgttttattttttatcattttaaaaaaattaaataaaaaaaattggccatgtctttcttcctttccaaaacttgtagttataacctacaaaacacaccctaaaaaaacttgcttgtgatcagagtaaagattatatgtttgttttacagaaat

SEQ ID NO: 3174 - DNA, 8233 bp, Glycine max
  Intron number 3 from transcript Glyma09g03200.1 (locus Gly ma09g03200) derived from phytozome v7.0 (chr-ID Gm09; pos 2263985 to 2272217)
caagggcagtccctacatccggggaagctgcaaaggtgtgaccccttaacatattattttacttatatttgaatccaacacgataaatcattttcacttatatacatataatgacatcttactcgtttattatattatattattatctgctctttcttgatatcctgtaatttatattgattcttctcaattaaaacactcctgcaacaacaatactctcccaagtctcgaaggttagtaaaaataataatttcatatttattaaaaaattaattaattttattaaattatgttaatctcaattaattttttctctctaaattatcttttatttaaacttaatatcaaaccatttcaaaaaaaaaaatgaaattaatatcgaacatacaaaatttctttaatccttttttgtacttgaaaagtcttcaatatatcatattaaattaatgatactctcatcatatataataagataaaattaataagaatttgcttatattcatcttaaatagaaatgattggaaatataaaaaattatcttaaacttaattaaaacaaatcagttttaaaatattcttaaagtagttataaaaactgaggaagttaccaaaatttatatcgaattacagttaaaaagtttatacttttattttttattataattataatttattttataacacattaacacccaaggtctttggtgtttagggtgcatcctccctaacggtttaatgcatgttgttaattgaatcacacctggctacggaatcaatcttgattttttgtaactgttatcagttgttacttttattatttttttcaatcaattttctagtctatgtactgttataagtatgttttaacttgatttggttgacccttcaggcccgccgccgccagacatcaaaagtcatgggaagtgggccataataggtatacgcatgaaatgatatttctcttatgattagaaacaattattcatttgttttaattacgcatctatttcctatatattgttataaaaaaaattaaattaatatacttaaaaatattattttttagcccgtacacatattatttttaatcattttaaatccttacacgccattttaatctctttaaatccttatagcaaggactaaaacagaataaaaaataacatacataacaaatgatgtttttaaatgaagagattaaaagtataaagttgtgtaattataaaaccaaataaataattatgtttttatatattttatttagggaaaatatatttttataattttatatttttgtgaaattttattattagtcctcaaagtttcataatattataaataaaaataaactaaagagaacggtaaatattttcaatattaataatgaatatattattattcgaaatagataaaaatgagataaatagtattttaaaaattaagaaagaaattatcaaaataaattataaaaatcgagacagatcatttttattgatataaattgaaatgttaaactcaaattagaattcattaagattatactaattaattttaaatttgagtttatctaaataggtaatttttaatttatttagtataacaatttaaaaataaaatataaactctgtttaaaaaattttatttaatgaataaaaattacaaataaaaaaattaaacgctcattgcagaaaagtctcataacttaaaaaagaaaaaaaaataagttttaaaaatactcttgttcagtaaagaatattcaaaattgcaagtcaataatataataattccaaaataacacaacaattcttcaacatgcttatccgttttgcataattttcctttccgtagaattctaaaagaactactcgtgctcaaaaagttagtggcataccaatatattcattgatgttatttttttttccattttttgtttaatttgaacccgctgtttttaattttttagttaacaaatttttgctttaattgataatttttattatttttcatttcttttttaactcattaggtacgtactcttaggcttgactcagttagacaattcatttttctttagctcattacacttaatttcagtatgtatgtctttatttttatattactgataataattactaataatctttttttcgcctcaaaacaaattattatttttcaaataattttctcccactaagttagagattatcttaattggatacgccattgcatattatatatatacctccaaagtggtctaataagaacattttatatcctccttatcaatttaacggggagcaaaataaggaaaattttaagtttgtgaccagcacccaaatggagacattaaaaactaaagttgtaacatcgtagatggtatatattactggaactacgtacacttagatttctaaacaaaaacaacatcatgcgaaagcgactcataatataagcaagtatatataacaacaaaactcaaaatacgatcaacatatttaatgttaattatctgtcacccaaaggcatcgtacagaacataaatggaaaatacaaaaatataaattaaagctagttatgttctccttgcatgtgactccaagccttcatctacgagaacttacacttatttcttgaaaaaagagaaatttaaatgaataagtcataactcttctatccatacactcttttcatgatcacttatttctgatggccttgtcctcattgggtctataatgaatctttcaaacttatagttgaatctacatctttcaactattaataattcctactaatttcttattctcacaactattacgctagtttactctcatcattacattatggttttgttctcattattaatattttccttccacaactttattcaactaactcaacattaattccttacttagactttacaaggtcaagtttacagtgactaatacttaaggatattactaacatttatcttaagtaacataattttattcctatcactagaatcttcctctcctatcacattgagtggaaacagcctttcatctatacttccccacagctgggactcacataacattattctagatataaccttcccataccctttagacctgatatcttatcaattcacattacaagtcacatagatagtcctgatcataattaatataacataacaacaatcatgatggaatcgggcactcaagcttcacataggtacaatacaagtcaacatactacactgtaacaaaacacatgtgtatggtatgctccttcatttctacctcatgcacatgtgatacaaatttctaaactcaagaaaatagctatcctaagatcaaatgctacccaaaagaagtatatcattattagtatcaatgcctagaaccctcacgctacctgtttcatcttgtgactagtcaaggttacctagcttttgaagtacaacccaacaccatggagtcatcatgatcaatcattggggttttcacactagctatgaccacccccaaggtcaagttaaacccattgtgaatcttcattgtctaattcatatctactatcttttccacacaataactcaattatgattatgcatgtctcatacataccatgtaggcaagtgtttatttggacttctctttacaaaatgagtgagtctcattcttatccttcatgggctaggtccttttcgaacaagatatcacaagaactcattctcatctcttaccgataggtttataaaaaaaattatataaaaccaatccataacaaacctaattcaaaccattttaaatccattttaatggattggttttatatcccaatacagtattttagattttaaatccaatccaattaattttaatatagattggatgtttgtttaatttgaatttttaaatccaaaactcatgtccactgcatgcgttcttcaaatgatatagcatctctgtaaaaatattcatggttaaggtcatccctaagtaacctcagtcgaggttgtcaaggtctaccaaaaataacctagttgggattgataaaagataaccttcttcaaggtcaaccaaaaatggccaaactagaggtaggtaaaaaataatcctagttgaggttgacaataaattgtctcagttgggaacaactaagaacatccacaatcaagatcacccaaaaacttcatttgttaaggtcgatcaaaagtaccctaattgagataaaccaaaaattgtccaaccaatgtcaactaaatagtcttgatcgaggttgaccaaaaaaatttccaatcaatgttagaggaaaataacctttggccatggtcaacaaaaaatagtcataatcaaagtcgactagaaacaagcccaactaaggtcatttgtaaactattttatggtttaaaactaaatttaaaataaaattggtttcgaactatataaaccaattttaaaattgattttaaacaagtttaaaaaattccaattctatttttattcaattaaatggatatggattttcaaatctaattcatttaattggatttttaaaaaataaattacatatctcatagcatgatgtcacatgttaaataatacttcttccgaactaaaatataagcaacaaaaaaataattttgaacctaaatataaataaatactaactaacttttatcttatttaataataattaatatttttattatgtttttcatttaataaaattttattttttgtgaataatttattcttattatacaagcactattatgaaggatattttaagaatattttttaaattaaatgttattaattaaatttcttaatccatgtatctggtagttaaatttacttatatttaagtccaacaggaatattaagcatttcatttcataacaatcatatgttagatgtaatctacttaagcagatatcactgacatatacatcttcaagagacataattatacatgtctctttggtacaataataatcagtcacatttcagatctcatagcttcatgtcacaagttaagtaatattaagcatttcatgtcatcatgctatcaacaagaggtttaatctacataagcacatatcaatgatgatactgacatcctcaagacgcatagtcaaacatatggctctatgctagtaggtctcattcagctacattaactatgcttgtttaacgaaactaaatcttgcttagtgattcaatacaatatttctaaaacaattctccctttaattttggtcaattaatgaaattgagtctcaatcaacgaattttatcctctattctcactctcgctcatcaattttttactttgttcctacttttgctcaacaagaaaaagcctcgacgaatccaatctaggggttcacccatgctcactatctaatttttgttaagcaaggcccacccttgctcacactacaagaaaaataacttatacctacagtcaaaaactgtcattataaataaaaaatccgtaggtaaatgtatgatagactttgtcctacggacaattcttccgtcaactttgagggacttataatgacggctaattgtctgtcactatagattttacctactatgtatagtgtgtaggtaaaaatcattaacttctacttacatctcctaattgtaggtaaaagtctttaatatgtacctatcatcttcaattgtaggtaaatgcataaaacatcaactaaagatactgcccatttggataagctttcctatggcaaagaaacattttttcagcattgaaaagtactacccatttcaggattcagtggccaaattgtctgcctcttgaaaattcttctccttagatttcaatgcctctgctgcttgggcttattcccacaaagagccagctgttgaaaattgaaaatacaaacaaaacccaaatactcttaaaatcatagtgtatttacttggcaataggcagtaattaattctggtctcaagatacaaaatcgagaaccaagtccagtatagttggcatcacgaggagttactctgtgaccagttgtcacgatggtggtggtggtcccaaataggcagaggaggtggtataggtaaagagggcaggttaagtggactaacagtaacctcctcctgacctacaatttgatccctactatgctgctcaaggtcctgctctactgaggcagaagaaagagttgtttcttgcaattcccagttaatgctagcatgaccttgcctttcaacatatgactgtatcaactgatcaagactctcacgaaagctgctacgaaggaggttagagacacttctcctgcaagatgaacaaaaagatttactctagattataactttcatattagaaagataattgcagtaactcttcacttgtatttacatacctattaagaagttccctgagttcaacactgtacacgttgtcatcttcaagaaaataaaatccatgaattctaccaactggagcactttcatgatcagaaggtcctcccaaccaatttttcactcatttgctgtattattgagctgattatcatcgacattttcctcaatgctatttctccattcggtattattctaataccactaacttccttcattttcaaaaacttctttccccagtccactagtttgtaaagagagaatattatgaaattatcattcagagcatttgaatttctttacctcttctggaattttctccagagttctcatcaactaaaccaaagtttggatcatcttacacgcaaaactcctgaagattacaccaaatacaaacaatagtagtttaattagtgagttaacatgataatttcacttcagatctaaattatattctcttttgcaacatcaatctcatctgctggggtgtaatttctgaatagcttcatgaaggaattgatcaacctgattgatgacatcatcgaaaacctcatcgccactggacaaaggaggcagaataggaggcggcatagcatcgtcatcatccacgacacattggtgaggttgcttagaatcgttgttgaaagagagcatgaggttcaagcgattcatggactcatttgaatcagcgacctcccatgacttggggctctgaaatcccctacagagctctccatggagaaactgcaaagagaagaaagggatttgtggagggttagggaatcgaacctaattttgtcggcggcgcgtggggctcactggatttcggtgctgctgtggcgacctcttttgcgctcttctgcaccgagcaccgctactccgactgccatgattgctcctacgactacaaggttgttgggagaaaggccatagcgagagaaaaccctgtcgtgaaggccgcgaagatcgtcaaggtctaaaaaccctaaatcggagaacaaaaatctccaagaaatcgaacaaattgctgggaaaaagaaggggataccacgaaaacgaaataataatctaataattgttttgcttctaaaccctaaattggagctgagcttcagtcaggttatagttttaataaaatattttaaaattataatattgttaatttattttaaaatagatgtcagcatagaccatggtgcacaacttttaattagcattagattagattcattatttcaggataattttgtagtagtggctgtaggtataagtttttataaggttttacctacatcacatagttgtaggtattttttattttttatttaccaagatttacttatactaaaaaatgtaagtataagtctttgaatttaacctacattgaataatggtaggtaataaaatatttttagattttatctacactaattcatgtctgtagatagaggtgtttgtatgtataaggcatttttcttgtaatggatcaggagatcccttccaaggacatgccctagcttttaggcccctctcacttatcgaggctccattctcactaagtgaatcccttccattttcaatgcaaatggttttaatagttttgaagctttagacttgttattcattaagtggatccatgccatttcttgtagttatgactgtagttagaaattagagatttcgatcattagtacgtagctggatggaaaaaacagcctccccgcatcataatattgaaatacatgaaatgactgaacagaaaaattgttatttgaattgaatgggagacttttaaacttataagaaggacttcgtgaagaacaaattgtttttatttgttta

SEQ ID NO: 3175 - DNA, 1739 bp, Glycine max
  Intron number 1 from transcript Glyma07g31580.1 (locus Gly ma07g31580) derived from phytozome v7.0 (chr-ID Gm07; pos 36565255 to 36566993 reverse strand)
cgccgctctctgcaccctcctctctctctctttgggtatgtctttttagatcttatcaaattttacatttaatattcaaatatttgttccttactaataaatgcatgagataaatcaatcttatggattttcattgttcaagcatggttatggtagcttcctcttccgtctcgttgctttatgccgattgttacgtgccaatttttatggatatgtgagcagtttcacaatttgttggatctgtttatttatttatttatttattattattatggatcgcaatacgaattctctcgctgggtactatcttcaattcttcatcacagaactcttggttccaagttccagcaacatcatcactattgtgtttatgaaacgttatttgtttatttatttaagtttgaatgctgatgggagcgtttttggttttggaattgatgtttcgcctaactctgattgtctactgagtcatgacagtgaccttccctgccatagacacagatgaagtgatatgctatatcattttttaattctctctctctctctgatatatggtatgtttggtttagcaattaacatatattctgatatgtggaactgttttgataagcggaaagtagtaaagaaaagagtggaatgttttaaaatttagattgaatttttcacttttacgttttactttaattaattttatttatttatttcattttactttcccaaaccgaatcttaaagttataaaatatgtttgagttttaacgggaattcctacattttgatggacaaaataagaaaaagaaacttattactttagaagtaaaagtattatttaactctctcaagaagaaacatatatatgaaatttgttattatgcttttgtattgttgggttttattttgcagttttgtacttggtcatggatattgaggtggagatctggtttaatgccctttgtggataattaattgcattagatttcgggagtgactgattcttaataattgaagtcatacgatgctctctctctgctatgttggtttttctttttcttgctttatcaggcaataggcatggtggaataccaatttattaatactttaatttaatgtcctgttctttgtttcttgagtgctaattaacgtccacctattttgagctggattgggaatttggggtggactgagacaaaagagaatgagaattttaataagtattgtgatagaaaagaaagagagaaatgaaaagataatgaaggtagaagtgagtagataattataacttttcttgtttcttttacgttgagtgcagctatgaagagagtgataaacttacatctatggaaatgaagggagaggggaaataataaatataacaagtcatgtgaagaaaaaatgaaaaaaatagacaaagtaataaaagaaaaaggaaatatgtattgaatattttatatttgtgtttaaattggcagtgagatccaaaaaccaccactatcataatttttcattatactaaaaagtagctttataactaccataattttatcttgatttactgcatttccaaacaagcactatatgaccaaaaaaaaaaaacaagcattatatgaacttaatgacccttgacatttcttttgattttgtgtattaaattgttttggtggatcaattgatctcttgagtactcagatcagtgctggacaaggacaagtaaccaaaattccaagaagggttcattaatac

SEQ ID NO: 3176 - DNA, 1215 bp, Glycine max
  Intron number 5 from transcript Glyma18g49580.1 (locus Gly ma18g49580) derived from phytozome v7.0 (chr-ID Gm18; pos 58960742 to 58961956 reverse strand)
atctgaatatcaaatttcagtcaaatcgcagcaggtaatgatggtagtaaagacaagtatcatatattattcttcagattttatcattggtttttccttagaaactcaaacaaattgtgaaagctattgtattttactttttgcggtgttctctaatttgctaattgatatatgtgcttttatcatctagggcttactgaagcttggtagtcaggatacagttgacttgccatgaccacttagtaattttcttgatcattttctagctgtttgatgcattttctgttgatgttgttgaaatccttgttcctatgttattgaaatgtattgaacaagctttttcttttaaaggtttttgttataacatgttgacaatttgatgctaattatttgtagttattgtcaatgtaatctggtttccatctttatctttggaggcaactctgatgtttacagtactccactgcctcataattgtttccactaagtagtgaattatagttgtagaggcagcttctagtattgttaatttagttcttcacttaaaaataaaatggtttttagacctgagattgactggccatcaggttttactttctaaaatatcttttgtattatttttttttcctttgactggaatctccaaatttgaagtattgtttactaaatcaggttacaatccagatgtcaggaataattaaaaatcaaagctctgtaattgccaaatcttttttacctctatgattgaatttcttgattttacttgctataattttgttaatgtgaatggctaaattctatggttgttaaacaatattcttgatttcaggagaacatttttgctaaaacaatttaatatagtgacagtgaaactccaagaataagcatgtgtcttgatttgtgaactaagcatctcctctatcagtctatttaatactgcataaatttagcaggcttgttcatcactcttgtgatttaaaatcttgccagtcaaccattttggttcaatgcatctagagtctagaatcttgagatctctatatctgtttaatgtactctattattttttaatgctttgattcatgcacaacatttacttaacgtgcatggttaaatttctattttatgaactttctttctttgatattagtcttttgtcaacagttagaattattgctttttttcccgtgacttttcagggactacacaaatccc

SEQ ID NO: 3177 - DNA, 7357 bp, Glycine max
  Intron number 4 from transcript Glyma18g20840.1 (locus Gly ma18g20840) derived from phytozome v7.0 (chr-ID Gm18; pos 23458329 to 23465685 reverse strand)
acaggtgaatgcattgttgtatttgaaaattagcctcgctcaagcctttgtttagcctctcttgtatgataatgttgttgctgctcatttttctttctatttgttgcatagtaactgactttgtgcattattctcatttctcatctatgggattcttttgtcttgtactgaatagatgtgcttgtcttctggtaagatttaagagttttgcatgattgcgcttagactttttcatcccactacttatgcagttgcacaactacaactagcttttctgccaattgcacctagacatgtggaagccactgcttagatcctttcttcaagtagtgaaactttcatattcttcctccaaacattttctcaaaacctttctcatttcatttaaatgcctctcaatcacaataacttccatccaatattttcttccatgctagcctcgattctggcctccgaccctttaagcctttcctccaagaaatccatatgttctgtcactcaatcatggatggatatctactccgttggcctaaaaaatctcctctcaatctggcaggtaagaccaatatggtataacaccaatttataaattagtgaatgattattaatttataaaaaatacacagaatctcctcattgatccatgtcgtaaagattcaagaaagctttacattggttatcaattgtctaacataaacttcaccttttacttaggacttgggatataacatgttaaagattgcagcaaagcacaacatgggcaggttgatgacatgattttgaaattacaatagaacattatgccagatatttgatccatgtaccgaccccacctagtgagaaaaggattggtttgttaatgttgtatacaaattcaacatacttcaaatataatagtagttgtagagttccaagccaaaagataaggtgcatttaatgcatagtgggaattgaatttttatcactaaggtttaggtggtttaaatgcaaagtgaaagattgcattttactagatgaaacttatttgaatggatgcattggaagttgtattgtttcaacttccaagataatttatttattataattggtggaaatcttcactataaataaagaagagaattagtggagaagagactaatgaagagagagtgtgtgagaagagagattgtgaaacaacttcactttgttgatagaaaagtgtctttgtgtgagtgttatcatttcttgtaaccattgagtgtggtactcgagtttgtagagtgatatgctatttagggtgggttacaatcttgtaatcatttttgtgatagggaaatacttttgagacgatttcgtggatgtaggcaagaggtgccacaccacgttaaattcttgtgtttgttattattttttctacggtgtaatgtttgttgtgttctcacgatcttttgtgagtatgggtaactttgtttgtgtgagcattgattacccaatagtagttgctgtccctaactcaggctcatccacatatgagttctttaccagcaaaagtagtgatgcaatcctacccccccaagggcattgaatagaagactccaagaagattgggccaaagatgcaagagaaggccctaaggttctcatgagccttagggtagatttcgggcccatgggctaagtatgagcccacttatctttgtacatattagattaaggtttcattaattttgggtcttgtatttagcgctccataatgtaggtagggtaccctagaattataatattttttcagcccttgtattttagggcacctagactagtttttgtattaggggtagttttgtaatttcacatgcactaagtgtatatttgatgtgtgtggttggaaataaatttaattgaattggtagaagcctaatccaattaaattttagagggggaggtgagcatttgcttactgcaccccattgccacatcatatagtcacactttgtgcatgtccttcatgcttttcatgcctcatgacacctaagcacacttagtggagaatcttggaattgatcttggattagtgggctgaaccataactaaaattcactaatcataattagtgaaattttggctccaaagtttggctccacaaattcaatttcaaattcaagtgaaatttgaatttccctccaattttgtgtgacacttgggctataaatagaggtcatgtgtgtgcattttttaaaactttgatcatttgaatattaaacttcagatttcaaagctcatttggagcacaaaatttcgtgctcttctcttcctctcccttcattcatctccttcttcctccaagctcttatccatggcctcctatggtggtgagcttcttctagactcatcttctccttgaagtggcgtctcttctctctcttccttctccatttcgctgccattcatcttccaagaagcaaaggaatccatagatgaagaagatcctaggcctacaagctccaatggagcttacatcaagtagtactttggttctctaactttttttttgtttggattagttctataacttttttgtgtttcattttgatcttttatctcttgttttggtttcagtatggtcctatttatcaaatgtggcagtaaaaaccatcacaattgacaaaaaaatcatgatttttggtggtcaaacccctccacaattgacttaattggacctaatagaaaaaaaaattaaaggactaaaatgaaataaaatataggatcaaacaaaaaaaaagtccgaggaccaaattactagttatttggtttcccgtttctagaagagcagtcatctcgatctaacaatgggtcttggttcccatcagtattcttgtgacgggatgctcaaactatgtattaatgataattttttggttttgttcttattgttaatccttatttatatttatggcatgattagcacatcgtagttataaatcagttgaatatgaatacatgtcaaaacatgctttgatttcttgcaagtatggtatctattataaatgtgataaatgcataaatgggattgaaaaaccatttaattagaatcaccattaatagaaacccaaccttacttttgcatactctagttcaaaagctcagtgggtgataacaagtgattgattggtaacttgaagtactactgcactagaaagattgtacaaccattccaagtctagtgcaaattacaattttcaaagggttgtgtctttacactcttaatgaagttaactaacactgagactttgaaagaatttctcttgtttgaacacaaggagtaatactgcttctatcaaaagtttgggttgacttttagaaattttcattattgatgatgcaacacatggctgtattaatgctatttattctctgtgaatggccttagtataggattgtgttatttctgatctggacacaagttaataattgttaaaagtatttagatactatgaattacattgaaatacactaatagtgtgtttggatggagcaatttaacaggggaattcattttttcaaggaatttaaaatgattcgtgataaaatagcttgtttggatagaatatttgaaagaagatttaatttttggtatttttatgaatcattttgattgactaaaatagtgggatttcaaattctctcaaaaaatatagaatttgaaattcttttttcggagatgctcactctaacttacgttcttgctcgtgactctttcttgctcaacactcacaactacgggtgaccaaagtttttacggccgatatcgacataagttgtttttcactgacgttggctgagattttttcagtcagaaattttttgtatgatgtcaaccaaaactattttttgccgatatcgactaagattttttagatgatgttggttaggattattttctcactgacgtcagtcatgggaaatttttgctaatgtcagccgaggatttttttggccgttatcatctaggttttttcaattgatgttgaccaatgatttttttgaccgatgttggctagattttttctactgacattggtcatgactaacttttgagtagatacatgttagggtttttcagccggtgtcagctaggtttttctagccaacatcagccaaagctatttgttagccaatatcggctagggttattttttagttgatgttagctagggtgttttggttgatgtcaacttgattttcttagccgacgttggttaggatttttttgctgacatcaactagggttttttggctgacatcagccatagctatttcttaaccacattagctaggttttttggttgatcttgttatgcaatcctccctaggaagggaccagtcactagagccatgagcaagaggctccaagaggattgggctagagctgtcgaagaaggccctagggttctcatgaacctcagggtagatttctgagcccatgggccaacgttggttccaattatctttgtacatattagactaggatgccattatatttggtctttgtatttagggctctataatgtaggtagggtaccctagaaatataggatttttcagcccttgtattttagggcacctaaactagtttttgtattaggggtagttttgtaatttcacatgaactaagtgaatatttgatgtgtgtagttggaaataaatttaattgaattggttgaagcccattccaattaaattttagagggggaggtgagcatttgcttactacaccccattgccacatcatatagtcacactttgtgcatgtccttcatgctttacatgcctcatgacacctaagcatacttagtggagaatcttggaattgatcttggatgagtgggctgaaccataactaaaattcactaatcataattagtgaaattttggatccacaaattcaatttcaaattcaagtgaaatttgaattgaaattcaaatttccctccaattttgtgtgacacttaggctataaatagaggtcatgtgtgtgcatttttttcaactttgatcatttgaatattaaacttcagattttagagctcttttagagcacaaaattttgtgcttttttctccccctcccttcattcatctcattcttcctccaagctcttatccatgacctcctatggtgatgagcttcttctagactcatcttctccttgaagtggcgtctcctctctctcttccttctccattctgctgccattcatcttctaagaagcaaaggaatccattgatgaagaagatcctaggcctacaagctcaaatggagcttacatcatgttggctagggttttttctactaacaccatctaggtatttttgaccgacatcaagcatgactatttttagtcgacattgactaggttcttatagtcgacatccagtagagttttttcggtcgacattggtcagagctattttttagccaacatcggccaaggctattttatagctgatgttgggtagggttttttgtctgacattggtcagggctaatttttagccaactttgactagagatttttcagccaacgttgaccaatgatgtttttcagtcgacatcgggtaggttttattggtcggcatcgatcaagatattttttagctgatattgggtagatttttttgtcaacgcctgctaggagtatttaggccgatgttgactaaaaatagccttgatcaatgtcgtttgaaaagaccctagccgatgtcggccaaagaaaccctagccgatgttggtaaaaaaatctagccaacatcggctaaaaaatagactcaactaacgttagccaaaaaatagccccgactgacgtcagctgacaaatattcccagcgtactttgacaagaaaaccctatttgatgtcaaccaaaaaataaccttggttgatgtcggtttaaaaacatcactagctgtggtcagacaaaacaatcctagttaaaattatcaatattttttatttataaattattaaaaattgaaaatgttttttaattaatatttcaaaattagattgtgtttattttctataaggtttaatattaaaatttcatctatttaaaatataaaattgaaattttgcatatgtagaaaattgaattgccctatccaaacaaagaatttaaaatgaaaaaaatttgaattgatttatccatttgaaaaatgaaaaaaaaattaaaatcaaagcaattcaaattctagacatttcaaattccttgaaattttaaaattcctgatccaaacacaaggtaaggaaaagctcaaactgagaaatactttcatttatgcatgacactatatggatgtgagaaattatttgtctagattttatgaggaggattgttatgatactttgtagagcaggaatagttcttccaactcattgcataagctgcatagtgatatctcataggctctgccatcctattgcttcggtggtggctttgccgtggcacaatttacttttctgacattagcacacttaggcagccaaaagccaatgataggcgatggattatgccattatggtgcggaggcacatattgatatgtcagtcaaaatgatttggtcgctaaattgtaaattgaattgcagatcagttgtaggattataaataattatttttgcagcttctatcttaaggacaatgtcctcttcatattttaagcaaacttaatttgaattttcatctttgttctctgcccatataacatttatacctggtgtgaagctttccctaatgtgttaagaattcttttcttgtatgtggtttactatggtgacctcagttgttagtggtgttaaatcaaaatgattttgagtctttctatgcatattttaaagagaagactaattaaatagccctttatagttagcaaacaatatcaatgatgcaatgatgctattatttaataattatcttgacaagaaatagcgacaaagctataaagcacatgtacagtaattgaactaattgctctcaaagaaatcaagaatgcaattatggatgcccaactctctctctctctctctctctctgagttccttttcttttcaatttttcttgtgccttttaggcttatagagggtaacaagtaggattgaatttgctgcaacttgttgaagttgtatcatctttttccattcctttctggttcttgaaaagcacaatatatctctttatatgcttcagttttccagataaaggaactgccactggcattggtattggggaacattataactgcttatgcatttttcttttgttatattgtagttgcatatttaaaattatggtttatcaagtatgtattatgttataattgtagct

SEQ ID NO: 3178 - DNA, 2587 bp, Glycine max
  Intron number 1 from transcript Glyma07g35930.1 (locus Gly ma07g35930) derived from phytozome v7.0 (chr-ID Gm07; pos 41322703 to 41325289)
cgtcaccggcaccgatcaccgccctacgacaaccggtaatctctctctctctctctctctctaacacacgcgcgcttgctttttgtgtgaatcttacgattttgctgttcctgttgttggatccctttctttctttcgccgaaacgacgatgcttttcgagatccaactcgtcaatagtcttttcccttaattgttcggatcaatttcttcgccttctattttggagttcgtgttgcgaatcgcgaaactgtggcgtgtggttgcttgttgtatgtgttctcaaccattatttttagtggaatttggttaattagaatgggactgtatagtaaatatttactcggaagcattaggtttctatagtttgttttgtatttgtttctgttcttggagaatagtgtgtttcatatgctgtaattagaaagtttcatggatctggtgtttgttacagtaagttgaggctgctttggattttgattattgaagtttcaaggctaatgcgattatttgttattaggattggactgttgtggtctctggttcttaagttttgttgttttcttttcttttttctttttcaatttctttgccttttaatctattgtatttgtattgactttaaatagatgctgattgatgcagtttaatttatgtaatggtactgataatgctaattttaagttattagaacttaatagggatatacgatgctagctcagaaaatgttatagcaggagagtaggaagtaggatgacagctattttagatattataatacaaactaaattacttagattatacttataaattctcaaaaaccaaaaaaacgcaaaactaaagaaattcattataagaacatagtaatgaagtcaaaaaatgaaaatgatggtgaaattaatagaaaataggaaaagaacataatacattagataaaaattagcagaatgtgaaggggccaggggggattctaaaggaagaagaaagaatgggacatggaaaaatgaagtcctggaaactgtgaaggaacagaagttaaaacagaggttactttatgtgtgattggtcaaggaagaagggtttcaaatcctgttatgtttcagaagcaaaaaatgcattagaaaacgtgggggaaatcacaattttaccaaaaaaaaaaactagacatcattgtttcataggtaaaaatgggtttttgatgcctatatcatgatatggcagatatagtgtgcagaaacccactattgaaaactgttcctctatttgaatctgataggcgatagcagcctagggccactcctgctatagagctactataccatgctattaactactaagtaaccatagtggtgtgatttatttgagttgactactttattttggctttattaattcaagttgaacatgtatctttgtaagggttaagactatgaggactttgctatttttcttttattaatccttgaaacatagacactagaaagtgggcatcacattggttcttctgtttcaacattggttccatgaattgactgattgctgtttttggcttgtcctttgtgggttgctgtacctgtgtgcagttattttttagtttggaaggagtgatgtggtgattgcatgatggtagaagtatgctaagtttgagtgggtgttcatgttttttatgaataattggaatgaggaatttggtgttcttgtagattttgatgagggaacaattgctctttctgatttgggaattatatttggtagttgctactatgtattaaactatttctgggttaagttcgtgactgaatgatgatggcctgaggtgtagttggtggagttattttggattttacacagtggatttttggtatgaatgatgatttgttgtactggggtagtcaagtgatttttgtttaggttccggttccaggagttctgattttctgaccattgttatgaattatggaggaatgcttgatggtctctgtggggggattttctaggttgtgtttttgtcaacctctaactgttgaaacttgtaaagagtgaattacttgctgcttgctttcttaattttctctcagactcatgcatgtgtgtgttattcctgctgtatgggtgcttcaaagtgactaaggattgaaaaaaagggagtacatgtttctgtatgcttgtggaaagtgctgattcgagaatgggtgtgcttctggcttctctatgggtgtctgccattagataacctttgattcaaggaggaagagagagaaagtgatttgggagatgaagaaggcattcacatgaaaaattgatgtcaatttccgttggaccaatctgacgtcaaccctattttctgaggagcaaaattgcactttcatctatattttatgaattttcatattaacagttggtttttctagaatttttccgtgttgagttgagatttatagtggctatgatgttgctgtatcttcttcttgagacaaactggttcaggagaatatttgtatgcatttcattgatttttattaactgacttattttcttctgtcatttgtttcagtgaaggcaagacacttggacatctgaatcattggt

SEQ ID NO: 3179 - DNA, 2410 bp, Glycine max
  Intron number 1 from transcript Glyma16g03970.1 (locus Gly ma16g03970) derived from phytozome v7.0 (chr-ID Gm16; pos 3334662 to 3337071 reverse strand)
aaattccaaatctgcttactaactcctaaggttattaaaaaataaactgtccacgactgcgattttgaccgcaatttcaaagtctttgaagtgtttgcgactgcaacacgacctcaattgtggctgcatcagctttatttgtcactaatttcccccaatttcaaggaacacgacgaaaccgcatcgtaccactgcttagttagtgtgaggaaccctcactcactcactcactcacttaattttccccccaaattttttaaccgctagaatttcaagtgaaaggagattcagtttagtggcaagtctctctccttagaattcgttgttctactttcactgtgcttccgtttatgtgctctgtgtaatgacgcaattcgctccacacaaatggaactgtccaagttgaccgttacggataataaattggacttggaacagagagtgcttgaaaaatgaaaaactgttggtttattatttacatcgtgttgaattgagaagcaaagcagttttttttttacaggcaaatgttagttgttaggattgttaatttttgttagtggagattcaaactttcgacctctcccctcttctcctctctcttcaccactagaccaatcttatatctccaaaagtaaagtagttgagcgtagtgttgtttttgtgattgcgttccttggaatatgtactgtaatctttgccaattttatgacaaggttaaactttgaagatttcaatcaacacgaggggggaaagtgaagttttgtgttttgtgtgctgatcaaaatttcttcattagttattttatcctgattatttaatgttagattgatactggtgatgtcagtcaaataaataaataaaaatccttcaagaatttaatagtagctggtctcagaaaataaatgtacctgtacccttcccattcttgaatttgtgattctctcaagtttttgccagagccaaccatagtcaatatcaatgaacattagcaaaaaaggacatgaatttagacacctacaaaactacttaacaatttgaaggtttttattactgtctaaatagaagcagaaacctattggcaactgtctttcctctcgaagataaatacttcaattgctagacagatccatgaaaaaaaaagacttgtaagggtacaaacatcgtgggctttagtagctgaaaccaaagttgtttagctcaattaggaatgccttagttatcaatactggaagcacaatgttgaaggaaataacacaaatgaaaagagagatatgcacattctaagtctttgattttaaattattggcattttggtttttttttttttttgatcagcaaagataataatatatatattaatgagaaagaagtaccagaggtactatgtacataggtaggttaccatacacatggttccatggcattttggttattggtaattgtagatagaacctgaatagggttatcgggagttagaaaagtattaaagttagtcttttgatttgtttctatcattcaattctaactctttttggttgaatttgtcctattagcgtgatgtataaatcactaggaaacagcttcttgtatatgttagggctagtgaattaatgtagtagtttgtttgcccaaaagaatagaaaaaagttgaagatgaaaaactgggtctgatggatattgagtgctacttttcttctgatggtgtaatctaatattgacagattgggactcatgccaatgcttctgcttctgatctaaagtcacaagattcatgtggtttagcctctgttgtggtctgtgaagataaaggtgataactgatgttacaattcagttattcaagggagctttagttttttgatgaacagttgtaaacatgtcccatgaagagtgacccacggtgtctggattgatgcaccagtcaccataattttatcaatttgtcattgaataaaaattggcttgaaagcattgcaagcttaggctatggttggttggaattaaattgggctggtgaaaaatgattgtgtattagggcataagaaagctaaaacactttctttcttccttttggtgaattaatggagtgatcatgctgtatactatgctctccaagactgggactcaatttttatgaaattaaaatagtttgcatcagttgttcagaatctctgattaagatagtatagtttctatcaactgatttatgagtgcagtaatttattttttattattttaattctataaattttaattactaatttacctctcccctaaatgataaaacctgaccctgttcaacttttatcccaattccctaaaaaaattcaattccatcttatttcactggtgttctgcaatcattttcaatgcctccatctcactgactctgcagatttgtatcgatcaca

SEQ ID NO: 3180 - DNA, 2307 bp, Glycine max
  Intron number 1 from transcript Glyma08g43220.1 (locus Gly ma08g43220) derived from phytozome v7.0 (chr-ID Gm08; pos 43070020 to 43072326 reverse strand)
agctccgtgaaaacgcgcttctcgaactctccaaggtaaaccctaataaataaccgtttttatttgccctttcgagtttctgcttcaatttttcctcgtttgaattgttgtgactgtgaattgaagattgaagcctctgcttttgattttctgagggtgtaattacggtttattttgtttatttaattacttgtttttgtatgtgtgtatccgtcaatatgaattgaaacctttttttttcttctgattttcgcgtgttagttagccgttgagatatcatgctgatgccgtttttactgttatgaggtttgatgtggtgtgtggagagttagatggctgtcttgaagctgtttcccctgttcgttgtttgtttctctcttttttggagtcactttgtgtttttgtttgaggaaagaggtgagattggtttttatgtgtgtaactgtaactagtggaggtgagaattagtttcatgcctttgtcgtgtgtgttattaatccccttttgttaaattccagcaacatgaatgagatggagtagttcaatgttggtagggatgcacttgtttaactttgaatttgttttctaaaagtaagcggaattcagacacaaaaatttggtaccgtgttacacattgttggggtgttagattgcttgtgtttttcctaatctggaattggattgctgaagttggaaaattgacttctcaacaaaattgaatgaaagacaatggtaaaaaatgattagtgttgaaaggaacaaattgaggaaatggtccttgtgccagactgatcacacgtcctaaaccaaaagtgaaagaaatggacaacccagttgaacaggattcggctgttaccagcctcttcacacaaggtgcctccatcttggttctcagctttttatttaatgtgagctttggggggggtggggggggggggagtggtatcctggataatgtaggttcttcttttcactgttttggtgttacagtgggggtgcaagcgtcatgggctccaaaaacttaaacttattcttagaatgtggatttgggcctaactcaactccaaaaattacctcttagggtgagggttgccccttatttatatactctatcttgacctctagtcgatgtggggcttaggttttttccaacacaccttctcacacccaacacttttgggcttagtgtggtctacattgacccacaacattacacattaaaacactgtattatgatatcagagcttaggttattcttgacagaggaataacaaaagtcattctccaccggggacctactgtccctggtggaacttcctctgcccttctaaggttatgttccctctcttcacaaacgtgcgtgcggtaccacacacctttgcttctgtttggcagctgtcttggcatccttttgccaatgaccactaccgtcgcctctcccttcatggctatcgagattccttcggactctgcttcctcaacgacattcaccaacgtcccttgcacaaatacattttgtgcacaactttctttgtgggtgaacagtacccacgcccactgttggtcctgttcgaccaccagtgcactgccctcttgaacgccataccatccacatgtgcagccaactagccaactcaacacactgtcgtagcgaccccacaaagggcccttttctggcgagagaagtgcacgcacacaacgtgtgacacatctcaggcgagcatcacactggaattgcctccttcttcctaagggcgtgctttgctttattcacaggtgagcacctgtcgcaactacgggccttcattgattgcctccaaagtttttcggcacaaccacacgacatgaaccgtctttattttttgtttttgttggatttaccacatttgtaacaagcttggttcatataacatatatgctccagcttgaggaagagtgtgaaatatatgatttgatatgttttaattacaacattacacagtaaaacactgttatacttatgaatagtcaatgaatgatgattacaacttagcaacttaattctcattagagactcaaatcctatgaccaacacaatttataacacagacccaccatgcaacaacaccattctccatgatctagaacgacttagaacaaatacattggcaatattagttattgtaattatatcacgatttggcttgttttttcttgtaaatgtttggtagtgctgatgtgcttatagaggtatctcatcaatgtctttcttccatgtttttttgcattttagaagagggagctatttcaagatcttgctccattgct

SEQ ID NO: 3181 - DNA, 1332 bp, Glycine max
  Intron number 2 from transcript Glyma08g17290.1 (locus Gly ma08g17290) derived from phytozome v7.0 (chr-ID Gm08; pos 12805770 to 12807101)
gtgggttcaagaacccatttagcctcacttttcaggtatgttttcatgtttatatttgtagttttctttttgtttaatgcattgggacataaggaaaacaaaaagtgcagactttcttttggtgtgttgaaaaaaaattgtacattttcaattctgaagtattaaatttggactattaccaaagctacctagattttttatgcatccaaggaaattattgagcctgataaaatccattcatggaccaaatgccctttgtcaaggtcatttttgttgctctaaatgcactccttccctagaaactagaattttcatagttgctgaataatggaaaaaaaaagatacatttttgtctgtctgttaccaacctttttgttagagtgtttaactagatttattgcatctcatgtctgagttattattatagtcgtcttgaatactggatgtcctttccctttgtagttccagctttatttcatctcaagtagttagatgataagttgtccatctttcatccatgtccatcacatcttaatttgctgttgtctgatgtgatgatcacttgctttgttagaggatgtaattgttagctgtttgtctttacttttctgcacgataaaaaaatacagcagttgtcttccagatcatgatccatcacattttgatgtaattttcaaatatcataatcacaaggatgatctgggagctttgaggtagctatcttattgaaagagtaacttaacctctatgtgaatgtgtgtgtataagatcaatcccttgccatattagtttccctttgtattttgtctcacttaaagaaaataaaatattagatgggaagcgttttatctctttctctgttatgaattctattagcctgaaatgaattttctttttaagattatatggccgagtggctgagttgatttcaattgatataaacctctatttcccatatgatattttccaagcatgttttctactaaaagtattgtgatcactgacagaaaatgtttttaaaagttcatcgtttattgtattcaagagattttcccctagtatatgattggccgtttatatgtgattgctggacactggtgtttatgtagtaggtatactgtgaacattggagttaactttggatttgtgagcatcgggtagctcatttttattcaagtttgatataattttaatttgtttgttcatattttaatgtctacaagtgcaacccttaatctattagccattgatatgtcttgtctatattgttaaatttcttacacatctttttccacagccaataggtttggggaaaattgcaaagtttattaa

SEQ ID NO: 3182 - DNA, 2196 bp, Glycine max
  Intron number 3 from transcript Glyma18g12440.1 (locus Gly ma18g12440) derived from phytozome v7.0 (chr-ID Gm18; pos 11521926 to 11524121 reverse strand)
ggaaattcaaggaagcactgaaagattttcagcaggtaactatgtgcaactataagtgtttgctattttattgtctttaaaatattgggatgatggagcctgggttgaaaatatcactgattaacttgcaaactaaacaattaacgtttgtccaaattatgagctctgttaagaaagaaggaaaggagggaaaggtcacgggttcaatccctcctgctaacaaaaaactaacaattaatattttccgatccaaaaaaagaaaaataacattaaaatcaccactagcagcacccgcctcagttcctcagacccacaatagaaccaccaatcactcacttacccaaacagtgccaaaacaaaacactaacaaataaatgcagtactcagacacttgacaagactcggatgggtatctcacagtagctgagctagctgcatttacagaacatagctcataatttgcagcaagcaggactaacatcttccacccggaagatctaaatacagccaatagggctacgtatctcacagctgatcagagggcagaggttgtgaagatagttcccatcaccaaaataaatccaataatcacaaaaatcagatgtgagatgcagcagcttagctcagaactcctttctgtatttgagtctggcttcctgatttttttaatgctgttggtccttcattctctatcttgcaagaatctctctgtacacacccacatttctctccgccatttctactctttccttcatcttcaaattctgtataccaattgctgttaattggaaacagaaataggtattatatatgaactatactttgtatgttcctgtcctaatatcagtgatatcaatccagaaaatgggttacagctactgtaaaaggaagggaaaggaagactgagtggaaaaatgataaatgttgcacattattttgatggatttgctcccatcccaaattgacactcaattcttgtcacccccattcacattcccttttttcccttttatcatgttatttacggagtatacatgatatctcagcaactataatgaatattagactaaagtacacaccattgaaatcagtaaataacatggtattctcaaattacatctgctaatgattagtaagttcaatgtgaagttggccacttaaagcgtccatattttataaagaagaaaaattcaactgtcttgtattctcctccactataagatttacaacatatatttatgtaacaaatagcactacagcatatacatttctacatgctagaaaatgaaggatgcttcattattttaaattcaaagttttgcttgattattatttatcaatctgcaaattacattgtaaattcttctagtatgcatactttggtcttgtatttgaaaacatgcacaaatatttatattctaagtggttgttatccttctaatgaaagctgctgattttgtccaagctagagagttaggtacacccaatgtgtgtggagaaggaatagaaacattaagaaatttgagacattagtggtagtttcgaagaaaagtagattctgtgtaagtaatgtttgcgttgctttagacgaagggattatccccaaggttttacattctggttatggttgtgtatcttttgttgcagttgtggtagttggtggctgaagtgggccaatgtggtctgcaattgcagcctaatactgtttcaggggccaatgcaactgaaatgttgcacacttgcagctgcatcctgtaatgagctctgcaatttaaacaattgatgcttacaattctctctcttctttttgcgagccctttgtttaattagaagttgttctgtctactcactttctaacactagagtctagacatgatttttttttaaaacttggtagttctaatgtttattggaattgttggaatctgaaattttttcttggcatgcacccttattgaaatgttctcacatgaattggcttaagctgataattcttgtcctttaatatagttatttgttgctgcaacttctgttttaatatgccttgtttgggatatctcttaacccagcatctacttttaggttttcactttccttcaaagtaacactgactacctcattcttattgttctgtaacatattgtttcaatgtgcaaacattttgtttaatatacttttattgaataggtcaagaaa

SEQ ID NO: 3183 - DNA, 3303 bp, Glycine max
  Intron number 3 from transcript Glyma15g23240.2 (locus Gly ma15g23240) derived from phytozome v7.0 (chr-ID Gm15; pos 22313627 to 22316929 reverse strand)
ttctgtcaggctccaacagataagttcaggtcgggaattattttgtcttagaaaatcatatttgtttgaaacttgaatactctgtcaacttcaaaagttttacttgtcatgtgtgtgtgtgtgtgtgcttcgtcatacttgtttgcaattgtttaagttgcttgccttctcacattgttgctaactggtcagattttcttccatttttttacttttaagttttcaaagagtagtttgttggttttattgtattcaccaattattgctcagttgattatggacttggcatcttttattttttgttttcatgtatgatgtgtatgctggtttttatggttatgtgttttatccattaatgggatatgcaatggaacaattaggagataacacagttgtgcccactgaaaatccatattagaaaattagagtgaatcataatgtattctggaaacagggatgaatgatttaacatttaaattaatttgtggctgttggtttggaaaatgacggtacattttgaaacccgcaaatatgttcactcagtcataatattgctattgatgttttgaggtcaaagaagtgtaaatagctgtttgaagaattgcttgacctgaaattttaagttgttatatataagcctagctatagaatagattttgttattcactctcacaaaagttctattgtgcttgaagctgtgacaagttagtggcttaaattaaagttactcaaggctctagatatctgctcgagactcaagacagtcttgtaataaaattcaatttcaagtgtggagttggtgaagatcgaattttaggcgacttggtcaatgatattttgacatagtccaagaactgtttgaccttagagtctaggattaatttgtctctggaggcattatctttgccttgggaagatatttattgcttgtcaaattcaattaactagaagattgaaattgcaatttatcagaatgctatcactctgttaaattgtgtttggtgaaatgaaatcaatacttagtgttagaaattcgtttgcgatttctctggattgatgaatacagaaatatatacatagttgttgccttgtggatctcttttattcagtctttagtcttgtgctctcgtgcttttaacctgaggattttggtgtgggctgtaaacactagtgtaactttgatgagtctatctcttgttgatgggagtacacagccatacaatcacaattgttcacaccatcgcagcttccccttatccttttccctttccagcttttccagtcttaaaatatgatcaatttgaattttttgttctgtctacatggtatctgtcaagaacctccaatctcataagcttaagctattgggtgaaaaaatattcaattctatattatatttctagcataccccctcacgctggagccctttgggcttgaagcttggacaatgcatagacccacctatcttaagttaaaattaaagttttcttttttctcacaaaaaaagatttttattggaaaattggggcagcaacgattgaactttgactgcttggtctgtgaagctttgatacccatttcaggaaccaacaatcctaaaagcgtaacctattaggtaaagacacatcgattttatattatatttctaatactaccaatagtccaggattggcagtgttcttatgttcagcagatgtaaaagtcaattttaggtctttttaacttcctacacttggtgcctagagttctagcacacaagactcaacccttggattaattccacactttgaaatcctaaagtcattaaaccaatatgttaatgccttttttttggttatcaaatttgatgggatgagtttacatacataaattttggaaattataataatggatgaaactctttctctatgttagatatccaaatagaataggctcgtttctgtattgggcttggtcctgttggttggaagttagagaagttagttaccatgtgatgaagagaaaaaaataagaaggaattggctacttcatttacacactttttttaaataggaaatgagttagcagcctttgctttagtgttcatgaaattgaagagctctctggtttgctatagtttagcattttgattacctgcataatataaggaggcacaaaagaaactatcacatttgtgtaacttcactttctgtcgtatatgtattttaaaattaaacaccatttttcatattcctgttggattcatgcagcatgatatttgatacttgatattcctgcaaaataatacttgagattcttgattttaccaggattaattttgctgaactttttataggcattaaaatccacgagttgctttgactgctgtgctaataatactttagcatgcattattctgaatccagaatctttgttgtcttttggattactatatgaatgtagcactaggagggcatgattcttccagaattaataaagtgtcttcttattattcggcagcctgaatcttggttattcttatttgtgggccgtaaaaagatttagttactgcattttcacttgattctatatgtgaaaattatgtatattctgtccattttcttatcttggataatatgattcttgtaacacaagtatgaatagatatccataactatttccatttccctttttgtgatgtatacgtgtgttgtagaatgaatatgtaattctggctctttcaccaggtacagctaatttttctgattgaaattttagtagttggatattgttggtccattcatagattccttctttgctgatggtgcagatattttgtttggtcttgatagtttctagtggcatgaggtcagtggttttgttcacgtattttgataaaagaatcaatttttcacagaatttgtttatggtatttctctaacaattttttatgctaattcagtcgcatttatagcatgactgagtatatgtgctgggagtatcagttgggattttgtttttcaaaaaatatttatttattgttttaagcatctgttctttcttttcaattcatctgggtagacagtattttagaatcgagacaacagattttctaggtatcaaggtttaagacagcctctccacttctttgtatataccatatatccatcaatttttatgagttgcttttattcagtctataattctgattttgggggattattagggtagtatcaacatagattttgaaatctatattttattgacaacattggccatttgcttctcttgcagaaatacaagcacgattgaggatatcatctg

SEQ ID NO: 3184 - DNA, 913 bp, Glycine max
  Intron number 2 from transcript Glyma08g44420.1 (locus Gly ma08g44420) derived from phytozome v7.0 (chr-ID Gm08; pos 44062451 to 44063363 reverse strand)
ccagaaagcctcatatcaagaaagaggttgtttgcttttgttttggcctcatagttttttggtttggtttggtgtcttttgttttgtatttttaatctatttttttttttgtttaaaagatgattcttttttggtagctagggagagaaggagagtgagaaaggttgttcttgtttgttctaccaaggggcaatgtactagttttgggatcttttgctgctttatatattggttcctttttttttgcctaggactatttatggatgtctaagtgtgattggaatggaatggagtgtgattgaaagtaatggaacaggatggaatctagtcaacattctgttgtttgattatttttatgatatatcacctagtccgagtttctgatgctcagtatctatgatgaattagcggttgactcttgactagtggataccctggcttccaaaaccaaccaataaatcatttttatgattgaatgatgaaatggaagggcttccgccccatacttggggaagtaaatgtaaagtattggatggaatggaacagaatggaatgacttttgttatactttaaatggaatgacttttattttactttaaactatctaaagattctaaacaatggaatctagtatcatttcgttccattccttctcatcaatccaaatgtagcctagggtatgaggtggggtggtttgatttaagtttttttttgtttttttgttttattcatttatgaagttttcttactaaattatatatgaattgcatgatttgtggattttgtttttaaagatgacctaccaatgcagtgaaaatgctgtttgtatttagtgatatttattcattatatagattaagctaactgtggctaattgttttggacttgtcatttgctagacctgcttaacaat

SEQ ID NO: 3185 - DNA, 3050 bp, Glycine max
  Intron number 1 from transcript Glyma11g01520.1 (locus Gly ma11g01520) derived from phytozome v7.0 (chr-ID Gm11; pos 907941 to 910990)
atctggacttccaacgcacctcctctcacttcaaggtgttctccttttcctcttcacttacctttccctcttttttcttttaattgttgtgatgcttgctaatgttatgatttttctggcttcccgagtttattctgtaaattttttgtcccattattatctactaagatcatgatgccacttattgtgtactagttagttggttcatcaaactgtgactttaatttatgatctatttttttgtgatctgagctatgaattctgttaagtatgttgaaataaactagatgtttaaagtatgagtttaacttaatccaaaaattaactcaatggatgagtattctacctcttgtatattttaatttgattttatttttaatcttgttggacttaattttttctaataattactgattgcttcacgcttcgtacggctcttcatagcgaagagtaattcatgatcattcggagatcactatgtcgttttctaatattacgattttttttcccgcatacatatacacagttttttggtttttgccttttgctggaaaatttatacacgcggttgctgaactcatctgtacaagcaagaatccgtatggaaactgtatttttcttatcctatctctcgaaatgcttataatctttcccataccttatttgattgattccactaatcattttttgggtgacatcatcttctgggtttgtgtgctgcctttattatattatattgtagtggaatgtcctatctccttccatcttggattgtcctgcaccgatatatatgatgacatgatcttccatcccctttgttgattcagttggcgcctccatacctcttcattatttgtttttgtttttgtttttttttttttttttttcaagttcccccttccgagaggcattgagcataaattaaaacgaataaaaaagtaaaaagcatcttcttccttggtcgctgttatctttatctttctggatgtgtacgaaacgtatgatttgacaagggaaaatatcgagtccgtggttggaggtgaaagacaaactaaaaagaaaaacaaatgaggataattgttttccaactcatcatcctcatcccacccaccccatcctttccttttccgtgagtgtttgtaccctgggacactatatcaacttgtttcttttcactttgcaacattatgccaacttttattaattagttattactgttataaattttaatgttattttttaatcgacaatctgtgcaatataaatttgtgcctttctctatccgttagggtaaatgttgtctaccttcaacttgtgcttaataaataagaaattaattactttgatttttaaaagaactatgacttgcagttggtggtttattttacccataattcaatcaccaagatggataattattgtttaagatagatattttgttctaatttaatttagcttgcatgaaaaaatttctatggacgtggaaaatatataaacgataagataaggctaacctttggtaggtggggcctctagtattgatggtggaagattagaaaggaaccatgggttgttttgtttctatctggccaagaacttccttttagttagcggatctttctatccgtactacgtattaacattttttaagtattctcttcagattaaaaacctatggctctatacggattttgattctccgtagttataagttgaactgctccagcatcaatctcatccattctatttattttcgtacataataaatcaacatttaaagttaaattttaatggtaagatttacaagttcacggttttcagtttcttttgaattcgtttgttgttatcactcgtgtggctttatatttcatgtgactttaattttctttgttatttgtaccccaatgtcgatatttccacactgtcacccttatttatgttggcgcatgcgcgcaacttttgtatatatagtctgttttttaattgataacatcaattgaatggctaatgtttgttaattaaaagtgatatataattattctgatatgcaactatactattattacgaatccaaataaaagtacattgagctttctctttcttttagaactttgtttataaacacatttgtgtacttattctgttattgaattattagctataatagcggcataatgtccgtccatagtgcaaataggagtatttgctaatgcgaagtgacacttcccgtataccaaatatcaaatatattgaacaaataacatttagaacaattaacagtgccagacccagttaactgtacttattaacattcagaagtcagaacagacgctagttccatgctttcaatcaatttatgtttatttttcccaatcatgatgtcatgggactggctgctaaaaactattattattgttttgtcaacccgtccaagttctaatcttggagttgaataatcgacttatataatgagtgtgatgatggttatgaagtttttttattatgatttttctattttcaaatcgacttgcgatagcaaattgcaatgtcattaatttgaaaagtgtgtttttaagaaatttggtgtctgtttttctttctttatatatcaatttgtaaaatttgagatttatttttctttgtgaataataccaatatattcatcgaatatcttttaaatgaatttttaatattaaaagtataattgtttaaattttaataaaatatgatcatgttgtattttaaagttttgttttcatggacgaacaatggacccgcgtggaaaatgcgtatagaatactttaattgcgattagtagctgggtcggttggtggtccaaatctcgataagctggtcaactttttgttttgtcgacacctaaccatgatatgtaaactatacaagtggtacgacgtggatagtggagtgagtatagctaataataatatggtaaatattggtcattgttatttgattgcatgaaatacaaaggagtgatgattgaattaattgcaggaggggagcatacagtagcggctcagtgtacgaca

SEQ ID NO: 3186 - DNA, 839 bp, Glycine max
  Intron number 2 from transcript Glyma13g03160.1 (locus Gly ma13g03160) derived from phytozome v7.0 (chr-ID Gm13; pos 3111272 to 3112110)
tgtaagtattcccaagttttattatttttcagaccccattattcaggttgatttatcagtgataacaagttccatatttcatctatttaattgttatgaaaagtttatttagatgttctagtatgtttgtgcaagcaaagtatgactgttgcatttattatgtgcatatggcagcatattattgttgtttactgttattgttgtttttgggtgaataggcgaacatagagtggaacatgaatatatctggatgtgccttttttcttatttttttattaactgtcgtatactagttgttttagtcaatttttctgggaaattattactgaacaccccaaaaatgggttgtatgcgtggaaagaagagagagctacagagaaaaaataaagagagaaattgatatatgcgatggaaaatgaaaagagagataggaagaaaaatgaggtggaagagaaaaattaatatatgttttgtagacgatttgttgagtctctattaagagatagcctctttatactaggaagtatggtatactcattaagagtgattttaatcttttaaagaaattaagacaaaattcaacttggttgttggttgtaaaagtagaattgcgtttcatttattattcaatcttgtttccacatttgtcttttctgataatttactttgtctttctcagtatttcttgtttttcactcttaattattctgtgaattgatatattatataatttttaattacttatgagtcaaaattatcgaatgcaatctatattttacacttatatattttgcaaggagatagtggggagctgcttacaagatcgcaaagaaagaaga

SEQ ID NO: 3187 - DNA, 1308 bp, Glycine max
  Intron number 7 from transcript Glyma13g18610.3 (locus Gly ma13g18610) derived from phytozome v7.0 (chr-ID Gm13; pos 22240172 to 22241479)
caaatatcggctcacttcttaagggtcttgttcaggtatgaacatttaatgtttaccatatgcttttattttggatgcttgaaaccttctccctatatataaattagaatagctatattgaatgtgagcatttttaggagctatttttcaacggggatgtttttgggaatttttcttcaatgagagtggttttagggatttttcttaacctcttatctctttcaaaatacctttttttaccttattttctaaattgaacttcaatatttttcaaaaagaaattatctataaaaataaccttaaatcacaatataattttttatcataaatctaaaatataatttatgtattaaaaaatatttatttattatgaattttgattataatataatttatatattcaaaagaatttatttattataaattttagctgtataaatataaacatttatcttgtgtattgcataggcaaaaacactagtactatatgtttgactttagcacatatcatgggtagttcaactgtgttatactgttattaagtatctgatttaaggttaatccactacatgaaatttgagggttttgttcatgttgggaggaaggcttgcatttggcttggcaagttagtatttagaccaatcaataagttaatggctttatgaaacttttatgaacttttaagtgcagtggtggtataatgtgatttttgtgcatattatgtgctaggtttacaatcagatacttgtgtggaagatgtatttgtattaattacatcattaaattgctaactataccttagacaatgttggagagcatgtggcctccctctaagttggccaccattcctactaagctcaaatctttgctgtaactccagttaactggtaggacagtaggcattgctcaaatcaagtaaatgactaagcatagattaatagggaactggggattctgttagattgaacttgagctgttaagcaccattgtaggtattgccaagtccatctttgaagtttattgcctgagatatttatgttagagaagctgaaggataatttgtgtggattgagttatttcttttgggttggggtatgatttgggtagtcattgggaactcatagtgtttcagatttgttgtcttgaccagaactagagatgccctgaattcaaacccttgcaccttaaggtttaataagttttgtgtatattttgatcattaggaatccttttttgagataatgatgaaattgtttttacatttgttgttcagggaagaaaggaaattatctctcttctcagccgcca

SEQ ID NO: 3188 - DNA, 3279 bp, Glycine max
  Intron number 20 from transcript Glyma01g42890.1 (locus Gl yma01g42890) derived from phytozome v7.0 (chr-ID Gm01; pos 54009568 to 54012846 reverse strand)
ccattggaaaacataagtaagtcttatttgttggttgttaaattacgatagtattttaggttagtgtaatttgtttctagtcttctgaatggcaatttaccctttatgtttgcctcttctatttttgtaacatgtaaggtctttcctcttcattaatgtttcaattaaatttctagatatttaggttttgcacttttgaatttttttataagcttttattgaagccattgccattttcaatttgattctatgccttccaatattgctttctgaactacgtgtgtctctctgtatgcatcatctttgtaaagaacatcttgcttaatcatgtaaagaactgttgactgagtgaatgaagactgttgcctttccaattatttttgttaaatatttgatatgcgtgtattttatttctgctttaggttgtggcaggagcaagtgcaacatttttttggtctaagccctagagaacgttctttgtcttccatattgcagctcaaggtaaattttctgggtgtatagtaggtggtatttatgtttgtgattattgatcctctgattgacttaggctgcattgaacagctatggttctcttttttgtgtggctatttgtaaaaaaaaagtactggtcaccgtggtcaggattttccttgtattttatatgaattgttagtgggtggtttaccttcattttctctaattttagatttactttaagccttaacgtttgttttgatttccattataacttgtcccttatattttatagcacctttctgtttaagcattttcttccaattgtttttaattttgtgtatattcttagtatccaggagtatcaaagcttattcgttcatctgttgcgatgattatgattgaaaaagtgaaagctttcacaattgttgtgaagcctttaccagtctgttttattttattaggacttgacatatcactggtcactttccatgacactcattatttgcttactattgaagagaccagaggttgtgaaatgcttgaatgccttaacccactcagctggtctatatttatatagccttagggagtaaatacaatttgaaatttacaagaatattaatgaagttctagtacctatgtacatgcatgtgaattcctagatacatgaatatgtgactaactaggtgcattaataactattctttgttggaacaactacccatacaatgttgtaattccaacactccccctcaagctggagcatataagtcaaatgctccaagcttggaacaaatattttgaattcttggtccccgtagagattttgtaaagatgtctgctagttgatcattagaactaacgaattcagtaataacttccttagaaaggtcggacaaaatgacaatcaatctcaatatgtttagttctctcatggaatactagattagaaactatatgtagggctgcttgattatcacaatatagcttcatttgttgagcatttccaaacttcaattcttgaagaagttgtttaatccaaatgagctcacatgtggctacagccatagctctatattcaacctctgcactagaccttgcaacaacattttgcttcttactcttccatgagacaagatttcctccaatagacatacaatatcctgaagtggaacgcctatcaatgggtgatcctgcccaatctatatcgcaaaatccaactatttgagtgcttcctttgtcttcatagagtagtccttgtcctagggtccttttaatgtatctcaaaattcgaattactgcatcccaatgatcattatgaggagattgcatgaattgactcaccactccaattgcaaaggaaatatctggccttgtaatagtgaggtagataagcttcccaaccaattttcgatatctttcaggatcagaataaggctctccctaattgagtagcaatttttgatttggatccatgggactatcaattggtctacaatctgacataccagtttctttaagtatgtctaacgcatacttcctttgtgagatgataatcccatcttttgactgagcaacttcaattccaagaaaatatttaagtttttccaaatccttagtctgaaaatgactaaataaatgttcctttagttgagcaattttttcttggtcatttcctgtgatgactatatcatctacatagaccaccaagtaaacacatctactcgatgaggtatgacaataaaaaaatgaatggtctgcttcactttgtttcatcccaaaagcctgaacaattgagctgaatttttcaaaccaagctcgtggggattgtttgagtccataaagagacctccaaagtttgcaaaccaagctagactccccctgagcaacaaatcctggtggttgctccatataaatcttctcttctaattccccatgtaggaatgcatttttaatatcgaactgatatagtggccaatgacggatgacagctatggcaagaaagagtctaatagaagtaattttgagctttgaggcgatcaatctggcccattggccccaacttttatagcatatacccatcgacagccaacatgtttcttgcctgggggaagaggaaccagctcccaagtaccattatgctccaaagcctgcatttcatcaatcatggcttgtcgccatcctggatgatcaagtgcttcacaaagacgtttggatattcaggttgctgtttggacaaagggacaaatacgggactttaggttctactgactagatgcagaaacctttaaagaacaaacaaggtgactctgataccatcttagaatattagagtgtgagtttaggcctaactcaaccccaaaagctagctcaaggggtgagggttgcctctcacttatatattctaacttgactttatttttagtcgatgtgggacttgggtgacccctttttttttattaatcttgaatatgggatttgggttttttccaatacacctccttacgcccaacacttcttggactttttggcccatgaataacaatggtgggtgaccctttggattaatcttgaatacgcgctctgataccatattgaagagactagaggttgtgaaatgcttgagtgcttaactcactcagctgatctatatttatatagacttagagagtaaatacaatttgaaatttacaagaatattaatgaagttctagtacctatgtacatgcatatgaattccttgatacatgaatatgtgactaactaggtacattaataactattctttgttggaacaactac

SEQ ID NO: 3189 - DNA, 1313 bp, Glycine max
  Intron number 1 from transcript Glyma08g21100.1 (locus Gly ma08g21100) derived from phytozome v7.0 (chr-ID Gm08; pos 16003852 to 16005164 reverse strand)
catcagtcttttacaggagacagatcccaagccaggtataatctagctttattctatgtaaatttggctttaaatgtctcatggtgttaggtgctatatgtattcatcaggaaaatagcattatctttatggatttccatgttttcaattgttcattggcatgttttgccatccaaattctatattatgagccacaggccatagcagtgccatttatttgttggtgtttcaactttcaacccatccgcccttatattattgtggaattttatgattggtgttaattatggtcataataaatgaaggtcagataccattcctttgtgtcatttagggtcagtaagtaacaaatctcaatgtaagagcctaaaaaccacctccactatgtcatgctttttatgtcaaacaaatgttaattgtgttgaagttacaagattttaagatagaaaggagagaagagaaaaacataatatccttgaattatgaatatgatttgatgcaatgatcttattcaaaaggctaagacactaacccttattcatactgattaataaatagactcctaatgatacttaaatatggaaactaatcatcataattactatctgctgaggtgtgcatgttttaataggttttgtaccctttattattgtagttgtaacttcttttcatgaattaaaattataatcaatgaagacttttggttaatagattcagtttgccagcattttatttttacaaactacaaaaaacagcattgagtcattaatgctggtgatagatttttgatcatcagacttggtttgaaagcctacttaataaataatttagaagaacacattgaaatgcagataacactggtggtctatggttttcttgatggcaaatggaaataaaacatacgtttctgaaattggatggtatgtaaattgttacaaggggggaaggttgggaattcatgttatgataattgttagactagaaaactgggacatgagaattgctctgtgtgtgtgtgatgcatagaagcttggggaaattatgaaataacttacactcggcaatcaaacatgctgttattgtatgattttttcttattatccaccaattcattgggagaatatgcttctaaaaccaaacaaaatatcaactcctgctccttgatgtgctcaatgaattgtgcaatggttttcaattttgataatgtgactgttagaccaagaataggtttaaggttaaagattttgtatttttattttttagaaatttctaaccagccttctccttcaccttcacaggtggcagagtgggga

SEQ ID NO: 3190 - DNA, 3039 bp, Glycine max
  Intron number 2 from transcript Glyma11g25540.1 (locus Gly ma11g25540) derived from phytozome v7.0 (chr-ID Gm11; pos 24183002 to 24186040 reverse strand)
gcacaagaacttgaaacagtatgtggttcaatcgatgtacaaaatgcgtaaccattgctgtgatttgactatgaggatgtgttgttgcctatgtgatgttggtttctgctttcaagatagcacaatgtgtctgatgttttatttcaacctttcctaatatcagactccgaaaaagaagtataggatatcaagggggtctaggattttacgatttctaattcccttaaggaagagataaataattgtagggaaaatagaatttccacggcaacaacaaaacctattgttataacccctaaaaggatttttgttagaatcgttagcaaactcagttgattgagcagggtgtgtgagtgttgtaaactccttggtattgtgtttaattcctacggataaaaaagaagtataggatgacttttatgagtctttaattgtgtttaaactttgtgttatgaaatagattaaattctgttcactaaaaaatagattaatttccttaaaatatttgacagagatttgcctataaataagtaaaacaggcggctgatttgcaaactttgaaattcaattgtgaactaaatttggctctcaattattcactgaaactaacagttattgttgttattggatgttgatggaaggtataatggcatatcttatgttttttttcaatgtatatttgtatagatttgattctattaatgattaatttcatcagtcccatatgacactgaatatgaaatatcattcatttgccttgccctcaaaattaaggatttccaatctgttggacagcctgtctggttgagctgatcataacaaattatggtttatctattccaagagcaatagagttatctattagtcatgttgagtgattgtcacgatgtttatcaattcccaatgtggatgaggccatggatggttagctagttcttgcattccaaattatatgtaggctattgttagttctggtggctgaaaacaaaaaggtgaaaggttttgatcttcacttaaaatttgtttacttgaactcatgatattgtatcatatctcatttttattccaacatggaatggaatgtgtccaaggataagctgaaacttgtggctttaggtgggctatcattcagtctcttagtgtgcaaggttgaaacttatgcccaaaaatatttaaaggggataattacaaagaagagatttgtggactagcaacatagttaagaacattaaatattctggggcactgggccaccagtaacagtaatcactgttatcaatcccggatagtggccaaccccaaaaacactgtggggggatgactgctattctgaattttttttatatatttcatactaaatacacataaatgctaaagaaattttaaaaaattactcgatagtattgacatgttcgtagttaacaataaaaaagttataggttttagctcttaagcaaacatacaagtagatagtagtgaaggaaggattgaatgggttttttgttcataattcttggtgttaatgtttctcattatctagtttctcctctttattttctaacagccatgactaaccaaagagatagaggaaaaaggagtgaatgggattgagactttggcagatagatgaccaaaaaacagacctcagactcagacgagacaataatggaacaaagacaacaagagaaaactaaaaaagaacttactgtagagacaaaaacacaagaaagagattaattgaaaacagagtttgatgagaatagagaacagtgaacaagattataagagaaaactgaaaaaaaaaaaggagaatgagaatgagaagtaaaaaaagctgctcaatgggttgtccgagagtcaccagagggtcacactggggtcgttcagtagttgcaaaataggagaggaggcaagtgaggcatgatagttacgaactatgaaagggttcactagtttctcttcatctaatgctgtatatttaaaaagtcttagattatcttatatcttgttcttaactttatgataatgtacaggaaagttacaagggtagatatagtgccatctacatgttggaccaacgattagggctagcatgcattgaaattttaatctacaagcaagagtcactgtgtagtttcatccaaaaggtggggctggggggtggaccaggaactagaaagtgttaaaagagcaggaaggggctttagttatttgccagtgtgtgtttggttaaatagcttattaagtgcatattaagtaatgcatataatgtaaatacttatgtataagttgtttctataattgaagaggaaacaagattaaactattttcataagttatatgtaacatcacacttgcaacacatatacaagtgtaaattggtaaacaaaatactagtgtttatgtcataagataagttcagattagctgtaaataagcttttccaaatgcatccctaattgagagatggtgtaattttgaaagtggttctctgtattataaatgaagttccaaagcattgactacaactttgcaaccagtttacaagcaaagcatttttacacaagttctattgaaatttcaaacgactgttagctataatttgtattataattattagcctatatttaatattttattttatttccatcattagaagagatacattgatgaactgcactcaagggacaaattgcattctgataatcatgctagtgcattatgttgcctgcaatagttcatcttctgtcttctgactgagaaccaattcaagcatctagggatcttgaatttgttctataactgtttggtttagtttcccttaatgctgactttttacttgaacaatccttgcgtactttgtcttatttccttaattttataaggatatcatgttttaatcgatagaatggttctaaattcagcagtatttccctcaatgtttgtcttgttgattagttgattctaaagctcagaataaccatccatatttaaatttctacagcttgcagttgagtaccaaaacaaggcactgattgt

SEQ ID NO: 3191 - DNA, 4999 bp, Glycine max
  Intron number 2 from transcript Glyma18g53180.1 (locus Gly ma18g53180) derived from phytozome v7.0 (chr-ID Gm18; pos 61508406 to 61513404)
caaaggtatatatgcttgctagcttcttggtttctcagactcttgtgtctctttttcaattctagtttagttagtaaacatcttcaagtttgtttctgttaagagtttgatttttctaggaatctattactacattggtttgctgcaacccaacctagatatatgaacatatttagatcgagtagtgtatctgatagagtcgcgaaagccttctaaaaacataaccccagcatcataggaaatatatcccaatctcattttaatttgtttcccttctcagtgacttcttgaagcattactacaaaacctttttgaccgttgaccttttttaaggaaaacattgcagataaagtcgtagataccaggtgggagtaagtaccgttcaatattcatctccatatttaaaggaaaataatggataaacgcccttatcttatttggttatctcccttcattttacctcacaaaatcatgatgacaacatgtaaaattaaaagtcactatttgttgctttgcttttattatgaaaaattaattgattatttctcatcatgaatttaatttttttatataacaaggtgagttagaaatcacatcatgaatctataggttttgagctgtttatctctccacaacgaccaaatgttcacctaattaatgtgaacatgtcaattaatttgccttaattattcgtctgttgaactgacaaaataaaaccacttgtttcactgatggagttcctgtaattccccaccctactatggctgtgtatgatgttggtcaaagtatacgttggtcttattccttgtgccttagcccttggtagctcttaattaagtcctaaactaaacccactttagggtgtaataaagtctacttggaaattttgttagagaaaatgaaatgaaatgaaacaaaatagggagggaagcgatggaatggggaatagccattcacgacattgggaaattgtgattggtgaagccattcagcaattctaacgtagagcctcaattaatttctctcaaatatgaaaatgattcatctgccgctagaattccggcgttgattattattctatttttaattgtaataatatatattttgtcaaatttgaaaggcccgttaacttatgataactttgacaattcgtataatttgtgaagggaagtcatcttgactaattatgttgcttggaagtctcaaattgtatgaacgaaagaaagaaaaaaaaaactacatagacttagtcttttttcttttttaaataataaattcaactaaaattccttttccatctagcatcattcctttaattaatagctacaacgctttagtaaaaggctatgctgaccatgtattgttatttattttttgaacaattttttgtattaattattgtattaatatgtgggaggctggatcatgtttcccatcatggaaataacttttgtgttgttggatcatattttaaggcaaatgttaagtgcattggttaaagaaataaaattgatttgtttttttttttatctaaaaatactattactgtatatttttgtaattttaatatatttttagtatgatttctataattttttattattaatttcttaatatcctaaaaacattggccagtagaatttttagtatgatttttaatcttattcaaattatcttgactaatatatatatatatatatattggatttagtcttatgttgttgtttattgttcaatttatgttttcacaaaaattatatatacataactatctatctatatataagataatcatgtaacccaatgagttgatagtaaatttgactctcttcatctccattcttgcagaagaagagaccaggctcgttcaaatttaatagcggtaaatttatattttcaaattcatactcattagattttattggatttaggtaaacgggcaggggaattcatcactttttataattttaatttatttatatttttaaaaatattattatatattagtaatttgatattatttaattttatttttatatttgatccaataaagaaactataattctctggttgattatcatttacaaaatatcatttcattgtaaagcttacatatatttttattctttaataatatactaatttttagtttaaattttattatagtttttgtttcttatgatgttaaaacaaatacttttttattatcatattgttaattcggaatatttactaattttgtcaataaccattttttcttgaaattttaagtaaattatcatgaatagtttacatgttgatataaaatttgaatgtgaacttataaatgtaacatatcattaaaaattaacaatcaaaagagtaatatttttatcaaatattatattttaatttaaataaaaaaaagagacatgaaatatgatactaatttcaatatgttcataaaaataatatagatagagacttaggaataaccaaagtgagttttgttattttgataaagttcttttcatacttactatcagaaaatcgaatacctattgacagtatgtctaaaaaagttcaatcatgtattaattgtattcgaactgtaccgtcccacttttagacaaggaacaagcatgcctaagcaagcatcatgttgacccaaccttttttttcccgaaattctaagtcgcagtttggctcgggtttcctagaaaatttggtgttgaaatttgtaagcattgaaagtgaaacgcaaattgattggagagttcccactataatagtccacgctctggtttactgattcaatcatcttcttcattttgataaaagtacttctcctcctacatcttttttggtcctactgcaacaatgaaacaactgcttcttgagccttgtttcatcttcatcttgttggtaatctcaattaccaacactccaacttgcctttgcgaagatgatgctcgctacgccaactgtagaaacgcaattagctgcggaaataacaacttcaacctcaaatacccattctggggagaagacagaggtagcatttgtggtggacctaactacgagtcggaggaactcacatgtgaaggtcaagtccccaagataaccataaatttcatcagataccgtgttcttggctgggaaaacacatcacagattctcaaagtcgcaagggacgactactgggacaataatactgtctgtgtcaatggtgacaggaacatcacatttgataacactcagtttcaatatgattatgatggccttgttaacgttacgctcttttatgattgccctgccagttctccaactcccactaattcattgcttccaccatcgtctgtgtttagtttttcctgtggtggtgcttcagttgtctactacacagtccaacctttaccttcctcgtacgaggcgccctgcaagattgttgtgattccaatctttcaaaccaacaacgattcacttgacactcccgatagaatcattgaagctttacaaggcggttttcagattgaatggacgggaaattatgaggagtgcgagaaatgcactggttctggtggagagtgtggatttgatggaaataatttccaatgtttctgcaaggatggaccttattctgcttcatgcaaaggtatatatgcttgctagcttcttggtttctcagactcttgtgtctctttttcatttctagtttagttagcaaacatcttcaagtttgtttctgttaagagtttgatttttctaggaatctattactacattggtttgctgcaacccaacctagatatatgaacatctttagatcgagtagtgtatctgatagagtcgcgaaagccttctaaaaacataaccccagcatcataggaaatatattccaatctcattttaatttgtttcccttctcagtgacttccttgaagcattactacataatctttttgaccgttgacctttttcaaggaaaacattgcagataaagtcgtagataccaggttggagtaagttccgttcaatctagtgttcacatattcatctccatatttaaaggaaaataatggataaacacccttatcttatttgatacttagagtggaaaagagataaaagagaaaagaatatataaatataatattattatgatagaaaagtacgggttgccttctttgactgccattacaattatcacttatcttccttctcatggggtccagtaattattagaaaacttgtctatagcctgcttaaaattctttagctgtaattttattgttcaaagggaggaattgtcctgatttttagctgtagttggtaattacatttataccttgtaccccatggccaggtctaaacagaaaccaattttcagattttggcacagttctttgtgaaatatatgtgcaaataattattgcttcctgactttgaatctgatccttgttgcactaatctaatagtcttaacttttaatttgaaaattggagctcactattattgatgttacacacttttacttctgcatcattaatggcttgaaatgatttagcagtatcgtagactcgttatacacaaactctaatgatatgataagcaaaaagtgaaaagagagagagagaggtaagtagattaagctaagggaatattgatgagtttaatataaccattaatatacaaatagaaaatatatcactaaaaattcaaaatcatcaggcaagttactattatcaataattgtacctcaaaatttggaatggtttcgtaaattgattttgtttaattttttatccccatcgttagcttagtcaaaaagtccattcgttaatccctgcaagtaacatggactagaactaatttgataccatttagaggaagcaattcatttctcttgccatgaccatcatattatgacttgtcatgatttattgagtattactacttcctgtgaacaatatatatatgttgattgtttgcagaaaaaagtaaagtccagttgccaaca

SEQ ID NO: 3192 - DNA, 2061 bp, Glycine max
  Intron number 6 from transcript Glyma18g22380.1 (locus Gly ma18g22380) derived from phytozome v7.0 (chr-ID Gm18; pos 25187284 to 25189344 reverse strand)
ttacgaaggcgtgttctacaattacttcagtataggtactgttggcttttatgttcgtagtatgttgttgcctaaaatgggttttttaaaacatgttagaggcttcttttcatagttggtattaataatcgagacttatgttgttgtactagaatatatgtctaggtagcattaataaaataccaattactcgcttcttgacgctcatatataagggtaatttaagaatgcatttttcaattgttataaaatgctacttgaattttgaagtcctaacctttcctttaagatctataatttttttaaattatggttttagaagctcaagcaaattacttaggttcatgcaattgggatatgattcattgaagagaaataagattacgtatatgcctcatattttacgtttttcttttccaaatgaatttacgtatgcgtgaataaatataccatctcttacttttatataagaaataaattaatacatttttgtggtcttataagaagtataaattcattttcatatgtatttaattataatttttttacacttaattttctttgatgtctattaatgagactctcactcattcttcgtgcaagtaagtgtgttatttcatgaattcaaaataatttgattaaatataactaatacttaaatcatttaattttatgggtattttaggaataacattttaatgtatgacattattaattaaaattagctaattattttatcgatattcattaattagttatttgtttgttatatgatatggtatgtatcttgtattattgtattaaataaagaatacatgaaactgtgtaatgtaagaactctgagaaataagattaccaaatatagaccattagattgtatttgaatattgctcatgattaaaaaaaagatgttcatgaattttattagtattcttttcattattagctaacttttaatctttgatcatctatccttacttttatagcctatatttataggttctcacataaaatgaaaaatgttatttgaagtgaatgagagttactagtagggggttcaatagcgacccttgattgttatgatttcttttgatattgattgctcaagatgattctggttattagaaatttattgggagtaagaaaaaatcattatcagacttgaataatcttaagaagcataattaaaatttgtctaagtgttaagaagttggtcttccaaaaatatttgttaaaaatgttgcttttggtggtgaacaaaagttgattttattgatacaacatacttaaacactacttttgaaatatgaactcaattttgcctgacttgaaaattttcagttatatcaaatacttacaaaattcatttcaataatcaaaacttaattttccttgagaaatacttggttttcaaaataaaaaatggttcaaaagctacagatagtaaggcaattgtagacaactaagaagcaaggtaaggatattgcatacaaagtttgtgtactaatttactcttcaatccttggactatatctagttcctacctcaataggattttatcttagtagtaacacttgattacaaaggtattctttctaatcatgtctccacaaagttcctaactatgattaaaatgataatttctttttggttatgtattgtaaccaaacttaactatctaactcaacacttaattaagtgtgttgtaaccaaaatataattattacaatataataaagtattacattacaaaagtgtaatacaatgggcaaatagtctattgctctattctcctaatagacatgaatttcatattttttttctataaagaacttcatcgaaatgaacttttatgttgctaatcataaaaatacttttagtgaataatagatgaaaaatatcttttacaaaaataaaaaatccaaaattcttgcaaacaaactcatgaattatccactttggtgttgatttaggatggatactatttttaggtaccttatatgaatttctaatttttattttagagcaataattattgtttttttttctcattttacagga

SEQ ID NO: 3193 - DNA, 1769 bp, Glycine max
  Intron number 2 from transcript Glyma06g05060.1 (locus Gly ma06g05060) derived from phytozome v7.0 (chr-ID Gm06; pos 3579836 to 3581604)
cagggattttgtctacaccccaggtcagttacataggtttttgcttttggctttcatgtcgctcttgcaatcaccctattttgtgagatgttggtgatgaaatcattttaaattggtttcaccatttatttgtataattatgattgcctagaccctttgagctaggaatgagtgttccaatatctttatcagatgtaagagcaaactcaaaagtttggaaataggtggttttcaaaatcacctgttgggaatttacttgggaattaaattactggataagaatgaccaattatcctttgtgattaattgggggatgtattaccaagttttaatggtgtatctgacagttgtaaaatataagtaataataaaccagactgaatgatatggagtgcaaaagttaccttactgctatgttcattcaattggttcctggcttcctgctgctcagtgcccaactttgtacaccatggaatttgatcatttgaactgaaaaggtttatatgttaaatacaattcaaagtttttcagtggttcaagttattttcttctagaattcatagacgatgtactttctgatttgctttttaacaagatgaatgaaactattgcagtctcataatgattttgtcattgtaaattctcaatggttatctaaagaatatttaatatctatttcacttgggagatttccttagatttcaaaaatatatcgtcattaccttgtgaaagatgtttcactcgaaatatttttgttattgctttgactcttgggcctatgacttaaaccaatcaataaaatattctaacactcttcctttgtcatatgcaaagttacacactagatacatatcatattcatggaatatgattcactttcaagatgccttggtggtgaaatcgtggacacacaagactctaaatcttgatttctatggaattgagagtctgtattagtttttgtttatggtgcactattggtttcaaaagtatattgtcattaccagtccatttctgtctttctgctgtctctttggacttcaataagtgcaaatctatttgttatgtgctccattttgtaaattctttttttttattattcttttaattttcttctaattttgtgaaacatattgagattgtttgattcttttggcatggaagattactaaattctgaatcattctattcacatgtgattctctattatgaaaagtatattatcattgatgttgtaaatgtgtaatccttttgtctgtactgaacttgatggcacaagttattgatattaacattatatgcaattgaaagtatttataatctacattcttcaaatattatatctcatacttgaaagatagacaaatagtaagcctcgagaagaaatatctgccattattgggtgtcttttaagttttattctcttcttgactcaatatagttatgcattatgattggatggctaatatttgaattggttacagagattttttttcttccagaatgaaatgtatataacaattttgaaaagagaaaatagttcaaaactggaatgagtatgatctttattgttcagctacaaagaaaatttagtttatttatttaaatgttcctttgcttagattggttcagtgatcatgaacaatattggtctctaatgttcatcaaaatttacctgcacttctacagtcagcgagtattgtatatctacaccttaatgggtagatgaacttttctgatgtcttacttttaagttgacacttgcaggtc

SEQ ID NO: 3194 - DNA, 1139 bp, Glycine max
  Intron number 16 from transcript Glyma12g10230.1 (locus Gl yma12g10230) derived from phytozome v7.0 (chr-ID Gm12; pos 8070726 to 8071864)
cattgttacacgggcagagggaaatacttgaacaggtaaaaatagtttgtcttgtgcaggctattgcaatatgtccttcccacccagcccccttctgtcagccactttattttgagctcagggagcgagcatagttatcaatgacacatttttgcagtggtgtggcagagcagccatctgctgagacagtacatggataagggtgcattttcattcaggggtgtcagctgtttttaatattgatggcccataaagcagagttttgcagtgctatagcactgctacaaagaggaaatataaaatctcatgtttgcccttaaaaccacgtgttgaggggttttaagggataaagttgactcctctccccccttccagaaggtcagaaaatcctaacattagcaaccagagcagcaagtcacccgtctccagccaaaatttctttcagttggaaacctctgttctctcttctcttctctcttccccttgttctgcttctatgcggccaaagtggcagagccacccatctccagcaacattcacccatcactcttctctgtattctgcagttctgaatctgattaaggcttttattgagtgttccttacaaccttcacttttctctcattgagcatttatatgtatatgctattaattaataaatcatatgaattgtgtaaaagaaatatgaccatagtggctatcccgctattatagtgttcagagttggccactacacaatacacaccactatccaagattgacaactaagggtacaggaaaatgtcttgcatccgtgattcttaaatttacatgtattatatatgtccttgtattaatctcataataggctggacttttgacttagtttcattgcattcccccctatttagatacttagttagagatataaaactgttaactgtttaaaatatcttcacctaaaacatttgggtagagtcatggatgattttacatcacaaattgtagttatgtgtgcagcatggtgggcttttgtgggttgtccttttttttcctactgttttttcattgaactcatctgattttgcttttagttttgtatcacaacttgcattatatctacagggagagcgaaatttcaaccggtttggtgggtggct

SEQ ID NO: 3195 - DNA, 3155 bp, Glycine max
  Intron number 4 from transcript Glyma13g03170.1 (locus Gly ma13g03170) derived from phytozome v7.0 (chr-ID Gm13; pos 3119917 to 3123071)
attgcagaatttttcaccagaggaactgcagaaaggtgagttttctgtcggatttttgtatcttgaatgggttttcgtttatatttccctcaccttaattgtaagaaatgatttagaattgtagcttatagtctgatcttgctaaaatggattcagtaagattttctccaatccatttatatttcatgcttggtgtgggaactgttagacatgtggcccagcctcaataaaatgttgattgtcaagggtaggaattggggggtttattcccaatggaataaaaaataaaaatcaggaatctagggataagttaggtggttaaaacagtagttgcgatgttagcaggtaaagaagtttaaatatgtaaaaaaataccaaattggtcatattggataaatagtttgttaatgcagattttgcatttgtaagggtgttaccctagtaagaggagctctccttgttccctcactctcaataacaaataaaagtaatcttctttcctcctcagctattttccctacactctagtccaatgatcatatgggttcctttcgattgggtctgacctgccagatcccctgttggagagattggagttagggctcgaagttctttagtgttccctcaaattgctgaagaggataatatagatcacaattgctcgagatcaagaaaaatgtggaaggaattgatggcattaagtaactctggctcaacccttgtttaatttagtcttggttgtgcttaccagttaccaggaacatacaaaagattatccctaattgcatatttttgtggatgatatattttattgaggaatcaagggaagtagttatttttaagttgaactttggagatagactttggaatttgcttaagactaagatggagtatatgcattgctattttagcaagagacaaacggaatatgtcttggaaatagaaatgggagaagatattgtacaataggtttttaaatttaaatatgtgggatcaattacacaaaatggtgcgaaaattaatgagatgtcgcacacatgagacaagtggtatggctaaaattgacaaacgtgttgagggttatttgtgatggcaaagtacctaccaaacttaaagacaagttttattgtattgttatatgttcatctttactctatatagcagtgaatgtggggctttaaagaatcaacatgagaaaaactgagagtagcaaaaatgaaaatgttaagagggatgggatgtgtgaccaaacaagaaaggataagatacaaaatatttatatttgagaaaaattggtgtaacatcgattgaggaaaatatgacaaaaaattggttaaggtagtttggacacgtacaaaaaagtatgcaagagggaccggtgagaagactagattacatggttttcagtcatgtgaaaaggataggaaaactaagaaggacatttgaggaagttgtcaagagagatctcatggaaaatactatccttaaagctttggtctttaaccgagtgggataaagctttgttgttgtaggaataactgcttaatacggaactagaactgcctacttcaaaccttagcaaatcaggatttcaagggcagataatttcttttgacatacaacagactagactttttgagaaagtgtgattaggtttcatcagtatagatgggactgcagtgcatctggttcatttttggatgtgcaaaaccacaaaacacatggtgaaatttcagagtggcattcatgtgaagatttgattttatagccttgggaacatctaaaaatgattgttggcattgcagcggaaggggattgtggaggaatacatccaagaatttaaggttttgatggcacacacacactggcaacttcagaggacctgatattgtgtgggaggattgagagccaagatgtgatgctggatacatccacatgacttgagggagatgatgatctacgagaactattaactctgcacaagacattgagaaaaaactgaaagtctttgggaagccacagttctgaaactcaaacatggattttcaccgtctggttggtgggggattcgtcagcaatgagtagagcccagacagcaaggggttatgaatgcaacctacaagggagaagaaaagctccagcaacggctccatggagaaaatgagtcagtggggctgcttccctaaaaagtaaaaattcccttcaactcccaaatcacaagtatgtggcccgaaaatgaagtaaaggatgaaactgctaagattttccccaccaaatgtcagctccaacaactactcaagaagtattatattgtccacttgatgcttgagacttttcctccaatcaatgtatgatcttattgcctcctgaaggaataacatcaagagcccaactggtgggggtagcttagggagctagttataacattagtaggggaagtctggaggtaaggcagttaaataagtgaaatgtgtacagatttggtcagattagaagaatatatttattgagatttctaagttgttaggaccttacccttgcaagtgaagttcttgttctgactcaatcaatagaaacaaccaaatacttctccattcttctcaattgtttctttcccatctattcaccctacactctaatttagcactcttgtgggttcctagcagaaaatattgttcatagcaaccataaactttgtcttttagttgtagtcattaagtggtgactgttgttcggcatgaatgattcaaggggatgaagtcccatttaaacatgctggattttattctcagatagtcttccaatgtaatgatttcttcttttttctatttctttttctagatctaatgcttttatatcaaaatttctgatccttggagcgatttgaaaactttttacatgtgacaaccaaaatttagaatttattcatataaggactaaaataaaaaagtgtcaagtgtagagaccaaatttataatttaaccttattttattccttttcctatcaaccattgacaaaatttacattgatatgattttgaatgaagtatccaactacatttttgctattgtgattaattaactaaatgcttgtatctatttcaaattatttgatggcagcgctatcaaaagcattgcgtggtacaaccaaactg

SEQ ID NO: 3196 - DNA, 1580 bp, Glycine max
  Intron number 6 from transcript Glyma14g18360.1 (locus Gly ma14g18360) derived from phytozome v7.0 (chr-ID Gm14; pos 20456538 to 20458117)
agggatacatacctagaagagcttctgtctctcatgtatgtaacatttcccattttcaacactgagtaattttattttactatttttggggctatggttgcctggtatttcaacaatagtttgtatcttagtctgacaaaaagaagtttgtatctccctgtttcttgaaaatttaagaggtcaatgtgttggatgcttacattatatgttgcattataagttgctctcattagctgatgcatgtgttgggtttggcaatgaaattcatgcctggcctgattttgacttggcctggcccaaatttttattggccaaaactggggtgacctgtgataggctggggcagcctgttggccctttttttattttcttattatttacttttttttataattattaaaatcacaaatgataaattcgatattatatgtgctgtaggattgagttggacaaataacccaccaagaatgattattgacaaggacaaaattcctaagattttttaagggtagaaaggtgatctatgtgccaaactacttttggtgctaaaatatagccattttagtgaaaattagtgaaaatgacttgaaatactttttgggttataaaactgtgaatgttaggagggaggagaataaagcataagggttcaaactgaaaggatgacgaggttatgatttgattgtcaaacaatgtggaagattattaagatagtgtaagtgaaatagaagcatgggaattatcatggcgaatagaaagctgcatggttttaagagaatgttcacaaaactcaactaaggatattcacccatgattatccgaagctgattaatgtgagtcgataaacatagataatcaaggaacaatttggatcctaaaagcaaattaatgagaggagataaacctagctaatcaaggaaaaattgaaatcccaaaaatattatctgatacactaattttctaatagaataagcaacaatgctcctattaatttggttgcttgatctgaaacatccataattgtctaaataatctttctacaaaaaaaaattcgctgttcctctcaattgtcactctttgatgtttctgcaattttatttttcaaccagtataacgtatgctttgtagaagaacataataatgcacttttaatgcacaaaccaatttccccgagtttttaatgcacttacttttactttgcaatgaaatcatttttaaattgtctagtcccccctcccctgtttagggtagcattttttttttgagtggagggatcaattttttgtgtgaaattattttcttaatatgattgttaaaatcaaatcggtagaatacactctatattcaaagtctgttatataatgtggttatttgtttccattgtgcatcaaaattcttcttgttcctctatgaatgtggctgctgagtgagtatgctgtgcatgcatttgtgctacctctggttgatgtcttttcttttttgtgggtgaagagttaagagctggttgtacaaatatgagcaattattatatcttccaatgaaaggagagaagtaacaatttgtgttgtttcagatcaagg

SEQ ID NO: 3197 - DNA, 1436 bp, Glycine max
  Intron number 1 from transcript Glyma16g30050.1 (locus Gly ma16g30050) derived from phytozome v7.0 (chr-ID Gm16; pos 33722629 to 33724064 reverse strand)
gcactggcctcaccgctattgttacaggtcactttttattttccaaaatataactgaaattattgttttttcttctttttgacaaattctctattttttatcctcttcacgtaatatttattatatatttattcagctttggtgactttgatagtgataccaacaatttagtgattatgaaactggtgatgataatagtaattgtagtacttgaccatggttgcaactgaaacatagtggtgatgatgcctgcaagtgcagccttacgtacgattgttatggtgctggtagaaacatggtcacagtggtgttttctgttctaaaaattactttttggtttaaaagttaatttttttaagataaaggatcattatgattcttgaatgtgtaaataagtaataatttaatatttaaaaaaatgaaaattttaatttaaccattaaatctgttaaaaaatgctataattaataagtttttgaaatgattttatcattaaactgtcatgtttattgatcaattattattaagttatatttttttaatctaatttaaaattaaattgtaaaattcaagactaatttgttattaaaattgacatagtaggtaattcttactgttttttaaattcaagaattaaataattttttttgttttttagggattaaattatcatcaaatttatatattcagagactaaaatgataatttattatctttttataaacttaaacttacttttcaatcaacttctttttttttttttttaaaatctagataaaataatttgaaatagaggtaaataatgtaactcttatagatatcggaggattttgttttaaaatttatattcgaagacataatattaaaactcgaaacctgaacatactcgtattttttcaagggaagcttaatatttaacacctatttatagttgtatgataccacataagtttgatgaggttggtttatgtttaaaactttttcccccataggtgttatcttctttcgatatgaaatgttatgggttattactattaagaattggatgacaaagttaattaggttgcagaagtaaattatacgaaacttactctttatttgtttgcgtagaaacaaggataaaaagaagagaaatagaatagaatatgaaatttcaccttttatttgatagaataaatatgaaagtgagtagttaattttattagatctactaaaaatacttttttcccaaatgacatgaaatggtctctctttttcctttctttaatttcatacaaacttataacacttcaacacttctaaacaaactggaaattctatatgaaatctacaattttttatatgtaagtaccttcaccttaattgtgtatttttggttgctgttggacaatgtaacaacaggggcatccagtggtattggtgctgagactacccgt

SEQ ID NO: 3198 - DNA, 5615 bp, Glycine max
  Intron number 2 from transcript Glyma18g18140.1 (locus Gly ma18g18140) derived from phytozome v7.0 (chr-ID Gm18; pos 19504765 to 19510379 reverse strand)
aacacaggttagtttatctttgcttcaatatttagaaaacctatatattctagtatatgtcattgtgaacatcacaaggcaggttacattttaggtagttggaaattgtatctgattgtaaactcataggtccttatgtgccttaactgattatttcttctgatctaaatttaatttccattcagtcttaattctcttgacagttgttagtacaaactattttacaacaatattttactaaaccatacttatccttctcaaatgacttaaatcatctgtttgggttacatcagtgggttgtttataacagtattttagttctgatccttctagaaatatcagcttcaatgtggaagaggcaattctgccaggaagcttactagttgtcatgctttgtgatttccaaaagttaaatgctctcgtagtttcttatctaaatgaatcttgtggtcctatcaataggtgattaacttagggtatctgagggtataggatcttaaaacctgtgttgttaatggcgtggcagattttttaaccgccaaagaaaattggtaaagggaggccgtctgccgtccttctgccattgataacactgcttaaaactgagattgttaaaatataatttggtccttagatgtggccacttgtgttcctttggtgtttaaaagttttgtttttacaaattaggcctttgatggatgaaattttttagaattatataacttagaagggtaacctttctagcaagttgaaactttaaagaaccaatttgtataggtggtcactttcaagaaaaagaaaaaagacagcacaagcttccactttcaagggccaaattggttattaactccatattatttgttttgtcaacctcgaatgtgaattgtatcttcttgcatccagagatgttcatgagcagtattcagattaggtttctgcttaggggaacggtaagataaactcagttttgctatggcttggtgtatatactaagtagaaattttacttatttattattgtattaatgctgcattggagcaattattgtatttgaatctcattttcaagtgacgcgtgtgattatagttttgggaattgtacctgaaagaatacactctgaataaatgtttagatggccagttaatggttaaataatttttgtgaagctgtggacttctttgaaatggaaatatttaagtataatgcagtattgctaatacggtctcttacccgagccaaaaaattacaaaaggtgactgtgacttctctttgggaaggtcattctgcagaaaataatattttttttcctacatttgtttataatttagttatgtctgaagtctgatgttgtccaatcttgtctgatgtgggaagcactctggattaattagtgcaacatgctgctgctataatttagtgaatcagcatgttggccattggatgattaagctattcaattatataagcaatcttgtggtgcttattccaaagttataatactagaatgtagttcatggtaacagcaatcttaagttgtggacttattaaagatattgtatataatggaacagtataatttctgattttgggtctacttcgggtctctgcatgttaattagttaacttgattttcaaatttatgtctcttggtgatagaagcagtgggtttcctcttttgttttcttcttttctatcccttgtatccctttactttttgatataatggacgcagcttgtgtttggaacttgtgttgtgatttttttttcctttaatcatatttatgttctgtgacagtttgatttttatagtcaaaagtcatagaacttatgaatatgacacaagtatgataagacctgggtatgagagtatgaaaattcttgaaagttctagctacaaacaacttagatatgttaaaatgatttttttttttttaaaaaaaaaaacttacatgaatgtataatatttgtaaagagaaattattcatttctctttaatgcatagtaatgccaatggatgatggttaccaaaaaaatatattagaggtattccttggataggtaaccaggcaaatcatatgatgcttattggtggtattatatatgggtacaacactgacaatttgccatttttggagtatctaggtttcatagtatagaatagaaccatgaattcattgagccatagcaaacagattttgcatcattttcctgaattagtgctatgcacttgaaattaggtgtggtgtttggaccttatcctactcatttcctatttcggtaaaggaaatatttttatctcaaatctctattccccagtttatggttcatgactcgaaaaaaaagtactgttagttagatctgttgagttaccatttttttagggtactattcagggttgttatagtatggttggtgaattaaaaaaagtaactagttttgaactaccatgattcacttattttaattggttggtgaattattttaatattagtactttgaattttgaaattttttgtcttcacattcaatagttatctatgctggaccaccaatatatcttaccattcataatcatatcccagcattgaaaattccatataacctcttcaacaaccctagataaaatttgttctgcagttgaggttgacaagaaattgtgcttatgttggaccctaaggattaagttctggttctggaccttcagaactgtagaccttagtaatctaaatagtaatgtactagccacgttcgtattttattccatctaatttgtcttcattaaactctggattaattacaattatggtctacctgtgtttggtagtgaaacagtatcatattattgattgtttggttctcttaaccttcagtttttcacctctaaggccctagtaatgttttgaatttctatagaaatctggcaaaaaaagagaatttccttttacctcaaaaattgtatctttctatgttcccagggtgcatttttgaacctcacaagcatgagttgcatttgcaaaaatgatgatagacattatattggtggttgttaaaaacatctaatgagttcagttgttatcaatatcattatcattattacatcagaattggtttgttgactagatttatatgttacttgttaagaaaaaccatgtgccattttagtattctactattctatcatcttggcaactttaaatttgatttcacaaaagtctccatccttttgctagatctgagtatttaaacttatcaaacattgggctgttcaaaccaggaagtttggtaagaacaggtatacaaggcgtgggattagttagatctaatgtatgttaaatgctgaagagttggacttgtttggaagccaagttatttatgttattatcacttttctgcactttatattttgttaataaggttgcattctctctacagagcaaagaaaccagagctagtcttctcctccctttaaaccttgtattgtcaatttgtcatgattttttcagagttataagcattcgtatgattctattccaattagaatggctcttaagagtagtctcttccgacttagccctattttgcccccttattttaaatctataaagctggtaaagttctttgagcattatacatacagtgcttcattatgttctatggctccatacaaaattcttttgggaattttctaaaccatcacagataaattcctgatgtaatgctgggaattcttttccagtttttattagattaaactgataaattctgatccattttgagaaatgctaggaacatactctttctacttaatagacacctaaaacaccattccttttatcccttttggaataattgtgaatgtatgaatacatgattttgatgatgctaaagaataatcaaacaaggttgcttttaagattacttcaacaaacattcaaaagttaagcattgcttcaagattaatacaaggttgcttcaacaaacaagcattactacaagattaattcaagattaagcttttgcctcaaaacaagtgtttccaagagataaaggctctggtaatcgattactgggcaatgtaatcgattactagaagataattttaaaaaatcaacttttagaaaggtttttaaatttgaatttaaaagctgtaatcgattaccagcaacggaactcttgaaattcaatttgaaaagtcataacccttcaaaatataactatgtaatcgattgccaatgaagaatttcagaaaaaactttttgaaaatacacatctctttaaaccattttgaaaaggcacaaaggacctatatatatgtgtgtctgactttgaaaagcaagagagagagattctaagagaacttaattgtcaaatgctctctcaacacctcttgggcaaacacttgcaaatctattgagagttcatccaggaacatcaaattgtattatcatctctaaaagagagaaattcctctaggatcttcaatttgtatcatccactctaaaagagagaaatccttttgttcatctcaaaaagtcatttgtaatcaagagactggttgtctcttggattgtgagaattgtaatcaagagatgggttgtctcttggagaaacttgaacacaagggtgaggatcccaaggtgtgctcaaagtctgtaaaggatttacagagatagtggaaaatctcaagtggccaagccaatgtctatctgccaagagtacactaatccttgcatatgaaaagaaattgtttccacattccaacttattggtcaccaagacacaagtatatggggaataaatggccaagccaatgtctatctgccaagaactatgtttttttttttttttagcttggcactctggggaaatcagtgactggctgacgtcaatgttcttttttccagtaaataataaggaccctgttctttaagccatttgtattactagtatttgtaagtggtagacagcaattacgattccttagtataggtggacatacttttgtaatatagagttggtgcttattagttttggatcttatgtgtttcttagaaccaaattaactttgcataaagtctaatgttttgcacttagttccagatattgtcaatccatgcttagaaatttccaatttatagccattgattgatagtacctatgaaatctttatggctttaagtgtgatgtttagccaatagccatgctaatatgatggtcagtaatattaataatagagattactaatgcctgtttgtcatattaaccatagagctactaaagaataaaatgcagcttaaggtaccactacctgtcatacctgtcatagcaaagtaatagaggattagggaataatgctattatgaatttttgtctacaagatacattaaagactttgatcattctagaggttttcttctgttggaagttaaaactgaggatctgtagttgcatgaggattttacagtttatgcctactgatgttcatttcattggtactctctctcctgttatcttgacaagctttgatatgctaaactttcttttatccaattattttgtttttaaaacgctttcaaattgctttaacaggttattcctccttggcttggaaaagt

SEQ ID NO: 3199 - DNA, 1418 bp, Glycine max
  Intron number 4 from transcript Glyma04g09960.1 (locus Gly ma04g09960) derived from phytozome v7.0 (chr-ID Gm04; pos 8251001 to 8252418 reverse strand)
ggaagtcatagtggtctgaaaaacctagtgcaaaggtagattagaacttcttactttcttttattcccctctcaacccctcccctgccccaaaaacgtgtatgctggttattatgtgctataaattaaaactgaatttgatgttatattatatatgcaagtacaagttatatttgggttcatgtttgagaccattgcagaccatctgcccctgcagctgaattttgaaatattgattttgtagtaacttcgttaaattgtgattttatcaagcaattgataatgaagttcctagtggttaatgtgcttcctttaattatgtaataactaattagttgtgaagtcttgcatgacggtcaatctaaccaaattttgtaaacatatctatcagtcctagaaccattcaagggaacgtttctggccttagaacagaactgtatatccttagctagtattttgtgtataataatttacttaaatgtagtcaactttgtactcaactttttgcacaacgttagacttagacatatataaatctgaaaaatagagctcagaccattgatcctgcatttgattaaactctaagtgagtcttctagatgaagtttcttcttagttattggaactcttagaatttgggcttatggcctaactcaacctcacaaaactgatttttaaggtagggattgcccaagcattatgagcaccacttaggacttatttttaattgatgtgtgatctcaacctgctaagagttcacttcctggtggctccacacttcacttggcctttctggtcagcccctttgtagatagtcttttctgagacactgacccaggggtgaccataccacaactaaggcaactttccaaccaaaacacaatgttaaattttctaatttgacttttatgtagtcctttagtttcacctttaaattaatatatatatatatatatttttttttatcagcaaacttaataatatatattaattgagtaccagaggtactaacagtacaagtatcagtccagaattgagcttaacatagtttggccaatctggaaaaacatttaaataatacagaaacatgcactgctaatacaaaaacatttaatattgaaccctgaaaaatgcaaatatcattattgttttatcttttgattatgaatgatggtgtaaacaaacaagaaaaccaaaattatgtgcttatggattctgcttattcgtattggcattttttgttccttactttaatttcaacataatatcaattatacatgcttatttctgttactactatgcagattccttatatttgtattctgattttaaaaagtgaactcaagagagttgtattttggtcttttctcatctgatattgacagttacttgtgggaagagtggaaagagagacataagg

SEQ ID NO: 3200 - DNA, 2243 bp, Glycine max
  Intron number 3 from transcript Glyma02g02680.1 (locus Gly ma02g02680) derived from phytozome v7.0 (chr-ID Gm02; pos 2039712 to 2041954)
ggactatagcttttgcttccttttcttctctactggtacagatttctttcaaactctctagatttatttagacttggtagaattaatagtctgagtgaactgggccactatagcttcattatactgtaactttttttttcttttttctttttattatggccacttaatttatttgctgtgacttccggctttggagaacaccattgataatttgctgtaacataacacctagagttgttcatgttcatgatttttacatcctaagttctatgtttttgttttgaataatgatacagaaacaatcatcaatcactccaaacatcacattagcattcatcatttgatcatctctatctttctatcactttataccgccttttatattcatttttttctttctatttttatctctttatcttattaggttaggtgtgaaatggatttgtgtgccccaaattgatcatttttttgtcttttattacgttaatcactaggagcggctgccattttaatttaataaaaaaataatcacttttttttctttaatgatgacattaatatgaaatcgtttagttgaaagtgatgattaaattttgtcacaaaccttaagtgcatataagataagtatttttttaaatataatttattttaaactcaaaaatcaattaagattcaaatcttaaatcaaagaaataagctactatcactcaaccatttacttgtaatcatacattcctccctcattgcattactgtataactgtatatattatatttaaagaaattgtttttctaaattgcaccaaaatattacaacaaagggagaggtacggagaaaatatagaaagcatcaaataaaacttttaattttaatgtgatgaatagcgatgcacaaagaaaaaataacattaatgtagaaaagtgatgtattgatttgttatataaataatatatatttaatttaattttaaattgtaataaattaaaataagaatatttatttatgcaataaaactgaaatttcaaaatcagacacttcgtagagtcactggaaccgtggatggaaacataaaaagagataaaagagacatgacaatgcaattgcacaacttatggattatattttaaggctttacaataatataatagtgaatagtcatgcacgagttgtacgtgtgtgtgtatttttttacctaagattttttttgcgtcattaacatatataccaaatgcatatatgattgaaaaattgtttatgaattatttaaaaatagaaatattcatcatatttactgggattcataataacttttaaaaaactctagtttaatatatgtgtttatatattatattaatcaatgtattatattagctggcttaaactcaaaaagtggttgaccttaataaagataaacttacatttctactttatttctttactctctgttaacaaaaccgaatactatatataatcatgcatgtcctgtttcacgtggtctagtagtgtcgtcatattttataattcaacgtgataatggacatgcaattttctaatagagagattaaattagagtccatgtggacttaattcaataatagatatgaagcaaagatagcaatttcaatatattttgagcaaggggaaactaattaagttgaattagtgggttgttctaaatggaaaatcagtgtttcgtaaaaaaaaaaaatatatatatatatatatatatatatatatatatatatatatatatatatatatatatatatatatatatatatatcaaagataattataaataattgtctatcatcaaaaagaataaaatccactctcgcctgtaactcagactaatgcaaccacctttctcctttcacatacatgataaatcatttcatagatatgatgcgtaacgtcacatcaaaagaatcttactgtcttttgtctttgacttttatttttgggtggttattcgataaacaatattcaaaattctcctactacatcttttaattatttatttttatacgaaaagaattaaatatatttgatatttttgaaatagtaaatatatttatttttttcgttcaatactttattacaagaaagcaagaaaatttaaagaatgatcaatagtaaaaagatatagcaatattagtatattactcttatagtcttattccatacacataggcacataactatataattgaatttcctattgaaattttttgtgacagggt

SEQ ID NO: 3201 - DNA, 8443 bp, Glycine max
  Intron number 1 from transcript Glyma11g08890.1 (locus Gly ma11g08890) derived from phytozome v7.0 (chr-ID Gm11; pos 6275064 to 6283506)
ctttggttaacttagggatttctcacaacgatgtaagtttatttatttacctttgaattaatctccttgcatatattgcatgttatttaatatatatacatatatatattgcatgttttgctctggctctgcactaaaatatcatgaaaaccatgaacaaattaaaaaaataataataatcatgaaacccttgtccctgagtttatgcgttacaatgtttacctcacacacatatatatacataacgaattgcacgtatggaatataaatttgaaaatacgatcgcagccttgctagtttcatagagttttctttatgcatagtattagactactagggcttgggatagaaattggtaatatatagaatatcaagttccatcttgcagaaatgttttctgcaatttttattcacgaaccatggcataacttccaagttttttccccattatatatatatatatatatattaaaacaatgatttcatctttataattttatccattttcttagttttctagaatagtctattatatacctatatgatagaatatatcataagatattttatcagtattgttagtctaactaatcagtttgtattgatagaatatattatcaaaatatatgataagatattttatcggtattcttagtctagctaatcagtttgtatttgatagaatatattatcataatatgagataagatattctatcattatccttagtttatctttaagcttgtaatcatttatataagctaatgatgcttaacaaaaggggagagaaaaatattattttcctcatcccttgagctaacttttgggattgagttaggcccaaaattcacattctgagatggtatcagagccctagcgccttcctttgactttcgcacacagaccctagcgtcgttcaacccttttctttttcttctccatcaccatgtctcactcaaactctatctttcacattgctcttgttgtctccaacatcaagaattatgtcctaatcattcttaagatggaaaatgtccaatacgtgacataggctgaacttttcaaaccccggtgagcattttttctcgttgtctctctcaaatctcttcttttaccttatctctctcaaatcacttcccttaccttaccttcccttcatctcttatttcttcttcttatcaccgccatgacgaacaataagagttctttccattcgtctcttgtggtttccaatataaggaaccatatctccatcactcttgaaatggagaatgtctgtcgaagagctgtctcgtcgttcaacttgttttgggtctcacaagtgcatatcgaggtgtagggacgttaattcagcagagtgatcatcaacctccgttttatcaagctcagtcgatgctcacacttgaggaagccggatcgacaatggtggctgtctcacaaccatttatgactcaaatttctctcattcagaccaacaacaacgtgggaagccgtttggatatcacaagaattatgaagaaaaaaaattagtgtcggtggtcctgggtccagtttgagacagtcttagtgttcgtgttcatcgacctctcgcttcgagtgtgggggtgtgatagaatatatgataagatattctattagtattgttagcctaactaattagtttgtatttgatagaatatattatcaaaatacatgataagatattctatcggtattcttagcctagctaatcagtttgtatttgatataatatattatcagaatataagataagatattttatcattattcttagtttatctttaagcttgtaatcctttatataagctaatgatgcttaacgaaaggggagagaaaaatattctttctatcatcccttgagctaacttttggggttgagttaggtttctcacattatgcattctaagatggtatcagagcccccaaatccacattgactagagatagtgtcaagatagaatttataaggtgaaggcaaccctcaccctatgagctagcttttggggttgagttaggcccaaaaactcacttcctaagatggtatcagacccagttttgatcctgggaccacgcttccgttagtcattgctttgtagtgacaaacacataccatttgttgttcacgccccgagcccaggaagtgcttggcgtgagggggtgtgttggaaataatccaagtctcacatcgactaaaagtaatctcacattataatatataagtgagggataaccctcaccccttgagctaacttttggggttgagttaggcctctcacattattcattctaagatggtgtcagagccttagcaccttcctttggctttcgcacacaagccctaacaccgttcaacccctttctttttcttctccatcaccatgtctcactcaaactctatctttcacactgctgttgctgtctccaacatctagaatcatatcacaatcattcttgagatggaaaatgtccaatacgtgacatgggttgaacttttcaaaccccggtgagcattttcgctcgctgtctctctcaaatctcttcttttaccttatctctctcaaatcacttcctttaccttaccttcactccatctcttatttcttcttcttctcaccgccatgacggaaaataagagttcttttcattcgtctcttgcgatttccaatataaggaaccatatctccatcactcttgaaatggagaatgtctgtcgaagagctacctcgtcattcaacttgtttcaggtctcacaagtgcatatcgaggtgtagcgacgttaattcaacagagtgatcatcaacctccattttatcaggttcagtcgatgctcacacctgaggaagccagatcagcaatgttggctgcctcacaatccatttatggctcaaatttctctcattcagaccaacaacaacgtgggaagccgtctggatatcacaagaattatgagaaaaaaaaattagtggcgatggtcctgggtccaattcgagacaatctcagtgttcgtgtttgttgacctctcacttcaactgcgggagtgtgataaaatatatgataagatattctattagtattatgataatatattttatcaaatacaaactgattagttaggctaacaatactaataaaatatcttatcatatattctatcactatattagggaaatattactttttcaaaaaatgttagcgaagtgaggaggactcttcccgtcctcctcccattttattttttcagatacatggatgtttagatcgaattttagaccacgagcttgcttaagaattttaatctaacttctacaatttaaaatcagtttaaaaagttgttacgattttcctatattgtcaaataattttactgattaagtttattatttagaataaagttattgaacttaataaaaatcgttttgagttttttgaaattagtgtaaaaaaactaatttaaattgaaaattctaaggtaacttttaaataattttaatgggcatagtatggaatgtattcggatttcggccattttcttcaaaaaggaaattattctgtagaaggaattgggactgcatgaatttatttaaacgcgttttcatggaaaactcgaccatatatacacgctatgttcatgtctgtactctgtatataattttgtaattaatgtttcgctgtccttattctaagacttaattagcttcattgtcatttttttccatacccaaatttacgccaatgagctaggcacattgtcaacgtggacagtcaatggtcttctcctatatatagtctttgaaataccctatttttcaaaggcatttgagtgttgctaggcaattatctgaaatgttttcttatacagtaagtgtgatgcaattattccaacaaataaaaataaaactaaaatttgttacaccagaattccataaagtattatatataatgcatgtattcattataatgtttactgtctcatttaaacacattctaaaatatgaatgttttacttcaagataaatgagtcattatttaaataaactaaatgctaataataatacacctgtttaaaggcgaggttaattatttgtacttctatttatattcataagaattaattaaaaaacataattatcaaaatttaaattataaatatcaaagcataaaaacaaaattttgacttattaaaaacgcaatgaaataattaaattttcaataattttaaaatataattaaataaaaaaaccaataagcctatcctttgcttaattcttaagaataaaattgttcgataacctcgtgatcatacatacactcatttcccagttttcttttgccctctgcactgtacatgtaatggtttttatttaatttttttataaaacatttatttgcattatataaaataatattgggtcaataaaataactctaagtacactttatccttagcctcatgtcattacattacataagtttattaagttataaaagttttcttagtgttttagaatttttattttatatatatatatatatatatatatatatatatatatatatatgggacatatcagatgtgacatgagtgttttattatgagagataaaaagattaaataagaatccttatatcaaaataaaaagttaagatttaattggtaatattaaatggacgtgttattctacatgataaaactttattaaactttataaaatgttattacatttttatacaaaactgtatttgttcatttttaaaaaagtcaagtatacttactctttactcatgagtcatgtcattagaatacatttcaacgaatgagtttaggccgatgtgatccattttgttatcactaaacaatgtcattacattacataagtttattttatttaataaatattaaattataaaacataagttttgttttatatgtaaaaaatattatataagtagtgttttacaaaaaaaaaaatggtattctgttcaattttaaaaaagacgttatgtacactttactctttacacatgccatcatatcacataaggttgtattggaagaaaatttcactaaacttatatagaattattgtttttttttttgtataaaatggtatttgtttaattaaaaaaagtccatattttcttctgtacgcatcatcgccataaatgaggttgttttttgcaattaaaaattattagactttacaaaacatttatcgtgttttatattacagcatagtatctatttaatctaaaaagtcaggtatctctatatatagtattaaactcttcacatgtcatcatataatgcatatatgcataagtttttcctatgtcataaaaatttataaatcattttaaaacatttatttcgtttatttttaaattataatgttcagtttaaaaaattgaattataaggtatttatattattgacttctatatatacaaaaatagtaattatttaatccaaaacgtcaaatacactttagtctgtgcacatctcgtcatattacattagtttgtcttgtataataaaattttagtaaccttattaaacatgtattgcaatgatataaaaaaaaatagtaaagatagaatatgaaatgattatacatgagaagatattggtgtaatattaattgaaaaaaatgagagaatattggttaatgtgatttgaacacataattaaattaaagaaggtacaatgaaaatactagtaaagatggtagataatacgacttttagtcctgtaaataaggagacagagagagagaaactagtgaagaagaaaattgagaagtttttatcaatttcttttttttttttttgagaaaagttgttacttgttaagaagaatcttatgataaataatatataaaaatttaattttaaaccaaattgaatggtgttgtataatttatttaaccggtctcatctaataaattaaatataactttcgtccttgtgttgtcccattagtacttgttcataccaaaaaactatgtatgttttatatgttatcccattacataagtttgacgtgtataatagttttgaataaattttaaaatatttaattgcgttcctgataaaataaaataaaaaagtattcattgaattcaaaacaggtacactttaccttctacatacagttatattacaaaaatttactctatttaataattttattttaaaaaaaaaaattcaataatctttttagtgaatgcatgttataaaacattggaaaaatataactgtgcaagacaaactcaccacccgctcgtattacggattatttattttaaaattattttttcaaagaaatttaaaaattgttgatttttatgtattttgaaaagcaaaaaataaatattgttgaaaaaaatgttattttataaatatacattttgaaatatacagtaaaaaatgaagatacacttgttctccccgcatctaaagcaaataagtaatggagtaatattttatttacatcctaatcgtataaatacccccatcgacattcatgaaactagctatttagtacgtgacaactcacgaaaatgaaataattatttgttaaatcatgaccacataattaatcaaagtgaaaatgcgataaaaaaatgtttccaataaaatatctattcgacagaattgtcatattttgtgtataatatatttttttactatttgttttttatcatctaattaatttatcacatttatatatttttctttttctttctgatcatctactaatatgcgatgcccatacattatctccttaaataatgtaatcatgtaaagcatgcactttgcactgagtcaatgaggggaaaaataaattaaaatgacaaactaaccttagttagtaagtggacgtgctatatgcgtactttcatttttgtcttttacatgtcattgtgttgtaataaaaaaacatatacagtaacatgacaggtaagattgcacatgacaatttcctgtcgatctagtcaggattcacaatgatattaacctgttcacacggatttattccttctttgatagataacaagaaattagtacaaagaatgtatgaaaataattgagtaaattgcacgtaatcttagatttatctttattacatctgatatatttttcggttgttgaatcgtacagaaaacttgttaatttttaagaattttcttgccatcctattcttaggcgtaaatcccttatatcaactctcctctttgatgtacaaagagttacaacaactcccttagaaaatctcaaagtaatatataaaaaaaaaatagaaggacatcatatgtaataatagcgaacctataggggagtctagacaaaaataatttactcaatttttttttcataatttacttaaaataatttggtgtagttaaaagatgaaaaaaagatcaaatattttttaaaatgatgggatttattgcattatttttttaatctatttttattctttttaatctctcttcaattttttttattttttatttatttttcacctatttgcattcgttttttaaattattatatctctctatttgtagaaaaagactacctactagggtagggttggaagaataataagaggtttaaatgattttttatgttttataatcatttttattacagtacttattctatcttaattatattcctttctcttttctctatatatacattcttacatcgtaagaatttattaaaacgtatgcaaactaccattcttcttcaatgtgaattgcctgaaattggagataaaagacagctaattaaatctccacctataattttatttttcaactttttacaaaattaataaaatataagaaaaaaaattacaacccttagaggctgcatgatggctgattccttatggactgagtgtaatgacatcagtaacacgtttccaatttttaatctctataatgccaatttttttaattgtctctatattataactggtttcccatcccttatgacagcaccaccttatgtaccccgtccctccccactttgaatattactaacatattcttttgtcggtacaaaatattataaacataaacatttgataacaacatgtatttttaaaattcattttgtctaatgaattgatatttaagtctggagtctcatcatcacatgaaataatttatccttgaaatttaaagaattttgactttattcggtcaaatacttttgcagtttaacattagcttacaaatttattggtttattttcgacttgaactcgtacttattttagtttagaagcagattaaacatgaaattaaccatttatacaaacaaaaaaaaatgttatgctcatcagacttcgattttctttgataaatacaaacaggttacagcattggcaccaaatattccagcactgta

SEQ ID NO: 3202 - DNA, 5257 bp, Glycine max
  Intron number 5 from transcript Glyma16g08860.1 (locus Gly ma16g08860) derived from phytozome v7.0 (chr-ID Gm16; pos 8352688 to 8357944)
ttttagtaacctttgtggcttcaaagtaagttactctgcgattaacaataaatttcattgtgcattagttttcataatatgtttgctaagattaattgatttttagtcatgtttatttttaagatatctttcttctgtgatactgcttgtcagtttagaaatggaaaagtgttagctctggtcgtgaatgtccacactcttcaataatgattttttttttggtccatgaaattttagtccttataagtcataactgttttttattatattttgtagagactaaattgattgagcttttggttaataaatgaggccagccacaaatatttgcaatgcaacatcatttacttatattttaattgataaaacatgtacttatatgattgatatagaaagaatgttaatgtagcttgaaatttattgagtggttgaagcatatttgataaaacatgtacttatttgattgatatagaaagtcaagcctatccatcttgggttcactattgctcatgacttgtattgtagttagcttgattgagaattggtttgatgaaggaaataacctagtattagggtaaggtcaaagctctgctttagtacaccacctctggctaagcactagtaagcaaggaaagtagtcccgtagtgaaactagggaagaaaatatctataatcaacatcatcggtatggaaaggagtcgttcaaataaagaagtcacaaaaggaaagaataaggatttatataaagagaagagtcgagtttagcggtaatggaataagccaaagctagatcactggagtttaggcaaatgggtataagagagcaaagtaggttttggaatgcatatttcgaagccaaataatcaaccaaagaagattcccttgcaaaaaggagatgactctagttttatactaatcttcaatttttgagattccctaaggcattgccaggaagtgttgttcacttgttgacaattggatcaacttaggtagtaaggctcaattgtgagattcaaaaatacaaatgtaaggggttgaaaatcttgggatcaaaaggttgttcaaaaaggactaaaaatcctagctcctaggatccaggaagggctttttggtttcaaattcctattttactaccctactagtatataccaactgagttgtgaattagattggatgggctgatggggaatcaaattaggagttgcggaaaggacttaatataccatgtatcaagactcacaatagcatttgagtgctcgatcattcaatattggatgggtgatttttttcttataaaaaagtagaaataaacatagcttgctgacttagtacttgtgctaagggatgatttgttttaatttttttatatatactatgatagatcccggaatcaatacaattaaaaaacctatgaattagagtagagcaattggcattgaattttttcgaattgattagaggaagaaagaataggtgtagcaaagaaagcaaatcggagttagagagaaagggtaggctgaatctgaaaagtactctatggaggtaactttgttaagttaattgtgtatcataaaaaatgttatgtgctcttgggaaagaaagaaatttctactttgtttgacaggcaatgggcaatcagcaaaagccaggcctgtatggtatatctttgaatccttacttaatatgcttaatatggtgataccactgatttatcaacctacatgtgccactcttccatcagttggttctagttattgtcatttgattccttgatttgttcgataaggaatgtgaaacgaaagaagtatcctcctattgggaattagatcctaagccccttgtacatagatgaattgattgattcatcagatcctaggtcgagattgaaggggctcgaactcgcgactttaccagtaaaagtgtccaataagcttaccacgaaactagtgtgttgcttttgtcagagtatggagttacgctcattcgacttgccacttagcattttcaaggtttagcgaagggatctccccttgccaagggtgtagtgtaaggctagctaatgttgttttataatcatgatacccatagccttaagtgagctcccactaggtcaatatactatgttattctcttattaagccaagtctaggcttgccagcaaagaaatattattagatagaaaaatactgagtacataaattcaagaggatgatgaaatattctcaagacaaagacacaaatatgttctttggtacttcttactattaaagcatgattatatatttaaatgtaattttgaattgtattttaagtataaaattaactatgatagaaggcagaaccaagggttttaaattgtggataaatgtgaccacaattgtttttttttttggtcagcaaacttaataatatatattaattgagtaccagaggtactaacagtacaagtatcaatccagaattgagcttaacatagtttggccaatctggaaaaacatttaaataatacagaaacttgcactgctattctatcctgttatatttaggaaccctgctctgatgttagaagaccagtagttgtagtgcatattaaatcccttctccaaatttgtaagccacgtccatagtaggaaaattgcgtcatctagaattccattaacatttagtgagccatttgagaagataatattattcctatgcttccaaatggtccatgtcagtgccatccaccaccatttccatctactagatctcattccttctgtcattccatagatgtgaccacaattgtagttgtgatgcagtcacaaagtgtctaaactttaatgttgcaattgggatttcattcgtggactgttttttaaaaccttgggcataactttgggttccacaggattcatgtaaatgtttatagcctatagcaatagaaataagctgttcttggtctctaggtaggattggcaacctacatggattaaatgatgccgtcccatttcataaaaaacttagtttttggaaaggccaaaattaagatctctttatacatattttcattaggttttctatggtctttctctacctttgtctattgggtatgatccatttaattacttttttaactagggcatcaaatttagtagtcaataccaggatagtggagtcgttttttaatagtagccagagcggctgcaataacggccaaaatagcagtgttaattagtgcactatagcaatgccctatcatgatatatgcttcaagaatccattttacccctagaacatcattgtttggggttttatcaacacccacacccattaattattagcctctttgactagatgtctgcataacacctttgactcgccagaatactcaccgtaaggtgcaaagccaaggttgccttgttggaaatcggataacagaggcacaagagaggtgttaaacaacagaagcttcctgcttaagctcccttgtcaggcaggcgaggcacaagaggttggctgtgaaaatggccatgaaatgtgctgtgatggccagtcgttctgtgattgttctttgaggagcggtaggttgttgctctgtttggctactgcgattgcagccttattgcgcacaattgacagctatgatcttcagaactagtcatgcatttttctttgtatatatgtttatcctctcaatttagagtgagaggctaaatttcagaaaggaaatgtgttgattaagaatagtgttttcattttaaaattggtatctttacatatgatttcaattaaccaaaatgaagttgttatattatttttgctttagacacttgattcctttagtgactcactgaggtagaatgtccggagaagaaatatatgggcaggaaaggattatatcactttattcctttattgctttaggcccttgattcctttatttaaagcaagttttgaatgttttcacatatatgtaagcctacaatatttttgaaggatgttcccgcctgccattttttataattttgaaagcatctgaagaggaggaaaatcattacagttaggtgaggatcatagttatcagaatcttaaaagactttgtatcttacgatgcatgaatgaataatgtgaatcttatgattaacaagattcaaggattcattattttttctttcaccaattctcatgaaaaaattcaagtcaaataaacctaaattattaaatgaaaacaaattgaaagaacactcctgaacttatcttatttgactactgcactacttatttgttttttactcatttaatgcaagtactctatttagctatttaattgctttgtttccattctactaaaataaaggcttcacaaactcagatttaatagaactcatgcatctcatgctcctagacttatgtttttttagttactggtcatgaatatgtgctttaatatgtttttgttagttgcatatgctatgttttattattgaccatgaatcttacaatcaacaatacaattcgattcatgatttgatcccgattcaactaccatggtgaggattaatctgtattgaaaattttaagctaataaataacttggattgtgtataggagagcaacaaaggaagcaattttctcctaatatctagaataccattgtgtataacttcgattgtttgaagaagctattttcttgacctggacttggcttagacattttgagaaagacttcacaacccacctaaatcaatggtctagtaatattagacagggttttatgtaatgggtgatacaaatagcacaaactagatgttctcctagtatctagaataccaatataccattcatctctggtgtctagatataaggattgtatatcccttttgtattagtacctctggtactgttttaattatatatatatatatatatatatatatatatatatatatatatatatatatatatatatatatatatacttttattttgctgataaaaaaagactctaactgccacataagtttattcaaggtcatcgagcaaatgtgcttattctgtttgcttttggcttatatcacttgatttggagagcctaggatttcattttcattattcaattttgttcctaaatgtgtatcctttacaactcatttatttatatcaagactttgcaggtctattctatgagtgcattctaatttctctgagctgaattatttagtattcatacaacatgcttcctaatgcctatcttgtcaactttttaggtctg

SEQ ID NO: 3203 - DNA, 963 bp, Glycine max
  Intron number 4 from transcript Glyma12g31190.1 (locus Gly ma12g31190) derived from phytozome v7.0 (chr-ID Gm12; pos 34769270 to 34770232)
gttcctcccaagtcgaaggtttcttccacaaagaggtaataatatgcttctaactggttaagtgactccgtccaagcatctgcttgctcccccatgagtggcgggactggtttaatagatgatattctagttttttaattctaatcaaacttcttttatgtactcatatccatgctcctgacaaatgccatggatttgaagtgatcttgatggatgtgttttcactctctctttctcatttctgctgcatgctctgtcttgtctctttcttgtctgctgcttttgtgggctacttccttactttccaaaatactatcctggatcatttcgtccctcttttagtggagatcaccacttttagctatttggaatttggaacctgtattttggggagatcaacccctgtattcctagtttactgcttggatttatgtgggatatgatgagtagatttattctgtacatgttgatatatattaattatgcaacttacacctagtcatgttatcatataattgtgtatgtgtaattgtatttctattttggttgggaaaggggacaagttcctctatttgcccattattgttttctttttatatggtgttctacaaataccaatgtctgtttcaagggcatttgtgttcttactgtctttgatgcagaaatattgggcagcattgttgctttcttagttctcttctttttctatacttttttctatttattttttaggctttggagaatattttaccctcattgtactattctcattttctctctgaaaaaaggggcatttttcttgtgtcaccaaaccaataagtgattattcaatacttgacagctcagctagcataccttagacattagccatttattttttgacattgtatactttgaatttgagtaaatggttctgcttatacttattgcagtgagtttgaggaactagaagcagtaccaact

SEQ ID NO: 3204 - DNA, 968 bp, Glycine max
  Intron number 6 from transcript Glyma11g03420.2 (locus Gly ma11g03420) derived from phytozome v7.0 (chr-ID Gm11; pos 2293045 to 2294012)
agtacggaaaatcagtaagatacatctttatgcctctcaccagtgttcaattgcaatcaatacaaatttaaaactcgtattgaagttgaatgaccacattttcaaaagcacctctttagccctaaatctgttattgtatagtgaaacatgataattttacgacttctctttgcaactctacctagaatgttttagggttgtttccatctctaatatacagagagattcagtaatcttacagcactattttaacttcgtagcttttatgtttatagtttcactcattaagttctttttacctcacacagaggagaagagcaagagggaaaaatcatgatttgacagtatgaaattaaccataccttataatttctatgaatttgttcttgtgataaatgagtattttctcagttgcctcatgaccatgtggtgcatctgccctttatattatggatttgttttttctaatctcgagaaatgagtcaatttgtgagtaatactaaactactaataatttggcaagtggcaacatttagtaaattttcatctttcccgtaggagtgtgcttggttggttgagcctgaaaaaaagtgagtaggtggataatatgaaaataaattcactttgtacttgcctgtgcaaccaaagcatgagaaggtagaaaataatatctgcttcatttttcattcttgtttgaaaattcaatctgtactctctttttcaggttttgactttccatctattcaacctcacactttacatatttttttatagcagaaattgatgataatatgattcaaagttgaaatcataaatttgacagtgaaataaccaatgccgtaataaattctataaatttgtatgtaacaaatgagtattttgtggtagaaggattaatgataatattgtatttgatagttttaccctttgaattattttgcagggaaacggtctccttcgggcattgt

SEQ ID NO: 3205 - DNA, 3722 bp, Glycine max
  Intron number 1 from transcript Glyma02g01140.1 (locus Gly ma02g01140) derived from phytozome v7.0 (chr-ID Gm02; pos 849607 to 853328 reverse strand)
caaactgccaccttcggtaagttgattaatatcatacatacattctctcttccatatcctttttattcttcttttttcttcctattatatctcttaatttcaagatatctgaatggattaagttaatctttacctaacgtatcgttgagatttattaaattttttaatgtaaattgaaaaacttgaccatgtgcgtggcatgtagaaattaatcgaatcatatgttagaaaaagaaaagaaacactagagattaattagagagaaaattctctttatttatttgacacacatgactacatgattttggtgttctatttataataaaacaactcataatcattacataattatttaattaagacactaaataggcatagtgtcataaccctttcaatatataactacaaaaaaaataaaattctttgattcttattaagtcacactcatttatcttctaatagtaattcatagtcctttattttctatttactattattatttctaacatctcctcccttaattagaaagtcctcaattaatttttttgcactccaagtcttgctttcaatcttctaatatcttcaaatttgaggggcttagtgaaaatatttagaacttgattttgtgttttcacatgaaaaaactccacttctttctttttggcaatctttttccctaaacctaaacactcatttaatttgacttcaattggttcaagactcttaggaagttttgataactcaagtatcattcttcttgatgacattaatttcatcctccatggcttgtcttcaccttttgtctttcatattttcttcaaaggttaaagactcattgtcaacaaaaagacaaagcaaatcatttatataagttcaatttcatctatatatcttgaagacttctcatttttcttggtctttcacttgaactccttttggaagatgatgcttcaatcaaattctacttctatgcttatatacaacaatcttcccattgcttggattgtacaatttgtagtcttttgaacttgcatcataaccaatgaacacatgcatcacactcctatcgtcaagctcgaatcttcattggtcagacatatgagcatatgaaatgctcccaaagacttgagatgatcaactcttggcttcactccattccatgcttcttgaagtgtttggcttttgacattctttgtaggagagctgttagaaaaataaactccatgtggaatagctttggcccaaaacttcttgggcatagacttaactttcaacatacatctagtcatattaataatagttttattttttctctctttactaacccattttgttgtgtggttctaggaaccattatagggtggtgaattccattattttcataaaactcattgaagttttttgatgtgaatttgccacctctattggatcttagagccttgattacatagtcactttccttctctacaagagccttaaaatttttaaaaattacaaaagccttggatttttgcttcaaaaaatatacacaagtcttcctactaaagttatcaataaagagcaaaaaatatttttgtcaaatgaaagaggatcaattggtccacacacattggtggacacaagttggaaaggtatctttgcttttgattcggcttctttgggaaaactttttcttgcatgcttgccaagaagacatgcttcgcacaaatgattaggatggttgatgtgagatatccccttcaccatcttctcatcttctcaaacttcatattctaacaccatgcttcatcttttatgctagcctttaagcattttgcttcattggtcttaatgctcaaagtgaacattctatttcttgacaattatctttaagccgcaaataattatctttcatgagaacttcataccccttctcaacaagttgtcccaaactcaaaatattactttttagtttaggaatataataaacatcattgatcattttgtgagcaccattttttaaggaaattaaaatgatatctttcccttggatttgtaccttggaagaatcatctaaggaaacatttcccttcaccttttcttcaagcttcacaaatttctctttgtaaccgcacatgtgattagttgctccattgtcaagatacaacaagttgtcatcatcattttcttctctattatgtgctagcaatagtgctgactcttcatcttcttatttcttatcaacaaaattgactttttcttcaacattggatttacactcccgagaaaaatgacaatgcttatgacaattataacattcaatattggctttacacccccatgaagaatgaccatacttatggtaattatagcatttaatattggctttacactcccataaaaaatgatcatacttatggcaattgaaacattcaatgttagatttatcatacctaatttcatttgttcttccaaaatattgtctctacctcttcctctttcataacctctagtgaattgataacttctttcattattatcacaattgccacgatctcctcttccttggccatgtccacatccttttccacaaccacatcctctttggcttttttctcctccattttctttcaaaaaaactggctttaagaacttgctccaaaggctcattgtttcttcttttgaacctttcttcatatgcttgaagtgaatcctataattggtccacgatcattgactcgatgtcttttgactcttcaattgcacaaaccaaaaaatcaaattttacggctaaagaatgaagaatgttctctacaacgtgaacatcttccatatttttcccataatgcttcatttggttcacaaccattaccactttattaccaaaaatccaaaattgacttggactctttcatacacagggattcaaactctctatggagagtttgtagacacacctttttcaccttgtcaacaccttcaagggatgtcctcaaaatctcccaagcttctttggaggtggaggcattggacaccatctcaaacatgccttcatctaaaccttgatagatgaatgtaagtgcttgttgatcattcttcttcatcttcaacaaagtctctttctcattttgtgacaaagaaccctcattttcatgttgtctataacctttctccacaacctcccaagcatcttgggaaccttgccaaactttcatgcaattacaccaattatcataattcccttttgtaagactaggaaattgaaacaagtttgagtcattgcttgtcatctctcacctcactagtgtttcactcccttcaccaagtatttctcacaatttgaaacctaagctctcatgtcactttgttagaaaaagagaagaagagactaaagattataggaaatattatctttatttgacacacataactacatgatttgatgttctatttatagtagaacaactcataagcattacataattattcgattaagacactaaatggacataatatcataaccctttcaattcatagtgattacaaaaaataatatcccttaattcttattaactcacactcattcatcttttaatagcaactcacaatcctttgttttctaattactattattatttctaacatcataatcatctaaattctagaagtgcattattaactgattctgcgtgattattatgcacacagccaatactgcacctggattcatcgcaaagtcaatc

SEQ ID NO: 3206 - DNA, 6164 bp, Glycine max
  Intron number 3 from transcript Glyma15g33690.1 (locus Gly ma15g33690) derived from phytozome v7.0 (chr-ID Gm15; pos 37524696 to 37530859 reverse strand)
aattagtagaatcatatgaaaatgtgttgaaactcatttagagcatttatattaagtctcagtatgtcagcttaaattttaatcattttctattctaacagtaatgatctcaaaacttaaaaaagaaccttacgtcttatttcatgcattattttttttaatcatgttcagttcaaaattgattagtctagcatcttaaaagttaatagattcgatgtatcaaatctaactaactattttgatcaaacatgattagaactagctgtaactataggtggattcaaatgcgcaatgtagaattctcttgaatccctaaagatgcttctccactcttgaatatattaagcatatgttttatttattggtttgatgtttgaacttcatcttattacacggcagatgatcatgtaaattgtgctccagtgttgaagtcgatggtaatgcgtggacgtgaaattaattataaagccatagaaaaaaataaaacattgcaacaagagatagatacaatgaatgatgaactcgatcgctggtgtcaacaactgattgaacaagaaaagtcaactatacagcaatggagaaaatttgaggaagaaaagaaaagcgtaaatctttttaattaacttatcttgaatttgtatgacataaaatttgttaatgataatttaatattaatacgaactatttaacttataatgtcaaacaaattgatgggttcttaaaagaatatatgaaaaaaatagcggataaatgaatgaaacagtaacagaaaaactcaattatataataataaagctgaaaataacaactaatggtgaaaacctatcagcccctaagcacacagtgcttccctcaccaagatggtgaatcttaatggaatccctccccgcttaatccctacctttcagtcctcttttatagccataagcttattcctaatttatcgacacaaacccccctaattaaaataacaaactcccctaattaaaataacaaacttattcaataacaactcctataataacaataacagactcctatgattattcattttattcttttgttcctttatttctcctgtaaaccctccaaatctttggcttgggcccactgtcaaggcccaccacttgatccacctttctatgaattccctcctccatagaaacggccttgtcctcaaggcaaaaatctggaaattgaccctgcaatacggcattatcgtcccatgtgacgtcctcccatgtcttgtgcttccatttaatgagactttgctgcacagtcactccttcttttagagtcaccctagagcccatgaccttctctggatacacatcactctcacttgtgagttccaaatctttgggaagttcccctagaacctgatagtctccaattgccttcttcaataacgacacgtgaaaaacagggtggatcctggactgatcaggcagttgcagtctatatgccacatctccaaccatagctacaactttgaaaggccgataaaaacgtgctgctaatttttgattgatccgtttaaccactgaatgctgtctgtgaggtcataatttcaaaaaaacccattcaccaacctgaaaacgcacatctcttctcttcttgttagcatagcttgccatctgttcttgagctctttgtagatgtgatgtaagttgttttagagcctcgtctctctcacttagctctaatgccaccgcagccaccttagtctcatttgataaaaatcgcagaatactaggaggatgccttccataaaccacttcaaaaggagttttcccaattgacacatgataggtggtattgtagcaaaactcagcccaagagagccaatttgaccaagttttgggctgatctaaagcaaagcatctcaaatagctttccagacatctatttatcacttccgtttgcccatccgtttccggatgataggcataactcatctgcaatttagtgccctgcaatttaaataattccaaccagaaatgactcacaaataagggatccctgtcactgataagggactttggaattccatgaagcctcactatttcttttacaaacaattcagcaatggatttagcggtgtaaggatgcttgagcaatatgaagtgactgtatttagataacctatccacaaccacaaatatagcctcataacccttagacttaggtaaacctgtaatgaaatctagagaaagatcctcccaaatgccattaggaatggggagaggttgcagcaaacctccgggagtcgtggccgcatatttttgtctttgacagacatcacaagcacgcacaaaatctctcaccgaccttctgcattccccgccaatataaattatctgccagcttccaataagttctcaagaaacctgaatgtccacccatcggagtgcaatgaaattcctccaacagaagagggatagatggggacttgggggaaagaaccagcctgccatgataaaacaacacacctagcttaacagaatagccaggcttggaatcaggagcagacaacacggtttgtatcatgtcctgaatttctggatcatctgtcacctcatctaaaagtttcttgctatcggtccattgagggtatgaaatcaaagtacccaaatcagcatcgtcataacatctggatagagcatccgcagctttgttctccatccctagtttgtatttcacctcaaactgatagccaagcaacttagccaaccaacactgctagtctggggaagttatccactcctgcacgaagtgttttacactcttgtgatcagtgtatactgtgaactgctttcccaacaagtagtgtctccaatgttgaatgcacaataccaaagccataagctctttttcatacaccgacttcgctaaattgccctgagataatgctttgctaaaaaatgctacaggtttcctctgctgcattaacattgcgccaatacctctaccaactgcgtcacattccacttcaaagggtaaagaaaaattaggtaataccaaaacagggggtgaagtcatgataatcttcatcaattgaaaagctgcatttgcctctgttccccatgcaaagttgtccttcttggtcagctcagtcaaaggcttggctactttgccataatccttaataaattttctataaaattcccaaaaacccacaaactcctttaacattctttggttatggccaatccaaaatgcaccatactttagcaggatctactgctaccccttcacctgagatgatgtgccccaagtagtcaatctacttacacccaaacttacacttagcttgatttgcaatacaacagttctcacgtaaaatcaaaagaacatgacttaagtgcttctgatgctcttgaatgttcttactgtatatgagaatatcataaaaaaaaactaagacgaatttcctcaaaaaaggcctaaaaatatcattcatagttgcttggaaagtggctggagcattcattaacccaaatggcatcactagatactcatagtggccattgtgagttctaaaagctgttttgggaatatcatcttcatgcacccagatttgatgataaccggacttatggtcaatctttgaaaaaacaatcgagccgtataattccgccaataattcgtctacgatgggaatagggtacttatttggaactgtagctttgttaagagctctgtaatccacgcacattttccaacttttatctttcttttttaccaaaatcactggactagaaaaaacactcatactgggtctgatcactcctgcctacaagagttcagtcacttgtttctctatctcctctttctgatggtgaggatacaggtaaggtctaacattgattgttccctaatttagaaataatttgatatgatgcacttgagacctctctagaggcagctgaatgtgatctttaaaaactgcaggaaattgttccaggattgcaattaattctgctggcatagagacctcaccagcttcgaattggtgatgctgagatccccaccattcaactcccatcctattctgcttgtcttccaaaaatgagttcagataactatgctctccttgcctgctaccttgacccaacacctttaccatctgcccctcatacatgaactgcatagacaacaccttccaatccattatttcctttcccagtgtgctcaaccacgagactcccaacaccatatccaaacctcccagatccagtaccaatgcatcaatgactaccttcacagaacccatcttcattacaattcctttgcacaccccttgagaattcaccctatgtccatctcctagtttgatgctcctggcaagtttaggagtgatttataaccccaacgcgtttgttacttgagaggagatgaaattgtggatcgcaccactatcaatcaacactaacacatccacattgtcaatttttccctcaattttcatggtacaatttccactcatacttcccaacacacccatggattgacattctagctcctcttcttcatcagttgctaattcctctcaaccagtttgcactgcctccatagatacgatttcaccttcatcgttaagagtttctccttcacccaaaatcaacactcgtaaggatctctcaggacacttatggagagtagggtgatacttgcctccatacttgaaacacagccccttcgcccttctctccgacatctcgtcgttgtgaatgctgtgaatcccgttccatttttcagatcgcgaaccatttgcaccctttttctcagttgaaactaacgacatcgtagagagcgtgttagatccactggatcctgttttctgagtcgggttggcccaacgggaacgatgtgtctcttttgggtttgacccgctcctgctccaaaagactgacccggcccaatcattacgacccaaccgatcctgccctccttttttgctaccatatttgcctgcgtcatcatcatcttctctcaactcttcctctacgtctttagcgatacgcatcatttgcatccgattcaggggattgagagtccgaaccctacgatgaatttgtggcttcaaaccactcataaaataacccagatattgttcctctggaagttgtcccacttgtgacgacaaaagttcaaaagcttccacaaattcttctacactaccactctgtttcaacgtggctaattcctcaaaaggattttccagacgtcttcctccatattgcgcaatcagtccctttttcaacttttcccatgatagattgtcctcagtttccatcaaaaggttaaaccagtgtatggtagaaccttccatactgagacgtgccaacttcactcgcatctcatcagtcgtattctgcacatcaaaatagatttcagctcgtgtgatccatgcaacaggatcgtctccttcgaatagtggcaatttcactttcttccctgacaaacgtgattcctcatgcgacgtggaacctccactctcttgattcgtactcttctggccgatctgcttgcataaatcagagagaaccgagctttgttgttgcatctgttgagccaacatttgcagtgttgctttgacatcaaccatctgtgtttccaatgcgtccatacgatctcccatcttaggctttcgtggcatctacaactccggtgcggtggtgatttttttgatccggcaggtcggaccaattgatgggttcttaaaagaatatatgaaaaaaatagcggataaatgaatgaaacagtaacagaataactcaattatataataataaagctgaaaataacaactgatggtgaaagcctatcagcccctaagcacacagtgcttccctcaccaagatggtgaatcttaatggaattcctccccgcttaatccctacctttcagtcctcttttatagccataagcttattcctaatttatcgacacaaaccccccataatgaaaataacaaacttattcaataacaactcctataataacaataacagacttatgattattcattttattcttttgttcctttatttctcttgtaaaccctccaaatctttggctagggcccactgtcaaggcccaccacttgatccacctttctatcacaaatggaatcactaactttagcaacagagaagtag

SEQ ID NO: 3207 - DNA, 4599 bp, Glycine max
  Intron number 7 from transcript Glyma03g12260.1 (locus Gly ma03g12260) derived from phytozome v7.0 (chr-ID Gm03; pos 15429059 to 15433657 reverse strand)
ctggcaacaggtatgtatagtctgctcatgtttgagcctttgctctaatctcttgcacatcatgcatcaacactggggtcttttgatctgtgtcttcataatggtatgaatttctttagtttcatgttggtcagtaactcgcaaaccacagatgctcactagggtgtggtggctgaacctttgcttgtcttcctcgtctcacaaaatgcaagttttttgttttgttcgtatgtgtctaatatgtagccttaaagcaacatgttatatgtagtgctgtaataattgcatatatctgggatctcaatgttggggttttatttttttatattaaattgagctttgtgtcatccttttcatggttgcacgagtatgagcgtgccatcatttacaaactagagctgtatatggattgggttgcatgttggctttggaatttgttaggatccaactgcaaaggtgtgggatttgggacttgagttccagattggaagtataggattctagtgtggagataataagacctcgggctctccaactacaattgctagctaagaatctgaaattagggattttgatatgtagatttgatcaagatagggaaagatgaagaaacaaaataaattgaataattctagttttaaataaagatatactatttcagtgtattttacttctttatcttttcctatttttatatgatctgcatatgaggatctttaattccatatctttagcattattattgtttattaggataattgttagttatgattctattaattagtttttttttaattttattttattaattaggataattgttagaatgttagatatgatcctactatttagtatgatttcaattagtatgatttctagttatgatcatattaataagggatatatttgtatttgtatccttttttaaagacaaacctggttgaaatattatcaatgaaaaattattttcataaaatttcatgttagtctgggagaatctctcagcaataccctaggaaattcatccagtaccccttgcacttgtttttgttctacttctacaatagaaccttcatattgcactgcttctttgtatccacaatatccagtacccatagaaacatggccaattcaacatctgtatgcttgcaaatcgattgtaaagacactttagttcgtagcagtttaggatcaccttgaattttcacaaactacccttgctgtttgaacttaatggtcagagatttccaatttaccttgacatctcccaacttttcccaccacgctacccccaatatgatctacaccacccaaatcaaatagaaagaatttctctgttatggtcatttgtcctagttgaacctccatctgctcacaacagccttgagcatttttcctgtttccatcaccccaatctcactccataggtttgagtaggagtcactttcaaacctagttgctgcactaattcttgagaaataaagttgtggctggcacctctatcaatcaaaatcaactctcttttgccctgaatcagcccttccaatttcattgcttgtggttgagtaaatccaccagctgagcaaacggataagtccatccattgacactccacctttgtttctactgtattgtcaaatgtattctcaagcatccctttccaatcttgaaatctccccctcatcattaatccattcatcctctgccacaataagcaacctgaggtttttttcggggcacttgtgaccagcaacaaatggtcctccacaatggtaacagagttttgcttcgtggcagcgaaggtactcctaatagggcaggttccggactcccctatactgtgatcccgagctcgtagactcactttgatttgcagccattacgttcacagagctacgcgcatcccctgctagatttcgattctgactttgggtgttgtgaaaggtgttcattgcggatcatccaacactgtgtatccatgttcctcccttgggttgaaaacgaaacccatgactacgcaaatcaacctctggatttccttctttttcagcttcctcaaaatcagccgtcaactccatggcacgtgatagatccttcggtttgtggggatgaatttttgcccggatctcattgcaaagtcccaccaaaaaatatcctctcaattgcgcttcctttgtacccaagacttgagccatcggcacctcgaattcctgaatgaattcagtcaaagtcccccatttggcgcaacgctatcaaacattcgtaaacatctccccttccggtatcgccgtagcacttaatcagcgctgccttgaaaacagaccaactcttccgctttgccttttacttccaatactggaaccaatgcaaggcatttcctccatgctgataaaggccaatctcactttcgcgctctactggacgcgttgcacggcaaaaaacttctccgcatacacgatccatcctaacgaatcctccccttcaaatactggcattttcaccctcatttgcccaataatggcgtgacaaattcagtattaaatcctcctagactcgctcgctcacttcgtcctccgatgctggtgaaggctcggattccgtcacggactccacatcctccaacccactgttctgctccttagatgcattattggctcattatacatgatgcctttgtgttccatgagcatcttcatcatcttgcgcaaatctttaatgtcgtcgcactgtttcgacacctttgcaatcaccttagtttatttcttggatgatttctgcaactcaatggccatcgccttcaattcgctggttgttgttttcaatgctgtaaccaaagattccagctcagtgaatcgagcctcgtcatgatccatgattctttcttcgacaaatcagaccagttgttaggaatcttctctactttactaactgcaactagaggtagaacaaatgcacataagaaccaacacagaacagtacacacagagataaagggattactgttactgatagttcttttgctccttacacaatgaagaacactctcttcccttacattactgagacacttcttaggttctctcaatacaatcaattctccccccccccccccccccttccttctcaagaaagatgtaatttattcaaaactactaactaacctgtcaactgttgacagctggcagagtctaactaactcccaacagcctaattgtcactcctcatcttattcttcctattgtacactagccacggcttagctacagtagatgattcctcttgcctaacaatgagtttgcttcttactttcagcgtaggttgcaggaaggatttttctttgttctgtgactctattctacatgaagtggttcataacaacttggtattaaagcctttcacaatgcttctcagcttcaaatgagagatgtggggggtgtcgttggcattgcaatgtttgcctaggactagctaaagggatagtgcacacccaacttgtgtgggtgccagggttgagaaacagggtgagatgttaggattcaattgataagaaccataagagagccacaccacaaaagctaggtattgtagttggagagtctgaagccttataaactgaccctagaatcccacacttctaatgactcagatctcataccttgcaattggatcctaacagacaaattggatattaaattagcagaaaagtagaagtgtagaactatattcagatcatattgggttggtttttcttgatttcaaacttttacaacccaaggctgaataaatttttcttgaaaatttcaatcattttgtaatggccggaaacaagtggattggtccaaattttggacacaaatccattatttgaacataagaaaattatcttactttgcatgtaatcatttttcgtgtacatgcatctaaaaaatcaaagggcaactttagatgttcaatttttgtattcaaaaaacattttccttttggacaccctagtgcaatcaatgacatctttgcataacccaacagtggttgatcacagtggacgttgatagtccataatctgatttaggcagtcgtaattctgtattaggaagttatttggcagttgttttatattatttttgaattagaaagttataggttatgatatgacagttagggatataagttgtgttgcagacttgtaaagggcaattaaggtatcatattgttgttctgtgttttgaaggaggaaactatgatagggaaaaccctttgtgttaggggggaactctgtatatgtactcaaatctggcttaaaccagattatttctatctttatttagaatttagtgtttatttctccagtccaacagaagtagactgaaaccctagacgaactttacctgcaatgtcagggtttgaattctggagttgctacttttgagagaattttacgtaatcaccacccccaaccaaaggattaatctcacagccccgcctttgagaattctcggtcatatacaaaaaaaattacgtgtgcatcaattacgtgtttcatattaatattttgtatgaattgcaggtggcactatagtggcagctgtgagcctcttaaag

SEQ ID NO: 3208 - DNA, 6806 bp, Glycine max
  Intron number 3 from transcript Glyma10g22150.1 (locus Gly ma10g22150) derived from phytozome v7.0 (chr-ID Gm10; pos 28137569 to 28144374 reverse strand)
agaaagggtgagttctgatttccaatttgtagttaaactttaaatataatgcataattttttttgtgttataaatagcagattgtggaaaatgacagaaagccaaaaatctgccatgtgtgtgtgtgtatgaggagggatcaagttactccaagagttatggatcttcaccattgatttttttggaacctaatggttaagataaactattcattacaaccattagatttcatgaaaaatgaagggtaaagatgaagagtaactctagagtaagttgatcccagatccacttactccaagagtaactctaaaatttttttaaaattactcctcatcctcaccattcattttcttaagatctaatggttgtaataagtaactaatcttaaccattagatctcaagaaaatgaatgatgaggatgaggagtaactctaaaaggattactcttggagtaagtgaatcccccctccctcccccttccttctctctctctctctttatatatatatatatatatatatatatatatatatatatatatatatatatatatatatatatatatatatgggttcactaacgcattgttgtaggattctgccaaacccaataatacaagacaacaagtgtcatgttttcctttgctgaactgttgtgctgctatctcttctatttcatgatgaaagattttgctattatgattcccttttcaaatcatatgctgtgtgacaactatttcaacttttgggatttgtttgtgtcaattttgtgtctgagctgaagaaacatgttttagtttttgtcttgtctggatagatttcttttctttagtgcttgggaagaaactttccagatctagttcagaaggtttatgtttgtatgtctcatcattttattgttatcttggaatctagcaagatcatgtgacatccaattcctttatgattagagaatgtatggattaataatggttcttttatccttttaataagaaatttttgggaaacacccatgaggcgtttggtaggggagaaatttatagtttcttaagaatcttagattgggcaacttagttttccatgtttattacctactttaaaaaataatgatcctgggaaagtattttagctagcttcccacaaaaactttcccatggagggggggtgggaatataactttcccgagttaaatattttttttactgcagtaataatatgacattacttttattaaattatttaatgtggtaaataattaaagtaactggtaaaaatatcacgtaactctatgattcataggaaacttatataaatattcccaataacatttatttgggtttcttgagtttctgtttgtttatttgggtttactgataggggctaacccaagaagagtggaaacttgggaaccgattgtggcaaaatttcaaaggaagctttctaaatgaagacaaagacacttgtcatttggtggaagggtgtgcttgataaaatcagtgctcaactcaattctgatcttctacctttccttctttaagattccaaagaaggtcatagagatattggtaaggctgcaaaggaggtttctatggggtgtgggagtggatgagttcaagactgcgtgggtgaaatgggaaacggtatgtctaccaaactaccatggaggtttgggagttagggatttagaattgattaatatggcactgctaggaaagtggaaatggagcatgcttcaggaggatgataccatttggaatagaattctggtttctaagtatgggggatggagagtgttagatttggagagggtcaaccagccggaatcactatggtggagggatttaaagaagtcatgtggcgcctcggcggttggggaatggttcaataaaggcatgaaactaaaaattggatgttggagtagggtaaatttctggactgataaatggatggggggaccggagttgctaggtgaaaagttcccatgcctttttgtcttgtttgaacaacaaaactgcaaagtggcgtggatgggctttatgtggggatcttcttgggaatggacttttgtttggagaagaaactttcagtattggtaggtgaatttagtgtcagattttctggctgaactgaataattatagtattcgaccaaatgaacaggatgtgggaggtcgggagcaaaaatctacactgttagtggggcttatgcatggttgtatgagacggtagttggatcttcagaagaggagatattcaaaagggtgtgaaattaagtccctaatagggtgggtcattttgtgtggacgctggtgagggatagactgccaactggaagaaatctaagtctgagacaaatccctgttggggatgtaaactatgaatgtccgttatgtttgagggttgaggaatcaatagatcacctattttttggctgtgaaagggtaagagatatatggcaggagtgttactcgtggattggggtttcttcagtgggtcaggtggtgccaagggaacattttttttttggaaggcaaaaatatatattattaatatgaatcatagcagtaccaggggtactggtgaagtatacatgaatacaagacacttagtgtgtcgccttccaacataaacaaatacctaacattaatcccactacataggataaatatacccagcccatattaactaaaatattccacaaggttagaagaccattgattgaaaaaaatactaaagtttttctctctggtctttaaccatgaccatttgatgaataaagcatcgtccatcactttagaaggttgaaagtgattgccctcgaataccaattggttcctatgctgccatatggagctagtcaatgctacccaccatccatatcgatgagattggttttgccctgcaacaaaaccctcacaaaattgggcaaaatgtgatgctggagaaggtgcaatggggccaaccatctggttccatctcatggattcccaccaaagccctgtggtcattttacaattgaagaacaagtgatccacctcctcttgagcattcccacatagagggcatgaattatcctgaatcggcacatttcttcgaaggagatttcccctagtgggtaatctatctaaaataagtctccaagagaaaatcgcagcccttggggggatattcagcttccaaatagtctttaagatgttggcctctggaatttgattgctggtcatcaataatctgtaggctgacttagtagaatatataccactgggatcagctttccagaccctaatatcctgcatatgaggctggatttgtatatcagtaattgcttccaaaaatgccacagctatatgttgctcataatcaaatagattccttctccactttaagtcccaacaccaattgccttgagagaagtttcccatgttggagatggtgctattcttctgagcactaatcaggaataactgattatattgctgttcaagtttataatcttcccccaaccatttatctttccagaatttaattttttcccctccccctaccttccataccatctgctgatgaataagactgaactcaggctgctgatatagctttcgaaggtccttccaccattgagaatgccaagctttatccctcccattactaagatctgaccagcctccgtattttgacattaaaattctggcccacaactggttgtgattagaggataaagcccatacccatctacccatcaaagctgtgttgaatttagaaatatctttgaccccaaggcccccatctccttggggagacatatgacatcccacttcacccaagggattttcttatgcccttgatcacccccccacaggaagttcctttgcaaggaaacaagtttgagagctattcttcgtggaagcttgaaaaaagataaagtatatatgggtagagcagtcaggacagaattgattagagtaacctttccagccatagataaaattttctgattccatttagatagcttagcttcatatttgctgatcagaggttcccacaccaagctgctggtagactttgccccaatgggaatgcccagataatggaaaggagtctccatatgtctgcagttcagaaattgtgctgcttcatgaatccagttagcctcagctccaaaaatcccaaattggctttttgcaaaattaatcttcaatccagatgccaattcaaaacccctcagcatagccttcaaaacaatgacattatcccatgaagcatgccccacaaatactgtgtcatctgcatattgcagaatattcacaggctcattttgcttccctaccttgaaacttctatacaggttcttggctgttgctacccgcatcattccagtcaagccttcagccactatgttaaagagcaagggggctaaaggatccccttgtctcaaacctctagtgggaacaaattcctttgaagggctgccgtttactaggattgatatagtggcagattgcaaacaagcattgatccattttctccatgtaaggttgaaacccatcctatccaacatgtaatccaggaaagaccatgaaaccgaatcatatgccttctcgaagtccaccttaaataccaaagctggcttcttacactttttagcttcctcaacagcctcattgagaatcaaagttccatgaaggatatgtctatcctttatgaaagctgattgtctttcatcaataaggccaggcaccaccatcctcaaagttcctatgtctatccttttagccaagggaacattttctgcagcattggtactgtgaaagcggcagagttgatgggcagaggtggatggtgttgtgggctgctgtaacatgatgtatttgacgtcataggaacaagtgcatttttaacaatcgggaattccaaggggaaacagtactagatgatgcaatgttcttcatttggtcgtggatgaaggcactggaaaagggttttaatgtcccattccaagtatggagtagtaatgctagaatgaattttgtaaggggaggagtggagtagaaagcaataggggaaattttttgttgtgggaatattttgaggtgggagctttcactcggtgacaaatccaaagaatctttctattatacatctcaaatgtatttgtgaagattctctggatttcgtgaggggggatgcctaagggctgtgtataccagcaccgctggtgctatacagttttacttatagtatatataatataatacatatttttgctgatagaaaaaaaataacatttatgatcaaccaaatgaattttgttaattcccaggaatcatgattcttgggatttatgatttccaagaatcataattcttgggcatgaaaaaacttctcccctaccaaaccccccaatgttcgagacggggacaattaaatttaagtttttgaggaggataaaatgtttggaaggattgaaaaagaatggaacagaaaatgtctttagcgccagtgtgacatcaaaatgaaaaatgatgaaagtctttgtgaggtggagattcttgatgatatggaagacaaaaaaattatttgtaataggtaggaattctttcttgatgacatcgaattcttgatgaaagccttttttatttgaagtgcactacttaatagaattaatagtagtgacatgttgtaggttcataggttgcatatggttgtttcctatgacacatgtataatcgatggtgcttgcttggattctgttcctcacctcatctttacattatttactgcagtttattcatggaactctttatttggcattttcagtgaatgttggatgtgtcctaactcctaagttactggaccaatttgtgattgttagaaattagaatagaataacatgcattttatgtatcacatgttaaataagttcatgcatcacttgttctatacatttagttttgtagtgattagtatttaggaaataaaatcctttcactctttgcctaggaagtagatgttatgcacaaactaagaagtgaatactcaatcagtttccaagtaattccaccctatctcattctctctctccctctcttctcctcttcccttaaatttagcagtgatcatttgcttttatgattttgatagaaataaaggtttaattaccctttttgtccctatagttgcaatgactttcccttttagtctctaactctctattgtttaaaacatctcattttggtgcttatagttgcaagtttttaatcatttgagtccccactgtctaaaatcatctaatgttttaaaggatctggatgtaatgattttagacagtgagtaccaaaagggttaaaaaattgcaactatagggaccaaaatgggatgttttaaactatagggactaaaaggtaaatttgttgcaactatagggaccaaaagggtaattaaacaagaaataaatatgctctattttgtggcggtgtacaatctatctacaagtttggtttggaacctttgtttgactgattttcagttttcttgaactgtggtattaattctattgaacacttgcctaggcttatgtcactttctgcctgacgtgtcgtaaaagcacatagactcggagcccatattttgcactgtgttgtagcttgaaattcgtgatccaagtcgagcagtatttctttgtagacatgtgaaaatctattagtatcatagccttgtgattattacatttttcttttttctatggtctcataatatgctttttatacaatttaatttttattgttttgaattatgagattttagagt

SEQ ID NO: 3209 - DNA, 1755 bp, Glycine max
  Intron number 1 from transcript Glyma06g03690.1 (locus Gly ma06g03690) derived from phytozome v7.0 (chr-ID Gm06; pos 2582844 to 2584598)
gatcactccaaattctggtaagcgtgcctcagactcagagaaccttcatttttatcctcaataaatgacaatccgtagctgcatgtatccaattttacattatagtaacgtactcttttttgtttgattttctaatttaatcggtcgaatatattaatgtttgggtcagagattttgtcactaaaaatttaattcgtcgttatgtaagttttctaaaaaaatttccgtcgaattaatgttttaatttattatcaaattaatctttataagttgtctagtatccttcttaattatgaggagttagagtggtgataaaaggagttgatcgaaacaattcggcgacaaagaaaaattattttgtaatatattttttttttttatgagtaacttagttacacatcttttgataactgtaattacaatgaaaaaaaatcgaagaatcaatttagtgatatttgttaaagactaatatgattatgaaattgaggattgtatctaataattaatttagaagttaccttaatttaattacttgtcattttaaatataaaatccttttgttagtatcggtcccttcagaatcaataagtaattaaaaataaaaaacatttagtaccttaagatatgtatgtaaaacataaaaacatgttactttttcttttttttaattttgtatttgtctttagtttttttttttttgtagaggtatttgtctttagtttaattttaagtaaaagtatagtatttttcaaattaaagttatccaatgacttaattttttatgcaaaactttatatggcaattatttttgaaacaaaacaaatagtatcatctattatcgatatttaatggatctgtatatatatttattatgatggtaaatgtttgacgagtgatgccatactcatgaagaaactggattgcataccaagtgtcttcttcgtttctcatgttatttatggtcgaaaatgagttttgttttgtagttagtataggccatttatttacaatgtgccaaaaataatattttaaaagttcaaacaaactttatttcttcttctatgcgtataaactggattaaagtaatggccaaggtttggaattatgaatgataataatcataatggtaatagtcatagtgcttcatcttctacacgtagcatcatcataaattatgtcttgagccatatataataattgatagagcatggcctgctatgacaactattggttaagtatggacattgagttacattatgacttatggtgttgtttcttaaagtgcatgttgtcttcggctttatagctcttacaacaccttaatgaaggcggtggaaaatgggtcacattcttttgctatactagctttccatgcatgtgcttctgcatagctaaaaaaatctaaggcaaatttccccccaacggagttacgtagaaaggcctccgagagtatataattcaattttgcttatcctctttacctctttaatttaaaaagttagctttggattttggtgtttgtatacttttgtgatttgtgatagttctaaatttccaatattgtagtaggggattgggaacttcgtttttgggaacttaatatggggttgggaacttcaattcatttttggcaaagaatgctcccgcttaaatttaactagagtctgcatattattactctaccccaatgataataggattacctcatcaataaatgtaatttcattcttacagacccgttttacactgctttcc

SEQ ID NO: 3210 - DNA, 9273 bp, Glycine max
  Intron number 4 from transcript Glyma04g24950.1 (locus Gly ma04g24950) derived from phytozome v7.0 (chr-ID Gm04; pos 28636884 to 28646156)
gtggggattgcaacaattaaggtattacttggtatttccatgagtactgaaaattgattttataaatggtgcatttgattaattcatattttcttcaatttgttcactttctgatttacttcaacttaagatgatgctgactgcaattttagtgtaagaattatatggtttaagacggagagcaaagagattacaaatactctgtatgagattatattcatatgagcagtgttgtcaaatagtggctatggcacctatggcagaaattggtggattttttttttaaaaaaaggaaaaaatagactttggtcatgtggcctgacccaaaaatggtccacaaagggtttaaaaccctataatcgaatcagatatgttcttttcctctcccagtctccctcataaagttgcctccaaatgagtaatcatcgactagcgacctctctcttcagtgaccactgtccatcgccatgaagacaagctaatgtcaaataagctgtggcaaatctagtcatactaggcctaatgaagtctctcttgtgaacttcttcagcatgctaatgagcattactgcttattagtaaccatctagattacattctcctctccaataaaagtgacagcattatccaacatcttgaacactttgtcagctgtttttgagatgaccaaggcatctaatgaatacagaaaaaaatcccctttagactgttcaccaaaaatttacaaattgaacaccttttttatgtatccacccattagacaaatcataattttggtctaggaaattatcataacagaaatcctttttcaagttcagcatcttttgggcaaaaacaggatggagatgggcgtaatttggtgtgaaaagcagaggtctgtgccacttaacatgccaataattgatggaaaggaaaagcaggggtttatgcttttgctgtggagaaaagttccatcccttacatcaatgagtagagaaacaattaagattgttaattttgggggatcatgaagccctaaacgaagatggagaagtaattgctattgaagtggttaaggataatgcggaagaaccagtctccaactttcagccttggggacaaggctgatttttcagctggcaataatgatgcaaattgaccgttaggggaagttttggcagttatgtgtagaaaataactgttttagaaatcagttctgtattataaactcagacaactaactgctttagaaaacagttgtgttagaaattgcagaatggtagttatgagtagaaaataactgccggtagttatttattaggagtatatatttggtagtatgttgtgtaattaggcagtgtgaagttatctgtagtttgtggacagagggtaatcactgtaggagacttttgtctctggtacagcaagtgtattgtcgtatttgtgtgataggagactttcatctctgcatcagcaaaatgtattgctgtattttgtttgattttcagtgttcaatattattttatcaattggtgagggtgagcactggtgtagcggaaaagttgcgccatagttatgggttcaaatctggaaacagcctctttgtgtatatgcaagggtaaggctgtgtacaatgaccctcccccatacatttacattgcgagtagcctaagtttgcagaagaatctagaaaggtggaggagaagatgagaaaggagacaaaatttttttatctagaaattaaagaaaaaagtgatccctatgttcaacccacactttggttccctctatttgtgactgtcatttccttcataattctaatccttccccagcccaaatgatagcctactgaataagctttacgtggacatatcatttacttgatttaggcttaaaatgaatgagctatgcccgttttattttaagtatatccactcaagcatccagcacctctgttctaactttaagaccaaatttctcctttgaaacatacaaattggtaaaagttgtctcccacaaaagtggttgatctctttccaacctttcctgaagaacataaaatcaaagatatgtagttttaagttatggccaaaatacaagagcaatgtaaaaatggtgtcaaagtataataaaacccaatttagcctaataaattaaattggtgcccagacaaatcatttaagactgaaatctcattaattaggtagttatagaggtaaataaatgtgtcaaaacagtagctattagaaagcctttttgcttaaaagcttctttgagtgtaaaataatcaaaatcaaacatgcattgagttggtaaaacgatgaaagatgctcctatgttaatggataagaataagaatactataagatatgctgaacttacatagactgaaattgtatgtggcagtgagttggtagttgtgttataggagtatacttactcagtttacttatctttttgtttcaactaatctgcaaaggctaaactacagttagtagttagtctatagttggttaatctgttaggataactgactaaggttagttgacagctacaatcgtgtaactgtctatatatactgaggtgtaactgttttctccttgggttgaacacaatcatcaacttcacctcactttagacttttgcaatttcttagattccctgcaactcttttagattcgtttatggtatcactgagctactgttcgatccttagcttttcttcttggcttccgcttctaacaaccctcctccgccgccgccggtgaccactgaagttgcggtgcataatgagacaccggtgaatgtagatgctgctacattggtcgccgccacttctttcatagaacagcgaaagatttctctcattcgatctcggaaaaactcatgaactcccactatttgttatggtatcaacaggttgagcttgtgatcaaagtccatcgtcttcactatctcctcacaaatccacaaattcctccgcgatatgcttctttggcagatcgcaatactggaaatgtctcttctgagtttttgctttgggaacaacaggctcaacttctgtcgtggcttcaatccacgatttcaggtgaagttctccctcatctcatcgtctgtaagtcctcctagcatctctaggataagcttcattcccactttcagtctattattcatgcgaagaagcaacttcgtaacgatatccataacattccactggataatcgtttgatctctatatatctccttcgaattcagattttgattgattcgcttgcttcgattggagattttgttccagcaactgagcatgttgataacattcttgatggactacccgatgagtttgagtctctggtcacgctcatcagttgtagatttgagtctctcacaattgatgaagtcgaaactctccttgctcgtgagactcgcattgaatagtcttgcaagaaatcaattgcttttgtcaatctcactgagacatccaaacctaattttagccccaattcctcgcagtagatgtcttccaccaccactatatagcctcaagctaatgttgctcaggctaacactgattcaacctactacaactacaatggaggtaatcgtttccctaacaatggtcgtggaggtggtcacaatttctctcccggtggccgcggtgatagtcgtggctatggtgatggctgtgggggttgtggtggtaggttctctaacattcagtgtcaaatctgtcataaatatggacatgagacttcctactgttattataggcatgatgataactatgtccctactcaaccaatgaactatccaaatcagaatcaatatcccaactccaaccaaatcccaatcaacagtgatattctaaccaaaatccaaaccaatatcaaaaccagtatcccagtaaccaacactcaaaccaatatcccccctcccaatcttccaattcatatcctaatcaacattccaatcagccttttatcagaatgccccaccctaagcccatctaaccaatgcttagtcctcttcatcccaaaactggtaccccgattcaggtgctcaccatgttaccaatgtctctcggaatattcaacagatcacaccctttgtaggaccagatcaaattattattgggaatggtcatgggttaaacatcaactcctcaggtgtaacttcctttaaaactcctcttaactctcaaattcctcttgttcttaataacccgttatttgttccttctataaccaaaaacttgatgagtgtcagtcagttttgtagagataattctgtgttttttgagtttcattctcagttttgcttggtcaaatctcaggtctctaaagaggtcctgcttcaagggttggttggtgctgatggcctttacaaattccctaatctgcttcagtcatctcaactgccactcaagccttatatcactgtcaataccatttcatctgatgtttcagaacctgtattcagaacatcttcaaactctgttttgaattctgtaaagagtcaatgatgcttctgttgtaaatacagtttctagtaagttctacatcttttgccccttggctttctagattaggacatccttctgttgatactatgaaacttgtattcaaactttgtaatctgcctattatcaataaaacaggtcctgatttttattcacattgttgcattggtaaatcccatagacttccctccttccctccttcccttcgcttagtgtctattcaactccttttgaacttatctatactgatttgtggggtccctctcctattctgtccagtactggttacagatattatgtaacatttgttgatgcgcacacaaggtttacttggctgtacttgttaaaaagtaaatcagacactctagctatttttaaacagtttcaaaccatggttaaaactcattttaacctacctatcaaagctgttcagtctgattggggaggtgaatataggcctttctctaaatgtcttacagatcttggttggtattatgcatcgactgaattttcctcatacacaccatcataaatggtgttgtagagaggaaacacagacacatagtggaaacagctttaactatgttgtcacagacctcaatgacacttgactaatgggatcatgcggtcatttctagtgcttacctaatcaacaggcttccttctttggctattcaaaatgaagtgccttatcaaagactgtttcactagctaccagattacaaattcctcaaagtctttggttgtgcctgttttcctcttctcaggccttataatcaacacaaactgcaaccaaggtctcaagagtgtgtatttttgggttattctctttctcacaaaggctataaatgccttactgcagatggcataatatacatctccaaagatgtaattttcaatgaaatctggttttcctttccttccttgatgggtgaatcagatcagactatttccaccagtgttagtcatcccaacactttaactgtgctacagtctcctagtccagctgcccctgctactacttcacaaacaggtgcagtatctgtcaactcatctgaagctacaacaccagcctcatcaccatctaattcttctcctttgcctcaagggacttctgaattacctaatactccacccgcaatagtatcatccaatgttgaaattactgctgctgaggtatctttatcttcccctgttactgattctgtacctcctgtcacacctaatactccacccgcaacagtatcatccaatgttgaagttactgctgctgaggtacctttatcttcccctgttactgattctgtacctcctgtcactgcttctcaaaatgctcttgttagacctgataatgtgcttatgtgcacaagagccaaagctggtgttgtcgagcctagactccatcctacacttcttgctcattctgagcctaagtccactaaaactgcgctttccaatcctacttgcctggcagcaatgaaggctgagtatggctttgatgaagaatggcacatgaactgttactgatctaccttcatttagggctcctattggctgcaaatgggtgtttagggtgaaggagaatccagataatactatcaacaagtacaaaacaaggcttgtgatggtaccagccaaatctctcgttttattactcttgtggtacaaatggacatctaggaattggagcctagcctccctaaccaaccaccgtgattactcccgaatgagtaattccaggcagtcagtctctatttatagctaacaactaactactaactgcctttaactgacttaaacagttacaaggctaactactaaactgtaactgatcttagtcagctgcctaacctggttctggctgctttggctgctgctctggcttcctcttatacttgccatgtgtccttccttcatacacttgcttaaccagtagcctaacagcttgtagaaaagggatttcatcataaacttggttatgattacaattagactttttctcttgtaatcaaaccagtaactgttcggattctcctgtcccttgctattactcacaaatggagtcttcaatagttagatgtcaacaatgccttcttaaatagcattcttgaagaagatatttacatgactcaaactcctggctttgaaaacagcaacaagcaacttgtgtgcaaatatggcttaaaacaagctcctagagcttggtttgacaaacttaaagctactcttcttcaataccagttctggtcaagcaagtgtgatccttccttattcatttacactgaaaccagcactgtgatttataagttggtgtatgtcgatgacattattgtcataggcaaacaatcctactttcattaaatccctggttaccaaactcaattttgagttttctcttaaggatttaggaaatctagactattttttgggtattgaagtaagatctcagcctaatggtgcgctctcattctaactcagtccaaggatataagagacctgttgactaagaccaagatggatgaagctaactccatctcttctccaatggttggtggctgcaagttaagggggtgtttggtttggttgttttctgttttcattttcattttcattgaaaacagaaaacggtgatgaaaatgtgtttggttggatttctgaaaacattttcagtgaaaatgaaaacaggaaacaaccagaaaatgaaaacaataaattttcgttttcagtgttttcagttgagaacagaaatctcatttcggttaaaatgaaattgtggtgacaatgaatgtaattttaagtaaatctaaaaatacaaaaaaacaagaagtcaatatattataaattttcagtatttttatttcatgaaaacagaaaacaagaagtcaaaccaaacatattttcagaattctaatattttgaaaatgaaaacagttttcagaaaatgaaaacagaaaatgaaaatgcaaaccaaacacaccctaactaagtcaggctatgagtccttttctgatcccaccttgtacagatctgttgtgggtgctttgcagtatgcaaccatctctcgacttgaaattagtttttctgtcaacaaggtctgtcaatttatgtctgatcctactgaacaacactgggcagcagtaaagagaattctcagatacttggctgacactattaattttggactcagttttcttccttcatctactggacctccattttctttacttgcttattgtgatgctgattggacttctgatccagatgacagaagatccacttcaggagcagcagttttctttagctccaatttagtctcttggtggtttaaaaagcaatctgtggttgctaggtccagcacagaagctgaatatcgtagtcttaccttggctacagcagaagtcacatggatccaatctcttttgtctgagcttcatattccttatgcatctcctattattttttgtgacaatatgagcacaatagctcttgctcacaatcctgtgatgcactcttgcaccaaacatatggaactggatttattttgtcagggagaaagtcattgccaagcatcttcaagttgttcatgtcccagatcaaagagctgatattcttacaaaggctctcactccttctaattttactgcatataggtccaagctcagactggttgaaaagcattctgcaaacccctcatgagcttgctgggggtatacatactcggtttacttgtctttttgtttctactaatctgtaaaggctaaactacggttagtagttattctatagttagttaattaatctgttaggatcaatgttgttaatggtggatggcggttcatggcggaaagccaaaaatctgccataaaaatatgacggatgatgtagcggaaaatggcggatgtcatggtggacaaaaaaaaaacatatatatatatatatatatatatatataattaaaaattatcaagtaccaacaccaaacaaactcattcaaattgaaaaaaacaatggattgcagtcaaataaactaaaaaagtggtgtcaaacagaaaacaaaataaaaaattggtgtcaaaaatgaaaaaagggtgtcaaatagaaaaacgaaaaaaaaaactgcagacatcaaaaacaggtgtaaaacagcaaacaaaagaaaaaaaaacaaaataaaaacgcaacactccgtcgtccacgttcgttcgtcttcgccgttgtgctgtcattcgtcaccgccgttcgtggtgctgctggtcgctgcttcgcggggtcgtgcgggtgctggtcgctgcttcgcggggttgtgctgctgcgcttttgaaatatattaccgggtagggttgggttgggtcagcccaacacctaccgcgaaaaaaaacaaaaaaggccgctattccgcctttcccgctattccgccatggccgccatggctatggcgccgccattcgcaacccgcaacgccaccgctattcggtggcattttttcaaaaatccgccacgcttttctgccatggcgccgccatggccgccatttgataacactggttaggataactgactaaggttagttgacagttacagttgtgtaactgtctatatatactgaggtgtaactattttctccttgggttgaatacaatcatcaacttcagcaacttcttagattctctgcaactctttgggttcgtttgtgttaattgtaatatttgttagagatggatgatattgtttgttgattctcattctttcaatccttttggctttgttgcagttctt

SEQ ID NO: 3211 - DNA, 621 bp, Glycine max
  Intron number 9 from transcript Glyma13g26030.1 (locus Gly ma13g26030) derived from phytozome v7.0 (chr-ID Gm13; pos 29261643 to 29262263)
gtcgtgaagccagtgacattgcctaagacaaatgcatgaaataactgctacatgctcagtggtttcttcatttcatgaatgagacttcttcttcaagtttggtttaaatttttgtgtgtagatggggcaatatatttttagtatatattgattcttatgcagtttgccttagatgagtattatattgagtgaattgttttgaaagaataactagttctgtgctctgcttgattggcgcagaatcatattcaatcccttcctgctccccaagcttttggttctgttaaatatacagtcaactatttggctcatgcactcatcattgtaacgaaatttaagtattgttgaaacaaaaagttcaaattgaccaataaagtcatgtttaatagaagtttaggctgtgattttattattattattttaaatagataaattatatattttaacttttaaggccttaggcaaaatttatatttatatttaaaaatcaacaaaataataattacatgcattattaattattaataatattttaaaaataatgcatgtatttaagaaaaaaaaattaaataattaatatttttagcaaattatcaatttctttgtccatacttcttgaaa

SEQ ID NO: 3212 - DNA, 756 bp, Glycine max
  Intron number 3 from transcript Glyma19g04340.1 (locus Gly ma19g04340) derived from phytozome v7.0 (chr-ID Gm19; pos 4523709 to 4524464 reverse strand)
tttgtccaacttgtcttgaaggtagagatatatatttttatcttaataatcttaaattttctgtagaagacccattgataccaggacataaattttcaggaagtattgatcttttattgtactatgcttaatgacacaccttgacttgtaccaagaaatctggatgttttacttttatttgtagaacatagatgttgttgcaagactctatggtgtatcattttccttttaattaaaaaacttttggctgctgtcccttgaatggtgaagaagaaaaaccaaaagctggatatttcaattaattgggaataagaaaatgtgcttctcgcaacggtttcttaatggcatatcttattatcttaaaattagataactatgttccctttgttctttttatctatcgtttgatgtaatggtacacagactaagaaatgtaatttatatcttattctatatatttctttataattttcgaatatgccccttatccatcatatctgttatttctttccgatttaattttctgacattttctacgctattatttgtctctttttcttgctaagtgtgtaaaataattaaacatagataaagacaacagtatagttgagaatctctgatgttgctggtattaattggttgttgttgttgttgttggtagtggaaaacacactattaaaggagcaggatctttggagattcttactttctaaactgtttttgcttgcagaatacactaaagagaatccaaagata

SEQ ID NO: 3213 - DNA, 1013 bp, Glycine max
  Intron number 12 from transcript Glyma19g03490.1 (locus Gl yma19g03490) derived from phytozome v7.0 (chr-ID Gm19; pos 3521418 to 3522430)
cttattccagcaagtgaattgtcacaacatatcaggtagttatatttcatatagttggtttgcattattctttggattgtacacttttacttaaatggtgatctacatgtactaattaacatgattctgccatttgcactgattgcaactgttcaaattttgacatgaatagctttaaatagaaaacattgagtcaatcacatcaaattgtctaatattcatatgttaatcaagatgtagttcatacgaccaactactgctacttttgtgcatggaaaattgagcatgttatcttgaagaaaatacttgaaaaattgtaaaaggtgtttctgttgtgtccaaacatattgcatattcaacctaggtttgtttagaaagtatcaagagaagtttctggtatcgatagtctttatcttgacatatatggcatcttcacaatgtgaaagcaaaaattactggtgttagatcagaatctcaaggtaaacaacttcatcccttgaattactggtgttgtataggaaggtatgagagaagtactggcaatttcctgaattcctgtatagattgagattagcttgaagaatctctagcaacaaaactaagattgctccaatagagaaaataatacataattttgaacccaaacttgttttaagtagttagacttttaactaaaattgatccgataaagtcagattgagtttacaggattgtttgacgagaatgagtctgaaaatttcattgacaactaagaactgatatattgatattgacgggtccttttcaagtacgtaaagcagaggatagtcatactttcaattgtgaatggaaatatgtatcaagtattagggaaaacattttaattttggtaaaaaaaattacctaatatccagtcttgaccaatgacatgtgagagtgagattggcactcaacgtgcattgggaaatgggatacaggtacaacagaaatacactaatttgtgttccctgttctgctcgtgtagtactgctgga

SEQ ID NO: 3214 - DNA, 971 bp, Glycine max
  Intron number 5 from transcript Glyma20g38000.1 (locus Gly ma20g38000) derived from phytozome v7.0 (chr-ID Gm20; pos 45730187 to 45731157)
aggagctggatccggacaaccttggatacattgaggtttgtattttacacatggataaagtcaaaacaaattaagataataagttagaaaaatgccctcataagtggtttgatgatggtgtttatatgtttaattttttttcattgtatttatattcctatatgcttggtaggtatgctgcatcattggccattagcattcggtgccttttcttttgatttctttgtttccggtcaattcatgttgcttttcttttgctgacatttttttgcacccaatggaggacgcgtgtttacggtcggccatttagcacattctctgggtgcagcccatttcatcgtccaattcctaacaggctgaggcctcattaaaactggaccagcctaagtgaaaaaggctgcaattttttattgatgaatgtttcggttatgtgaagaaattattaacaatacttgaacctataactattctctaaatcttcgttcacaccaactatgataatatgataaaaactattaaattgaatgaccagaactagaatactttatcctctctgagttgacgagattatggttttactcttaaaaataatcttcttatcatcaattttttgagacttcaagaatcttgttttataggaatagttaatcaacactaactaataatatgatcaaactaatagtaattacttaatattcatagaataaccccacgtgacttaaaagcctcatattttgagttagtaaatatatatcatgaacttagttttgtacttttatttaatttttttgactggatatagttttgataagttagtagttacgtccctacgtacctaaactaaaatatttagttcttactaaaaacttgtggcaactacttaagtttatgtccttttaattaagctcaattattatgaaaaatgttccctaaagtaaatgtatggtctcatgcagttatacaacttggaa

SEQ ID NO: 3215 - DNA, 3318 bp, Glycine max
  Intron number 1 from transcript Glyma18g38120.1 (locus Gly ma18g38120) derived from phytozome v7.0 (chr-ID Gm18; pos 45437136 to 45440453 reverse strand)
tcggtgaacgtcaaccttgtggtcttcagtactaggtatccattgtttcctgacattaagtatttaatttaacctgttaatttggttttgttttctgttatgatctgttttatgaatgatctgaaagtaagttaaatgcttgttcttttggtcttgtttgttttgtgttctgtttttggaaccgcattttgatcaagaaagtgtttatagtcccaattgtcttatcatctctttggttgattggcacttgggttgggtcaattatagataagtttcatattgggtgacacaagtattgaattgcacaccaaatatgtcgtaactgtttgagctttatgcccttgtcacaatttagtgacagtgtcatgattgcttgatgtaattagaattaaatgtactgactgtgtatatagttaattcgcccccataaaattagttgaaaatattcacatcttttctcatttcttgcttctttatgggtggcttttcataaaaatcagtagtgttttctctatgctgctgcaacatttgttcttggtgtcgttgttgtactgcagtttggtgaaatcatgagagaaccatttgctagatgcactaagcttcctagttgtaccttgacacaacctagtttgagaactatggatttttagttttacgtgacagaatagaatttagagctttgatgatttgtaagcaaggagtgcccaccactcatggtcttcataaattctatttatttaattccaagatatatgtcaagttgaagattcagattgtcaagttagttctgggtgtggactcatgcaaattaattaactaaataatcattatgaataaagattaatcagggcatggatcctttcttttacagaatatggtcatgctggagggagaaagatacaatgtgtttttaatataactagtggatcctacgtccaaattggcaggtccttgcctgataaaaaaaaaaattctctctctccaacagaaccatttcttgttattcaagaataggaggagtatccaaatcctaatatctgcataatgaatactgcatagataaatgtaaaaattagcacatgtttgaagatattggaggtaattgttaaaaggaatctcattatgaatatatttgagaatttggtcttttaagtgtgcccaatgacatgatgcgatccatatagttaataggattagacttttgttgttgtttaaggaaacaagcattctgtacatgcaaaaaatagaatcacttcaattttcaaagttgttgatggatgagttcatatttttataaacatccttttattcatgttatagaacttccagttaaataaacatctttaaaacttaatttatgcagaaagttatgcttgatgtatgttactctatctcagcactatctctagccaatgtgggactttaacatgcctctcttttagctcacggccacccaccataatgtgggacttcgacacaacttgttacgaatctaacaaacatgctagctcaaatgaaatgtagcagtttagctgcataattatatcaattatgataaacacctaaccacttggggaatcctcccttaaaatatagctgtcaaagggggaaccaaggcacttaagtactccgccatcccatactactcgatgtgggacttaggcatcctataatacccaagctcctatcataacattgcccctaagaaccaatgttccaatggttgcattctacaatgtttcactcagtctttctggtcaatcgcttcccttcgtaggacaatcagagacattgataatcagagctctgatacacctaattgtaagcactcaggcacttggggaacactcccctaaaggttagttatcaagggagaagaaccaagccacttaagtgcttcaccgagcattcagtactacaagatgtgggacttaggcacttgataatacccaagtccctatcaaattagtagtgtggaatgtttggcttcataattagataaattactagtgccaaatgatacaccatagaaatttcttctaatgataattttgtccatcatggtataatatcagtgtatttatgcattaaaatcattgacttgggtaaccatttcagaatattcccatctttgatttttgttctttctaatttcttgcttttttattgaaggctctagatatataaatgtacaaactagtgcatgtttgaggaaatgagcatgctatacatgcaaaaaacattactcgaattttccaaagttgttgatgtatgaattcgtttttataaacatccagttgttaccagttaaatgaacatcttcacaattttatttattgcagaaagttatgaggaattgctctgattgtgtgtgagctttgttattaagacaagtatcaagccttagtattggtatcttttgagtgagtaaactgccaaggtcaaatggatcctcagaccatagttagataaaaacacacaattgcacataatgtgagcatatcaagtgagaattgttctcgttatcatcagaactgtttgatttatatatgtagttttatatattagtgaatacctttagaaggttgtttttttattcttctctctgctgtagctgcctgacacagagagacagcctatatatactttatattttgtcctttgttctttaactttgtattaccctttcatatatttaaacaaatattcagctgagtgtgttctagagagaacactcaagcttttctcctcatacaaaatatcttaactaacaattaattttgacatgtaatttcatatggatcatccagattaaaattgactaaaccaatcttttcaattctacagttaagatttattattaaatgaatggcatacaatcaagataaatgatcaagattatatttaagtaaaacaatcttgatgggactaatctctccctaggtggattagtcccacactttgtgaagtctgcccagatggaaactcggttgctttgtggtttattttctatatatattgaactgttgaatttaaagtaagtctttatttattcaaagtttattttaattgaagttttcttgattgattgggggtgtcagcaacttatttttgtctataagttgattgccattattgattttttccattaccttccattttctacttctctatctcacttatgatgacttggcaaatctactttcaattgttcaacattcaacaatatggactgttttttttatctctatccaagtaaccctgtgattttacaattcaacagaaaacgaagggaatactcaatcgctaaaagaagaa

SEQ ID NO: 3216 - DNA, 4311 bp, Glycine max
  Intron number 5 from transcript Glyma12g03250.1 (locus Gly ma12g03250) derived from phytozome v7.0 (chr-ID Gm12; pos 2133432 to 2137742 reverse strand)
cttataagggtgtatctcccatcgactagttagaggtatggttaaaattacttgagattaattatgttggttgaagtgctttcttgttacacaatatatgtaataagtgataggtctagaaaaggttgtcattacttctattggtggggattttttttttaaatctttagtgtgttttaaataagtatatgggattaatattacaaaacgatagggaaattaataaaattgtcaatagaattgataggcatattatttggcattatttgtgcaaatttgttggcctgttaaaccagcatatcttgcatgattgtatggttgtaactgtgtaattatatccttaattagttagcccagctgtaggttaccatttatagttttttagtaaacttcaaggctagaaatcagattgtatcatattatttaaatgagaattctccaaacgagaacacacagtttttatcccaatttatctgagtttaacatgctatcagtctaggttttgatcccaacctagtttttttctttgctacgctcctagtcttcgagttcccagttctagtctcttgcatggtattgttcatgccacagtactgttcacggcacagtactgttcacatcacgatactgtttgcagtgcggttactattcaagttgatcctggttctgctcttgatttctccagtttcttgttttatctcctcttgcgatttttctcagcatcatgtctactgaaaaatatgatgtcctttttgttcgtcttaatggaaagaattactccacctgggcattccagttttgtcaaaggcaagtagctttgggttcatgttaacggaactaattctactcctaacaaaactacgcacaaggaggcacatgccaaatgggaggtcaaagatgcacaaattacgtggatcataggctttgttgagcctaatatcgtcctcaatctcaaacccttcaccacggctgcaaagatgtgggactatatgaagaatatttataaccaaaacaacactgctcgcaggttccagcttgaacatgaaattgccatttttcaacaggatagtctcttaatttctgatttctattgtcatttcatgaatctttgggctgaatatattgacattgtctataaagatttgtcaactgaaggacaaactgaagtccaaagcattcatgacaccacaaaacgagatcaatttcttatgaaattgagatctgattttgagggcattcaaaccaacctaatgaacagagctactgtcccttccttggatgaatgcctaaatgaattgtttcgtgaagaacaatgtttcctcactcaaacaaaaatggaacagcagaaatatgcctcccttcttgtggtgtatgcaatacaagacaaacctcaaggatgagacatgagtactgtctaatgtttctgctgcaaaagccatggaagttttgcttcccactatcctaacaagttctgcaattactgcaaaaaaggtcacatcataaaagaatgtcaaatcagaccaccacggagaaatgcaacagccttcactgtcactattggcttttctactactcctgtttcaggggatcagaatccgcctgcttttgtgccaactttaacccctgaaatggttcaacaaatgatcgtttcagcattttctgctttgggtctttccggtaaagcttctttacccaactatccttggtagtttgactctggcgcatccaattatatgaccaacaatgttgttgcccttaccaatgttacaaattactccggtaatttacaaatacacactgcagatggaaacaatttacctatcacaacaattggtgatattttttcatctcttaccaatgtatatgtttcccttgatctcaccagtaacccttcagttggtcaattagttgataatgattgcagagttgaattctccaaatctggttgtcttgtgcaggatcaacactaagggaagatgatcgcgaaggggtcttaagttggatgtctttttcctctttatttattgttgtcaccatgtttttttctgccttttatttcttgtaattcctaaactattaatttccaattatggcataagcgtcttggtcacccaaattcctccttgtttatgtggatgacattattgtcactggctcagatcaagaggctatcactacaatcaaacaattgctgcatacaactttccacatgaaagatcttggacagctcacttatttcttgggatttgaagtacaattccaacaaaaatgcatctttgtcactcgacacaaatatactcaggatctaattaagctaggtggtctcaccactgcaactacggtcgacactcctatggaagttaagacgggatgaaggtgaactcttacaagagacccaacattatacaaaaagttagttggaagtctcatctacctaaccattacaagacctgatatctcttttgttgtccacacagtcaacaaattcatgcaaaatcctagacacttgcatcttatagcaatacaacgaatcattaaatatttgttggccacttctagtcgtggtctcttctttcctacagatgcaacaatacaacttcaagcttacaatgatgctaattggactggatctcccaacacaaagaagtctactattggttggtgtatgtttttaggagatgcccctgtctcctggaaatgtaagaaacaggaatcagtctctaaatcctttattgaagcaaaatataggtccatgtctgtagcatgctctgagaatatttggttacggggtcttttttcaaaacttggttatttacaagcagcaccaactccattgtatgttgataatacaagtgtcatacagattgtagcaaatcttgtataccatgaaagaacaaagcacatagagatcgattgtcattcaattagggaagcctatgaccacaaaattatcactttgcctcatgtctcaacatctgttcaactagcagatgtctttaccaaatctttggcacgtcaatggcgtaattttttagtcagcaaattgatgcttgtagattcaccagcatcaatttgagggggggtgtcaatagaattgataggcagattatttggctttgtttgtgcagatttgttggccttttaaaccagcatatcttgcatggttgtttagctgtaactgtgtaattatatccttaattagttagtccagccgtaggttatcatttgtagatttttagcaaacttcaaggctagaaatcagattgtatcatattatttaaatgagaattctccagtggagaacacaccgtttttatcccaatttctctaagtttaacaaaaattcctcacagtttacaaactgtgtggaagtatgggaaatgatcaattgagtatgttaagaagaatgtgtcgccataaagaatgattgtgtacaaagagatataagtgtgacacttgtagaggaaaatcaaccaaaaattggttaatgtagtttggacatgtgcaaagaaggcaacgaaggcactggtaaggaaagtaaattttatccatgtgataagggatagataaatcgagaagaacattagaggaaattattaagagggatctcatggcgaatgataaacaagtccaactaatggcgtcatgtgatccatgtagactacttaccacctagtgggacaaggctattgttggtggtgttgggttttaaataaacttgattcaaaaacatggacatgaataccactgtacccaaatttaaggagttgtgagagaaaatgagacagtaagaaaaggtgctggagacatcaatgtgtaggaaatacaagtagagaaatgaaacaaaatataataaatggaaatatctgattaaatttacctcctttgccctttaaataggatagatggcacacaagatactttcatatgttttgttaaatagaataatttagaaagtggcaggtggtaaattaaaattggaccttagacatctgcaaaagactggctaaggcctatgtttattggaaaagctaaaacagaaggaaggggggattttgaatccaacattgtctgcccctccagtatttcgtttttatacttgatcaggaagagttacctttctctttgtttcattgtattcttctattgcatatgcatgtgcttttgtcaaggtcaagcaatagcttcctaatctcttttaacaagaaatatttattagtctcttgtttatcttcaatgcattctgttgaatggttgctcctttgccatgcaacaggctttccgtggaagctgtaaagaggagaacaggga

SEQ ID NO: 3217 - DNA, 2965 bp, Glycine max
  Intron number 9 from transcript Glyma10g18620.1 (locus Gly ma10g18620) derived from phytozome v7.0 (chr-ID Gm10; pos 22979787 to 22982751)
caatctacttcatctaaggtaacatttattttatattcatgacttcatgttacacgaatgtgataaagctagaacaatttacatgatttaaatcaacgagtgtactttatgcttatgttgtcttgagcattaaaaggtcttgctgtgtttatggatgatctgtaggttatgtcttcatatgcatctaatcaactatccacccaattgattagattatattacttcttcatgagattgtcttttctactctcccctaaagaatgatacttgtcactctttatgttaaatgatgtttaagcacgtgcattaaagtacaaggtgtttggtggagaatgtagaactgatcctagtttctgtctttttgatatgctctagcccagtgttgtcaatagcagatcgcggaaaaacgcgaaaagctgaaaatccgctatagaatatagcggatagcgtcgcagccaaatagcagaagtcacatagcggttgaaatagaatatatatataacaattaaatatgtataaaaaaaaggatgctatatgcaaataaaaataagctggacaaacattaacataatattatctcaaaagttaaattgttcaagacaaaatatgttcaagctcctctgccccttccccaatataataaaaaaaggctaaaaacagctaaaagctaattagctaaacaagtcctagtgaagcacataatcaaaataagctaaaagctaattagctaaacaagtcccaataaggcatataatcaaaaaagctaaaagcatcaagaaaacatggacggagaagggggagtattaaacaaaagaaagaaaaaaagttgttacctgtaaaaaaacaaaggcactggacgaagaaggctggaaagttttggtagggaagggtttacgtggtgagtggagactaagaatcagaggagagaagggttgaagggtttacattgtgactaagaatcagaggaaagggtttacatggtgactataaaatgatcctagaaactgaaaagttgcatgaagtagaagtagaaatgctaagaggttctagaatggtctgaaaaactgaaaagttgcatgaagtaaaaagaatagagtaaaatgctactgttgggcctattagaagaaaacccaagtccataagtaaaaagtaaaaagaatagagtaaaaacataaaatttgactctaatgttttataaaccaatagagtcaaattttaaaaacccacgtgactattgcatgtgagttttaacaaagccccaaacaactttgaagacgcgacctaaattcgcagttctctcttgactgttaaacttttggcaagcataccaatgtcgtcgcaggttacaaattttataaaagagatcatctccacaggatcttgagttactcagtttctctggataaaagtaaacagttcaatagttatgtacaatagatttaatcgaaatttcatggatttaacggaataacggtaaatagtggaaataacataaacgccgtaaatacgtgaaactacgaaaacaaataaaatggatttaattaatttaagagaagtgtaggattggatttcattgttcatatcttcagtatctaaataagattaatacatatgatcattttctaacatctatgatgcacacgttagatcaccccgaatcgatccttcgcattcgagaatcctaagaatatttatcgaatattgattcctcgcatatgaaataactattccagcattacaatcataatcttgtgttattcgcaatcaaaacgttatgctctattcctaacaacgtaacgtaaagagtgaattcattcagttcaaattctaatagtactttcttgtcaaacataaaattcgatttcatgaaactagtgatcaaataaaatcaagcattgcgagcagaatgaaatcaccaataatgagtagaaaaaattcatatatataaaatatcaaaatagataccttagggtacgaagattacatccaatcctgcggagaaactagctgctcttggtatggaacacaagatcaacagaagaaatgatgaaggatgtgatccacgatcactttcatgtcgatctttgcagctccagctccactttttctctcttctctctccttgtttgcgctattctctctggtttttctgcttccttttttcctctgctgcatggtttttatctttttgatccagaaggtgccagagcaactcgcccaggtgagttgcttccttcatgctgatgttatgtcactcgcccaggcgagttgataacttcttgttgaaggaatgtcactagctcaggcgagtgatggctagcccaggtgagttcaccctgaatctcttcataatgaccctcaacactcttcatcttggctctatttctggttccaacaaataaccatcaaaacataagaaatgcatggatgaatcttccatatttaaacaaaaacatttataaatgtacaatatataaaacaactagaataaaggaaagtttatgagaaaacaattataatcaaaagataagtgttatcattctaattccaaaaataactaaaatatgacacttatcactgacatggtttccattctttgggaatgatgaatcaatgaaccctaaacgcaatagccgtggtgcaatttctctccagagtccagattcaaccttgtcggaaatcgacgatgcaacagccatggcgcaatttctcttcaaagtccagattcaaccttgtcggaaaccgacgacacaacagccgcgacccaatgagattccgtgacgtgtaaggcgcccgcaattgcgatgagattcaaccttgttacgatcacaatattttagcttgttactccaccttacagaaaattttgttgataaaagtttgatataagatccattttggctttataacaattcatttcttctttgttaatatgattattttgtatttttttatgcagatcaac

SEQ ID NO: 3218 - DNA, 2059 bp, Glycine max
  Intron number 4 from transcript Glyma06g13200.1 (locus Gly ma06g13200) derived from phytozome v7.0 (chr-ID Gm06; pos 10359535 to 10361593)
ctagcaagtcatgtaagtttatgctgcaatctttttttttttcctttttcttgtgtacattactgagaataattttgtgttatattgctttctactaaatttattatttattttttcactttttttctgagatcattgattttttttctaaagcttaaatctttatgtattgtggatttattttgcctgatcactagattaaacaaggaaagtttgataggcacaaatatttgcccttgtggtgatatgatgtgtacacacacaacagcattatgacgacccccatgtgtgtatattctgcataattgagatgtagtttttttttccggggggtggggggattatgattctttgtgttatagtgggaaaacgtgattctgtgttttagttgtgtgcagatttgatacgcaacattttctttccgcctatcacaaagcacgagtttgtatgtgaatttaaaatacaacacaatttaatggttcagttgatgttctgtaatcacatgattccatattttgttagcatgtaataaaaaaaatattttgttaggattatgatctaatatctagtataagtatgggttagggctttatgtttggtgacaaatgtaacacatcatatcatggctaaaatctagagcttcactttatttccatggctaatctcccccccttccaattaattgcctctcttgctgctatgtttcatctccggttttctggtcacccattgccatgtcatcttgtcagtagtttctgccatcactagaggtggagcgagcttcatgcccccccccccaaacccccccaaaaaaaaaaaaagctttttaatatacgtacatatattaaaaatcatctaataatattttctataatattctttaaagttgtttttcttcaattgttaataatttcaagtctttgaacatagaacgacactttatttgaaggtaatattcagttattttctttattattattatttttgtagaccattttatgttaatattgtactttaaagtttttgcttttaataacatcagccttcatggttgattttcagcattaactatgtcattaatcaattgccctttcatattataaaagtttttttttttttgcattttttgaactcattttttctatgacttatatccttattctgtttaggcaaacttatacgctatgacttgaacctgggaattttcttacacaaaggatatctaataatatctacattttatcttagaattatttagaatattttagattatctctttggagtagtttttatacttcctaatatttcatgattggtctctattatctccttttcttccctctacaccctccctcacgcccagacacttttgggcttggtacgtggataatatggtgggtgacctgtttaatggatccaggtagggatgctcaaaaaaactagttttaaataaataactataactatatctagttttatacaactagttatataaaagtaggtataaaactataaccaattttatagttatgggtatttctaataacttattgttattcatccataactagttatgtatttgattttagatataatttagttacagttatgtaaatacccaaattatgagcacccttagatctatgatagactataataccatcttaaaatgaaccctaaaagttagctcataggatgagggttgccttccacttgtatactccatctttgccttatctctagtcaatgtgggagttgggtttttcccaatggcatacacatacttgtgtttgatgcttatggcaacactacatagtttttctgtgtccatgtgttcatgctgtaccttgtgtacatggtttatatgttgtttcaaactctcaggtccgcaccattttattttggttcccaatgttgcatatttagatttgatatcattgttgcattttttttctgtgcaaattatctgactaatgaaaatgatatcatctgcctctgattgctgatttacttgttgctcttaggttattggtgccttttggtacttgttttctataga

SEQ ID NO: 3219 - DNA, 378 bp, Glycine max
  Intron number 1 from transcript Glyma17g10370.1 (locus Gly ma17g10370) derived from phytozome v7.0 (chr-ID Gm17; pos 7765090 to 7765467 reverse strand)
accgaaaggagcttcggaagaaagaattgaaaagggtactcttcacttccttaacctacgccgctccattttctctttctcttttaatttgattttgtttctttgccaattgattttaagtgcaagtagatatgctacaaatttaaaataaataatgaaatagtgttgctaatagggtttttaactcaaggagctgtttcaatgaaatggacattttttttttttgcagtgatttctgttttccttaaagtatatgttttgttgtgtattgcttgtgttttgggataattcaactgatggtctgattctgtacacttccactttttttttttttggtgaacagaataagaaggaaagaaagaaggtgagggaggtggg

SEQ ID NO: 3220 - DNA, 2190 bp, Glycine max
  Intron number 2 from transcript Glyma10g00570.1 (locus Gly ma10g00570) derived from phytozome v7.0 (chr-ID Gm10; pos 326795 to 328984 reverse strand)
gtttcattgtcattgcccctcaggtcagtgcccattttacaccttaattaatgtaatagctgtttggttcagcatgtagcaattctgagaaaatcactctcgcaagcagattagtgttatttcaataagttgttttaattactttttcttttctttccccttggcttggccattgattgataagtgtttttcttttgttaattgtcaaaagcattagaaataggcaaaatacagattcgcaaggaagtgaataatgttttactgtatttttctactgttattttacactaaaaggattgaagtgaataatgttttgtgaagttagactcttacactttcaattttcaaggacttgaatgggggtttaatcgaattgagtgtatgcatttcagtaagttcatccctggcttggtctcttgtgataccttatcttttgaattccctactggacaaaagattttggattgttacttcttaaaaaaacatgatgatagtgagtaggttggtttatcttgtcattacttaattaatggagcataaacgcaggcctaagagagattaatcccttttatcagtaccatcatcaattatttgtttaccgcatgagtataatttaagtttctttttcttttagacacaaggatgaatatccaaagcatcataacagcactatagccctggaactttgaacacataattatgggaaatcattagaaagtaggcctgattgtgatgttgaggaagattcattgctaagatcttggtctttgcaaataaattggttttttctttcccttgatcctttcatacgttacacaactttcttcacagagattaaatatatgtggctaaccctttttggtgcaactaacccttatgtatagactaatttgaacacagttttttcacatgctcaaaagcatatcaaccatcgtcaaaactaaaaacccaagaccaataaaatttaagtggcacaagcaggagatgacttaccgtattttgtcatatattgtttttgcaatattaatcacagctgataatgatccaaaaatattacaattaaacataatagtaatagcacatatattaggccattgtctaacatatagttctgttgatcttttgcattgaacagattaggtcgtttccattagctagcttagttctctgttgacactcaattttactttcttcactgacggacaagcccttattttcttgttcttcttcatttgcttcacttatatttctaaggtcaattcacagcacttgaatttggcctagttaaattggcattcactgttatctaatagattttatatatttgcacaatgtaattgtgttcttgctcaataccaaaaatgttgaacaccttaaatatgcacaataagccagtgcgtacctttgaattacatggttccttgttcagaattccatttaatgcgtacacagaaatgatgagttctctcacaattctaatattttattcccactactgttttttatagtgtataatgatgactataagatttgaacaaaggacctcatgtaaattactcaaattctattacctgaaacaataaattgaaaaggagcctttgatcctttccgtgtaagcattatgtggaatttcaaatctagaggacatacttcaaaggcacatttttttttttttctgaatctgaaacacactaaaatgttgtcctcatgtgagttcttgttcaaaaccaaactaaatgtagaaagcatacaatctaaacaagtgaatacctttaatggacatgtctctggattcagaattacacgccaaatgtgtacctgataagggttactattgtttcaagaaaactcatctagagggaatactctcacaattgtgagtggattggaggactcaaattcactttacttggttaattgttaacccaacctacttattacagattgcttaacagcccctacgctgtaaaacaaaatcaattccaatcaatggcaccttgataaacaaaattttaacaatgtaatatggaatttattgtatcaagaaacattgagctttggtatggcatgctattgatttgattgttgctatataattacttgttgtcttccttttggtaaaatacaaggccaaattaaatcttgtttgcacttgacagttgtacacagtggctggacctgatacaagtg

SEQ ID NO: 3221 - DNA, 4433 bp, Glycine max
  Intron number 1 from transcript Glyma18g12590.1 (locus Gly ma18g12590) derived from phytozome v7.0 (chr-ID Gm18; pos 11748256 to 11752688)
ccaacaacaggttttaccaacacacaaacccttctttaaatttttctaacccccaaatcttgaaggttcttgataattagtttctccttgattttttgtttataaattattggcaaatgcttgttaatactcttaaaatgtgtccaacttgttataataactatatattgtgtattggaaatcttggtttaatttctaacgaggttaagatatgaccaggtctgatttttctgttcaaggtgacaatttcatttctttccaaactttataattttgtcccttttggttgtttattattattgattttactttcctttatgacctttgtagtatatatatatatatatatatatatatatatatatatatatatatatatatatatatcgtttatctcacacaccttactcaattttatttttgttacccaactgtttgtttgaaaggttggagatctgtgtggtgagagatagaaataggtgtcaaggtgatactaggagtagcacttaatagatgaagaagaggaacagctttgaatagggttacaaagatttgaaagtcagagatcttagcttgtttgtgtatattctcccatgctcttaagctttttacagtccttttcctttctctctctctttccctcaatatgtcaaccacaaaacctacaaaagtctgccacataaagctgtcatgcactcattgatcatcttctcttctcttctcttccatgatcatcactttttcttgatactcctaattaaattgtcagctgataaaaattccaagttatctagggtttcagaattttcgttagatacacacccaaatctgtttatgtccaagactttagtgcagtcaaatcgggaatatataaatataatatatctaccaatttagtagccccaatttgaaaaaggaaataataaaaaaaatatcttgaattcatcactttacaaggtagtaatgaacatatcaaaatccaaaattagggtttctggggtcaaagatttcagattcctcttatagttgaaacagggttttctcatcattctgtcgtaaattaaattgtttgtagatgttcatgaaagtctaaaattcgttccccacttttcataaattttgtccttacactatagtgaaggaaaacatgctgcagttagggtttcccagcccgtgtggtattatcagtgtcaataactctatgcttccacaagaaatttctggcagaggtgtttttgaaacattcatggaattaggtgcatggttactttttctataagaatatctgcaggagtaaagttttggagagagtaggaaagaggaagaaaatttttttgtttctaataaatatttttatttaataattttgaaataaaaacaaaatgataaattaatataaaattaatttcataatcttctgtttatttttataaatattatataattactcttaattttaattttttttcccgctctttctttttcccttcaaagtcccatccccaaacatgtatattctagatgccttaggttaattaacttaagctagacgaaagcctctgtacgtggatatttgaacagactcaagtcatattttatgaataaattataaatgaagataatattattctattaggtaaaactacatgctaatttcttttttatttattttttgttgaaatataatacaagtctattttcctaacaaagaaggattacaaaaataagattcactggtcacgtgaagtattatttcttagttcttcactaaggacaacagagcatagttagtggcatttattcttctgcaggtccttcagttcatttttttatatataattttaagttaattttctttcccatttctttgaatttcttttaaaaaaatagtatccaaaagaagttatatattatggtgttgtgatcttattctccctggatcgtttgtttttttacccagagttgctaaaagtaacagcatgatatcagattctatgaacggctaaaagaaaagcacccctctctctttcatcttttttaatttctttcatctttgaggaaataaagcttctacacccttgacgtcaattttctacctactctcgtcaattatgtgttggaaatttcaataaaaaagggaaagttacatttacattatggccagatgatcataggttaattggcttcttcgtactcattgcattaactatttgtattcgaagtttgaactttaagtaattcagagagaaattgagagagagattttatatacattctttagaatattttaaagaatatgagagtttgtataaaacaaattcagcttctgcgggtttgtgtccttagaaatattagtgacaaagaaaggtgtaagaagagagaaaaaaaacagagtacggtccaatgagaagttctgagttgatgacattcatttctttggtttccaaagttcactgacaaagaaactagaactacacgagcaatttgcaaagggttttaattttaagggaatctaggtgtaagaaataaagatataataagggaatctaggttattacaccatgtgtaatgaggcagtggtgacacgttttctgaacttaggaagtgttattatatttgagccaatgacactgttggatcatgtgccagcttggcagggacagccaaccagggcctcgacaatattaaggttgagatatatcagtttttttttttaatcagcaaatataatatcagtaagtttttgagagataaataattatgttactcaaaattataacaattataatatattttaattatattattgtgataatgatgatggatcgtttgtggcatatatgtaaggtttattcttgatcatcatattaattttcatgtcaatttctttatcttgttaataattattttaagagcaataattaagaaattaaaagtaaaaaaaaatgttgttacaaaagtattgtaatatttttttagtatttttttattaatttttataaatgcacacacccttgaattattgtctttagcaaaataatttttatttttatggattgtgagttttatggaggatttacatatgaaattttttagtggaagaaagaactggattgataccgaagtatatgatttcttgagcgtttaaatggattgataccgaagtatatgatttcttgagcgtttaaatgaaaacttttattcatgtcacaagagttaattgcaaatgtgatagaagatataaaaaaaaggcatttcctgccaacataactatttctagctccactcatactttgtacttaaaataaaaattttaaatcatccctattttttaaatacttgttatatatactacatccaccattttttttaatcttaattctctaatttataagagaaaaaagatcttgactaatttgggatttaattaaaagataaataaaatataacaaaagaatattttcactaaaaattaaactcagatattatcttaataattcaattttaacttcaacatatttgtgtctaatcaattggtttatatccattttcgttttgaaaccttacttttcatggttgcttctatttattaatttctttgatttttaccactgacaggatgacctcgtaaagaaaaaagtattgtttagactttgaactgcaccatatatataatagatcaaccacaattagtgaacaatatatatattgagaagggaaattatacagggacacccatgcataatgctaattgttacctatagagaaagataaaagaagaaaaaatttataactcttaagaatatttccaaatgtatgtcgatcatcttccatgtgttaatgatagattcaatttaccagattacagttggtaacttaagttatgttttcattacagtcatttttctgttggaaggtgcatgcttaacatacttttgaagaaggaattcttttgtattttttatttattattttgaaggtacttttgaaaacgggttaatccaaacatacacattaatcatcatatgcaagacatgtataatttaatttgtgtgttcaggtgatcttgatgcattttgtaatgataaatagtgtgcatgtgaaggagataaaagatgagttagataattaagaaaaaatgataaaaaaagattaaggatttaatttttttttctaacaaaactaacattctaatcaactaaacatttgttgtatgtatctgggtttcaaaagttttaaacctgcaatatttcaatctcagttttgttagggttctacacttatatatgtcagtaaactttgtacttatctcaatgtttgttcttagatttctggcatggatcccactaatcccacactagcttttaaacagtttcctgaattgtttgtactttgcagtgttagggccaccattgaaaggtacaagaaggcaa

SEQ ID NO: 3222 - DNA, 2196 bp, Glycine max
  Intron number 1 from transcript Glyma20g33200.1 (locus Gly ma20g33200) derived from phytozome v7.0 (chr-ID Gm20; pos 41808268 to 41810463)
ccagaattggcgtccgcgcgccaaggatagctctcgtgagttctcgttccctcattcattgtgttactgatgaatggatttagttgttttgttatgatcttggtaaattattgaggttagatgtttagttaataatgcgagataaatgcagtgtgttttatttgaaggatccgtttcaattgtgaaaggagaaccgtgcaatgattgtgtttgtttgtttcttgcaatgttgtttagtcaatgcagtgaaggcttttttactgttagttatgacttatgacaatgccaaggcgttcttaattgttttaacgggattctgtttgattagttgattgtaggatatttcttattatggaggcatttttgttatgacgggagaattttgcatttcattcccaattaccaaattctggactctttgttggtccttgagcttaagtaacttgttcttttcccaaggtttttagataaaattctcccttttgattaaggctaagttgaacggaatgtcaataatcttgaaatatctatggtggcttagatgcattcctgatctgatttttgcttcagaagtttaccgtcaggaaataacagactgcaccaggccagagtgaactccccctggactgcatgtattaaggttattttttgtatgttataccttaaataaatttaaaatgctatttttacattgtataagaaaaaggtgagtagccaatggttgggggaaatcagtacttttggcatttccccccacctgattcctatagtatgaataaagatcgcatgaattcttggtgcagcaatgcatgcacaaatgaaattcttagaatttgaacttaggatctaactgaactccacaaaatcggcttacataatggacaaaaattctacaccctttaatttccatatagcttattattagaatttatcatttcatagttgctacacttattgtttggaactttttatgtaaatctaaatgtttgacaaagttttttttttttttggaacgcaaaaatatatatatatattgattagaaaagtaccagaggtactatgagatacaagtagctagtctgaaaacagaaaacaaacaaccaccctacaaaaacaacaccctactaggggtcacactagctaaaagctagagacattcctgaagaccagcagtggaaatgagtcttgaaatctttttccaaacccctcagccaagtccataaaaggaataagatactatctgtcaacttagagatgtcaaaggattgattgtggaatatcatatcattcctgagtctccaaattgagattgtagctgctacccaccacattttccatctattgatagaagcctttgaaactgctaaagaatagtgttggaggaagttatctataggcctgcagtggataaccttgagattggaggaagttatctatagaaactgctaaatgtttgacaaagtagtgagggcttacttcactgaattggtggtccttgtaaatttgtaatatagcatgctacaaactcctaattctaagttattaaaatagggtgattacaaaagtaatggaggataaagaaactctgttcttctactgacattggataggcatgtctacttctatgtagtaattcccaagcagaagtgcaaaatttatccagttttcttaatttcatatggatcatgcatttgctatgcaaatcttttagcctctctgctattcaaacaaaaaagagatgaaagtcatgaaaccatacaagttacaacttgtactttgagcaagaatccctgtctaagaactttgataattaacttcatgattatgggctgtttctttggttttgagtaacgagcattgcctcaaagaagagattcttagcttttcaacagcatatgtggaatagcaatatttcttgtttgtggccctgaactcaaccttgtagcccttgggccaaaaaggttgacccaagaggtgtggctagtcatttgggcctcatattttttttaaaaaggaaaaaaagaagagctgattatattaacttctgtgcacttaattgggttctcactcatcaaatatctcataattcaatcagcatagtatcctgcatggaaaacatcttgttaaattttgttacgattacatgctcttaatatgtttatctgtgcttttttcgcctctcagatattagggcac

SEQ ID NO: 3223 - DNA, 522 bp, Glycine max
  Intron number 1 from transcript Glyma11g27450.1 (locus Gly ma11g27450) derived from phytozome v7.0 (chr-ID Gm11; pos 27168931 to 27169452 reverse strand)
gtacaccagttcgatggaaaaccaccttaaattaggagaacaaaataaaagaaattatgatttggacccttgcaacaatgcttaagtgtccatgttttgtatctcttttttaattatgtccaatacattactaatatttgtgacacattttttccgtgttttaaacatcaaagaatccaaaaaaaaatatgtcgtgcaccagttccatggacaacaaccttaaatcaggagaacaaaataaaaaaattaagatttggacccttgcaacaatgcttaagtgcccatgttctgcatttttttttaaattatgtccaatacattactaatattcgtgacacattttttttgtagtttaaacatcaaagaatccaaaaacaaaatatatcgtgcaccagtttcatggacaacaacctcaaattaagagaacaaaatcaaaaaaattatgatttggacccttacaacaatgcttaagtgttcatgttctacattttattgtctagttagagaaactagacctgcata

SEQ ID NO: 3224 - DNA, 585 bp, Glycine max
  Intron number 14 from transcript Glyma17g13080.3 (locus Gl yma17g13080) derived from phytozome v7.0 (chr-ID Gm17; pos 10008742 to 10009326 reverse strand)
tgggtaaggataaaattgtggtagactggtaggggggcagccagttgattctgtggagttgttattgtgatatagtattttgccaccctatgagaggcactgcatatgttcaattatttaggtcctctttctgggtttatgtatacaactagtttacttatcatatggtaagaactttaggaggaccacataatgaaatctagttattgtaattgaagacctcctatggccaccacaaaccccacaccagaagcccatacttccaatctatctgtttctaagtgttccttttaagttgtgcatcgtaccactatttcttgaaccttttttcattcaattgaggaaacaggaaggcttgattacataaaacatgctatgatgcaatgttttgtaatcatgctcaatcatgctctttaaccttttttattctctcttcttggcttttttttagaaacaaatcatgctcattcatttgtgatggtgtttgtattttgtacctttcactatcatagtcttttgtagttatttattgattctagacatttggcttcttcttttagatcaatcaattagagaaggacaaag

SEQ ID NO: 3225 - DNA, 864 bp, Glycine max
  Intron number 6 from transcript Glyma03g22710.1 (locus Gly ma03g22710) derived from phytozome v7.0 (chr-ID Gm03; pos 29127398 to 29128261 reverse strand)
tatttactggtatttaccataactatttttggtaggttagtagcattatatttgtagacttggctgtttccacgggcttcacttatgccacaacgaagtttgctactcaacgaaggactggatactagttcaccaagtccttcaatttcttaggaaggtgttcctccaaattttattgtttttatttcacaatctgatgatttcagttttccttgtagttaaatctgttggtcaattaaattgtgacaatcatgcttaaatgtttgtagtggttgattgaacatccaaattttttatcaactgatgtttacattggtggcaattcatactctggcattactattccaacaattgttcaagaaatttctctaggtaaaagactcgtatgtgattcaacatgtactgcaaaattagaatgacaaacatatgaacaagttggctagtaactatatgaaccactattaatcatgctaattggtaatggaggcttgtacctggtaactattttgttccacaaatttatttgtgcttactagtgtcttgtctgttttgggatatttttatccttttaaaaaccatttctagtgcatcaaaatttacttttgatgataatatttatattctttcgattgtatgatctgatagctttatatagcctatccaatatacatgtgcttcagcattaggctttgtatctatgcaaacattaatgttgagtcatcactcatttgagcaacctagtgttttcacagcttaaagcaacatattgctttgaagcatgtatgcttattttatgtgttgtaaatctatggttagatttatggtcttatctttattgcatttgtcctgtaggtggtaaagata

SEQ ID NO: 3226 - DNA, 2921 bp, Glycine max
  Intron number 6 from transcript Glyma17g11350.1 (locus Gly ma17g11350) derived from phytozome v7.0 (chr-ID Gm17; pos 8520492 to 8523412 reverse strand)
caaggtttaaatgcttgatactgatgtcataagaatcttgttctgttgcatcatattgtggtagtgttagacatacattccagtattttgtatataaggagatacgttagtttgcgcattttctttcatatatgttcaggacgttagattcttattaatttatgacctgccctttatgctcgtacctctgctctggtgtaactcagcagattattgaagtctttggaatatgctaaagtggcttcccttgctgggtcgcgatgagatcttgactgatcagtttgctgctttagtctgattgaagaaatttgacccatcaaaagtactaaaatatatggtggtgtgatattttagaataactgtttgtctaaaggatggctttatatctgttaaccaggcacagattgactggttggctgtgccaaaagtttactttggcatcatgtgattgtgaatttttgatgacataagtgaaagtttatatatacaaaaggagatagtcatacgttagttagaacatagaaatttatagcattggattttggtggaaaattagggattgcaaatgtgttgagatgtgtgtcatgaacacaaaacagtgaataatggggattcctttgaagatgagtcgttgacttgcagatgttgatgcacacccacaaaaactaaggacagaaactgtcacctatgaattgtaggactggatttgcaaataaggttatttattaggtttgagttggtaggcactgagcatattaggctggatttaaaatttagcctgcagctttgcactaacttatgtgactacaaaaagttaaaggctcttgtgcagttaagctgtcttcttttatcattctgcaaattggattgtagttcttgtacatacattgttgagattttctcacaatacatctcacatacagtttgtctcattggaaaaatgaagtttatcatttaaaattatgtcgttctcccttggccctgttttatttgcttttctcttattgacatttatgatgctctcatgttttctgattctgttcccttgctagttgccgtgtatggatatttttatcatcttgggggtgggtgcataaattgtgttgataccatatgccactagcacatttgcatgttccattagtatttaaaaagctacattttgtgatttttatttttttggaaataacctaagttgttcttctttgtacccaaagcttatttcatacttgaagacattgggggtggaaatgcccatattattttaatgtttgaaccttattctgaaaatcggttctagattttaatctgctaggtctatttcagtttgtgttttgcctcacaaagcaaagggttcttgttctctttcagtattaagtttgaaacccaacctacactatcaggatttaatcatgggatggtcaaatgaatttattttctctttgttttagctccatctctttttcttgcctcacttttttaattataattttatttgatgctttctttctttgttgactctgtctttcttttaaattgttactgcaattcatgtcaacttgttatattggttaatttttgtacgaacttgaagatcaaagattcgtcttggatcttttggcagtgcactaaagatcttttggatgcttaatgattgattgtcttcacttttcagggaatcaatgtgaaggaaaaatctataaaatctagattatgttatctgagatgttgctgcccctaaatagagactgaaattttatacttacatgagtttctgttgctacagtttatgaaacatgattaaatgctgaagattctaccagttgatacttgataggattatcagatgttacccaggattcctatattatgagaagtagattatggaaatttatatttttcttcaattatttgcaatatttgtctctagtgtttttggtggtgattatgttactgaaatctagatcaaagcttcttttatgcttataggaatcaataaggttgtggtattatacaaaaattacaagaggtccaactgtagatgctactctagatcttccaacaagcaacagataaaattaggcttttttgtatctgttatatgctttatttctctctttcccattgagcttgctaccctgttctttttttagggcattttcaatttactcttgactagggtagcaacttatttagtgtcttggagcttccttattctacacaaagatttggccatttgaatctttgtaatgttgcctcctttgttatcccaccataattaagtttgactagtttagctattataaacctaccaactcttcattcccagttttcttggtcagatgtgccaggcaattgacaacacaagttaggggtgtttgtagtctagtttagatccatagtaaggcataaaagccaattaaaaccattcagtttctgtaataggagaactaattggcttaattcaatttgtaaaaccgaatcaatccccatcgagttaaatttaagaaaacaagaatagtttacctgagcccttcagaacagaaaagcacacaaaaatcaggataaaacaacaacaaagcagatgacaacaacaaaacatgactactgtgccaaactactgatctatcaacaaaataatgtcaaaaggtcttatactggctgttccatcaatttgaattagatttgaacacccaatcacttaatgatttagaatttgctccatttttgcaacatcaagcaccatagttttctttccttaattttctgctaaatgattttcaatcatcaatacttgctttctggtcagcacaactctactcgtagcatggagcaattgatgattaattgatccttcagtagtttcttttacacttttgcatctgatatcaggttggcgacttgggtctgtccaaagtaaa

SEQ ID NO: 3227 - DNA, 609 bp, Glycine max
  Intron number 6 from transcript Glyma18g01030.1 (locus Gly ma18g01030) derived from phytozome v7.0 (chr-ID Gm18; pos 509798 to 510406 reverse strand)
ctatctgtaaagcttgtttgcattttgagttaactgtagatataatttaattatatctaaataaatgatttagattgatgtcaatttaaactgatttagtaatttatttgcatttgtttttctgcttgtttgccttatattgtttgatgactgcaggtttctatcaaagtactgccacactatggttggctctttggctgcctatgatatggcagtaaaaattgatttttgtagttgctaactaggtttgtattggccaactttgtattctcaataattattttccttctgttactcggatcatatgtactgaggctgacctgctaaatgttgatgatgtagataacaagctattctgtccttttaactactcgtcttatatttctagcttgccatatttttggacgttgaaaaatgatgaaagtagccttatgggattaagttgtttgaaaaatttactcgtgattattttgtatgagattatatgtattcaataatctataacgaagaatattattttttataattgatgcatgtctactttagtctatttatagaataatttgccattgtttggctcatttcaggaatctaaaaggcagaagagca

SEQ ID NO: 3228 - DNA, 6167 bp, Glycine max
  Intron number 2 from transcript Glyma15g13700.1 (locus Gly ma15g13700) derived from phytozome v7.0 (chr-ID Gm15; pos 10308548 to 10314714 reverse strand)
gaacttgcaagacctgcctcaagtaatcttatgatatttcatgtgataatatatattaatgaggtgtttacaactgagaatattattgatgactcatacaaagtagtgacattctattgacctgttctgataagtgtgaatgattggtcctgtatattatacaaatgttttaaccattagttcttgtaatgagttatgcatttgtgcagttttaccttattggagtatacttactcaacactgtattttcttttttagctaagtcagtaagtctaaccattgttagtaggtagactactggtagttagttggtagttaggacagctgtgttacagctgtcactaactaacttaggttagttgacagctacataactgtaactgttatataaacagtgttctaaactgttttcagttggcttgaattcctcaatacaaatctcttattccttctctcttctctctaaattcctttatggtatacagagctaggtcgatcctaagctaattttcatggcttccgcgttacataacactactggtggttcgccacctcctcctcctcctttacaacctctggtggtatcgtcttctttggcttcattctcgcactccatttccgagaagcttacgacttccaactatcttctatggtgcagtcaagtgcaaccagttgttaaaggtcatggtttatctcattttcttgttgctccgatcattccgctgcgatttctgactattgccgatcgtgatgcaggcatagtgtcgccggagtatctcagctggaagaagcaagatcagcttcttctttcctgatctgttctccctcgtcttgtaggatgcactacgtggcatctatgggagaaacttcactcacatttccattcgattgctcgcgcgaggaagtgtcaacttcgaacggagctttgaaacctctctcttgacaattgcaaaatcactgactatctccttcatattcagacactgtttgatgcacttacttccattgtgattctgttttgcaaagcagcaagtggatatcattcttgaaggattaccgatggaatatgagtccatggtatcctatatctacaacaaatccaagcctatgtctgtggacgatgttgaattgctttgtcttgctcgtgaatcgcgacttggcaaacttagtaagaagtctctaggtgctgtaaatcttattgagtgtaaccctaattctacccccaattttcagtcttagatcagtgctggagttaattctgatcctcaatcacatccaactcaagtttctaatgatgctgctgacaattacaacaattctggtaacaattccggcaaaggtggtggccaaaatttattttgtggctgctgtggtggaggttgcggccatggtggggtcacggaaaatttgcagatgttcagtgtcaagtctgccataaatttggtcatgaagcatccttttgttattataggtatgatgaaaattatgttgcttcacaacctatgaattacaccaataatcagacatcaactcagccttcacatccttataatcaaacacctacccaagcctcacagtggtcttctgccacttcatcatcctctaatcaaatcctaaacagtacctatccaccacgaccacgttttaatccctataacccttttcccttatccacctcaatacatgtcacctcagtacttttatcctccacctcaatatcagtctcagcccatgaaccctacctcatcatcaccatctccacaggccccgtgttgctagtgttcaacctgtgcagtttgcaaactggtatcctgattctggtgactaacgtgtcacaaaatattcagcaagctaccccctttgaaggtccagatcaaatcaccataagcaatggtcagggcttgaacattaatgcctcaggtgtttcatctttccactctccctttaactcaaacattcctcttactcttaagaatcttttatttgtgcattctgtcactaaaaatcttcttagtgtcagtcaattctgcaaagacaacagttttcattgaatttcattcttcctattgtgtggttaaatctcaggtttctaaataagttctccttcatggactggtgggtcatgatgggctacaccattctcctgacttgcttcagtcttcaagacaatcttcttcatcaagtgattttgtgcaatctagctcttcttttgtaaataggaagaataatgtttcatttgtaaatgctgtttctacttgtaaagattcccgtgccatttggcattctagacatggtcattcaagtactgaagttctgaaacttgtactcaaattgtataatattccactcatcaataaaacgagtttagttttttgtttatcttgttgtgttggtaggtctcacagattgccttcttctccttctcttactgtttactcttgttgggaaaagctcaagtcctacatctgctagagataaggtcaagataaaatatataagtggggggacaaccgtcaccctatgagctagcttttggggttgagtttgacccaaccgcgcattctaagatctctaaaccatttaagttagtttatacttggatgtatctgttgaaaatgctaagtctcggtgtgtctttctcctttgcttcctactccttttagacaagccctgggcctgaattgcgctctaaacgagctgtccacatactcatcaccaaaacggagttgtggaaagaaagcacaaacatatagttgaaatggctcttactatgctttctcaagctatttacctctagattattgggatcatgctgttgtttcaagtgtttacttgatcaacaggcttccttcatctgccattaagaatgaagttccttctcaaaagctttttgactagctgtcagattacaagtatctcagagtctttggaagttcttgttttcctttactcagaccctataaccaacacaagtttcagcccagatctcaggaatgtgtcttcctaggatattccttatgtcataaaggctagaagtgtctctcatctgatgccagaatctatatttctaaagatgttatattcttcaatgaggctaagtttccctacactcaactctttgctgagccagttacttcttcaacacaagcatcaaatagcaccctgtctgttctgccttctgttttgaatcatgtggttcctgctatgtctcagcctccagggactaattccacacatgcagtttcatcttcttcgggaactaattccacaaatgaagtttcatcttcatcaattagtcctgaaccagcagcaactagtcctgaaccagtagcaactctaccagctgatcacttaccatcgcctcaaccagaggtaacttccaatcctgtgatttctgctccagcactccctacttcagtgcactctactgcagaatcacctcctttgctagtcagacctgataatattcactcaatgtgtacaaggacaaaagctggtattatacatcccaggctgtaaccaactttacttctcactcctgctgaacctaagtccactaagtcagctctatcaaatcctacttggcatgcagctatgaaggcagaatatgatgttcttcttcataaaaacacttggaaacttgttgatctcccttcctcaaggtctcctattggttgcaaatgggtctttagggtcaaggaaaaccctgagggtacagtcagcaagtataaagataggcttgttgctaaaggctttcatcaaagacttggttatgattacaatgagaccttctcacctgtaatcaaaccagttacagtcagaattcttttgaaacttgctgttactaacaagtggaaacttcagcaactagatgtcaacaatgcttttctaaacggcattcttgaagaagaagtctacatgactcaacctcatggaatttgaggactccaacaaacatctggtttgcaaactaaataaagctatttatggtctaaaacaagcccctagagctcggtttgagaaactcagaaataccctttttacctacaatttcaaatccggcaagtgtgatcgtcccttgtttgtgtattcagacactagtactgtggtttatatgctggtctatgtagatgatattattgtcacatgcaataatcatacctttattaaatctctggtttctgaactcaattctgagttctccatcaaagatttgggtgatcttgactactttctgggaattgaagtcagctctcaacctaatggatctcttctacttattcagtccaagtacattcaggatttattggtaaagactactatgaatgaggctaattctatctcttctcctatggttggtggctgcaaactaactcaaacagggtatgaatctttttcagacccctctctctatagatcagttgtggtgctcttcagtatgctacaataacaaggccagagattagtttttctgtcgacaaaatctgccagtttatgagtaaacctactgaacagcattggatggcagtgaagaggatacttaggtatctcaaagggactatcaattttggattagctatgcagcctaatttctctgtctctcactattctgttcatgcctattgtgatgctgactgggcatcagatcttgatgatagaaggtccaccttaggtgcagcaattttcctagggcccaatttggtctattggtggtccaaaaagcaatcagtagtggctaggtccagtactgaagctgaataccaaagtttagccctgaccacagctgaagtaacatggattcaatctcttttggctgagctcaaagtacctcatgctcctcctgttatcttttgtgacaacctgagcacagttgtcttagttcacaatcctgttccagaaccatacacataaaactggacttgttttttgttcatgagaaggttattgaaaaacaagttcaagtggttcgtgtccgtgctgccgatcaaagggcagacatcctcactaaagctctcataccctccaacttcactgcttacaggttcaagctcagagtggctgtaaagatttctaccaacccctcatgagcttgcagggggtattggaatatacttactcaacactgtattttcttttttagctaagtcagtaagtctaaccatttttagtaattagactgctggtagttagttattagttagttgttagttaggacagctgtgttacagctgtcactaactatcttaggttagttgaaagttacataactgtaactgttatataaacagagttgtaaactgtttttagttgggttgaattcctcaatacaaatctcttattccttctctcttctctctaatttcctttatacctggtctatttacaactcattgctaaactccatgctcccagatgagcttttgttttgagtaatgctatgcagccaataaaaaagagctgtagttttgaagaattcagctagattcaagggaaattgttagataagagcttgaggattcattccaactctttttttcccatataatatctcattgaagagcttgaggaagaagattttactaacactcctcttaggttgcattttcctgtagctttctgatatttttttaatgctttatgttcatgtaagcttcaaggggtatcagaaaatgactattgactagatggttatgaatggcaactttatctggttaaggactgcatactttatcagtaaatattctctctggcatggacttttaaggaacttttttatggaggggttcagagttcggagggaacaggaagggagagtttattttcatttttgtaaatggagaaagttatttaatatttataaaagacgaatggggatgattggaaaactacatataatatctcattttactccttttcttttttaaaataaaaaactcaaataggagagtacttacttaaaacagaacgtttaccctcacttcccttcatccaaacatgccctaaaaagtttgaacttatctgtagaagctttaatgttctttagaatgcctatgaagtgtaactgggggatattgaagaattaatttcatttgtttttctttagaagttgagtgattggaaggtcttttacaggtagaagaaaattgaaagatttattgcttcagagt

SEQ ID NO: 3229 - DNA, 1354 bp, Glycine max
  Intron number 3 from transcript Glyma01g21710.1 (locus Gly ma01g21710) derived from phytozome v7.0 (chr-ID Gm01; pos 27131974 to 27133327 reverse strand)
agggatttaagtggtacttatagacgacctaccaatgaaggattgccatatgaaatcaaaccccatgcctttttgttaatgctatttgatcctaccagttgagccaatcctcaaatccttaatggtagtcattacaagttttcttagctcaaaagaatatttaaaacaaaagccatggcaataattggtttctaatcatgctgtaaaagcaaaacgttgtcaagcatattgtttataatttatacttgcatatgaaaaaggagattataatatttactgctgcacaaaaatataaatattattaaataaccaagcaacaagatgtatattcttagaaaaggtcctcttgaaccataggcaactggtagcaccctttattttttcattgacggcaattgaaggtttgttatgcagaagaccatttaaaagagaaggtgttaaaaatatcctcctaaccgtggcacaaaaagaaaaagaagtaaaaagaagtgtgctgtttatgctgtcgtttggtgtatttagtcggagcagaatgaccacttattattagggttgaccttttgtccttgttatggtttagattctatttgcctgattgttgcttaagatcatggttgttccaacaaggttgctgttactaagatgtagagacattggtcagccttgttacattcttaagttttttgtctttgttttatgttgtcttttttcatttggaggatttcttatcctcacctgggatgtattttcttcaagttctctaataaaatttccttttcctacaaaaatatttaccattataataaggctctttgatagaggccatagcagaatatcaaaggaaggtcaagacaatcctgccctacaagaagtcttgagatagggtagaacacttaaaatatccaaacattctttgcaatcaaatacaccaataggtagcatgtgggcataaagtcatcctccttatttctgccgaaagcccaacagaaactgctgtaactctgacaagtgacaagactgaattcaccaaaaattcaaaaatccgaatcatctttttctgaatgaaagtggctgctatgctaaataggtaaaggtgtctgatcaagtaccaaagagtaggacaatatatttattagtcttgtacttgtaaaaatattttgggaattggaattcaacagaaatcttagctcatcatagctaattttgttcctcacctgcttaggactttggaattcaatacaaaacatgcattgaccattatgcctaaatgctccatttttttatatgtaaatttcagtttactgtcatagatgatataaagcacttcttttaatctattgtggtatttgtgcag

SEQ ID NO: 3230 - DNA, 1996 bp, Glycine max
  Intron number 2 from transcript Glyma13g05240.1 (locus Gly ma13g05240) derived from phytozome v7.0 (chr-ID Gm13; pos 5467767 to 5469762)
attctcccaaggcatacacagtaagtcataaaatatatataaacattttccttcaatatgttcattttgaatgatctgtttacaattactttttctgatttcttttgttgtgagcttttcaataatatataatgctcttcatcttgaattgattcacacacgatcttttcctccgatggcagagttttgttctgagacaatattatgttctgtattgtgcttttaatttatttatcgattttcttaataacgtaagaattaattaagattagggagataaattaaatagaaagtttttataaaaaaataatatctttaatgtataagaaaacatctttcagtggtttttatatgataaaaattataaataaaaagtatttatcatatcaatattttttaagactgccaacaattttaccagaaataggtttattggttgctagcttgtcgaatgattattatatgctacatgcaaaatctaaattaaaagtaaaagatatacaatttttcttaagtagcatcttgaatttgaattttacgcataaaaaattcacttaaaatcaatttcaccttgtcgtatatacgatcgataaatataaaagggggacaaaaagtcaaagtgactaaacattaatggacttttggataagaataatttaaactttattcataaatgtgaaaaatatagtttttaagtctgatctagatccatacattgaggaaaaaagtacatgttcagtcaacacgttggaataatttattcaataagaagtttcttaaatttgaagcagtcaatacgaaattaatattgataaataataaattaaaaatgacttaaaaaattgaatttctctttcttcttttataacattaaataaaataaaaatggatgtacacctactaaatagataggatagttcactggggccagcttaataatgagaatattaagataatgtgcatgagatgttaattttaattcttttgctacgttactgtacatctagaaaaaaagaaattaattagtgtgctaatttaaattaacttcagttttgaaagaataaaccttattctattatgtaaaaaaaaaccttattctgttaagattaatttaacttgagtattagtgcatgaacgtctgagaacaagtgtaaagcatgaaccaaaaagagattatgtgcaccgatggcgcaatcagtttttttatttttatttttttctttatttgctgaattgcaatcagtttgaatatcaatggttatttgatttttttttatttacataatgctctactgtaatacggacatgatgaaagtataaggtataatgattttaatttgatgtttagatatcaaagatatatattaagctattagggttaggttgaaagtttattttttcataaattattagtgcaagtttttttacgcaatcaacaaattaaaaattaccttatttatgatttttgaaatagttatttaaaaaatcaacattcttatcatacatggcaatctataattagatagcaaggtaaattttttacactttaatgcatttaaattaaattctttaggttaatgataaggcttaagagttttgaatattttacatgtatataataaagtcatagataagttactttattatcactttaaaaaataatgacaacgttgtagtggtgagcatgcatgattaattaataggaggcaaatataatgaaaagaaatattctatattggaatgaaagttaatcaaattatgattattaaattttatataatttgttagaaaataaaacttgagggtgtacatacaaatatctatatgacaacttttgtctaaataaatagttcagatgttccattgttgaaatagtacgtactcttctctctattaaggattagcacctggtttatatatatatatatatatatatctttgttctaacaatatataataacactaactgtgattgaaatgctaaaatatttgcaga

SEQ ID NO: 3231 - DNA, 1630 bp, Glycine max
  Intron number 3 from transcript Glyma06g09980.1 (locus Gly ma06g09980) derived from phytozome v7.0 (chr-ID Gm06; pos 7521316 to 7522945 reverse strand)
gagctattataaggtataaccttcttattggcctgtaatacaatatatgatacacatatgctgaccatcttgtgtcattatgtgaatgccttcattttctatgattattattttttttataaaattggattcagctgatagaattgcatgtgttcctaagtgaatgcaaaaatttatttagagatggtcattttaatagcttgattggggtcaggtcccaagttctgttatgttgcatttcttggaactaaatgattatatttagtagtgatggtctttcgtgcttattgatcttgtttgaaattttaagtcaagactctacatgtatgatacataattcttctaattttggggggttgtgaggacgaggattgagaagagtggaattcattaaagagctacagttttgcttgtctttgttcatatttttacactctatatagtttggcactctacttttgaactcttgtcaatgatgatgatgatgatcgagtacagttgatgtgtgctctggtagtctgtttgtcaggacccaatttgattggctttaaactctgggctggttatgtagaatggagaagtatatttaagaattattgtgttatgtaagaatcattattttattaggattttgttgtatagccaattagtatttagatgtaggatgataaccaagaatacttctcgtaagccagttacttcaaaaaaccacaaactggataagcttaaaggacaagacaaaaaatctaaatatttactattagttaggcaaagtctaaacgttaatcacttaaggtttaagttactccctcctatcctttttacaagactcaattaattaattcactaagtttgaagaaattagttaattttgttattaacattaaatttattgttagttttctctaagattaatgagacatactcttttcttcttctttttaaaatatttttattagtttaattattttaatctcttatcattaatatatttattgctttaatttttattagctatgtatgcagagagttaaagtaaaatttccaacatacttttcaagcaagacaaagttagactcccatagagcttaagacatttaatgtattccacttactaaaaaaaattaacatacccctactgccaaaaggctcctaccttgcgaaggtacattggagggttacttaaatgatttttaataaaaaaaattagacggtactaatggaaattgaagtctttgtgacctttatagtttatatgttgaacgttttcgtccctcattcacttaaattcattttttgtagggctattaaacaaactaaacacctaatcgtatttagcttttggacaaaactctcaaattaattctccctctgttaagttggtccacattttagattaaacaatgtgtagtttataatttccatccttttattcatattcgtagaataagatcctaaggagattgatccccacacttatatatatatatatatatatatatatatatatatatatatatatatatatatatatatatatatatatatatatatatatatatatttcctaatatgcttttcttcccatgcattaggtggtcattccattgcaccagctgagagctgtaaa

SEQ ID NO: 3232 - DNA, 3971 bp, Glycine max
  Intron number 2 from transcript Glyma13g05040.1 (locus Gly ma13g05040) derived from phytozome v7.0 (chr-ID Gm13; pos 5277636 to 5281606 reverse strand)
aggggattttgtctcaattcgatcaaacacgagtaagtctatatatttttcctttatttccaattaatttgcatcttgctacaataggtagacaaaaaattttatctaccaattttgataaagaaattgtagcttgtgatctaaactataaatatgtggttgcaatttaagttgctatgggacattattattaaaatgtcaaatttggtctatttttaagtttttttaatgagataatgagagcttgtggggctttgtttcatgtttattgtatttttttttttaatgaaagggacaaagtccctgaagatcaattaataaccatgagaaaacgcaatagaactgacattcgtcataacaacgtttgaaataaagtacagattgacctcaaaaatcattagttgcatatctaaggataaactatttttgaatgagataatgagagcttgtgaggctttgttgcatgtttattgttttttttttaatgaaaggggcagagccctggagatcaattaataaccgcgagaaaatgcaataccacttacattcggcataacaacgtttgaaataaagtgcaaattgacctcaaaatttcttagttaaagtgtggagccactcaaaagtacccccaccagccgaacaaaatccttaatattctgaaccatactaaaacaaagatgatatgatggacaaccatgggttttgaccaaaagaggttattaaatggggtattttttggattaattctcaaatcagggtaactcgtaggaatttttatgacttattggtacgaagtcttaaaaaaaatttaagacttcagtctttttttttccaattttttttaacagtaaattcgtaaaaaattcatcgactttaattttttttaattatttatataaagttgtaaatttttatttttttatcataccgtggtacataataatatttggtataagttcatttttttcttaattttatttaatatttttatattttattttataaagtattattatttgttaaatttagaaacaaaaaggaatcaatcagtataaattaataatcaaaaaacaattccttattcattttatctaattattattggttaagaaaatattaattaatggctaagaataaaaaataaaagtcattggattataaaagaattagtcattttaattatgattattatttgaacgactctaaagtcataaattgtaaatatatatatatatatatatatatatatatatatatatatatatatatatatatatatataattatttttaatttaaaaagagttaaacaactaatcataaaatctaaaattataattaaaatgattttaaagttattcaaaattaatttaaaaataaaaaaattaatcaggactttggagtcgtgaaaaatttatgattttatataaataattaaaaaaattaaagttgttagattttttagaacttcattattaaaaacaaattaaaatcgtgaattttcttacgatcatatctaaaaatcataaaaattcctgcaacttatcctcatttaggaattatttcaaaaaatacttccatttgataaatttcaaatagaattatccttttttagtcaaaatcacgacaaccatggctatggttaagaagagtactagccacctgcgagttagactctaccttaaacatcttgaaccctctgctccaagtccaagctatctgaatgcaaatcataacttctcaaagctcagctgcaacattcatgtttattgtttagtaactgagtgaaattgtctataaatatatatattttaagcatctttaaagcaattctacaaatttataactaagaaacactatttaattcattcgattttatttactccttgattttataaattaaatatgcaatatatttttctacttagaatgaccattcttctttgtccctagaaagtgaggaccatttgatcttaaaagtgttgcccctaaattgcaacatttattttagcttacctagtttttttagaattaattatataattcatctcttaattataattaaaagtttaatttgatcctttaattatttaaaaaattaagtccctcaattattaaaaagttcaatcaggtcctttaattatttttaaaaaattcaattaggttcctcaatttttttaaaaattcaattatatcatttaattgatccctcaattactaaaaagttaaatcaaaatttatatatttcattatacaaaagacctaatagtattgttttaagtaattaaaggacctaattgaacttgtagataattgagggactcaattgaagtattttaaataattgaatatttaattgaattttttagtaattgagggatccaattgaacttttaattaaaattaagagaccaatggtataattaagcattttttttacataagaattaccttagagattgaaaaatggccaaaataaagaacattaatttgtatacataaatgtcaataaggaaaaaaattaatatttttttattgaaggataactcaagttgcatgtgttttaaactttctttgacttattttaaaattaaataagttgtatcagtaagcttgaagaattaattaaagaaactctgatttttaagtatatgaaaattctttcaagcaaattacgtatgataattcatctatcgtgttatttgatgtctagttaccaggtagttcaaaattaaaggttctaataaggtaatattttcttttatcgcatgtatcatgcttttccattaattattccttttagtaaataataattaacttgcatgcactcatcaatttactttagaaaagtttatgttgtaacatctcgaatgaatcctaccataatgaaagaaattcaaaggttgtatatgtacgagattgtgtagttgagtatgcattaaatgaactaattggtactacctataccaataagatgcatatattgttcggtagtctatcacttaaaaatttcatagttaagagtgtttaacatggagtagttatgggttgggtgattttttgagaagtttcctagaatgcgtataagtgaggacaaaacacattaaaaaatctcatgttggtatgtggggacagtcaatgatcttgagagtagttgagtggtgttaaagctggttgtcaaggtctcagaaaaggctacttacaaagggttctgatggaggactctaattaataaggatgttaagtgaagtatcaccgtgtgaagtgtcgtagcgtgagagccgccgatgagtcaacaatcaggggacattataaatggtattagagcatatctctctcccaatacggtattatctctctctcaatacggtatggttcgaggacaaactaggcataagctagtgggcatgtaacaccccgaacgaatcataccagaatgagagaaatccaaaggttgtacaggtataagattatacaattgaggatgcattaaagaaattaattggtatgaaatagttatgggatgagtgatcttctatgaagttttccaaaaagcttgagtgagaataaagcatagtagaaagtcttgtgttggtttatgggatcaaacattgatcttgaaagcagacaaaattgattgtagaagtctcgaagatgactacttacggaggattatgacaaataagatgttaagtgaagtattactgcgtgaagtgttatagtataaaagctgtcgaaaatcagggatattacatatttggtattaaaaatatgtttatatcttgaaactgtttttttgtattatttttgttgtatagcgttttaaatttttattgtttttaagtataatattaatatattatatgataagaattttttcaattaaataaaaatagtatcaaatgctaatacttttatgatttgtattcaaatttaattattaggccgaggctaaaatactacgagggccac

SEQ ID NO: 3233 - DNA, 1699 bp, Glycine max
  Intron number 8 from transcript Glyma05g14330.2 (locus Gly ma05g14330) derived from phytozome v7.0 (chr-ID Gm05; pos 15222636 to 15224334 reverse strand)
tcgacaaggggttattgaagtggctaaaatgtaagtagcctgattgttggctatagtttttttgtagtttacacacacacacatattcttaaatcgagagttgcccagtctgtatttggatgctttgtcatgtctctttatataccaattgttttattttttaatcagccaaagaaaatatattactgatggtacaaggggtaccatgtctcatacaattgtgtttatgatgcctttcaacctataaaacaatgcagcgtccctaatacaaagaaaaaatttacatcccatttaaaccaaaacatatctcagcaactgcaattgaaacctgcagccagcaaaacaacaaaacaaagctgcctaactaactaaattaaaactaataaagttgtaccacaataaaaaagtataccagcactaactacaaccacacattgtatcaactgaaatataccaatcacagaagctgcatgtacagcctaccatcctgtgtgttgaccaaatgtagtaccagggttttagcatattcagaatcccatcctcagaattccctatactgccatgtataacacctaaccaataattatacttctcccgcatgcaatgacttttcttcacattcataacagcctcataaccatactgccacatgtcctgtcagagtaaaccagtttattctattctcctacaaagctttcagatatagattggttccacagaccgaccatacataaaatgaagctgagaagccttccgttttagcttttagcctggaacaagatctgattttgaacccaaacacctgttctgcgtccttatactgttcctatgcaaccaaagtgatcaaacagtaggtaaccatacccacccaccaccctttttttaattttttaagtcttctttatataccaattgtgttggggactaatttttaagcatttgaaaattgaggaaatagggggtaaaaatgcctcatacaattttatttggaacttctgatagcaatacaagatcaaggtaaaattatacaattgagcatgagaaagaataggatattctagagtttgtattgtagtgtgtctgtttgtccatatccatatcaagactttaaaattgtgaagtaacaagaaatgtgtttattatccaaccaagagaaaaatgataatatttttccctaatgctgttatggataatttatcttgttggttttttgtgtagtaagtatatttgtaaatgaacgagatgtataatgtttagaagcttcattaatattttattcttgggctctatatatagagcataagtgcaatacaaaaattcaaatactaacattatgctaatcttataatcagactgataatttcctaaatctaaatgataagatcatatccttgtctttatctaaacagtatcttaaaacaacctaaattcctaaaaataaattcaaattcaaattacagtcatttaggcatatgttttcattatataatttacaattacttgaatgccattgggctgttggtattgagattttgagtttcaatttgttttgcaacttccaagctatattttattggatgggtaacattatattggggcttttaattcaaaatgggtgaatcttttataagacatgctttgatataataagacattccttacaagaattttttgcatttgtttgtgccaagcagtatat

SEQ ID NO: 3234 - DNA, 1632 bp, Glycine max
  Intron number 1 from transcript Glyma15g11740.1 (locus Gly ma15g11740) derived from phytozome v7.0 (chr-ID Gm15; pos 8646927 to 8648558)
ttgctctcttcaaccccttcttactctccccgaaggtatctatctctttctaattcacttttttaccattaaattgccttattctttttaatcagtttgtgtttaagaattgacatatagagaattaaaagtgatgatgtctgattcagaattatatatacacaaaatttcctccaacaactgttggccatgttgtgtttttagaaaacataagatgtgtttgattacccattagagacgatcaatgtgaaggaaaaaaagagaagaaatttgagatagtcttttaaacacactttttttattgattaaaacttattgaacataacaaaattttgtgagtctcacttttttatggtctcatttatgattttttagttttccataaattttaacaaatagtaataaatatgttgctagcactcctcaatttaacattaatattaaagaaaaaccgaacagacgtctaaccatgtgttattacactcttgtaaatttcatctaggaagattcttttttggttacctttacaatgtgaaaattgaaacaccatgtgatcaaattgttatgcaagtgttgtttccttcatcatttaaatgcattctgagtctggtagatgggttatttactgtatattccgataaacattacttgcaaggcctagtagtttgattaatagattggccaatcaaatagtgtgatgaattattgaactttattaaaacagaatctgtggtcatgcaatggaaaaaaaggacagttgacaaggtctttgtagatgttgtttcttgtgctctgacatcgatttctgattgctaacgtggtctgcttgtttatgcaggattgaccaacaattccattataggttagttcttctcccctttagtacactagagaaatgtacaagttcatgattatatatactctttggtttaagtatgcatatatctaatcctctcccactttttgaatgatagtttttaacattaaaagggaaaataacacattggaggaagtagaagtgaaaaaataacactttctttcttacctgtcagttatttttgctgatgttgttttttaataactagggggaaaaaaggagaacaagatattggttcctcacacccaagacttaatagctagtttagatctagttttagataaaatgatgagaaatattagtcactctttctccagtgctctctttcttatactctttttgtcatcagttgaaatttattagagatcactaatttcaatgaattttacttctaaaccaacagagagaatcattaaatgaaaaatgaaactcttttgatgatttctaataaattttaatcaatcgtacaaagtgttaaagaatgttgagagagtgtgctagcatttctctaaaatgatttgaacccaagatataaatccacacatttgtcataccaaatcaaaacacttgtttaatggcaaaagggcaaacaatagttcaaaacacaaataccaactaagagcctaatgtttacatattagtctgacatagggggaacttatacattttttggaggaattaatgaatccaaattatggtacccttgatcctggacaatttgagattttatttagcatttgtatgttgtagattgc

SEQ ID NO: 3235 - DNA, 4120 bp, Glycine max
  Intron number 32 from transcript Glyma10g44150.1 (locus Gl yma10g44150) derived from phytozome v7.0 (chr-ID Gm10; pos 50632070 to 50636189)
ggcttcatatcgggggcaaacattggccagaacaggtgatgttcattatttttaatgatgaacttgattttcttctaatgtcttctttgttactagttcaagcgaggttatcggtgatgattaaatatatattttaatcaaattaggtaaaatttcaaattaccataaaatggtaaaatattgtttggaaatgttgaattgatgcataaattatgtaaatcttattagtaaaaataaatactcattaatattaatattaatataatacaatttagaatgtaatatttcaaagaatttgtgtgataaataacgagtgatgtatagcaagagcaaaaggcatggattgaagcaaggataacaacttaaaacccaaatttgtatcccaatggcaacttctgtattgtggtaaaattaaccctgagctgaccatatctaaccatgaccgcctttgatgatttgtacctagtctaggattttagttaccagtttgataagttggctccaattgatcaatggactgattccgattgccggcagggtggattggctggtccatggtgtggcttatagtgtcttatctatgttcaatcactttttcccataatttcatagtgtagttcttatgctttttccctttgtagtttacacttgttaaatgtaggtaccaagtgttgctctgcttagatctgacattttcttttttttttttttgctcagcaaaaataagtatatatatatatatatatatatatatatataaatgagtaccagaggtactatagtacatgtagatactatgaaaacagcagattcagaacactaagaatctgtctgaagccataggataaaaatacatgccctgcacagataaatgatcctattacacatattatccctccctaaaattagaaagctgctttgagctgtgaagaccaggagctaaatggcactgtgaatcccttctccatgttcttgagccatgaccaaattagaaaaatggcatcatccatgaccttgcttccatcgaagtggtggttatgaaatactaccccattacgatgcttccaaatgacccatgtaagcactacccaccaactcttccaccttctagctcttactgcatcagcagatctgttgtcgtgttgcagaaagtgatctttgggattatgtgggaatgcacccaaggagtttacccatgactgagtttcccaccaaagaggtaatgtttgcagaaagtgatctgacattttcttacatcacaaaatcttattattagctttgtgatccaagtgataccttgttttcctacacatttaaaaatttcagtaggatacatccatcctcttaactgcattttatctctacaactcgaattgtacagtagtatgccaaattttgtttgttcgcttaggtttctatggcctccatgttatataactctattcttgtccttgattgaaaagcttaaaaaaaatattgtaccatctctctttgatatcttgatctttccttcttaatccttaatatcttgctctagatctcacattctccattatttgtcccaagatcttggtaaaacttttcaaaagcttaggatcatgcctcacacacaactttccttgtctcagttctagtatttgatatctggcccaataagagccctttagttttggaaaatgaacaatgctgaaatttacataattatgaagaatggggatttcaaagaggactccgacaaggggaccctttagcaccgtttctcttcaacatagttgctaaagccttaaatggcctgatgtcagaagctgtggggaaaggtttatttagtggttttccaattggcagaaataagttggaaattagcatcctccaatatgcgaatgacacaatcttctttggtgaagcatctatgcagaatgtcagagcaattaaagcaattttgaggaccttcgaaatggtgtcaggccttaaaatcaacttcgccaaaagcagctttggagtatttggcatgtctcaacagtggacacttcaagcagcagattacctcaattgtagcttgttgtcctttccttttacctatcttggtgttcctattggagcaaatccaagaagatatcagacgtgggatcctatcttgagtaaatgcgagagaaaactagcaaaatggaagcaaagacacttatctttcggggggagagtgactcttatacagtcagtcctaacatccattcctatttatttcttttcatttttcagggttcctaagaaggtgatggataagttggtgagcctacagaggaagtttctatgggggggtgcacatgagcaaaacaagatagcctgggtcaagtaggacacagtatgcctcccaaaagaaatcgggggcctgggaatcaaagacatcaacgctttcaacctagcattgcttgggaaatggaagtggaaccttcttcagcatcagggggaattgtgggcaagggtacttgaatctaagtatggagggtggaggagtctgaatgaagtaccgagagctaataccgaatccatatggtggagggacttgaagttgctttcgaatcatccgcaacatagtgaggcaatgtaggatacaattgtatggaaggttggaaaaggtgacaagttcaaattttgggaggataactggactggtggagatgtttcgctgtcagctaaatatcctaggttgtatgtcatttcttgtcagcaaaaccaaattatccagtagatgggagattgcaaagacacggggtgggagtggaacttaaggtggagcttttcaggagttatggaaacttaagattccaaataaaatttcagcgtttgcatggaggctactcaaggatagactaccgactagagcaaatttgagaagacgacaagttgaggtagaggatagtacatgccctttttgtagaaataaggaggagagcgcaagtcacttgttttttcagtgcagtagaattcttcctgtatggtgggaatcgttgtcttggacgaatattgtgggtgctttcctgctaaatccaaagcagcatttcctctatcatataggtggaatgaagggcggagtgagggctaacaggtggaagtggtggtggcttgcactcacatggacaatttggaagcacagaaataatgtcatcttttcaaacgttacctttgacatcaacaaaatgttggacgatgcacttttcttactttggacatggcttaggaatttggagaaggatttcagcactcattacaatcattggtccagcaatcttagtataggtttcagtcagtagttgtggacttaatgttacttgaatgttacaccttactgtcagctttctagctagacaatggttcacagcttgaccaaattatggttttgcgtggaaccatttgtgtggctactaattttaatatgtatattgtggtacctctggtactcaagtaatataatcattattgtttgccaataaaaaaaaatgaagagtggggatttcaaggaccaaatcaattgttcataagggctcaaatactagtttagatttagatatagctgcttccattgttaggaaatatcaaagattgctcgataaagtttaatggcactgctttttctggtttcaatgtatataagtatcacacagctgtcatggttatagcaagcatgatgagtaagaacagagaaattagtctaaacggattatatcattagaatgaaatattttgttttagtggtgttgatggagtggattgctatttattgttagcaaggtaggaaacttaaacacatgctattatgcaattgttggaaagataattgaacatgacaaaaaatgccctctcaaagtttgttacgaataattttatgttcctaagtttcacttgaaagtaaaggaacttttgtatttcagtatatttttaatacaagcaccaatcacaattttattggctaaaatgactaacccctgttaagggaaataacaaaagtggaaatggagacataatgagatatttgtctaaatctaatactatcaaagaaggtatctcctgctagatatttactacattttctgttctttgttgtttgaaatgctcagttcggggg

SEQ ID NO: 3236 - DNA, 1663 bp, Glycine max
  Intron number 13 from transcript Glyma17g12950.1 (locus Gl yma17g12950) derived from phytozome v7.0 (chr-ID Gm17; pos 9879865 to 9881527 reverse strand)
ctttattgaaggctggtgttttgtatgcctcttcaattattgttttagggtaaattattttatatctatttcaagtttgtaggagggtgagtctagcgattaaataggataagtagcttctacagttacgtatttaagtacagcttgttacatgggtttactgttataagtgcattccaactcttgttctcaaaatggtcttgactagttctccccagtttagatatcctgtttctattttccaattctcttaaactattcctcttcctccttaggatcaccttatgagagatctttgaatgtgttgccatccttatcttattgcaacttttgtttacaactgaatgccttctatcaatcttgaagattttcttttttaattctgacatctccagagacattcctgactcactcttccagtctccttctaaagtaggacaccatcacctaaatggctaaatcttgtatcgcatgttgatccctgtaatagaatgaacaggatccaagtttgaaactgagctaggcaaagaatgatgggacaatgatgtgggaacaactaacaagggaaagaaaaaaaggattaagacaaatactccctgtaaatgattagccaaaattaatttttttccttactcaaagaattgttaccagtaacagggttaccagctgaggcattgagggcaacactcttctcctgaatgcatgaaactgatatcatcaaatacagaagacatacatagagtttcctcctcaaacactagcttcccttcaattggggagctattcccatctgtgataatctttatgagtgcatttgtttcacggattaaaagttgattcctggggatgtaaacatgggaatgtacaagcttttaaaaattcttcccgggtactgttgattcctgggaaagttgtaacttccatttttaccatactttcctacaattttattcgcatgtggtaagggaagttatcgtctaaaatgtaaccaagcacattttaaatatattcaggaataatattcctagtcataatattcttgggaatataacatgatactttgaaacaagcgttccttttggaacctgaattttgtttgtgtttgattcaatacctcattaaatgtgctgcactgagcattatgtgaaagttgaccaaatatagtacaagctctaccttttatctagtaggcataagaaagaaatttacattttttttgtcttaaccctccagttcatcaagggaaagggaccttgactaattcaaagttcggtcaggaggtaagtaaagcctgatcaagaattgcttccgccaaggatcaaactcgggtagtacccgaacaatttaaccttaacttcaacacattaaccttacacattatctagttggcataaacggaatttacataataataccatctgattctcacctagtattataatttatactttactcctctaggcatctcagttaatcctggtaatgaagtattactttttcagttgttggttagctaatgagctctaacttttatatgttgaccataattatttatggtacataaagaatatttttatcctatttagttttacttgtaaatatttttggacttatctatttaatatggtccataataggtaccttttgcctctgctgcttcagt

SEQ ID NO: 3237 - DNA, 3025 bp, Glycine max
  Intron number 4 from transcript Glyma16g25920.1 (locus Gly ma16g25920) derived from phytozome v7.0 (chr-ID Gm16; pos 30096176 to 30099200 reverse strand)
atctataaggtgattatcttttctacccatttaagtcaaatgatgcttattgttttgttgtgtagtatagttggtcaggaacatgaataaattaattgtcagagagaggtatttgatatttctaatgttgcttcttatttatctaataataagtgatctgtataaaagcagttagagttggtgtcaaaatattcgatttcaattttttatataatcaaaatatttaacttatgccagaagagaggttgagatctattgtttaggttcagtgttttgttgggtaattataaaagttagatgttaagttgttattaaatggatttgccgacgacactctctgtcaccctctttttattttttaacactcactctattattggatcttagaatgtgggtttgagcctaactcaaccccaaaagctagttcaaaaggtgagggtttccccccacttatatactttatgttggccttatctctagccaatgtgggacttggattttttccaatattggatgaaatttgtcggaaatcatcaatttcggtgggtcacacttctcatttaatgaatctctctccttatttagaagtaggacccactaaaattagtgatttccaataaatttcagtcaataatagagagtgttgctaacattcctcattattatatttattgttttgtccattatttcattatttttgtttttatattgtacatatttgttattttctgtcttttattaggttaggacagatttgttgcctttaatatggctctattctaggcaagtaattatgagtgtaagtctatataatttgaatccccttttcccggtaatgagtaatgactgaaaagtaatgttctgaaaattttctttctagttggtgtcagagctctacagtctgtaggtttctgctcctgctgtgtagttgtcattcttttctattcaatgtgctgtgtgccttaggcatgccttattcctggattactttgtgctttctttgtgcatcttgcattatgtgcagtagcttaggtgtcttgtgtccctactgttagtggaaggccaccctctgttagagccacctgaaactggtcactgcctactagtgcctagagccttgctggcaagaaaaactccatgcctctccacgctcatagagatcctagtgtgagatccatgcatcttctcggcctctgttcatttcactgttggtcccatttgatctccagcatccgtacacctgttctactcattagacgctccagttgcctgatagcactgcgggccagcaattaagagagtctatgttaggaagaaaaagaatgggacagcagaaaataaagtccaggctaattgaatgtaattgaaagttaatagttgtagaaataggttcagattacagtgttatgagttctaggttcattatttgctgtatactatagttcccagatctgtttctgttttctagatacattattgttcatttctgtacataattaacattttgtgtaatatacgatatcagtccagtgctttgacactgaacaattcacccaaattatatttttttcttccactaatatctcagttttaacatggtatgtagagccttctatatttctttttgctgtgtgttctcctctctcttctgtggctgcccattgttggttaattttgaataaagaaagatagcaaatagaaaaggcaatgggattgaataggactccatatttaaatgcattgaaataactgaataaaagatcatgctccttgattttaggaactgctactgataatgggaaaataatataagaaactaacttcaaatcagaaactagcttatccataacagcaaaatgataaatttgacttattcaaactaaaactactttgacaacctcacaaaggcacgatctcaacacccatcttagatccgccatacgcagattctttaatgaaggctggatgtgaacaggacaaatgtgaaattggaaatttggataagttgtctacagtgataggtagggcacacagggacctactatggaggctggaacagtggaaaagaggctcctagatcaggagtgacacgccaacttgaatgaataatttcttgatattatttctggatattgaaactgtaccagacattacattatataggctaagcaatatacttactttccttaaactagtctaaaaatagggtaactacaaacaaccagccgtacttttcaacaattatgatacagctagtgcaggactgggacaactagtggtttttttaagactatggaggcatttgtttcaaggtataatattacatttccaggaatattatgcctaggaatattattcccaaaaatatgtttggttgacatctattaatttatttttaaattgtttaattggaaaattgaaaaaataaaagtggaagatggaagtggggatatgtagttattgtagaaaataacttccattcttatgggaatgttagatacctacctttcaccttgggaataagaaggaaggcaaatatgcatgttcaattttcatgggaatcaacaatttctgggaatgctttttcaaaacttgtaccaaacatggaaatgtgatattcccaagtggactttcctgggaatcatttttgataccttgaaacaaacacaacctatatggttattatgataattcagagaatgaaaatattgaaagtgaaagtaattctgactattgattttctgttaaatgagttaaaaaaactcaaatatacaactatagcttgagctgcaagcttgtcagttaacaaactctagcagtgccgactcagctcaacactaatatacatgaggacatacagtaacctaacactgagtacactaagtactctcatttattttgcaactgtagatttaatagatgcagttctattctaatttatgtatgtatattacaaagtcatgattaaaggatcttttccctgttgacaggcggttgcaagtttgtcttctgtggtatcttgttt

SEQ ID NO: 3238 - DNA, 2041 bp, Glycine max
  Intron number 1 from transcript Glyma02g10450.1 (locus Gly ma02g10450) derived from phytozome v7.0 (chr-ID Gm02; pos 8348616 to 8350656)
ttacctcatcaagcttcttcttattggcgatagcggttagttaccccttttttccgctctattttttttttctcctcttaagcaaaccaaacgccctagcttctttcagatttcggaccttattgcttttttcttcttcttctctggggtttggtgattcattagtttggagacgcttcattttaattatgtttatgttttttaaacctggattgaatgctactattatctggttaattgtcttttaacacgtggttgctatatttgacaatgtctaagatgaggcaatggccacaggatgatatacacggtgaacttgttcaactgtttagggaggaaaagtaataaagtatagcttcacataaatttctcaataaacacttatagagaagggaataacaagttacaatgaattaagtttctcccaagttaaaatcagtttttggaaaaattaaaccagagagcttctacaaaagtttaagtgcataagttgattttaactaatgatagaagcttaattcatttttactttcttaactttttctcctaaaagtgctcactgagaagttcatctagacatggtttaagttgttcaatgagataggtaggtttgaggaaatgcctgtgggtaatacctattcatgagaagagaatatagccataggaaatatgccattttatgtgtcaatttacacacacaagagtgacaactgtgctctttataacataataagtcacagttttcacacacaatcatcatcaatttaagaataataagaacttagtaatgaggtcaaaagatgaaagatgatggttaaattaatagaaaaagaacataacaaattagattaaaattagtagaatgtgaattgggaagtctaagcatagaagaaagaatgaaacttgcagtgtgaaggaatggaggtgaaaatagatgtggctttttgtgcaatggtgaatgaagaaggttttcaaatcctattttctaaagcaaaaaatccattcaaaaaatggaggaggaatcacaattttaccccaaaagtaccctaaacaattgtttaaagacaagagacttgtgtactaatttggttttatgccaagaagctcaatcgcaaaggttatatgcctgttgcagggcttgattgaaagatacataaggaaacaagaagacctatatcattgatctagaaacactgcctttgatagggtgctgtgagaaatttcatggaaggcttctgagaaagaaggagatcctataatatatgtttgatttataaatgaaaaagatatgcatgatgtggcaatgactagcatgcaaactctaggacgtctcacaaatgattttcatctaatagtaggtttgagtctatgctatactagtcagtgttatgaattatggcgtttgctaggaacttaaatatgtgaacactgagcatgtaccacttgtgttaaatgtgagatagtctggtttccaataatggcttggttgttgttgttgtttgagtcattgactattcactggtcatttttgtatatatagataatagtatgtaatacttaaatatgcacccataaataatagataaatatgcttgtatgttggtgccttgaagttgaaaaataatccataaaataagtcatagttaatgggtagttattttaatttttgtacctcattctaaaattttgttaagttggtagttattttagaaaatttattttttttgagaaatagaaagcaggttgattagtgtgcaaagtgcaacatgccacaggtaaaggtccagtatcacagtgcctccaaaatgtaatatatatatatatatatatatatatatatatggacaatactctcccaaatatacagatatacatatttatgtttgtttttatgtatttgtgcatgtgaatgtgtgtgtattgatcatggtgtcttattttgtctttttttgtatttcacttgaagttttgtcttcttttaatagctatctgactaacaattgcaggtgtcggaaagagttgtctgcttttgcgattttct

SEQ ID NO: 3239 - DNA, 4821 bp, Glycine max
  Intron number 1 from transcript Glyma14g34710.1 (locus Gly ma14g34710) derived from phytozome v7.0 (chr-ID Gm14; pos 43411884 to 43416704)
ccttcctcgtcgcgttctcctccactttcttccaggtcaccgccgtttcttaccgtattattcattactctttaattgtgagtgaatgtctttgtttgcttaactatatagctataggattgaggagagtgtttctaaatttcaaaaccttatagctttgcaatttctctcgcatagtgtggtttttaattagggatggtgagggtaaaattgggtaatataagtcgttgcacgtgtatagcacatcatgaatggatatgttgaaatatcaactgttgcttttcttatcaccaattgttattacttatttcataggagcctagtttaggtatgtgattcttgcgaatcgcgaagtagattaatcctgtttggataaacttgtgcatgaggacttataggaaaagtgtgcaggtaagatgaattgagtttcttgtataagctagaatcaacttatgccatgaccatatataagaaaagtaaataggaaggtaaaatgaattgaattgagttatcgcataaactaaaatcaacttatgccattagctaagcacttgtaggaaaaggaagagaaaatatgaaagtaaattgaacagtttcttgaataagcaaaaatcaaattatgttgataactttttattagaaactctctcatttaacttctccaaaagataggtgattctgtgattgttttattccactaaagtgtgcttaaaaatgtataagaaattaatgaaattgtattggttcatgatgaagaaagaagaagaaagctttgcagagaagaaagtatacacatagttcagagaagtgcttgatcttagattgataaaatgctttctaacaaaaaggtgttattccttgcatgtatttataaagctaaaataactaactaattataactaaatgcaactaactaaacaattaatgacagctcagctataactaacaaaactaacactctaacttattctgtcaacatccccctgcaagctgaggaatggatatcaaacatttccagcttggaatgaaaagtctgaaaaacaccaggagggagggctttagtgtagatatcagcaagttgatgagtagaggaaataggtagtaacttcgagaggccagaattaagtttctcccaaacaatgtggcaatcaatctcaatatgtttcgtatgttcttgaaaaaatattcatgtaattaagaccatccatttgcccttgtaatgttcaatagaaccaccagctttgtgcttaattttatacacccaatgacagccaatagcatttttatgcgaagactagatcagttaaaacccatgtatgattcagctctaaagcagtgagctcttgttgcatagcttttacccaacaatcatatttgacaaccttagtataagatttgggttcaacattagagaaaatggacacgacaaaactatgatgtgatgaagaaagtctatcataagaaatgactgaagagagaggatagcgaatacttgaagtatgagtggtaacaacaaatgtgaaagttgtatgaaagttattgtactttgctggcctttgtttctgttgatcagaacaacaaggaagaggttcaggggattgggaaggtgaacttgagggagaaatggaagtaggtgagtaattggtttctgattcagaagttgggtctggttgatgaatgccattttggcaaatatcttcagtagataaatcatcatatgtggttttggaagatggcaatatggaggaagaaaagggtgaggaattagcagattgtgtttttgaataaggaaagcaatcctcatagaagatcaaattgcaagaaacttctatggcttgagtttgaagattagaattaacatatcctttggtatgaggtttaaacccaagaaaatgacaaggaacaattctagaatcaagtttcctctatgagcagttaaagtgcctacataacacagacaaccataaattctaagatgagaaatatcataaggtatatcatagagtttttgatatggtaaaatgttatttagaaaaggagttggcaaacaatttattaaatgtgaagcatgcattgctgcaaaagactagaatatgggaggcaaatgtgattgaaataacaaagcatgagtaacatttaaaagatgttgatgctttctttcaacaatcgcattttgttgaggtgtctcaacacaagatggttggtgaataatacctatttgaagcataaaattcatgcatgagaaactctgcaccattgtcagaacgaatggtttttactttggtatcaactgtttttcaacttgagtaatacaacttttcaaaagagattgcatttcagcttttgttttcctgagaaagacccaaacatatctggtgtgatcatcaacaacagttaagaaatatcgatgaccacattcatggaaggattggcacatggtccccaaatatcaacatgtatcaaatcaaaagaatgaacggcatactattgggaaaaggtaacattatatgcttagcacgatgacatgtatcacatacaaatgatttatcattgaagataatgggataagattgtttcataacatgtaatctatcatgagatgcatgtcctaaatgaaaatgccataaatccattggcactttattacagaaaaatgtcatagcaacatcattggtggttctggttgttatcatatcgaaggctgaaggcatgactagcttgtacaatccatcattcgcatcaactgtaccaatcatcttcaggctgctggcgtcctttatgtgaaatttatttgagaggaaagtcagtttgtaattcagagatgaaaccaacttggaaataaaaataagattaaaatagaaacatggtagataaagaacatcaacaagggataaggactcagacaattttactgttcctgagtgtgtggataacacttgttggtaatctgactataatgggtttaatttgtttatatgtattgtatgaagacaaggatgaagaaacgtgatctcgctcctgaatccgatatccaggttgcaaaattttcattgtgtgtagtgcaaatgaaaggaagaacattccctacagcagatacattgtgctgtggaaaagtaccaatttggttaacatgaggtgtagaggatgaatccccaaggttagattgctgaattagagccaccaaggccttataatgttgctatgtaattgtaaaacgaatatcaccattttcttgttttagctgatcactgtcattatcgttttctgcttctcctgttacagtattgttcactacagctttgttattttaaaacttatgtcctggaggtaaccatgctttttgtagcattcctcaacagtgtgtccacttttaccacaatgactgcacattttggttcctctaccatatgaacctctacctcttttacctcctctggaaaaaggaaagtcatgctttagatagcatacatgtacaatgtgcccaactctgccacaataactacatgttggtgctgatcctgaactagcagcattaattgtgcttcctttaacctcaaatttcagatttccaattaagatagaattaagcacttgtcgttcttgttgaacagcatatgagaaaactttagctattggaggtagagaatccatcatcaaaatatttgatctaacattaccatattgatcattcagaccactcaaaagttgcttaacttgatcctgtgtttttctttccattaccactagcaagtgcatcacatgaacattttattgcacacgtggagattgaatctggtctataactttctaattcatcccaaatcatgcgtaattttgtaaagtaatcagtaattgaagaatcaccttgtttgatagctggaacttcttgctgcagatccgaaatgcacaataaatctccttgtgaatatcatgacttcaagtctttccaaatgtctattactttgtccatccataagatactttgtctgattgaagctgaaactgaatgaacaagccatgaaattaccatattgttgcatctcttccatgcaagatgtaggggattggtaatcaaaggttgcggaagggttccatcacgaactcaagtgcaaatataggggatctactccatgaattgtaatttgttggatcgagaacaggtgaaacaagtgcaattgttggattctcacttggatgtagataataggaactatgaacatttagggattgatcaatttcagagatggtgaatcaaggtttaggaatatcaaaatcgaagagcaaagaacaatggataaaggaatcagagtaaagcagcagagctcttctaataccataatgaaactgtattgattcatgatgaagaaagaagaagaaagctttgcagagaagaaagtatacacagagttcagagaagtgtttgatcttagattgataaaatgctttcttacaaaaggtgttattctttacatgtatttataaagctaaaatataactaattataattaactgtaactaactaaacaattaatgacagctcagctataactaacaaaactaacactctaactgaaaactataactgaaaaatgattattctgtcaacagaaattagtactcaagagttaagactactctaatttccaaaagcatgtttttgtacgttggcttttttctttttgcactaggcaataagcacatatatggggttcttaaaaccatgtcagtataactgttatactattgtagatatttggctgattgtattcactttgaactttgaagtcattgtattataggtagctttatcgcgagcattta

SEQ ID NO: 3240 - DNA, 3454 bp, Glycine max
  Intron number 2 from transcript Glyma06g16860.1 (locus Gly ma06g16860) derived from phytozome v7.0 (chr-ID Gm06; pos 13253790 to 13257243)
caaaagaagttgtgccgcttcattcacggaaaagtgtaagtgtctgacgtgttttgaattgttgaattgaagtgtggttgagtttttatgtttttttttccttctttcattcggaagatggaaagagttttgatacgggatttcggcagagaaaactatgttgagtttatgcgtggcaaaactagattagtattagggaagatggttagagctcagtcaatgaaaaattggaagagagtttgtgttagtgtcttggttcatttatccttcctggcataagacacaacttgatatggcataagtttgagttgaataatttggatttaaaagaaagtatgaacgttctagattgacaatttgtgaacttctttcgaaagcaagtgcattgtgtaatttgaaatattttttcaattgccaccttaagttcatggggatttttatttgttggagtggagtgtctatttctcttcttaattcattatttttattgtgtgatatgcattaatgtaatggctacaaaataacggttcttagaatttggacttagggtctaactcaatcctacaaaatccacttgtaagatgaagattgcccaagccttataagcactacttaggtcatatttctagtcgatgtaggatctcaaccacctaagaaccgcatcttagtggctggactctatgatgcttaatttagcctttctagtcagtccttccgtaggtagtcctttttggcgtaggggtgaccgcaattattgtggatttccaaccatgatcattgaaagttagatagtggtatgtactttcttaaattatttccttgaattagcctgtgatgtaatagtattttgtagagaatgctggtaaactgactcacttagatccttggttagctttttctttgattctgggggtggacgatggaatttgtgcatggaatatatcttaggaaaactatcaagttctggtaaggtggtagattattgggtcaattgcctttgaaggggattgggcgttgatatattattctgtagtacttaacaggataaatacaaattataattgtcatgagatttttggagcattcttcatatgccaatttatagggtttgagaggagtaaacaagtcaaagttctttggcagtatgcaatacatgtgttgactaggtaactatggttaggataggaaggccaaaattttttgttgttacctcgtatggataaagtgatcttaacttttttgtgatgctgagatagtaatagataaccacagtagttagctagcctgaggtagttagaaagggtaggatggcacatgtaatgtatacatataaattataatataggatacatgaggaaggacatcttgtcattttggtggaaaaatcctgcaaaaattgtggcagtagagaaaagaagaacgccaattactgatggatgctcacattaggagcacctaggaagtggtgtgagaagttgtctaagatttatgagctgcagcaagaatagtatgtatgtatggctgatgttgtgcacaaaggcaagaatgaaggccttcatttcgacagggctgattttgctggaaatgatgcttatggctggataactcaattgaaaggtatttctgaatgagaagtatccaataagaggagtgcatgatggattttatgatgaaaattgaagggtgagccctgtcctgctttcaatggttggagtcttgcattctgaacttgattagatgatgtttagggttgcagtcattgggcattttagccacccatgatctcgaatccttatgaaattttattgagtctgaagcaagagggctcaatgcaagagtaaagggagaatttctagacttttgtaggaccacttcttgtcataaggaaggattacctttagaaatcttgctgaaggggctcaaggaggagaggagtggaactaaaagatgcagtgctgggtccttgtctgagaatggagttttgtccaaatggatggaaactccagaggtcagtagaatgcttgttttgaaaaccggacaaaatgattggtttgactggaagctggtctagtgattggtttattaactccaaaaaactgaagcattttagaacctgtaaagaactgatcaaactggtgaaaaccggtgcagaaaaccggtttgaggctgtctttttaaaaaatatttgttgatttaattttaaacatttctaatataaataaaaacacttattttaggattttacataaatataaattatttttgcaatcaatattaatttttatcttataaaacataatctagacttttatattgatttaaatttttttaaatccttatttctctttattatatattattttattacttaaaatattatataatattaaaaaatataaatttaattactaatggtacaactgcagttgaaccaataaactgtgaatgaatgctttcaccggttcaactgccggttcagtttttataaacattaagtaaaattacagagtcactaacactatttgatggccataaaatactcagaaaacagagcattggtgtttttgttttgacccagaaggggttgatgctgttttgcggtttgcagtggaggagtaggctttgtcagcatgctgcaaacagctggagccctggtgggacttgtttcaatatggatagatagaagatagatcaaccgattagttagttagttgcaaattacaatcagtggttagtttatcagttagttataatcagtgtttagctagcctgaagtacttagcaagggtaggatataccacgtgtataaatatataataaaggagacaagacaacaaacatcttgtcaattttagagaggtttgaggaatttgggctagggaggtgcaaacctttgaagtactgcaagtttgcagttgagttaaggttggttttccccctacccctatttattctaataaaataccaggtttctatcagatagcaacaattttggagggcacttcatgtgtttgtccttgactttttgtttattgattttgtattttgtgggtttttttagaatgatagcttttcaggttggaaaagaaaagtagatgagtctatacgaataaacttttcttaatttatgtttgaaatttaatgtatattttgatctatgttcttgtttgttaatgtgcatgatttcataattgtgatgccttttatatttccaacagatttaaaagtaaactgtgctgtgaatatgcaatttcctatgtatgcttgcaaactctccttactaattttcaattgtttggtttgtggatccagctgcctctttttacattgttgtttacttgttttctgctcttgcagtttgtgtttttgatgagcaattttattggttgtctatcacgtttaagtgcttggttgtgcagtctgcaggttcttcatcagcggtggatttggaaga

SEQ ID NO: 3241 - DNA, 4547 bp, Glycine max
  Intron number 1 from transcript Glyma10g00360.1 (locus Gly ma10g00360) derived from phytozome v7.0 (chr-ID Gm10; pos 137931 to 142477)
tcctctctgcacgctcttgcctcctccgatctcaggtgcataaatcttttcttgatctctttcttctcatttcatgtgattatttcttatgatctctttgcatctgcctatctacaataatttcgtttgatgcttttctacaacactcatcgaacatggcatcacgcgtattgatctacgtttaatgtttcggttatatttgatgaaccatacttattctatcattatggaattgattttaaaaataaagaataccattaaaccaaataattcttttagaatttccttaaaaaaacaatctctaagaattgattatttgcctcacttatagataaaacaaatagatactaaaattgatatcaataatgttagttcaagtgactgaaacttggaacattttaagcttgtgataaggaatttaaattttgataggtatgtatgaagaaatcattattgagagttttttaaattttatttaagcattttgggtcttatttaatgatttaacaattatatattttaaaaatatcattgggcaagggagttacggaaaaatagaaaacaatcaaaatatttttttaaaataaataaaaacgagtgggtgaattgcccaatgctcaatatgcattaaagttcaaattataatttaaataatttcaataaattatatttccttctcgttatgttatttgacttatttatcatttattttatatatatactatcattttttgttgttgacaaatttacatatatgacactatttaattttttgttaaaaatttattaacttttattacaaattattattaacaaaatagcttttactacatcattcttaccagatgcaagtaatacaccgtaatcttaatttcttgtgttaaggcgtatatctccttggcaaacacaaacaattactacaatctactctttttaataaaaatgttaaaaataattatgtggctataatacctcttaacctcctttatcactttttattcaattcaaacgcgggcccgtcgcccgggcaaaagacaaaaaagataaatattatctaagtaaataaaagataataatatattcgattattattatagcgcgtgcttatataaaaatatatttgtttttttttttatacttttaattccagtactagcccatgcgattgtaaccgctgttgcacttgcttcttcaccttcttcacactattctctcactcactcttcttcgtttcggttcttcagatctcttctccgattccaggtaattttgttaatccgatctcgcttttttctttcttacttttctcctccgctccgattggctactttgttttgattttgaacttaggcgttttttgttttcgtttgcttttgtttcactcatgttagggttcttcgattcaatgattttgttgctcttttgaattgcgatcgatatgaattactgtttgtgttgactcggattcgatctgtggtggagtgaatctaggcttctcactctgatttttgggcgagatgagacaggcggttgccaaagtcaaaatccccttataatttgttccataataacatggaatatttctagctcaatcatccaattcatagttgacaataaccctaaagcttcacctttagtaactgctacacatggtctcgtagtagctattttgcccatcataaatcttccttcgttgtctcagatacataagcctcaaccagtgatttggtcttgtgaatgaaacattgcatccatgttacattttagataatcatgagttcggggagaccaaataccataagtagacaaaaatgcatatcatgagaattagaattcatattttttgttgtcatccactcatccaccacttgtttagcacgcaagaccaattgtttacagaccaatttatgattattccaaagtctgtcatttcttgcattccacaaactccactgagtcgttgcaaaaatgttatgaattgctaaacagctcagtggtttcctagctttcaaggcctaggatcctccaaagaataaaggtgaagggagaaacttgttttatttgttgcttgatttctattacatgattcattcatatatataagtaccaaatactaaaagccgttatccaattctagcaaattctaacaaacatcattaacagaatttggcaaataagaaaaaaagcataaatggcagacaacatatgctcctttggccaattaagttctgccagctcagcaatctctgtcgaattagttatacgaaatccctcaaatgctgaggtttgatgattttccttttgggcctctcgtctgtgcttgtctcccttgtgtctgcttgaagcatttctgtttcagtgtcattcgattgatgagtccattgttgttgctttattcctttcataaccttccctccataacaaaaagtaacatgtttaggaacataaagtaaagatagagctttaaaacacacctttttaaagttgtcactgtggtcaagaagagaattaatgatgtgccgcaaattagcttccttccatcactctttatttgtcatgcaatccaagaaaacatggcatgctttctttactcaagctacggtggacacaaatggaagaccaatctacacctctagtacacagtctagttcgaacggcagacaatcatgacacacactccacatgaaaacttcaactcgcagccggacctacaaatttcaaatatgcgatcatgttccatcatctctcaagtactcattgtccacaatactattcataaaaaattacaagctattcagatagaataatttccaaacttatcaagtaactagatacattgatcttcctaaatcgagttaatcatagggactttcaagacaatatcaacatcagatgtactaaaaatataatcgataataatttcattccacattctttcacctggtatcattaaatcttcaacccttagatgacttacctcctgagatagaacgacaatggagattataatttggttaggatccctcaactaaggctctgacaacaccttacaagatcacccttactaataatccatctataaccttccttgatcaatacttgagagctgcatatgcttctccaacaataggatagtaattaaagaattttggagtaattttcaaccaacttcaaccaatctttttttgttgttgtagtcgggtctgtttttttgccaaacctcgttccgttttttacaaccaatgatatttttggccaacactaactagtttttttagataatcattgatcaatattttttttttgatcgatgtgatttaggtttttattattggaattatttttctgccggcattaaccataattatcatattatcaccaaaattatcacgtaggtatccacactacattagaaataatagataagtgacaaaatcaatctgtcatatttttatttacatagaataacagatgagctggcaacatcaatctgtcatatttttaaccaaattcaaaatttccttccgtcatattccaatcggtgagcgtgtcgtttttttttttttaaggagaaagcgtctcacactttgagagaccgaccaaaatactgaaaataggtatttatatttttgtttcattttactattcttcctccttccatccaaacgcttcaactcaattcataatccacaaattctccctctcttgtgcggttcaccactcagagactcaacaaattgcttcgcctttggctctaacgtgactagcaaatcatgtttcctcattctcgccgaggtaatatttcattcgctctttgttctcattttctttgttttcatttttgttctcactctctctctttccgttcagagtgcgttctctctctctgttcagacttcggagtacgcttcctctctcacagttgttcgtcactggtctctgtgatctaggtttcgttttttcttcagtcaatttgtgtttcgagtttgattttacgattttgttttctgtctagggtttcattatgccataccactgaagaacgaagtttatctctctcttgtgacttgtgagcaattcaaattgcggaggtataagattatgtttgaactcataatacaactaaattgggtggatttttttacgtttgaaatgaaatatgtttgagctcataatactatgtataagtttctttgagctgcaacaaaaattaagaatcttcccctttactagttggaagaccatactggaataaacgaaacagttggcataatttttgttgggttatgtgtttatttttcaactgtggttcttgggtagaagatgacaactgctgtgtgggggtaggctgggtgtgggtttttgtcccaaaccaaagggtaggttgggacaagttggaagttcatttgaggggtgtgcggttgctaaggcctgtgtttctgattcttgccttactccttagttgaaacatatcatcatttcagttttcattctctggcattctgtgtgcagaacagaacctacgcactgcattggaagatacaaga

SEQ ID NO: 3242 - DNA, 1311 bp, Glycine max
  Intron number 5 from transcript Glyma09g29460.1 (locus Gly ma09g29460) derived from phytozome v7.0 (chr-ID Gm09; pos 36344973 to 36346283)
ctgctgcactaattaaggttcctttttaattattacctgtgcataaacttatgtcttttacatagttatcagtatcctaaaaattaaaatgagtttgtctgtcttgtggggaagggacaccagtaaaccagactaagatatgcttcttaacttctacagtaataattctggggaagggattttggtagagcttggattcaaactcaacatagttatcaatgggtctagctccttataacggaggaagctgtcataaagcatagaaaaagtagaaaaaaatggtataggaaataaggaaaaataagcagaatacatcaaaaagcattatccagcctcacccaattcaccctgaaattctccctccttattcacacatgctctctttctcttccccctctgcctaccagaatcctgctccccattttccagctaccccttctgttaagtccctctttctccttcccgtaagcaattccacctctgttccattctctccattgagtggatttccttccttactctctatgaatgtctccttgccttcttttgtagacacctgatgcaacctccctctaggtccatctttatgctttctactcaacaagtggtaaaggtcctatgagatttgcaaactgcttagtgcataacctgccgagttattattctgttccaaattctattatcttttttaattaaatcatttatgatattatattcttatatctattccccataaaatgcattgatggattagtgatcaactgtaaatatctcttctttagtttaggcacggtttttgttattttgttttgtcactacacattagtagcattttgataccattatctcaactctggtgtattcttcaacactatggcatgttgttaggtataaattcatttatatggttatatggtgtggcctatgttaagttcaaaatgatggaggttgtgctttagacatacttggatggctaaagatagactataggcacagaggtcattaaagcatataaattggatgtaggctgtggcatttctttataaagaaaattttgaatgttctttttaattgctcaagttcttgtcttggtggatgcatatctccttattttggtaaacaaattaaacatttattaggtgtttctgggtaatatttatgccaattatctcattttatagagaaagaacaaacacatactcataattatcctttttgtcttttcaaaatgttatcttcacaagttcttaaattgattttatgaatgactattcaggatagtggaactgagaagcctgttgttgcttttat

SEQ ID NO: 3243 - DNA, 2240 bp, Glycine max
  Intron number 1 from transcript Glyma17g37900.1 (locus Gly ma17g37900) derived from phytozome v7.0 (chr-ID Gm17; pos 41632719 to 41634958)
gaaaggttccatcagaccttataggtgcgtactctctcttctttattaacattatctttgttctttattaaatttaatcgtaataatcattttagttgccatcgttgatgacaatgcatgcgctatgaaatattttttaaagtttagataaaaaagttaagcgtttgattttttataataagaatataataaacattagtttgtgtgtctttagtaatattgtgaaatgtgaagaatcacatattctacacactaaatcataattagcagaagcataactttgttacttatttgaaaaaaataattatatgtggagatatattatgtaatttttataacatatagttgtgccctttttatttctttattatattaatcaacttaattatcacacacttttctttactctctcattttgttttctttcttcgctattgctctcatctctctttgttataaaacaacttgtatgaatttattatataaatatactatagttcaaagtaacatctactcccatttcacttacctgagacatgtgaaggattcgcttattactatcaatatctggacactaactcaccctactggcatgacaccgaccgacataaatgaaagagaacattacaaattattgagaaggacttctggtagcttatctgctcttggattttagtcagagatgctacagtgaatagaagaaactcttatattctaataaataatgccttggtagattgcagtgacaatacagagaaataaatatatttttattgcttagtactttggttacagagcaaaatgaagtaaaaacatattctaaaaacctattttttatagagaaaataagagaataaaagaaaaacaacactactatattaaaataacaaaaatttaagcaaaaaaattatcaactttgtacatttttcttttcttttctttttataccttataattttattttatcttcatataaaataatttactcacgggattaaatttaaaaatatatgttcacctaaacaactttgaaagtatatataaagggtttaaccgtttaattctaattttccactttttagtttaaaatgtgtataattctggtctctcaattttttggagttaattaaggttttaattttaaaattaggaaaacttagtcccttggttattatttttttctatttaaaattctgaaattactattttcttgggaatttacttatggcattgagatgtgaaatatttttttaaaatttagattaaaaataatttagtaaaaaatttaataaattttccgaattaggagtttataagaaaatatgttagtatttgaagaggggaatttggatttttaaattaataaaattcgaaggaatttataagaaatggtgttaatatttgaaaaggggaagttggttttttattttaaataaaatttgatgttttgaattaaaaacaatataagaattccaaatagaaaaaaaaatcaacaaaggaataagtttattaaatttttttaaaaatagaaattaaccgacactttgactttggcttgctgaggcctagcaagtagcatctctgcttattgccaatactagagtatcagttctgattttttttacaactgctatttcgtttttatcttttttttttctacgttattctttacatatttaattcttttaacaactttaaatcccttcaatatattttcttggtttacacgataagtatttttttgttttcaagatattaaacgtaatttttttttatataaaattaaaaaatggtagaaagttttatgaagacatatcattatttccccccctataaattttatctctcttcttttcttctgatttcacaagtcatattaacgtgtactttacagtgtttattggcctaggttgagtttttaattctctgccctcaaaggtccaggaatgctgggatcaggatatctgacaaattaatacatgttattgattatgggaccggtttgattttcaacttatatatgaaattgcaaagaaaaattaattaggtgtcaaataataaacttgagaactttttagttatgtaaacttgagaactgataatatatttagttgatcacttcgctggtagtaactagctagtaaggttattttacatgtgcgtgtattcttgctaactttttttttttgtattgtaacaaaacagttgaagagttgggcattaaggagcttctgccagca

SEQ ID NO: 3244 - DNA, 1073 bp, Glycine max
  Intron number 4 from transcript Glyma10g06780.1 (locus Gly ma10g06780) derived from phytozome v7.0 (chr-ID Gm10; pos 5493226 to 5494298 reverse strand)
ctagttggaaataaagttgatagagtaagttgtgtttttagtcttgtgcattaatatgtgacccaaggaaatggatcagtaactactgtgaaatctttcctcaatgaaatgtttgaaaataaaattatgaaattgtggctttgagcttatctgcactctgcattaaggtaaaaaacaatattcaagttctgtcttccatatgtctctcatctctatcatgatttacactgttatgaaattcaagacaagtaacttgaattctatcgtgaaaccaactaaatttgagctaatttttaccttgtcttgcctattgttggtacatatggacaagcatgggacacttatacagattttccatacttctctgccactatcactatgattaacggatgacatccatcagaaaattagacccttacagattagatgaaaagtgacatctcaactgagtccatcactccatctacatatagcatgattttatgaattccatgtcaattcagtaaatattgggatgatacatgcatgcacttctttagacagaaaataattgtcatctgtaacctttcatgtagtcaaagcaacctaaacctgtcgttaacagtaattttactggaaacactcctgttcggataaacttctccgggagaagaaaataagaaggtaaaataaattgagtttctcccacaagttaaaatcaacttatttagaagctctctcatctaatttctccaaaagcagaggtgcataagttgattttaacataaagaagttcaattcatttgacctttttatccgaacagggtctttactattacagaatcttttgtagatagataaatgtaatgcaaggagtaggaccttggacatcctcaaccattgatgccaattctcaaatgaggctcctttcatacacaagctttagatttttggtgcaatagactttaggagcatatatttctcctaatttccggttattgtcaagatgtattctattgaacaatttctctaatagtttatttatttgtctattcttaggattctgaaagggttgtgagcaaagaagagggttt

SEQ ID NO: 3245 - DNA, 4042 bp, Glycine max
  Intron number 1 from transcript Glyma04g02330.1 (locus Gly ma04g02330) derived from phytozome v7.0 (chr-ID Gm04; pos 1607258 to 1611299 reverse strand)
atcgtgactatcttctctctccaactggggctcaggttctctatctctctctctcacaacttttccccatctttctctagttttgtcagagttatataattattcagagagtcttccgggtaatagctgaaaataaatagtatgtataaacaaaaaaaaaaaaaaggtaaatagtatctactactgtatgtagtatgcttctgcggttatacttctatcgtttagtttgtctgagatggtggtcactggtcagttaacgtcctatatattatcttgatcttcgtatgatttaatatttatgtgctttgtatatttttgccagatttgctgatgatcctctaacaaagttgtgtactccgtcacagataataataaattttttcttagtaatttaatttaatgatattaatactcaagagaataatttatacttatatatgatatgtacatggtaatttgtttaattctcctttaactttcttttatttgaagctctttgctgtggcttctggtgtagttttggtcgggagctagtcttgcaaaattttagaattgtttatttttattttttaaaaaacttgttggctggtgtgttcctgctgcagtagccggtggcgggtgagcctattatatatgttcaacagcgttttctagtaactgcaacaagaaaaaagtgatttttaattactcttacatccgtaaaaaattcttcatattcatgtattttaaggcagatgttatattaacccaaggttgctcttagtgaagaccaagaactatgtcagttgttttccctgagagattgtaataggtaataaaaagtttatagatatacgtttttatatattagaacttaattagaagcatttgcaaccccaaaattatgaagagtattggaccacgctgaaggagagtctatgttccaccttaaaagttaagttctagggtttaaaaacccaattaacagattaatcttatttaaaggaagtaacttctcaatttgaaacagctttctctggttatgatatctgtggtttgttcagctgcaaacttgcgtgcagaatatgtttatattttctttctttaaatattaatcagatgggtaaaattcatttcctttgacctttattaattgagaaccaataacggcaagtaagaacccaaataaacggggtagcaagcgaggtagggtatacataagctgtgagagaaacaagtttgtattatgctgtgctgtctaatggagcttgtcctctatatgcttttgatttagtggtatattccttcaccctttaattttatggaaccatctccaacaaactaagcttacgattctcatgagttatagcatctttactagcactgacagatttaggatccgggatggtgggtcaatttatttagaataaataatctaataatataaaagagtgaaaaaaagtagaaataatgagttcaaacgcataaaaataaataagaaatattaatataaaatttaaaacaaatacttacaattttattaaaataagagattttattaaaataagagatacacttagttattctcacatgaaaataagtccagcgtttaaaaatataaaatttgagaatacaaaatataaaattaaatatatttaattgtacatcctcatatacataatagtccgcccctgtttacccagtaatcctctacgaaagagagagagggttatataggaaaaagagaggtgtttataaaaaaatgagactatcccaacatatgtatagatacaaatgtgaagtgaaaaaagaagtctggaacccttctttagtttagagataaagatactgtcaaatggagtatcgaaaagaaaagtgggtctaaacactgataatctactgtaactaataaataccacatgtatataactagtcccagtcaattggttaagacagttctttgatttaaggttagctgtcttaaaagttgctcaactagtgaatcgtgaaccacctcacataccgaacataattgcattttttttaatgaagaaaggtgatttatttcccagcatctgttaaatgtatttagacacctacatattgttattaaaagcgaaaaatgaaattaaagatgaatggtgatgatattcttgttgttagctatggagttgtttgattagttagatcatagatgcaaaagcaatcaggagctacacatgcccaatattttgtagtccctttcagtgtgtcatggaggaccaagcattgcaatcgaaggacaagtgtcacctaaacggttcccgtagcctagtcctagctattacgctttgcgttatacacgcggcccattatcccctacaaaaacaaaaatagtgggccatttcggtggcccgtccttttcatagtttcggatagcactggattcttttctgttcttatgcacccttgctttgtcggtgttattcaagttgttcagcctcttttaagtatgtctgaattctgataagagagtaacgcatttatttgtttattcgttggtttaacttttttagtattggataaattaaatgtgaattttacagaatatagtaggaatatgatgtttgctttaaccgaaccgaattatggacacccagtaacatcaatattagtagtgtttagtggaattcacctctcctaaattctatcaataataaaagttacgtgaaagaatattgtctcaggactcaagagaaatgtgtttttttagaatgctgtacgaatattcactttttatacacatttaatcaatacttatcatttttctctatcacatcatataacctataagggttatactttttttctcttttttccctctctcacttggtgttatataacgatgtccataaattattttccgttttattatcagccaaggagaaatgtggcatgtgttgttatccttgcccttttgattaaaaatgttatattttgataacaaaaattttcaaatacctaaccgatattttttttatatttttcttcttattaattacatcattaatcaaattaatcacttatttatttatttttatttttcttttaagttataaggaactaaaaattattcaagaaacatttttatttgactaacccagaattttgaacttagatgttcatgtatcttcgtgtcaattgacacctcagacacatggtcatagctggaaggcagccgtacggtgttgggcacggtcttggactctggtctgccagcgacacgtacgaacacctatccacgtgatgtccttttttttttatatagatgttttttttttcttcctttttaagagttttcgtggaagacttattatggatatggccaggtgcaggtgttaaactgatgaagttctttaaatgtatatttagttttagtcaaaagaggttagcttttgattaacttaaaaagacttttaatgctttatatactaacctatttaaataatatgatattatgctattattctggtaaatttttattatggtatcttaaaattatatatgtatatataattatttatctattctctctctcacacacataacgctatttattataaattcacaccattatgttgtggcttatcataaaaaaattctccaataccgaatcattctagttaaaatattacttaatatatgttataaatatttaatttaatatatgtgtaaatacacgttgcagaataattaacgtaataaattgtatttttttaatactttgagtatgttatgatttttttatactttatattataaattctctgacactatcttttttataatattaatggaagaataatttgcctataaaaaagtaaacttaaacaaatgtgataagaacagaaactcgtaaacttttgaattcacgttacattaaaaatatattgaagtaccacatttccccccctgaatttttgaaataccacttaattacattggtagttgctatttggttaagtttaggttgtaaatggtggatgcaggtgaaagtttctgatcttgaagggaaagtagtggg

SEQ ID NO: 3246 - DNA, 661 bp, Glycine max
  Intron number 1 from transcript Glyma13g07120.1 (locus Gly ma13g07120) derived from phytozome v7.0 (chr-ID Gm13; pos 7298478 to 7299138 reverse strand)
gtgattcgtctttccaaacttcttttcacttcgaggttgctgcttcttctccttcaaacatattcacagatttttaatttcactattttttttctgtcaattaataatttctattcaaaatctgttcctttttctccatacccattatcgctcgtgccccttttctctctctggggtttaaagtttaaacatttccgtcttttgcttattgggtcgttttcaaattcacacgcaactccgaatttcattgcccgtttttttatatggattttgagtctacgattattttggtgtgtatttgcatttctgatagcgtttcaaatcattaatataaatgaaaatttctgttcaaatcgttaatatatgaaattaggtaaaatggggtattctctgtcattcatgcttagtatttttttactttcaaccttttgatgcatttgattattggtaatgatttgttaattgttggtttttatgtataatggtgtggcaatctgtgtctgaaatggatcttgcgtagtatttggaataataggttttcgtgtgaagagggtttgcgtagttgtgtattatgttatgttgattttatgtgcacattggagattttttctgattggttctgttttttttttttctgtgtgcgtgtgtggtggcagtgaga

SEQ ID NO: 3247 - DNA, 7481 bp, Glycine max
  Intron number 1 from transcript Glyma15g08880.1 (locus Gly ma15g08880) derived from phytozome v7.0 (chr-ID Gm15; pos 6300931 to 6308411)
ctccaaagtccttcaagcaattggccacttgagatcgatcgatggatggtaattttttcgtaccatataatatcaattaattagttgcttaatttatgctatgtttgaatttaaatgtgacaaatcacttgtgtgtgtagataggacacacagtgattaattgtgggtcggtaggtagattaacaaaggttatcatatcactatatatgatggaaatttgaatcctttttaaaaaagaaaaatgtcagctatatatggagtatacataacacaaaccctaaaagcataacccaaacaaaccctaaatttccatcgttgattgagaaattgtttagttagagtaatatactactagctaaagaccgcaaagaataataattagagtagaaaggataccttctctctcgtctcctctttttcactctctctttctctctcttatcattcaaaacactgttattgcagtttcctaattaaatacttctcaggtaggcactttatgctgattttgggcctatttctgagtatgctagatgtctttgctccccatggccatgcgagcttgatatatcatacgttgcatgttattcatacaaattgacgtagaacacgaaacgtacttgaattcggctaagtattttaaacgaaaacgtgttttaattaataaaacagaatccttctttaagacaatttgtacggtaatgtggtccataaaaattgtgtcttgttagaaacatggtataaaagttaattgttttatctatttgtctctctcagcatccacacaaacgttggtttgttcaatgatggtcatatgtatgtatgtttagaatgtgtacttaatctagccatttgtgaatgtgaggagagattacacgaaaatggccttggacgtttccttcttgtttgactctttgtcattagattgtctatatatacttattgtctcttaaaaaattctatccagagtcctccgtaagtatactcacaaatagtttctaaaacaagaaagggaagacaaataaaattaaatgtgaatttttgtcttataaataaaataaaataaaaaggaagtacatactgtagatatagagaactagatcaatcataagctcaaacctaccagattgttctggtggaaggacatctcagttagatgttgaggttcgggccatacatagctatgtaagtgtgcatgaacttgtctgcttctgaaaatggcttgcaaacatactaattttttaaatgagtttactatattttaatgggccacgtttgtcggcaatctttccctccctgcctctttctgtatatacttccatgtccatgtaaggttttaaataatgaacctcaactactgtattctttccaatccatatatttcaatttcttacaagtcgtacatagaggaactttccttcaacttgtacctaatcttatatttatcacagagtcagtgacatagcaatatgagcaaaccaaatatttacttgaaattatgctctcacatcatacatcgctgtcccattccaaatacctcatattagatcctcagcagggtgaatgttggcatcctataaacattgtctcgtggtcagtagaaaatcgtgcccatgataaagtatactagtatactaagatagatgtcattgaatgatattctatcatacaaaaaggaaaatttttaaaatatacattttttactttcattttatttttactttttacttttttttactagcattgcatcacttacctcattcatcactttctctttctatatttttttttctctctcatctttccatccaaatttggaatattcacatgttgaattgattcagaattaagttaaatcaaatttgaactaattatttttaattgaattggttggtttaggattttaatttctttttatatttcaatcaatccaaaccaaatcaattctgttaagatcactttgtttggttcaagtcattgggttatgaaaaaaatagttattatattttttttttcaagtttttatctttatttgttatttattttatataaatatttaattttaaattaatgaaaggtaaaaatgttccttattctttaatgactaattatttattttatttgatatttatttttatatatttatcactttatatatattactaatttctttattaaaaatataataaaaagatacataataaacatgaccaaattaaaatacatagtaacaccatataaaattataagaagatcaaaataattaaaaaagaaagaaaatacaaaagtagaagaaaaaaaataagttttaaagactaaaatgtattaatctaaaagttaaaaaatgactaatcaaatcattgaattgattcaggttggaaatagataaatctaagaattttgaattaaaattgaattgaaaaaatcaataattaaaccaatttaattgttttaatttggattgttcaattcatcgggtcaatccaatttgattaacactcctaacccagatctttctcacaatagaatggaatattactcgctaaaatccaaaaatattttgaatgaacaaattattttcatatacccaaaaatgaacaaattaattaagatactagtaataatttttagattttaatgataatattttgaatgtaaaggtattttatactttcaaacaatcttaaattgttatatcattcaaaatatttgatttttataataattacttaaaaatatatacctaaagttttgcttaattagtcagtaaaaaaaagttgatagtataaaaaaaattatactaacaatgtatcaaaattaaactaagtttttatacatgtttgtatagttatagttaaaatatttaagtttgaacaaaatattttttgttcagaaatcaacttcatggttcttctctcttttttttttccatttttgtgatccatcaataaggcttactgctattgtaatgaatttttaagatttgagatgtctaattaagttagaagttaagactttataatatttgatattgatatatccaataaggtgtgcattgcttatattgcgaatatgcaaaacacactgaactaatcaagcaagttatatgcaaaattcaccttagcctgttaggttattacttaagaaataagatattggaatgaaagtatatatgtgacctcttttgatcaaaaagagaaatatatatgtataacctccgatagctaacttagacctacctcacacgggtccttcacgggaaaagtaatctttaggagatcagatcaagaattgtgcatataaaaccaaaatagctacctttctgcatttaatccaagtagctagaatattttatttgatttgaggctttatcaattatataaaacagggataaccatattaaaagttaattaattgtgtcaagaattgaatcaatttaaaactcgaagaattgtttgctttaagaaaatattttgtttccattctctattttttttataaataattgcaaaaatatcacattatttttggctttgtttctgtcttcaaagatttgcataagtaattgtgaaaataaaaaaaaaattactatgtcctatataaactatgtcttcaaaaatatttttaataagttttccttaatttccatgaactattttggacttaatttgaaacattaaaactttagttacaataatgggtatggcaatccaattattcattgatataatgtatcatacagttatgatagatcaataatactaacagattaatttttctaagttgaatgacaaactattagtaaataatcattttataaagtttagtaagtaaatctttattatagtgataacaccaacaaactaactgcataatctgcaccgtgtatggtgcctacacgtcaatgtttgttagctagtgtatatagcaaaagcgttcagaatctagtgtatatatacatataaatataatatcatcatgagctaaatgtttacactatgttagttgatatcaatgatgtatcacttacagttgatatttgtgttttgtgcatcgttatatttaataaactttttaaaaaagccattgcaaattgaataatcaataaatggtcgacagtcactattctcataattaaagtacctactggtttgtagggtgccgtgcatgctgttaccttgcaatagtcaattaatagtcaattttaagtatacatgtgcctgtttaagcttaatctcagaaaaatttaaaggtgtataatagtcacgttggataagttttactttttttttaaaaataaaaagtgttctttagaagttaaaaaaaattgaagaaaaatttaaatgaaatttataccataaaaacacttttgtaaatttatccatgtatttatatgttcttcatttgtatggcaataaaatttcttagaagtagacattgtgtttaatgatttttttattgataaaagtacaaaagatacctcaacccatttatcaaatctaaacaatcaaataaaatgttaaatcgtccaaatttcctatatggccttttttggaatccgcacatgcccaatacagagtgaatatggatttagttggatctacatcaagcaagcatgaaaggtgtattatgtataaagttagaactaattggactctatccttataaattcattgacaattttatcaaattgtctatcatgttaaaattatttgtgatacaatatgaatgattttctttatctgatgatgatgtatctattttcaattatatctattaagaaactctatctttgagagtctaatttatatatttttttcatccaattttttttacaaagataaaaataataaatcgcattaaaattggaaatgcatgaaaataggctaaacgaatatcaatctatttctagcaatgatttcatttaaatgttctttttcagttctttagaaaataattatttttcaaagcaccatcccctaaacactatatgggttattagatcataataaacaattaagcatagaaaataacaatagaaatagaattgcattaagtagataataagaaagagttatattataagagttggtctatcagactcccaacaatgggatttagcctctcattgacatgagagttacactttaggagctgatgtagatagaagaaaggaagtgatgaataaaggaagagaaggagataatgaacatagaaagagagtttcccctatttgagatactcatgcttaggatgtattcattacagaactctgagtttcagtgtgttgtttggtttgtttcatacttcttttataggtctaaagtagcttaaaattcacctgaaattgcgttaagcgaaccttctaggcttagcgagtatagtgatgatcacacgcttaacgcgagattcgcgctaagcgtgagctggccgataagcaaggagacgtgttggacctgtcttacgcgctaagcgagctgtcccaatcttcaattttttttttcaaagctttttcttcacgtttttatatcaacattcctccaaagcacttaaaattttcttcttttgaattttgctggtcaaatattacaatgatatcaattttttcactatttcattaaaaatatcgttaaaatgaagaaattataatcattattcactaaaattgactatcaatttaactcaaatttcacagttattaatccttctatacactgtttcaacactctccttcaagttgaactgaattcatctatttgttgggggcagttatgacttgtgtatcattttagtcccaatacctttttctttggtttgtcccaatatggggctttatagttcttcaaggcgttacttcaagatctggccttgccacattagtaaacacattccaggggttaagcatcctattagtaaatgaaaactgtactacttctatgtttgctatatataacccaagtctaagaattttaatggtttcaactagcctttcatagtccaacttttcattcttgaaaataattttaagttcatatgaccatatagcagtatatgaagaaccatacctccttaatcttgtagtgaatgttaaagaatacacaattgagatcatgatttggaccaagaattcttcttttcaaggttactcttgtttgaatattgttgatcaataagatttttcaagaatgacacattattggtctcagtggtatagaagtttcttagaatttccagagcaaactcctgtctattgttgagtcttcctcttgaagaaagtccttttttgaatcacatttatgtatcagcttcctaattatacttaacaaaaactgaattgaataaatttataaattcatcatataattattttttccttaaaaaaaatcctttttccactttatattcaacaccattgcacatttaactatccacacacctacaactctcacactgtatcattctcatatattttctcccaggtaaactttaactagaatttttattgattaaactataggaaaattgttttctacaagtaaaaccactaaaaattaaaactatcttcctaggatgaaagggttgttgggaaggaaaacatatatttcctgccatataactcaatcaaactatataatagatgattaaagttaaaattaggggaaattatacttgtaatttcttactttctcaagttactttttaaaacttttttattatatatcactaaactcctctaaagtttggattatataaaaaatgatataactacagttaaaatcgtgattaataaatataaaactctagctaaattaaataaaaaaaaatattgagtgttaagtgttgcaaaaagaatgaataaggtccctgtgatacaaagtacaagatatataagttaaagcgtgaaactataaaaaaaaataaaaaacaatagagtgtactttatcctaaaagttaaacatccaaaatacattacaccgaaggataaaacttttatggtaccaaacaagttggatgaaaacatgcaccatgatgtctttgatttcacccaaacatattacagctttgttttatttttttggttcacattgccatgtttatatgactacaatattcgtactgcattggtcctaaatttttcgcaccatataacatctctttaagtatatgcaagttttagatgtacgtaacctaaagaggtttggtcagttgaatgagtggaaacgcatattctgatcagtcactatgcaatttctgatgtttggaatgcatatttgcatacatccaataatggctataagtttttcgaaaatgcttctatatattgcaagcaattttaatagtgacttttcactctgattatgtgggtattaaactataagttatagcatcaaaaggatgtgattaatatgtaacaagtcactttttctgaatactctttgcatgcaggactgcaagaacgacttacttggattggggattta

SEQ ID NO: 3248 - DNA, 2182 bp, Glycine max
  Intron number 1 from transcript Glyma05g21580.1 (locus Gly ma05g21580) derived from phytozome v7.0 (chr-ID Gm05; pos 26274763 to 26276944)
caattacctcgtttatcgctaccttcaagaatcaggtttctttgcttctcctttccttctcactctctctctctctctctctctctctctctctctctctctctcttttcgagtttcaaaacccatcgatatgtttatatacttgtctccttttttttttttttgtatgtgtatgcgtctgtaagatgtcgtcaattacctagtttttcctcaccttcaagaatcaggtttctttgcgcttcattttttctttctctctctgttcatgtttcaaaacctatcgatatgttgtatacttctctctctctctctctctcgtgtgtgtgtgtctgtaagatgttaaggttctagatgtttcgaggagtatgatttttttttaatttcttttgaatttgacattttcgagctggtttgggcgtttcaatgttgcttcagcggattagggtttgattaatgagaaaagaaaaaattagtcacgcgggaaaaaattggtccttaaccttttttttttttcccggttgaagatataaggaggactggaatttgttagatctgctactgaaaaaaataataaatgtggtgttaagttgatgtttgctgttctgaaattctctgcttattttatgagttatgatttttagttaagacacattgagactgctgttgtatgttgataatgaggtggtgctgctggtttttggaattggttgctgttcattttatactgattgagatgcgtatactgtatagtcaatgaaaatgaggcctatgacgagcttaactgtttctgctcgccttctcctacttaaatatgttttgattgtggttgatataagttcagattatatttgcaaaaggatggttgaattattattgattgaaaggaagcttgatggagctttgagctatatggaactgagcgcttgagacaacttagaaaatgattctcatggtttgaagaataagtgtttgcttggtctttttggactaactgtcgttctgaactgcataacatacgatataatatgatagatataaaaccattctgtgcctattcaacatgatattagaatattagatctcctatgactaagtggttttgtgtttgatctttgctgtctgcattctgttaaatgaaagttaaatttagctcatggtatgagtgagcattgcattttacacactacaagcttatgtggagatgacctatagaagtattagtaaggcgagtagacctggtggagtgtaaacctgatacaggcccaaataagcctgttattttcgaagtgtatctgagaagggccaaagggagaaaggagtgactaactatgtagtagtagtgtgcggaaataggggggataagtgggaaaagtgtgataacacaatagcggtataagtggagagaggtgggaggaggtggtttaggatccttggtagagtttatgcctctcaaagtgcctaaggaaagtttctcttattgttgtcttccccgtttatttatactgtaaacagtaatatgtctcaggatctggtccttaattccagacctgaatatgtaaataatacagatactttcagccctttttcctatctttacttgatacctatcaaacccaaccgctaggggtagaggagacaaagaaaggagatgtaggcgaaatatcaagaaggatttagaggtcaaagtttgtctatagatatgatttatgacaaaacattatcgcattgtttgatccttgtagcttccctcatctagtgggaaaagacttggttgttgctgttgttgttacttgtagataacaacttaagcttttgggagagttggtccttcaaaatatctgtttgaaattgaagaatgttatacgattgtttgtgatttacactttgttttaatgtaattgctgatgttgatttcactttttttaaaatttgatgtctgaagttattttatgatgatatatgttggtgctgttgtcttagaggagtcatatagactagggcattcatcagaatttggaaaacttcatgaggttgagtttataacataatttgtttactggaaaataaaaagtcatgctttccatatatatgaagcttttgatatttaagaaatcactctacagtctgcatctgaattgctttactggttacttgtgctacgtcactactgcaggtttcacgc

SEQ ID NO: 3249 - DNA, 851 bp, Glycine max
  Intron number 3 from transcript Glyma06g24600.1 (locus Gly ma06g24600) derived from phytozome v7.0 (chr-ID Gm06; pos 22161954 to 22162804 reverse strand)
gctcgtgaccgctggctcaaaccaacaggagtgatgtatgttttggtgtaacaaagcagagaaaaaaatagtattatgatgtatctacctgatttgatgttttgtggcttcttgatacgcacattactccttacctattcttccatttgtggtcttatcttgtgttaaatagatattatgtagttcattcctcatgtagcagcatttccttctttctttgggattttgttgagatctactagagtaattttggtcactaaatatttgattttttttctatattgtattgcatatgcaaaatgttaccagcagcagttaatttttgaagtttaatcattaataaaaaaaatgttaaacacctcaatttttgtttccatgtttataaccagagctacacacaagacacagttttgttctgtgcagcatattctatagttttcaacagaattgggctagtttcaaaatctagtcattagccaatgaatgtagtgccaaacctaagaaagtgacttaaatataaaacttttctataacttgaggcaaaggagtcaggaatgcatttgctctggtcctatacttgtatctatttttaagttgactcattgtcttggcatgttgtgcttaacatgctcttttcattacattaccaatggtgaattggtgataacttaaatatataaatgatttggttattgcctctgaaggtaactgtttgtcacgaaagtggtatggttatgattatgaattgcaattgttatgaaaatctttagtgcatatgagtatttctttggttgctttaggtgttacctattggttatttaagcggctctattttggcaggtatcctagtc

SEQ ID NO: 3250 - DNA, 1095 bp, Glycine max; identical to SEQ ID NO: 2317
  Intron number 1 from transcript Glyma13g33380.3 (locus Gly ma13g33380) derived from phytozome v7.0 (chr-ID Gm13; pos 35237447 to 35238541 reverse strand)

SEQ ID NO: 3251 - DNA, 2110 bp, Glycine max
  Intron number 25 from transcript Glyma08g17250.1 (locus Gl yma08g17250) derived from phytozome v7.0 (chr-ID Gm08; pos 12746611 to 12748720 reverse strand)
acaaggtttgcttctgggattggttttgttaatttgtgaagtgtgttgctgatagtggttctttgagaactattagggttaacactctttatgttttagtttgtagaactttcctttgaatatcatttccaatttccaagtaaaaatgtttgtgggcattttaaggctcctatttttcattgaaaggagaaatttattagatgcgatagaaataaagagtgaccaagaatctgagagatgcaggagaaagttaatgaaaagtttacaatgtgatatatattttctattctgtgtatctgaatgaattgactgaacttctaacagcttctttaacattcattgttggaatcattacttggattcctaactgaaatctaatgattgaaactgattgcttgctaggctgacagcttggcgagctacccataacaagaaaaagggcaacctagtgcatgagactctcccctgaggtctggggagagtaatgtatgcagccttacccatgcaaatgcagaggctgtttttaccattattaaaactctaatccatctgcttctctatgatgtactaatagtatctagatgccactccttatggtcaagtgtcttgtaatagattcattacgtgttatataactgctggaaatttagaagtgttttgcatccattatatggaagtccaattttagtagttttgcttccatgcaatgataatatttatgctcttaattctaacgtactgtattattgaatgtagcttgtcgaaataggtggagtgagtggaccttccactttatcaagtgatgaggtgggcatacatttttatatatcaatttcactttagtcttacacactttcttatgcaatgttatgaaaatatgaaatataccaatctgttgagattattgaagtgtgcacagtagtcagttaagtaaacagtatgggcaaatgacaagaccttgtgtggggactcttgtattgcccccagaaaagatgtgtgtttttaggggtgtgtgcgcaaaatggactattcaatgatcagttagaattgttccctatgtcactgtgctcctttgatgcatttggtgtactatatgatggagtaacttttcatttccaataatttgtgtattataaaaataaaatttggtttgtcacttcacaataagatcctgattcctgctggctggatttgtctatgatggaaaagaattccagattcaatgtcacaaattgaattagggttctcatgagtcattgtaaaactatggatggtacctttgcaaggtctggaatggttgtaatagagacttgaaagtgggaattgtacctattaggatggtataattgcaccttgaatgatttggacacgtgagacttagcaatattggtgttagaagagttgctaagatgtagtccaataagtaggagtgggccacagaagacttaaagtgaacccactaaaagggttcagatctaaattcttaaaatgtgggtttgggcctaacttgaccccaaaagctagctcttggggtgagggttgcacctcacttatatactctatcttggccttatctctagttaatgtgggacatgagtttttcccaatataaatgatctcttgaaagatatgttttttgacaagaatgcagtggcatcacttgatacatgtagccaatgcacagtgtagaagggaatgagttctaagctaaaggaaataaatcaaataaaaatgtaccactgctatgtgttaagaattactgcactgtttggacagtgagaaactgagagaaagtaagccagagagagagagcagtttttttaaaaaggattttcttagggagttgttgaagactctacagtggtgatcagtaattataagagaaggaacctaaacaatgttattaactataagtaaatcagctacaatggtaagctatctctaatagctcaaatgagttgtgctagaaaagatttgcaggagtgccccttctactttgttttctgtttaatttgctctgcaaaaactacacctgtgattgtgcttgacattttctcccccaacttaatctctaggttgttgctgaattgcaaaaggcaaaggacgaaat

SEQ ID NO: 3252 - DNA, 990 bp, Glycine max
  Intron number 5 from transcript Glyma20g23450.1 (locus Gly ma20g23450) derived from phytozome v7.0 (chr-ID Gm20; pos 33310699 to 33311688 reverse strand)
tctacagtctgaaattcaggtactaaatcaaatagtttagaaaataaaataacttaaaaatgagtttgtataatgccaaaattaacttaaaatgtgcttctgctttctaatgacttaactttcaacccaaaagagaaatgtaaataaaaggattatcattccctaaaaaacgtaaatacatcttaaaactatgcagaacactgttcgaaacatcataacatttgagaaacctctaagaaattctgtgactttcatgatgcaagctggtagctgcatttctaaacttgctattgttagctttcatttaactctaagtgaattaaatcataattcatacagacgatgattgtgaaaattctattcaaataaaaaagaacttactacttggtctatgtcactattccaattcatgtcttctttccctcaaaaagtgcttcttttatgtccatagcacatggataacaatcactagaaatatcattttgtctagcattcattatctttttagctagcatcttcataattatcggaattctagacttaattgtattttagttcccttattattgaagtttggttttggtctgcaaaattttggggagtgaatttggtcccctaactattttaattatgtaattttgatttattcattaacttgacatccaatatttaatggaaatgatgctgtgacactctcttgtactgcaataccaacattattagatgtgaagttaacggatggatcaaaattacaaaattaaaatacttgggaacaaaaattgggcagaaaaaaaaaacagggtggccaaaattgaatttcaccaatgctaggaggactaaaagtgcatttaagactacaaattgcaacttcttatttgatgctagttatcatgattttattatatattgattatattcctttaacttgcttatgtattaacatttgattcttaagacaccaaagtcaattagtaccctgtacaaagattc

SEQ ID NO: 3253 - DNA, 4924 bp, Glycine max
  Intron number 6 from transcript Glyma17g33880.2 (locus Gly ma17g33880) derived from phytozome v7.0 (chr-ID Gm17; pos 37779015 to 37783938 reverse strand)
agcacattagcttccaaggtactttttgttaaactcagaaattaggatgaaaactgtgtcctctcctctggagaattctcatttaaataatatgatacaatctgatttttagccttgaagtttgctaaaaaattatatatggtaacccacagctgggctaagtaattaaggatataattacacagttacagctatacaatcatacaagatatgctgatttaaagggccaataaatctgcacaaataatatcaaataatctgcctatcaatcttattgacatcccccttcaaattgatgttggtgaatctacaagcatcaatttgctgactaggaaattatgccgttgacgtgtcaaagatttggtgaggacgtcgactagttgaacaaatgttgagacatgaggtagagtgataattctgcggtcataggcttccctgattgaatgagaatcgacctctatgtgctttgttctttcatggcatacaggatttgctgcaatctgtatgacacttgtattatcagcatacaatggagttagtgttgcttgtgaataaccaagttctgacaaatagtctcagagcatgcggtagacatgaaccgatattctgcttcagtagaggatttagagaccgattcctgtttcttgcatttccaggagataaggacatctcctaaaaacatacaccaaccagtagtagacttccttgtgtcgggacatccagctcagtcagcatcactgtaggcttgaagttgtattggtgcacttgcaggaaagaagagaccatggctaggagtgacaaacaaatatttaatgattcgtcgtactgctgtaagatgcaagtgtctaggattttgcatgaatttgctgactgtgtggacaacaaaagagatatcaggtcttgtgatggtttggtagatgagacttccaaccaactttctatataaagttgggtcttgtaggagttcaccttcatctcgtcttaacttgacattaacttccatgggagtgtcaaccgtagttgtagtggtgagaccagctagctaaattagatcctgagtataattgtgttgagtgacaaagatgcctttttgttggaattgtacttctaatcccaagaaataagtgagttgtccaagatctttcatgtggaaagttgtatgcagcaattgtttgattgtagtgatagcctcttgatctgagccagtgactacataaacaaggaggatcacaattccttttgaggtgctttgtagaaagagagatggatcatagctactttggatgaaggaaaagccaagtagtgttgtgctaaacttttcaaaccacactcttggtgcctgttttaatccatacaaagaacgttttagcttgcagacattattaggtaatggtgaggacataccagtaggaagtttgatgtaaacttcttccttgaggtcaccatgaaggaaagcatttttgacatctagctggtgaatttgccaagatttagatgcagcaatgacaataatagtcctcacagtagtcatcttagccaccggtgcaaaggtctcttcatagtctaggccaaattgttgcttatttccaagaacaaccaatctagccttgtatcgatctattgattcatctgaatgcaactttatagtgaatacaaatttactgccaagaggtttaatcgatggaggacatggaacaatgttccatgtttgattttcctctagtgcaagaagttcagtttctatagcatcctgccaacatttatgctccattgcccatttatatgaagaaggaataggaacagatgctaaagttgctgtcaaagataaaggttaagaaaaaccatacttttccggtggtttacgaatgcgagttctatgacgtaaagggattggttctagttgaagcgctgaatcagcaaccagagaatgatcgggagagggccttggagggattgaaggctaaattagtggaacaatcggacgtctttggtaaaccatgaaaggaggacgagcttgttcttctgcaaaactgttaggaaacaatgacaaaacaaatttcgatgtagaagagtgagtgtcttggttagtagtaaaaaaatatgtatcttcttgacaaatgacatttctagaaatccgaatcctatgtaaatgaggatcatagcatataaaacctttttgatgggctgagtaaccaagaaaagcacatttaacagattgagctgtgagtttggtgtgttctggtagctgaagatgaacataacagacacaaccaaaggtgcggagagttaaataattgggtggcttaccaaataaccttaagaaaggggaattattgcttaagacttgagaaggcagccggttaataaggtggacaacagttgaaagagcttcacactaaaaacaggagggcacaaaggagtccaacattaaggtacatacaacatcaagaagatgatgattttttctttcagctaccccgttttgttggggtgtggaaggacaagacctttgagataatataccattttcctgcaagaactcttgaaacaaatgagatgtatattttcccccattgttagaacgcagagttttaatttttgatgaaaactgagtttgaacataggcatgaaagaatttgaatgcagagaatgctttagctttagaacgcaaaaagtagacccatgtaaaataactatagtcgtcaataaaagtgataaaatacctgtaatgtgcatgagatattacaggtggaattccccataaattactgtgaattatgtcaaaaggctgatttacatttgattgatgaattggaaatggtagaattttacttttaccaagtttacaagaattgcaatcaaattgaacagcactaaaagatagggaatctttattgtcaagaactctgatttcatcagttcatgaagtacattggaatttgggtgaccaagacgcttatgccataattgaaaattatcagttgcagaattacaagaaatagctgagcaaaaaaaaaagaattacaagaaataaaaggcagaaaaaaacatggtgataacgatgaataaagaggaaaaagacgtccaactttaggccccttcgcgatcatcttccctgagtgttgatcctgcacaagacaaccagattttaataattcaactctacaatcattatcaactaattgaccaattgaaataaggttactggtgagatcaggagaaacataaacattggtaagagatgaggaaatatcaccaattgctgtgataggtaaattgtttccatctgcagtgtgtatttgcaaattaccagagtaatttgtgtcattggtatgtgcagcaacattgttggtcatatgattggatgcgtcaaagtcaaaataccaaggagagctgggtaaagaagctttacctgaaagacccaaagcagaaaatgccgaaatgaccatttgttgaaccatttcaggggttaaagttggcacagaagcaggtggattctgatccccataaacgggagtagtagaagagccatcaattgcagtgaaggctgttgcatttctccatggtggtctgatttgacattcttttatgatatgaccttcttttttgcagtaattgtagaactttttaggacaatgggaagcaaaatgtccatggcctttgcaacagaaacattggacagtactcatgtctcgtccttgaggtttgccttgtactgcatatgccacaggaaaggatgcatatttatgttgttccatgtttgtctgagtgaggagacgttgttcttcacgaagtagtttatttaggtattcatccaaggaggggacaataactctattcattaggttggttcgaatgccctcaaaatcaaatatcaatttcataagaaattgatctcgttttgtggtgtcatgaacattttgggctgcaatttgtccttcagttgacaaatctttatagacaatgtcagtatatttagcccaaagattcatgaaatgagaataaaattcagaaattgagagactatcctgttgaaaaatgacaatttcatgttcaagttggaacctgcgagcagtgttgttttggttataaattttcttcaggtagtcccacatctttgttgcagtggtgaagggtctaagattgaggacgatattaggcttaacagagcctatgatccaagtcatgacctgtgtatctttgaccttccatttgacacgtgtctccttatgcgtagttttgtcaagagcataatcagttccgtcaacatgagcccaaagctccttacctttgacaaagatctggaactagaatgcccaggtggaatagttatttccattaagacgaacaaagaggacattatatttttcagtagacatgatgctgagaaaaaaaaatcacaggaggagaaaaaacaagaaactcgagaaatcaagaacagcaccgggtgaacagcactgtatgaacagtaccttgatgtgaacagtgaactgggaactcgaagactgggagcgcagcgaagaaaaaaaactaggttgggatcaaaacctagaccgataccatgttaaactcgaagaaattagaatgaaaactgtgtcttctcctttggagaattctcatttaaataatatgatacaatttgatttctagccttgaagtttgctaaaaaacgatatatggtaacctacagctgggctaagtaagtaaggatataattacacagttacaatcatacaagttatgctaatttaaagggccaataaatctgcacaaataatggcaaataatctgcctatcaatcttattgacacttttcctcattttaagttgtgtgttgattctgttcattcgaatttgtcagttttgcataaacttcatttttgttgcactgcagttacagctggacaacctagctcaacttctg

SEQ ID NO: 3254 - DNA, 2096 bp, Glycine max
  Intron number 2 from transcript Glyma17g05160.1 (locus Gly ma17g05160) derived from phytozome v7.0 (chr-ID Gm17; pos 3488784 to 3490879 reverse strand)
gagtgtgctgaagcaaaccaaggtaataatatataataataatcgactcccatgtaattcgtttaccattataacaaagttaattcaaatagttggtgttttaattttgaaaaaaattaaaaatactgcttggaaaaacattttgtaaaagctgcacaaattaatgattggttgaatgtaggtaaaatattaaatggtatgaatattcttgtgagacaatctgtgaagtataaaatgaaaaactattatcttttatgaattactttttttttaggaggtgaattacttatttattgtttaaatttttgttccccctcaaattatgatcggttaagaaatatttgtaataataaaaatgtcccaagccaaataatattattatttcaaaattactttttctttgaccacgtactggtagtttattatatattatatatacggttcttttttaaaagaatatatatatatatatatatatataaacacattggtgatgaatcaatgtgaaagcaattattttagagttatattattcatatataacagctcatataacattttatacaataatatattttatgttcatttttttccattgcatcatttataacatctcatgtttctttcacttaattgtttaatttgttgtataaataaattactgtacaaggtaacatctctcgttatttttgtgcatgtgtataactcgattttcttgtgcatttcttctaacttatttcctgttttgtcataaaggctgcgttcaattcaatggccccaattgaacatgttgccttttatttgtgtgctgtggaaaacagacattttttcttttcttttctggaagctcattttcatattcggactattgcttgttgttttccgttctcttttaatttattttctatcaaaatgtcattttcagttcttgtgcttatatagccacataggcaccaacggcgagacgacattaattttccattagattttttggttggtgtctaattaattcttattgaatgttaatactaagttggcgctttattttccaagttgctacttggatggtttgattgcacactactgttctttttattttatgtatcaaaaggtgttttgacttgcccactgttcttttcattttatttaatatttaatataataataataaagctgatatggcacgaatttataggtcatataagtcatataaaatagaattccacacatcagttttgactttcatagtttcataaatgttgggaatgcctttcaacgacggattccaaccttcacccacagacatgaaagccacgtgtaacggtcttataccatatgaaaagtccactgaaatttcaacacctcatgccatcgaccaactagaataagtgataaaaaaaattggagattctctattatttttccccataagtaacaagaaacttctttttcccttttttcacttatttatttgaatttgattgtctcgtcttttttcatcctgttacaaaagaaaaagacataaacataattaaaatatcacttattattattttgtgcggtattcattaattttaattctatatatttctttcttataataacattaattaagagaatctaaaaaaaaaaattaagatttatatccttatggataacctgcagggcctaagtcctaaatgaagattaggagacaaagaattacattatttttatgaataaatatatatcaacactcatgatcatatatattatccgacatcttgaaagagaaagaaaaaaaaaagaaatatatatatatatatatatatatatatatatatatatatatatatatatatattcatataaaataagtgatatgatttgttaggaaaagagaaataaaagcaaaacaaaaatgtcaaccaggtatttaaaatttgagaatgtctaaatataactaagtatataagcactctatttttactatttgtatattgcagcgttgtacaatcacatctcttctttttactgtttctaaaatttcaacatgcataacaacgttgttggtgtcgtgttctgattctgaaggacctgaaggacaaccttgcacc

SEQ ID NO: 3255 - DNA, 1653 bp, Glycine max
  Intron number 14 from transcript Glyma14g02990.1 (locus Gl yma14g02990) derived from phytozome v7.0 (chr-ID Gm14; pos 1896887 to 1898539)
aagaaatatacactgtagtgtgtgtagattgatatgttttagagcatttagaattcaataacaacaagccaagtcttatattaagttccatcatgagaaatttttttcaacaaatccattgagaaaatgaaaaaaaaaatatatagttagatgacttatactctatatttgaagggaatgggactcgaaaccatgcctcacagaatctaatgctttttgtcataaatgcagcaaattgtttttatatatcaaatcccgcatataaatttcatttattaaagttgcttgtgttctcaacaattgaatttaatattttacattatataataaaaagaaatagagaaagtgagattttaaataaaaaaagtgaaatatatgacaaaaaatataatataataacaatagaggttaaaaaataatttaaataattttcagtaatattaaattttacaattttaaaagttgtatataatgaatattttaaaaaattataagtagagagcgggtcatgtgagttaattcatgactcacaggtgttgttctttaaaaatatgctctgtgggatcttcaagctgttgatgtctgcatctgaaattaaataaccactcctttagcaacatgagattaacatcttttattatatattttggtgcacagtgatatctctgacaataacttctcctgggacagctcaagcccaactgaatgtcaacgcgggagcgtgtaaatttttattttatttaagctttgagtaaaagttgtcttcaattagttatcagttatcactgcaacatttttttttgtttttccagaaaccttgttgagagctactcttcatctgtaaatacacagtaagctgttgtctttggaatattttctgtaaaatttggtttttggtagtagccctagaatataaccttaaatttctctctttgttgcagaactaagattaattcatgcttaaaaaagaactttctatgcactgcttcacctagccaatgtaagtatgtgaccatactacaagttttaaattacttctatgatctgatgggctggtttaaatattgactcaaattctgtgacctgaaattgagtgaaataagttgatgagaaactttcaactgaacatgatttcataccaaaagaaaaaattaagatagtcatataacatgattttgtgtatgattctatttacgcaaaagttcaatgcctacttctttgctaacaatcttaagctcagatttgtacagaaattcaaataaaacaaaataaagtgagaaggataaatgtccattagggaagaaacaagaatataactgtttttcttaagtggttaagactaatttcctccttttctaatgatttgaaataaataggttgactaattctaagaaacttaaactggaagataattcgatatgcttttttattacaaccattgcatgattgtattgacattttattcttttttattacaaccattgaatatgttgcgttctttgcgaattttacctttctacgcagttgtctatctttatcattagaccattacaatttgaaagattttacagtgagtattctttcttttcaaccctgtttgtcattgttttgtcaatagatcggtactccctgaacattaattgtggtggaaac

SEQ ID NO: 3256 - DNA, 2030 bp, Glycine max
  Intron number 13 from transcript Glyma05g12900.1 (locus Gl yma05g12900) derived from phytozome v7.0 (chr-ID Gm05; pos 13300789 to 13302818)
gccggtagcgggcaatagacacaccgccaccacctctagagttaacctcagctcatccgcaaaaaaaagtttgagtgttgcctacgacacatggccgaccagcaggctaccaagtccaaagccaaaggtaagcaaagtactaggtcagtgactgacaagtcataacgcgtccagctaaagacgttaaagaagcgctactaggaggcaacctagtaccttttgaatctatgcttgttatttgatcacttttcatagtaggacacacctagttgctcatgatcctaggaatttaaataaaacaagcgcaagctcggaaggtagtcataccttacaaaacatatatatgtatgtttaggtagtgaaaataccttagatatgcatgtatgtaaacaaaaaaacacttcacaaaatatatatatgtatgtttaggtagaaaaataccttagatatgcatgtatgtagaaaacaaaaaaatacttcacaaaatatatatatgtatgtttaggtagagagataccttagatgtgcgtgtatgtagcaaaaaaatacctcacaaaaatatgcacatgtttaggtagcaaaatacctcatgaaaaaaaaaaggaaaaaaataaacaagaaaaagaaataaacaaatgataatgataaaaaaaaaaaaaaaaaaggagaaaaaagaaaaataagttgtcaagctgaaaaaccaacatgcttttgaaaagagacgatttccagcttttctttgaaaaaaattcattgatcataaccagtttttggaaaatgtgtctacacctgaagggtgaatgctgtgaaatttccccggacgcccgaaatggactcggatgaatgcacaaattgataaaagaacatattttggaaacattgggttgattaaaatagaggaaatgaatcctgagccctagcatcacatgaccataaaaatttgacacttgagtgtccgcataggtgcatgcatgaccagttttgcataaagtttctaaatcatcatttttgcatttgtgtcatggaaataatgtggggcatccctttttatccttgaaccaaaccaaaccccgacatgtatcatgtctagccattctacaaaccttgagccaaaatcctgactcaccatgaaccttgacctagggtgagaatgtcaatccttaccctcgggagcaaaaaagaaaagaaggaaaattccccaatcaaagagtgggagaaagcaaaaaaaaaaaaaaaaaaaaaaaaaaaaaaaaaaaaaaagaaaagaaggaaaatttccaatcaaagagaaagtcaaaaagaaaagaaagaaaattcccaaccaaagaataggagaaagtaaaaaaggaaggaaagaaagttcttgatcaaagaactagaagaaatgtgcagaaaggtcttttgaccagacaatatctgaacaatacagaattgtcaccaaatgaacgaaaaaagaaggaaagagaaccacaacctaaaatagtcttctccctttgattaccaaccagaatcccgtgcgctagcgacctttttctcgccccgcactaaacaaaaacagaaaaagaaaaaagccagaaaaatcaaaagccaaaaacacacaaaagccgaaaaactccccaaaagaacccattcccaagggaagtcctatttgatccatgatcacgcatgcaatttttgatttgataggaaataatttgcaaagtcaagtcatgacatatctatggttcggaattaggatgaaacacttacctgtgcgagattgatacactttgagtagatttcttctatttttgtcgaacccagtgtttcctctaaatggtcatttagaaacgaaatgctaacatccaaaatctcatttatggttatgggagatttcatcagcagactctccttccccggtagacgcattgtttttcactcaaaaaaaaaaaagcatatgctgctctaaatcagttggaatatttgtctctttgctaaagcatgtttgcattttagtggagaaaacaacgagactttttcaagtctcacaa

SEQ ID NO: 3257 - DNA, 2119 bp, Glycine max
  Intron number 8 from transcript Glyma11g16220.1 (locus Gly ma11g16220) derived from phytozome v7.0 (chr-ID Gm11; pos 11968561 to 11970679)
gctgctgcaagacgcctggattttcagcttggctggtagttcctcattcatttgttccatattattattataataataagagattgacacattcaacggttgcattgacatagatcacattctattgtaacaaaaaaaaaaatcacattctttaaaaaattgagtgtataactgtgggtataagttaaactagtagactctattgtaatgtttaggtacctctggtacccttttctttattaataatattttcttttggctgactaaaaaaaaagttacactggtatagttcagttcatgaacaactgtcaggatgttgaagtggagatctcacattgactagagatatgaccaatgtagtccttataaagcttagacaatccttatcttacaaagcgattttgtgtgattgagttaggtcctaaagcccaaattctaagatggtatgctagaaagttgtcttaattgcggcctataagagttggtttccagtgtcttagaaagggcaacctatggagggtctgaccagaaatgagtgaagtatcgtagagtacaaccattaggatgctgactcttaggggttgagatctcacatcgattagagatatgactaaactagtccttataaagcttagacaatcattcccttacaagctaatttgtgcggttgacttaggccctaagtccaaatccaaatactaggagaggttgaagaggaaaggaaaggaaatgagattggggaaggagctgatgtggtgttagggcttgactgactggcttcttttggggacattaaatctaaccttgaagatttgacaaaaaggattagcttgggaggccaaaagaaattgttcatagaaattgaacagacgagaattgctccttttcaaagcacgaggaaggtttttcaagaagagggtcaaggctttattcttgtaattcaataattgatgacaaagaatagatcactctgggagagtttcttgaattttggttgggcctaatttagtctcaaaagctagctcatgaggcgaggactatccttattgaaatggacaaccatagctattgaatgaagagagagagagagagagaggctttcttcaaagaaaaaggcatccagggtggatttcaagattgttagatggtgcaatgaaagtatcttaatcatgacacaaggcgtattcaaaagaaagagagggaagtggtctttcatttcatctaaagatgtaaagaaaggatgatgctttgggtggaaagctcactctaatgaaggggaaagaaaagagcccttctgaatcctgacataacaaagcatgtggaaattgactatcatttcataaaaaaaagattgaccatggaatcatctgtcttgtgccctcatgcatccatactgcagatattttaaccaaagctcttccaagctgcacttatgaaatcattagattcaaatccaatttgggtatgatagacatctataacgtagcttgaggggcgtgttggtgatctgttcttaatttagaagattgtttcctgatatctagcaccgatcagaatcatccaattatgatttgtacaactaggataatatccctttgttaattttttaggataacctgtatattctttccttttatagtttgctgccatttaagaggatattatctcctctgattttggcctgtgtacagatgttgaccaatttttttatttatacctctgcattgtaatcaatcattcatagtgaagtacaatcattgtctcccgaaagctttggctgttatagtctcgaactaccaaatcactttacttaaaatttatttcaatggagcacctccattagaattccttatcatgatgttataaactgttgaactcaattcaactgatggtcttgatttgaaaccttttctttctatttttctacttaacaccacaaagttaatgaagacaaaccaatattcattttttctttgaccctgatgcacactggaaattgaagataaattgacggtgaagaaaattacgcaaaatagaatatgaggcttgtataggatagcaggttgaagacattatgttaaaatatatttttaattcaggttcttgcatccactatatt

SEQ ID NO: 3258 - DNA, 2832 bp, Glycine max
  Intron number 1 from transcript Glyma03g33460.2 (locus Gly ma03g33460) derived from phytozome v7.0 (chr-ID Gm03; pos 41008689 to 41011520)
agaagcttcataagaagcgcaacattgtctccaaggttagtaacttttttcctttaaccaattatcttgattataaattattgttgattttgataaactaaatgttcattgagtgcattgtggtggttagttaactgttatgtggaaggatagattatagaatatgttttagaaatgggattcacgtgttgtgctgtgtgagtttggatttacttaatcaatttgtttgttgatgttggtttgaactgacattggtggggtcctataccattgttgtcaggaggaggcttctgctatcaaagctgctggaaaatctgttggtaaatatttgtgttttaatttaaaatttataaatatatatattaattctattttataaaataatatttattttagattctcttaagattttattttaatgagtcaaactagtttgttatatttgttgtgacaactgtatgttagttttccaacggtcatattttgttgttgcaaaatgcctatatatatctatttcctcttttctagaaaggacagacatgagagctctggtttctttctgccaaaaatttatctttcttttcctatacaaaacttaatttttgtgagagcaagagcattggtgttcataaggttcagggatcctttcgctgcacacgatcggaaccaacgggttgtcgtatcttgggagaggagcgcaatcaaattttcttacccgtgcagtgggggcgttttctctctaaggatagtgtttacgcgcttcaacccaggctatttaattctttcccttgatttaatttttccttgtgctcaatgtatgatataatgcattatttatgtgttgtcaattaaatttattttgctacggttatttcgttatttaattcaagactgtgcatcttcttcatattaattttttttttcattttttgttttattttccaacagtcttagagagaaaaaggttttattttttcactttcttcttgcatagtctttttgcagtagcatcctattttatcaaaatgtccgccatggatatgattaagtccctttccagtaagcctgaaaaatttatgggtgaaatttttttctgttggcaacaacaaatgaaattctggcttactgaattggatttatactctgtgatttctaaaagagaaataaaaacttcaacttcctctactgatatagttcaaactgatgcaactattaagcatgatgtttctgataaagatattttatgtcatggacgcattttaagtgctttggctgataacatatataagattttttgccataccaaaacttctgttgagttatgggaagcacttgaattgaaatatggatctgctgaaaaaggtttaagtcgttactcttgtgaaaaaatgattgagtttcaaatgattgatggaaaatctatttcagatcagatccatgaatttgaaaacattattttatgacatgaaattgaaaggaattgttttgcctgacattatgcttgtggctttcatgatttcaaaattgcctccttcgtggactagttttgctcgaagcctaaaacataaacgtgaagttttatattttgtttgtcgtattcttaatagagtaccttataaaaaaaaattaaaaaaatctttatgagctatggagaaaaagagaactaaatctgaaatatcttaaagtgtgggggtgtctagtaaaggttaatatccctattaataagaaaaggaaaattgaaaaaaaaatattaattatattttgttggatatttttttacataatactacttatagattcttagttattaattcagaagtatttgaaatttctaatggtactattatggagtctagagatgtgactttctttgaaaatattttttcttgaaaaataaattgttaaatctttgtatggtttgaaacaagctccaaagcattgacacaaaagtttgattaagttattcttttgtatgattttcaaattaatgatagtgataaatgtgtgtatgtgaaacaatttaataataatgaacgtgtcattttatgtttgtatctggataacatattgatatttggtagtaaatgaatttcataaatgatgtgaagtttttcttgtctagaaattttaatatgaaagaccttggttgtgtagatgtgattttgggtattaagcttatagaaaaaaaaaatgatggtatgattttttatccaatcttattatgttgaaaagctatatattaaagaagtttaattattttgatgtgaaacatgtttctactccttatgactcatccatcaagttaaagaaaaatttgagtaaaggattttcttcacatattctcaaattatcggttctttgttgcatttgacaaacttctctaggcctgacattgcatatgcagttggtagattggaaagtaattgagagatttaatgatacaaacttgaagttcttattttgatgaaataaaattgacaagtggttatgtctttgctttagatggttgtgtagtatcatgaaaatctactagacaaattattatttcacatgaaagcaaaaattattgctttagatactgctactagtgaggctgagtttcttaaaaatttgttatgtgatctaccattgttgaataagcctatacctccaattccaatgcattgtgatagtcaagttgctatatctaaagttactagcaaaaattttaatgaaaaaaaagaagacacttaagagtgagacataagtctataagaaatttgatttctcatggtgtcatttgtcttgactttgtcaggtcataaaataatattgtggatccgcttacaaaag

SEQ ID NO: 3259 - DNA, 2387 bp, Glycine max
  Intron number 1 from transcript Glyma04g10840.1 (locus Gly ma04g10840) derived from phytozome v7.0 (chr-ID Gm04; pos 9081200 to 9083586 reverse strand)
ttggacttctcacaacacaacgagcaaggagacaagtactcatgggtaattgaaattcacacagatctaaaataaaaattaaaaatctaatcaaatcgattgtttggatgatttttttccctcaaattaatcagtttgtggtttgtgtttttgaaatcgaataaaatcgtaacgcttatacttcggggtgggcataaaggtcgatctagttcgtttaaggcccgacccatgaaacctatgttctaagtggaccaggtaaattcattctacaaaataaatggatttttgtaggttcgtattcagttcaccaagcttgcggataaacggactagttcgcgggttcaattaataattttttttaaaaaaaaatatgtttttggttgtttggcacaaccacaagcaagaaagaggcgggacaggatgggaggcacgatggcgtagggaggcaagacatgcaagaaagaagatcaatgcgtagagaggggcagtgcgtgcgagcctaggaggagggagtggccttctctcttgcggtgtttggtcggggtaagggatgtgcggtgtggtgctggctgaggtagggaggttgtgcgtgagttgaagaagagaaagtgatgttgtgggcctctcggtggagtgagggccgaggaaagagataggtgacaaagtgagggccgaggaaggagatgcatggtgaagtgagggtcggggaaggaaacgcgcgacagagtgaaggctagggaggggaggtctgcagtgaaatgagggtttgaaaggagagactctgaagtttgaagtctcaacctatataatttttatttaaaaattaattttgtcttctatggactacccgcgagctcgcgggtaaaatccgttatgtccacgaacttaacagattgaactcaagtattgcttataatcataagggtttgtaaaaaaaagactcacaatccgcgagcttaacgggccgactcacggacttgaaccgtagacctacccctacttatactaacatttatattactttttatgttatagattttgagtataacacttgagttttatagtattatagtgttatatacaaaaaacttacacaatatgtacattttttagacgatttctttaaaatatgtgattttaaataaatgaaattttgatagatttataaaatgtttaacatattaataaattttatatatgatttatcaacaatttttttaatgtaatttaatttaaaagataaaaaaatataaatttaaataaaataatattttaataaaaactgtaaaaactaaactgaactaaatcacaaattattgaattagtctaaattttattttaaataaaaattaaaccaaattaaatcatatatattttttattttagttcacataactttttgataaaaaaatcaaatcaatgagtcacacgaaaattcctatatcacgaaatcctttttttttcttttacttcaatgggtgcatctttttcttttcttttcttccccgtaacttattttatattttcatggcttaattattttcctactctctccttaaatcttgtcttgttctattcattttccttcaatgagtcaagtttttcttccttaaaataaggttgaacaacctctttcttcctctaaatgggatcgtactatctagaacaataaaattaaaaataaaaaacggaggttgggttacgtgtacagtgtcaatgtctctcgtttaaatttttaattttaataaaattaattttaaatgttagctttattattttttaaagttttatactaattaattttactttgttattatttaaattaagtgcattctaatgtagaatattctttagatataaatatttttttggtacaagatatagataaattaattattttaatgtttttttaaaaatgaattctaaataaactcattttttattttattttttaaaaaataaattataaataaaataatacgatcccattgttttcctcttttttttttcataaaaaaatcaagtgacattattgccaagccatatattaataaatgaaataaaatgattaaatattattatatgtttctgttacattcatgtttatagctacctctccttttcaatataatttaatattaactatccgttccaagatttagctcccttatccactttccggtttatagctacagaacatctatacattgaacatcttttgttggtttttctaatggggtaaagagagaaagatggctaaattaaaatttttatagtgcactgcacctataagaaaaaattcttcattcaagtctttgcaaaaaataattattttttggcatggcatgacaggtacctagagcttgctcaccgaattgataacaccc

SEQ ID NO: 3260 - DNA, 13015 bp, Glycine max
  Intron number 1 from transcript Glyma18g20470.1 (locus Gly ma18g20470) derived from phytozome v7.0 (chr-ID Gm18; pos 22164823 to 22177837 reverse strand)
ttgttcgttctttgtcgttcttcaatcttcaaccggtaagttcccgaaatcgaatctttcaattcattctatgtgcccttagtggtccctacttgttttgtgtacttttactttaatttcgcttactttcagttttcttttcttccgctttaacgagcttttaacggtttatttaagccgttttatcacctaataaatgataaaatgaatttcaacccatcatttgtgttgtaatctcgtttaatcactgttcaaacaaaatctaaccgatcgttcacgttgtaacctcggataaccaaaaaaagcaaaataataataaaataatcaagaaaaatcaattggacgtttttctttgaaatttttccttgaattaattggctaataatcaaagtgaaaccaaggctaaaatcaactcacaaatcaagctttgtccgcaaaaatcactaaaaaccgttttaaggtccaacgccttgaacggtcctctttgcttttatcggttaacatggaccgttcaaaagcataaaatcaacatgtaactttaccaattttgcaagaactacgtaagtctaatttcctcatcgcaattgaggatacgtaggagcaaaagccccgcttttgtcgaccaccccaagagatcgttaatggtccaacgccttaacatttctctcctttcaaaaatcaagagatcgttaatggtccaacgccttaccatttctctcctttcaaaaaccaagagatcgttaatggtccaacgccttaatgtttctctcctttcaaaaaccaagagatcgttaatggtctaacgccttaacgtttctctcctttcaaaaccaagagattgttaatggtccaacgccttaacgtttctctcctttccaaaaatcaaaagattgtttaatggtccaacgccttaaacgaattttgttcgattaaaatcgatcttgcggaaaaagatcaaaacaacttaatcaacatttagttctaaaagaactaagtaggtttgatttcctcatcgtaattgaggatatgtaggagcgagggaaacacccttgtcgaccacaaaaatataaaaaatacaaaaaacataaaaagcataaaaacacaaaaagacacaaaaaaagggaaaataaaacattttgaagtcatatttgcacacttgattaaaggttgtcgtcccttgtgacagacgcgtggggtgctaataccttccccgtgcataaaaacaactcccgaacctttcacgattaaatttcgtagaccacacgttttggttttttttacgttttcctcgaataaacgttggtggcgactttgtgcattttcctttcttggaagacgcacctgtgagccccgcgtcgccctcccgtcgaagggtaggttgcgacaagtatccactataagtaccaacttaaacctagccttttcctaccaaggatatctgcaatgcgaacaatttgagattttggtacccaaatatttttggagtgcccagacttaccacagaagccacacttgtttgctatagattgtgacttagaagatgatgcactcttttctagtcctcagccagacttttcatgagaatgttaatgaaattttagaagcatggttaaagtgttgtaactttccaaaaactttatagatttttttgtaagacaggtgatctcctctcttagtttttcaaccgtagaggattcattagtcttactagctagagtaagactcttttctagagtttatattttctcttttataacttcatttgatttcttcaattcagtattttcatttgattttctcttttctaaaagtcttactggccaaacaaatattttgtatttttctttatacttttttgcattgaagagaaatcatttaattgttttgaagaagaacagtatagggcatatcttcttcatcatctgatgaagagcaagaagaagaatcagattcagagtatgttttacctttattacttcatctgtgttggccatcagacaaatggtagcttgctcattgtctgagttgctgctcttttcactatctaagtcatcccaagttaccatcagacttttctttttcttgtctatagaatgtatttttctctttaactgaggacattctttgttggaccttgtggcctcaataatcttaagagggataggcttagaatgcagaagaagcaacaacaatcaatttaataatgttctataaacatgtaaggcaaaattgattgcaataacataaatgagataagggaagagagaatgcaaacacaattttatactggttcggccacttcccgtgcctacatccagtactcaagcaacccacttgagatttccactatctttgtaaaatccattacaaagtctgaaccacacagggacaacccatcccttgtgttcaggaatcctttacaacaagagactcacagtctcttaaccaatctcattgaataagaagaatgaaagaagaattctctcttcaagagaagaatattacaatgaagatcatgtaagaatccttatagattttgcaagtgtttggccaaggatttcttttgagagagcatttgacaatgaagttcttttggaatctctctcattgtcttttgagaggataagacattttggaccagcaaaactctctctctaaaattcgtgcccaagtcacctatttataggcctttgatggccattcacaaatctaatgaaaagatgtgactgttgcagattttctgaaaactttccactggaggagtgctaaaagaaatccttacaaagatagtggaaatctcaagtgggttgctgagagtcatcatgattatatttgattgtatctgagattcattatgattatttttttttttacatcatgttagttatttattctctgaacattggttatgttttaagtatttggtacttaattagttatgactgaactttgtgattttatttacttatttacacttagttgtttgtgttatgtgtttaaacttggttattttgatgatatatgactaagtggtatgtatttaaactttgtgttattcaaattatgctttatgtatgttttaaaaaaattatttatgtatgattttattttacgcactttggctttttgatgttgccaaagggggagagaaaatgggtattttagaaatcaagatattatattttcaaatttttaaaattaagtatgaattcaaaaagaaagggggagaaagagatgagtgaatgatagaacaaaacttgcatgtattctcttgatttcaggattgtcatcatcaaaaagggggagattgtggaagcaaagctttccaagtttattttgatgatgtcaaagattcaagtcaagaatcaagagtcaaacaagtttcaaagaatcaaagatttgttcaatccagaaccaagattcaagaaaagaatctatagaagactcaagatatacaagaaccattaagataagtattaaaagagtttttcaaaatattgaatagcacaattttgttcaagagaatttttcaaaaagaaaaatcttttacctaagagttttactctctggtaatcgattaccagaaggcagtaatcgattaccagtagccaactttcttttcaaactgatttacaaagttgtaatcgattaccgtaatcatgtaatcgattaccaatgttttaaaacattatatttcagatttcaagagtcacaacttgtgataaaacattttcaaatcatttcaaacgtgtgtaattgattacacaatacttgtaatcgattaccagtgtttctaaacgttttgatttttaaatttacacatgaagagtcacatctgttgatgtgtaatcgattacacaatgatggtaatcgattaccaatgacttgttttgaaaaataaattaccaaaagtcacaattcttaaagtgactaactttcaaaagagtcacaacttttaaaaagtgactagttttgaagaaatttccaagagtcataaacttttaacttgagtcatcaaatgactataaatatgtaaccatggcacgaattttaaagagacaactttcagatttctttcattcattcaaagcattcttctaagagtttttgttcaaaactttcttgaccaaaaacttgtggtattcttcttcttcattccttctctctcttgtcaaaagattcaaaggactaaccgtctgagaaatcttttgtttcttccttcttcctcttgccaaaatattcaaaggactaaccgccttagaattcttttgattcttcctcttccctttaaacaaaagatttcaaaggactaaccgcctgagatatcttttgtttccccttacaaagatttaagggactaaccgcctaagaattatttgtcttaacacattggagagtacatcctttgtggtacaagtagagggtacatctacttgggctgtaatactaagaacaagagagggtacatctcttgtggatcagttcaagtggagggtacatccacttggttgttcaaagagaacaagggagggtacatcccttgtggatctttgcttgtaaaggattttacaaggttattggaaatctcaagaaccagtggttgcttggggactggatgtaggcacgggttgtggtcgaaccagtataaatcttgtggttgtcttcttcttccctacactctttatttttccgttgtgtactttttatttccactttacttttgtctaagttattgtttctgttccttactttctcataactttgtagtaaagcctaactaaatctagtaacattaagaaggataaatttttaattagtcaagacacgttcataattaattcaacccccccacttcttaattattctgaggtcacttgatccaacacacaattcagaccaaggttagttaaaaaaaaaagagaaagcaaaaggtaaacagacacagagagttatactagttcgtctctaccacagagactacgtccaattcttgataaaccatcaagttccactaacttttcataggttacaagtattatgtcacaactacttctgactcttacaaatcaaactctacccgaagtttgatcaacaagatatgtggttgacgattgcttagagacttaaacagaatcgtcttacagatgcataaacaaaatcagtacttagtccttttctctcaggatgttcaaggtgttttgagagatttttctaatcttgtaagagtatatagagaatcatgttgaaggagaagagtaataaatatttgcatgagatcaacttttttggtcttcaaagcttacggtttatataggtctcgtcttcaagtatttgttgtctcataacgagtaaatcttcctttgatcttcatctgataaaaagggtggttgggtgcatttaatgcacgtccttcctcatgcagagaagattttgtttaagtcttgcatgtatgagaaattatagcaggaagtcatatctttgtgtcaaagcatgtcatgcatagcataactcttttgataatgaagatggcatatcaaatattaacttcatttattcttcataggatttggcagatcttaagagaatgtttctgcaaacagaatctcagacacagaaataaatgaagttttaaagattataccacatgcgacagtagatcatgtaccacatgcagcaacagatcatgactttatctgcctattgtctgaaaaacatcagacacaaatgttataaagatatcaaccacataccacgcagcagtttagctttgtatttgtttgcatctaatcaaaataattaaggatcttgattcatctttaacacataaatgtgcttttgactcaacagtcaatttatggtttgaaacaaggttctaaacagtaccaaaaattaatggtcaaataacttccatggggtttagaaagaataaaggtataagtgtatataccttgaggtcagtgggagaaaatttatcttcgtgtcatatgtgatatattgttgactttgatgattttagcatgttgcacaagaaaaaagagatgttgatcggattcttgatatgaaataccttggtaatacttcttttataattgagattgagactcataaggatagatcacgttatgcactagggttgtcttatacagcttacatcaatagagtcttcgagtgaatgatcaatatgaagattagtaaacccaaagatgtccaatagttaaaggagataaatacaacaaggattaatgtcctaagaatgagattgagtgagcataaatgaatgataaaccttttggaagtgttttgggtagccttatatatacttaggtatgcaccaggtccgatgtctccttcatagttggcattcttggtagataccattcaaactttaatttgggaaagattgttaggtagttgctaagaaagtgacgaggttcttgtaaaggaccaaagagtatatgtttgtatataagagagttgataacttggagattattaggtacacaaattgtgataccctgtaaaagtaagaaacaaactcatgtttcatcttttattatgcaagcaaagttcattgctttcattgtttttattactcatgttgtttggtttaggagtcttgtgataggacctctcattgtggactgtattccttggccattgaaaattttcgatgacatatagtgttctatacaaggaacaataatacttagtgattttaaactaatggagttgaacaacttagttgttagaaatcttatgaaaattgtcatagatgtttagcatatagacacaaactccgtggtaattgatcccttaacccagggactcaaacccatgatttcttttaagagacatgtagatgatgtgggcattgtgagttcttttgatatgcttggttagtgggcgctttagatttatgttatttcttctttcatttttttggatccttattttgaattttgggaataatgtattgatgacattttacatttgatttgatgaataaatgatgaaatagatctcattatgatacttttatatgtgtatatcaaatgtgaaattattaaagctttgtgtctttgggaccactatgttggtggttgacaacatgttggacctgaggcataataatattaaagctcggtatctttgggaccactatgccagtggtcaacaccatgttggaattaaggcataataatattaaagctcattgtctttgggatcactatgttcgtgatcaatgtaacaccctgatcaaatcacactagaatgaaagggatccagaggttgtgcatgtatgggactatacagctgaggatgtcttaaaggaattaattggtattatctatactaataagatgcatcaacttttcggtagcccatcacataagaactccatagttaagtgtgtttggctcaaagtagttatgagatgggatttcttctgggaagtttcccagaaaacatgtgagtgaggacaaagcacactgaaaagtctcacgttggtttaagggatcactcatttatcctggaagtaggcagagttgattttcgcggtctctaaaatggttacctagagagggttctgaccaacaaggatgttgattgaagtgccactacatgaagtgtcatggtgtgagagccgtcgaaaagtcaaaaatcaaggatgttacaatcaacaccataataggagctaaagcctaatattattgaagctcgatgtcgttaggactatttgtgccccaatcgatgttgttttgaagctaaggcatgaaggttttcttagtaaaccatgtaatttctctagatttcaagcacttgagggaaattaaacactaacgaagaaaatggtggtatgacattgtaatcacattggcacgtcattttcttgctacactccacattgatgactagtcaatggagttggtaatatttgtacccatggaaagtgttgcctcaataagggatgcaattaccaccatgattttgtgatacacgacttttgttggatggggtcttaattaggtgttgttattagtctgggagccatcttcaaaaatatttttaaaatcaaagatacaaaattaattttacccaagtgggagaatgttggaattttcctatgaatttttgtgggctacaattatttgtaatattttgttttgtcaaaaagaagctaattttatgatttatttgatgatacttaagcctagtataatgtgattaattgtttatgggctttggacacctaattttgatcagtgtggaaagcagtgtaggcctaaccactagtccataatgggaggtgcttatggttaataaatattgaggctaggtctcctttaccttcatgttatcagttgctctcttgggtttgccccattgaaaactctaaaatttgaagcatatgataatgcaaagaaagacttggattttagatttcatggtgaatcaaaggtgattcaaagattttttgatgataacaatgatgatgacaaaggtgatgacaaaaagctcaaagatcaatcaaagaacaactcaagtgaatcaagaacaattcaagagttcaagataagaatcaagaagaattcaagactcaagaagaaagtctagaaacaagaatcaagattcaaggtttaagatctcaagaatcaagatcaagattcaagactcaagattcaagaataaagaggagactcaatcaagataagtattaaaaggttttttcaaaactttgaatagcacatgagtttttgacaaaaccttttaccaaagagtttttactctctggtaatcgattaccagtagcaaaatgagtttgaaaaagttttcaaactgaatttacaacgttctaattattttcaaaaagttgtaatcgattacaatgttttggtaatcgattaccagtgactgtttctgaataaatcaaaagatgtaactcttcaaaaggtttttgactttttcaaattggttttaagtttttctaaaagttataactcttctgaatggtcttcttgaccaaacatggaaagtctataaaagcaaggctttgttttgcatttcaagtatcttgaacacttattcatacaatcctttacaagccttgaatctctttgaacttcttcttcttctttgtaccaaaagctttctgaagttttctggttttccaaaccttgaaaacttatgctattcatcttttcattctcttctccctttgccaaaaagaattcgccaaggactaaccgcctgaattctttttgtgtctctcttctcccttttccaaaagaacgaaggactaaccgcctgaattcttttgtgtctcccttctcccttgtcaaagaattcaaaacaacacagtctgagaattcttttgattcttctcattccctaatacaaaagtattcaaaggactaaccacctgagaattcttttgtatccccattcacaaagtatcaaaggtttaacagcctgagatctttgtcttaacacattggagggtacatcctttgtggtacaagtagagggtacatctacttgggtttgactgagaacaagagagggtacatttcttgtggatcagttctagtggagggtacatccactaggttcaaagagaacaagggagggtacatcccttgtggatctttgcttgtaaaaggatttttacaaggttgaaagaaatctcaaggaccgcagatcgcttggggactggatgtaggcacgggttgttgccgaaccagtataaaaactcttgtatgtttgtttccttcttccctactcttttactttccgctgtgcatttaatttccgcttttactttctattaagtttctcttctactccatattctcttaacaacataagtaaaagccttagaagagtaattttttaattagtaaaggtttaggaataattaattcaaccccccccccttcttaattattctgaggccactcgatccaacattggacacctaattttgatcagtgtggaaaacagtgtaggcctaaccactagtccataatgggaggtgcttatggttaataaatattgaggctaggtctcctttaccttcatgttatcagttgctctcttgggtttgccccattgaaaactctaaaatttgaagcatgtgataatgcaaagaaagacttggcttttagatttcaagagattgtgctatgcacaaacaattctcgtcatcttgatcatgtcttcaacaagtaagtgctaatttgtgttctaaattcatacaagtctgttcttggtaaatttatttatcttacatgaacattaaaaacacactaggtgcagattttgattcaattagaacaaaaatgaaatcaatttagttgtagccacaagaacaagatgcaatcgtaagatgaaaaaaaatgacagacacataaatctgaacaaataaaatttgatttttaaggattaaaaatgtttttcacacatgtaatatagtccaatttgattttattacctaaacttcactctttttttgttttacctaaaacttttgtatgcttgattttagtacttaatgttagtcaaagtttgttaagtgatgatgtgatacttcattagcttgtcacatcatcacttgatcgatgatgtgacactctgagtcatgtcaataatagaaccaacacgtcaatgctcaaattgcttgcaaggttttctttttatagtaaaggaggcggtcatggccatgggacagggaccgagaagattaaggatgggagaggcatgtctcatggggaaaacatcattttgtggataatgttattgataaactcataaatgcacaacagagttttgaggaaggattagtgtggctatttcaaatgagaggtccaaatcccacaatgacaaacaatgtggaggacatcaatggtggcctcgaagaaattatttggggtttttttttttaatatggaattgtgatttggatccaagatggattagtgatttagggttctaatttgtgatttggatatgttgtgtttgttttcttatttctttttgcttgaaagtttggtcttcgatggtagtggaagttccgattgatgttgaagctctaaatcgcaagaaaaaaattgatatattttaaacgcttttaaccaagcattttttgttgttttttaccaccaaaaatttaaagccacaaatattttaaaataattaaaaataattatcatctaatcacgtatcgaagattttaaatgacaaagacaaaaaaaaatagagacaaacattaagagttaagactagtcaactttttttagagaactaaaattaaaaacttgaaaaattcaagaactaaaactatatcattttggggggaaaaaaggtaaatcaaaataaagttcaatccttgttttcaatggtcaaagcccgatgtaaccgcgtagatgcactatctttctgactcaaacactttgagcaaaaatgtcaagttgtgcatctgttttcaacttcttttcaagtttcaaccaacattcaaacgaccacatcatctctgccatactcgctgttttggtccaaactaccccattgaaaacttcacgcgtagatgcacacatcattggctttactattttgactttcttctttatttggtccaaacttatctcatctgtcacatggaaactgacatgtgagatctcgtgtagagcttcattgatcgagttcagttggtacctccaatacacaaaacgcaggtaagaacttcacttctttaaattcttcacaaacttctacaacttcgcaaagttttgtccactttggtttttattcgataaggaggcttgaacttatatcaagaacatgctaaacacgtgaataaacgttattgttattgattcaccatacttgggtcattcgctgtctttaacgacattttttatatagttatgatatgatgttgtctacttgtgttcaatgttcatgcgttccctccccttctttttctcattttattatttttttccctagaaaaataaactgccttgtgaatgggaaaggattctaatgcaacaccggcgtattctctataagcttttttagtgtccaaacgcgtttttctttaaatttgatacctcaaatgaccatgagtccctgaagagcgcaaggagtcaaagaaatgctttcctctacctttagatattgattgtattgtttgccaaaagcagagtctggattggcatccacatacacctaatagtttacgtttcttttacgaaattattcactgtgcaagtgtgaaactaaactgcctccaagattggctttctgaatagtggtggccaaagggccgtttcacaataaattatttcatagtctagaacaccacgtgtttatgttctcaatcaattttcaaatgacacattgtccatattttttcaatttacaccaattttcactttacatataattaagatttttaatttaccggacaagatttataaaactcattcaagtaggaccatggtgaaccagaagtggttaacacaattgattcgacactcaagtaagtctctcaactaaagtatgaggttagatccctaatttggatagagttgcgaccacatacctggttgcaccaaaaggtggaaccatggtggtcctaacaatgtaataatttttctacttcacttcgtttggaacttcaaggaaggaacacaagaaagttgtgagccgacttaggttcctgccttttcacacaacttaaaatgtgttcctatcttcaagtggcttttcctcttaaggaatataaaacttttggcatctcataattcattgggattgcacggaaaggaattgcttaactaatgttgtttccaacattaagcatcagcttggtcaaatatattaagtgcactattgattttggtacaatgttcttccaaagtaaacgatataatcataagcaacgtagcctacatggcctaaacactccttttctgcagatcctagttgagaagcccaactatcatcagtacca

SEQ ID NO: 3261 - DNA, 6151 bp, Glycine max
  Intron number 1 from transcript Glyma08g39810.1 (locus Gly ma08g39810) derived from phytozome v7.0 (chr-ID Gm08; pos 39396210 to 39402360)
tggcctggttagttctctttttaccttacccttttgtttgttgcttccaaaagttgtgtcttttccttgtgggttttgttgctggagaataaatcatttttttaacttgttagtttgtgagtgtgtggaaaactaaacttgtatcaattttatttattttttcttcatcttatggggtttgtctctgtgtgaagagatttgaatttgattatctgtttggattttacggttcagatgtcttttgttggtttctgacaaatttgggtgtatcatgtgttctgtttttacaatgagcaatggccatgctcattaatatctctgccatgtagcagcacatgtgcacatgtatatgttgcaagcttcttaaaatttctatcatgcagcaatgatttttttttttatggttgttatttgtaactgactatgtataaattataaccctgttttttcctaccctttatctgctgcatgcatgatttgtagagttctggttttgtttgttttttattttgacatatgaacatatggtattttagctcaccatggtgctgaaccaactctgctagatgttctggcgctattttaagactacaagttgatcatcagagagtgttctaatatgaaatttacgggaatataagaaatttaactttctaatatgttggaatgaattccccttagaagttgagttgctatttatcttctttctctttatcaatgttgttgcctttgggacttgctctacttaatgtctattatcctctgagatcttcaggtatttttaaaaaaaaaaaaaagtgaatgatggttgtattaaaaggtattgattcctctaaagtagcatgcactttagaggttaaagtagaaaaagtcataaccattattgaaaaatcaatggagttgattttagcagtttcattgtttattgtacttgcattattttatcactgtataagttgttccaatctaacactttttaacttcatactttatcttccgaagtgcatcttttgctttaaaaagctatattcatgtaaaaaaaattattctgatctttttatcttgatgcatgactatttttatgaatgggtgtctaaatagaaatggatgtacaaaaataaatacttcatatatttaaataggcaggtatcatatgccatcatagaaaagatctaatctctgtcctttcaagactttttcccccttttaatcatacttcatcaattatcatttctgggattgatccttcccagttgtttgttttgtcccaatttctcttgagttcatgagaaatcagaacttacttttaaatgactgagatgcaattgccactaaagagcatgcttgtgacatctatctcaacatccatatgaatgagaaaacgtataaaatgtaaaatttaattaaatcatttttattcaataaaattataagtaaatccacatggataaaaggtctagattcatttcaccgttgtcaaattaaacttataagaaatattttcggctcaaacacaaggttgttcaaatttacaaaagaactcaagttaaacaacagaataaagtaaagtaaaataacatgttcggaacatcatgtaatttaaacagaaactcaggccccaatgtcacatcctatcagagcattatgtctcggcgtcctccagcacaaggttccttaaaccaatgcacctaatcatcttctttcacgaatacaaggttcgaggtcatcacaggatccaaacacaaacaatacacatggagtaagttatcgcatttctaaataaagtacagataaacaaagacataagcaaaatatattacgaaaatatttattatatagttcaacttaatacaatccacttcacttcaccactttatcatttaaaattcatttttcaatatcaatcatattacacatgaatcacacactcaactaaagacgtaacaacatttaccaatttcataataaacaattcataggcgttatgtaacaattatactaagactcaagcttatgtgcaatgtgatatcatgtcagagaaaaacaacaccaggacccccaggagtacataacaagacacgccacacaatgagtatgtcagatcactctcactaagtgaaatcataaggcgaccagttagggtcactttgttttgcgagaaagctccaaccatatgcgatcaatataggcttaaaggaacactcaaaccgaatgtatttactcccaaggcctagactccgaagaatccattagggtcttgctttcctgattcaggtccaaacactgctcatgaattatacaatacccacgactttgaatttgttttcagacacgtttaattcattgcgctataatttaacaactcaagtttctaacttgaaatcctacactttccttttaacacatcacgtataaacacttttctcaaggtaaacactagtcggtttattgtatacttcataattcataacacaagtaatatcacatcaagtattaaccaaatacttattcacaaccatattccatgtccacaatttaacatttcacaacgtcacaatccaccatcacatgtttacgtgtatctcacaaattaacgcatgcttaaattgccacttatactcaatctcaattacaatttcataatctcaaaatgacatgtcattatgtctcatgaatcttatacatatcacacaataataatatttacatgacacaaaacatatatatatatatatatatatatatatatatatatatatatatatatatatatatatcatacaataacaatttttcaatatttaagacatataatcattcacttattcattcaattaataacaaccacatgcacatgtatagtaaacaagtatatccttacatttcctcctaagttactacaacctttgtagcataaaattacaagtacatgggatgtactgatcctattaagttcatacttatcttgtttgaaagctaagacaattatctacaactattatgttgatcacaaaaactggtttcaccgttaactatgtctaaacctaaggtaaacattggatcattgtttaatcctggcagctcgaccttttctcagtaatttgactctctaggggtctatacagctccgaattgggtgaaatcaacgacatttgttagctaacatccaagaatacaactttcatgaataccaaaaaacctaattcaatcattttcttagtcatttttaggctacaagttagctcacattgttaggaaaatagtacgggcttaaaacaactgattttcactaagcacaggcatgctctcattaacgacggttgtgcttcgcgaaaaatcttcattttgtgaagtaaaagaggcacaattcaaagctcaaaacacacccaaattcaaaacaaataacacagaacatgtgatcacatcataggaaacaaaacaccttaattaattttaagaaaacatgcaagaatcaagaattcccaaatttctaggtttctaatattcaaagtcaaacactcaattaaaccatccaattcacatgaagtcatcaattgacctgtcaaacatgagcaatttgtagttatcattgtacaggcaaaattaaaacgcataaaacaccctaaaatcaaccccaatttgatcatctaaggatccatgcacatgttctctctaaccctaattgtgataaactcatcccttatatctaagttggctcatgtgtgtagtccggtagtgatagcgacatctctagagtttctaggcgttagagatgagaagggattttaacctcaatttcactatttccttatgagggacatttctctctctactgtcattattttacaaatctcaatagtaaaaatgtgtgaaaataagttctgaaagtggtgtctgaatttcaagatgatcaaacggttaatgagttcaagatcatagttttatagggataagtttgggtatatgcagaaaaaataaaggattttgggagaggaataatggagaacgaatttggaaggaagagagagcgtaaaatatattgtaaatataaaaactgatctaatatgtttctatttataactaaggtactctaagccgattatttactctattttctttattttattattttataaaaaagaactctattttactctttcattaaataaataaccaattaaaatattcctttatttttaaaatatcattttactctatttattttctaataccatgaaactcttattttaattaataaaaactcttttctcccatttatttaattttaaaaactctattaatttttaaataaaactctttttatttattttacgaaaagcgggatgttacaattcctacctaggaaaacaaaaagaatcttcttatttttctaagtgaaatattatttgttcaactaattttacaactaagagaaaagagagagaagtatgagatgtaataaatgatgtgattaatagagatagaaactaatagatgactatccaagagcataaggacctagaagcacttcatgagttgaatggtcccacgacaaggtccaaagccaagcttctagaataagaaatgaccaagaggatcaaggatggactactcatcaacgacaaggaaggagaaaatcacaagaagctgaattggagtacattgaagattgttgaacagctcgcttagccgcatcagctcactaagtgcaattccaacatttaggcttagcacaaatgtctggcttagtgcaattccaacccaaggagaaattaggcttagtgtgaatgtcttgcttagcgcaattttatcctgaggagaaattgggcttagcgcgaatgtctagcttagcgcaaaccttcaacgaaaatttatgaaaactcttgtttacctgtgtaatgggcttgaacttgatgtaaataggccttataatgagcatttaagggagttattagaggatttaattatcttcttaagcctaattttataaatactcagaaactcttatttgtaagaacttttgcataattgaaattaaacttatgcttagagagagttttgcctctttttggtttttgactaaaaatcaaactaattcttatcaaggaagctattcttttttggtgaatcctccttcagcttatcggttcttcgcggattgtggtgtcgttctattcatcttctccatctttactatttttctgttcttgtgttcttaaaggtcatcaatggtgttcttgaatttgcatccggaacgatccgaatcaagcattcatggatttgattgcaacataaacatacaatattgttaatgttatcagaaccagaccagttattgaactggtgaaggcattggttcaaggttcaatgattcaattggggatgaaccagttttaataaaatactattttttttttaattttatataatatattatgtaatattaaacaaaaaataacatggtatgcataaatttataatattaaaaattaaacttcacttcaaagtgtcataagttatgtcatataacaaaagtaagttatatatgaaaataaatccaacacaccataatattttaagtaacaaataaaattaattagcaaaaaaaagaataaaaaaactgtgatttatgtcgaaccaccaaaacctgtccaaccaccagtttttagtggtttttccggttcatgaccgattcaaatgcataccggttttgagctttaaaccggctgtacaggccactggttcccggttcaaccagccggtctggtctggttcagacaaccactatgagtaacagtataagacaaatcatttctttttcttataatcttttgtcttggatgtcatgctaattttacaaccattgtgtttggtctaaaatgcatcttgttacatattggctgaagatgcatcttgtttgttagatacaaaggtagctcatcaaattgtatttaagtacacatcttatggcattatttttttctaaaatcaaagcaatgctaaagtcctagaaatatttgcacaaagtaatctctctttgttggataaactcggaatatttgggtttgtcttttgtaataatactcgtgaattaaaatatggttgtaattttgcaggagaggctcactccttgaaggtggaaaagattttg

SEQ ID NO: 3262 - DNA, 1458 bp, Glycine max
  Intron number 1 from transcript Glyma08g18240.1 (locus Gly ma08g18240) derived from phytozome v7.0 (chr-ID Gm08; pos 13702590 to 13704047 reverse strand)
agagctaaggttaaatcattttcctgtcattactcatctttcttcccttattgaccatctattttatgtttttaggaattgttgattaatcgtagttttatgttaatttgtttatattttacctgttcctttcttttcaggatctgattataattttgaattggtctgtgttctcaggaattagaaacgaaaaataccatttacaccatatacatcgtcgtttttttgttttgattttttttttcaatattgattttgcctcggagaaatgtttttttttttctgaattgctggtgtattcgctgtaaatgggtctggaatgatgtttgcagtttgttgttttcgattgaaaggcatttggtgccgtctttgattttggaattaaaaggagattgttgagtattttggtgtgggaagaagatgatttttcactattatctaattcgaaattgattagattagtttttgatgtgatagataggtagtgttgttttctgtggaagccccgtttttccttctgctgccattactgcatgtcggtggtagtgtctgatttcacaaggaacaaatttaggttaatcaaacatccttgaatgtaatggtctgtcgtgtatttgttattatgcattttgaagtcaaatgttcctgattataaacagaggggaatgtaggataaattcaatttcaaggataattttttggtccgtattggaattggggatgggagttagaatataaggtaagatgaggactaagatgatattttcttctgtggtgaaaccaaatagataatgtggtagaattggagcaccttgttagatgtaatttgagacaatgattttgccaaaagttaaaaatagttatcaactatgttgtttctcaatgtgttaattgctgttgggagttgaaattatgaaaagggagaatggagaagtatatcgattcctgtttattttgagtagacttcaatttagtttagtaaattcatctttactttcactctcaagcttaagtttatgaatcatccatctactattgcttcctttgcaaaaaaatgtatgtagaaaaactattttctatgattttagggcttaacttcctgaactgaaagttgaagaatctattcataaatgtcacaaggggattctgtgcacctctctcttatattagaaaattatgcataaatgtggaacaataatatttttacattcttgtaagttttcatttttaatttgtagagaaactgagaaaataatgaatctgcgtgaagcatacatattttaactgatgagggatcatggtgggataagacaatagagaattagattctgtttaatatgtttatatgcatactagtacaaaaagaaaagaaattatagattctgaggcatgttttttcttgtcctgtgatatgttcatgcagatagtttagttgtcaagtcataaatcagtatcatc

SEQ ID NO: 3263 - DNA, 9097 bp, Glycine max
  Intron number 5 from transcript Glyma09g12400.2 (locus Gly ma09g12400) derived from phytozome v7.0 (chr-ID Gm09; pos 13044272 to 13053368 reverse strand)
attgggcaagcaacctcaacagttcctctctacaggtcagtctctgcttggtttggtccatttttctttatttatttattcattataacgttaaacatattctcttgtcatttttatgtaatttaagacttttttttttcataatcaaaggaatctatctcacttggattgagtagcgcctgtgcgtgttgtaaatccctaattacatgtttaaatgtttttacagagatggagaaattaatgaatttatttattacatgtttaaatgaaattagtctttgtcattagatttgcttttgacgatagaacataatcaggttatgtcattcatacacgggtaatttgtttgcaatggtctcacttaaaaatctaagaataataactaaaagcatgtattattgcatttcaatagattagagatgaaatcataaaataaatattataacaacttaaatcaaaattaatcttagaaaagaaaaaaaaaagtcttcattattattagtgcataaatagtttattctttttttttttatatatacactaaacgtcatctatgttgcaccaattcagacaaataattcaccctcagatcccccagttggcaataataggatatgccgagagcccatcaaatatatttgcctcggaaatgaaaagcttgtggctatcacatttcttggatggaaacatagagttgcctagtataagagagatggaaaaggacgtgaaattgtgggaagacaatttgaagcaatatggtgggaaatattattggaaaacatgcattgctcattgtggcatatggtatcatgatcaattgtgcaaagacatgaagcatgaccctagaaggaagaatggccttttttcggagttgtttgaaccatatggccacgctgattacgcaggtcttactcgtaaaagataatttgcaagaaattattaagtttgtttggttgttgcatctcttccataatgagaatttgtatgggtcttggattacaccggtacttgcatgttaattttttattagattttctttatcactatattattggtacgaattaggttgggagaggaaattctaattaaagtggtcagtcttggttgttgcatttcttggttttttttttcttgttgatgccttactctttgcataaagaattatcatttttgatagattttttttttaatcacaatttttctatcaataaagtttgaacccgagaccttgcaaatcgagttacatactatttggaccaataacttattagttaagttacatttgatagttgcaattactcttttaagaatttattttaaatacataggtaaagtaaatatttttaaagctaaactagtcagtcacctcttacctttgggatgcaggggacaagagtttttgtaatattaaatttaattatatttttaaaaaaaatgcttagatattattgaagaatattaaaaacaattaacgatcaattgtccatataagatacaagagaattattgtcaacattaaattatgaaacatatgcaatataataaatcttattctatttatataaatcataatttattgaaaacaacaattaatttcttgccggttaaacataattttattgaaaacaatgatgaacttcatggggtttttttgtaatacaatttttttttcaaaattattaactttgaataatgaaaaatagattataaatactccttatatcaataaaaaagtagacactatgtaactttattgcacttgaaaattttatatatggaataaaatagcaaactttaacatataagatatgaaaaatgaaaaatagattataatataaaaaaccaaatgaattacaaaaccaaccataacaattgtcattaaaattctttaaaatgaaactccataccatacaatgagaactgaaaaatattaaaaatataaataaatcaacctagaaaaataattcatcgtgcttgttttcataaacctcaacttatggatttcccttctataaaatgattaacttgacaacaatcaatccaaccatcaataaatcttcatgaggaaccactatcaatctcttagctgattttgcatgcatgaccacttgtttcctaattggtcaaatagaatcaccagattgtttttcttagagaaaacatgctaacaaaaaccaaatgacattaccaattacattaatcatatattatataactatttttttatcccaaaaaaagaaaaataaatatggaaaaacataccaatgcacaagatgaaatatcagttgcagaaacttttttaattaaaactaataacaattgacacaagtgatagagattatttatgtcctttaatcaagtgattcaggatttgaatcttaattgacataggtatggaataaattatgttaagagaagaatatttactttgtgtgctcgcggtcctgacaattttattagaaacataggagtaagaataatcttcatttagattaagtttaaaataatttgaatatctaagatacataactttgtcaccatatttatcttaattagcggtatgaaagtttttttcattaacatatacaaggatcatccaatcaccttcaaagatatcttattgaccttttatatgacatgtgctcacactaagataatgcatcataatcaatctaacaatcaccttctagactctactattcttcctataaacaaaatctgaaccacgattgtgctttgtagtcctttaggcctatcattttgggcttccttattcacagattgggcttcaccaatcatagccttaaaaatgtcctccccatcaaaacaaccttgtcatataggttataagttgtttgcaaatcatgctaccttttccatgaagtatcaatcggggaaggaccatcccattgaattgaatcaaacttggtaggaatatcctcaataaagttagtcttaatatgcaaattatcaaaagtgagatcacataattgatatccactaactaaagggggagattatcaacttgagcaggtggaggaccaaaatgaggtttaagaaagtaagctcccaccaatactacatataagtcatagtccatgaaacttgatatgatgccaattgcaactactagagtatatccttgttgcataagtgacttaaacacaattgttaactcctccttatgaggggaaatctcttcaacttgaacaatattgagtaacttgaccttagagtccatctctacttggttgcgcaatgatacattagtagaaacatggtcttgaaccaagactacaaaatcatctaggttgccacctatatcaccacaacaatgaagtagcccattcattatttcaataaaattcataaattgaaaatttccaaatggccgagaaaggatattatcatcaaatgtctgcatcatataccacagtccatctctaagtccaaaacaagaaatccaattatcttcactaaaagcatatgaaggttgaaatgatcagaatgtcataaggaagggggttgaattgtgattttgccaacttttcctatgactttaacctttctgaacttttactcaatttgtgctccgaaagtcttgacatatgtaggttcaagcacttagatagccaagatttctaaatggttagtcacaacattcatttttaaatgtttaatataataatgtgaacctaatgtcaatgcacatttgcacatgttcaaaagtccattacttaaataaatgtatctgttagttgttatcaaaaacatgtattatgtaatgatgatttagcagtcaaaaatttgttttacagatgtagtactcagaatgttgtattcagaaagctactgttcagaatgttatttccaacttttcatgcaaaaaattgttttcatattttttgaaagctttcatactttgatgcatatgattgaactagttaaaaacaaatattgtatcacaaagatgatttagttcagatatgtcatttaacgaaaaaaattatgcttattatgaaaatattcttttagtatgcatttttatgaaagtcattatgatgcttagaaaattctaatgcagatgaaatatatatgagaacatgtaacatattgtaaaaaggaaaggaagaaaggattcaacacaaagatttttatattggtttatcccaaacttgggctacgttcagttctcaccctactagatgagattttatgttaacacaaccaacaacattttggagcaaccaattgctggatttttacaactgccaacacccttgctggtctttcattgctaaccctatgttagactttccttaccagccacctactggactttcaacatttcctccctacaacaccacacttggtcttggcttggacatcacccactaactacgacacccacttgatcatgggagagacaaacctacatatatacacattacaagctgggagaaggtgtttgagggcttttcagagctttaaaacactcattaggggtgaatcttctttgaagctctaagctgtatgcactcctactgcaacaattttgagctcaaaacgcatcttgagtagggagaggagttaagtcttgtttgtacacagtttaggttgtcttgtaccttttctctcatgatttacaactgtttttttttcttttataagcctcacatgtcaaactagttattatctagttgttatgaaaaccgggtgatttctttttgaactagacatactgcttttaactttatagttgtctcagtccattctaatgttgcaattctaatgataaaattttgagcatcttttttatggcctcttagaaatacattatgatgttgctgaggaatgacctattatgatgtaggttccttctgatgaagataacatgatatgacattgtagataactcagcttcctcaatccaaacactttatcacaacaccaatcattctaaagtatccattttgaggttctcattttgaggaacctttctaatgagcattttgaagtaacaaaaaaataaccattatgatattagttgagaaaggatccatacttgaagtagatccttttgatgaagataaaatgatatacctttctaaagtattacagattcataaacactaagtgaaagtttagttgttggtgtattggtgttttgtccaaggttagactatgtggtatcttcagtcttgtattctaatgcttctcattagttcttctcaaggaaagattcaagtttcaacatatttgcatctccttatgcagttagctttcactttttgatgttcccttattgtatgtggcaacatatggaaagtgaagtgttgtcaactttagtcttatggtgtgccctctgtatatgtggcattatatgggagatctaatttagtccttgtggtgcattctgagcaattctgaaccattatgatgttcagttcttcaaagtcaagatattcatcattttgatgtagactctgatgagcttcattctgatgttgtttgctctttgtagcctttgataattttctatgtaaggccttcttgatgtctttgggatatggtaagattgagatctttagagggaagcactgatttcatcaatagatgggcttctttcaaatcttctgaagcttcgcacttgaaagtataattaagacatccattctaagcttgttttgaactcatcagaacacttgttatgttctactctttgtatatgtatcatttgcatatatgttggcttgcatagcttttctgcatatcatgtttacttttgattgaattgtttgatatagatggaaaatcactgtatattctttttatagaaagactttgatgagatgacatgacaagcttgtattgtgtgagcttgttgtagcatgttatgtttgctgttattttttaattctttgaccctttgaatggccaaactggattttgatgtcttcatgagagttgtagagaattctatccttgacatttaggtactggtcttatgtcatttggaccaataacacataataaatcttcaaagcattgcacttacgttatattgtaaggataaaataacatctttatcttcatgatcagtttcttccaagatccaaaccttattagcccctaacttcttcatgaaagatgtatatctttttcttagatttccacatcaattgagataatatcaaatacacttttgtagcttaagcagtctactaattactactacacacatatcaagttgtctaggcaaaccaacgtctgcaactttaggcttaattttatccatgatcaaggttgtataagaccacgacttgttcatacaaattgaagatctttctttaagcttttcaaatccaccaagaacaactcaattgcatttctggaactccaaatacaatgtccaacaatgatattataagattccaactcaacatttacagatgtagaaataacaacatgcaatgaacaattatagaaatttaacataaagtacctctcatccaacttcctctttggatgtgcaaaatcattaaatgaagcattttgttgaggcattagatttggattttgttaagcatgtgccaaatgtgttcacaagtgtttcatttgctacccaacccgtgtcatcaaatagttggtagacattaactacccaatcaaccaatagtgtgaagtatacttctagttgcttgcaggatcacatggaacaaacataaaagtggggatttgcattacacaaaaaatgaatttgattgtggctttgttgaattgtctacattcttacattgtgtgctttgaatttttggtattggaatggggaaatgaattaatttctgagaatgataatgctaaatttggtttcaaggcactaggggtagcaattggagaaaggttatgcatctttgaatttgtttgagtcatgcaacataaggcttcatccaaattagaatatgtaaatgaaaacaaagtgacctcttcacttcttttatctattgttgctacaacagagtaatgtgcgtattgttgatagccatccgagggtgcaaagtgaatcttcaagggctagaaggaaatagtgccatgagtggatctgatcgttcctagacacctgttgataccacacaagtgttgcaccatccaaataaaatgaatatattgagatgcagtcctctttgggtgtatcataattgttgaaaaattgtgagacctcgaagatccaactgtgaggatcctcaccttcaaaacatggcacatgcatcttttagagatgtttatgtgaaggagtgagagtgtgcatcaaaggagtgatactatgtaacgagattggaaaacatcattctagagctgctacgtgattgaccatcttgtccagtttatcggaaaaattcgactacaaatgggtcataagttgaatgagctcaacaaacctattagtgcttcatttacacatagtttcacttacataaacaattgtcttcttggttcctttttgtgctccaccaataacatgtgccccctcctttcaaataggtatatctttttgaagtgtgaaactttgctttatctacttatttgtaagagttatttgataacatagatgcatgtctcagctccatggtagaattgtttgtagggattgaaactatgtagagggaagaaatagtctttaaacgattaatagggggcacttggatgttaactaataatgcatgacccttgtgcaacgtagttggtgctatatttttgttctcaagatttttttcttgtagttctagactactagtgatagctttcgccattatttttattttacaattttttttctttatgttttttccttttgtcaaatgcatgactatctatttccatattgttactgtacatgaagaaggtaatgcatcggaataagaaacaatttcttccaaagataaaagaaagcagtcaattgatgttatcttttggattagctaattttttttagtaaataacactcataccttttatgtttttctcaaattatattcaatactcctttttctttacattacttttaccccttttctattaacatcgtcacctaacgtcaattgaaatatgtgagtagtcgaaattaccctaacatctttgttacacttgtacccttgtgtttttttttctcaaattgcatcctatacccctcccttttttacattacttttatccccattttgttaacgttgttaactaacgtcaattgaaatatgtgagcagaccaaattgtcctaatatttttgttaaatactcaataacaaattaagaattaactctgtgaatggacctttcttaaggtaataatagtttttctttaaatatttgactcttactttcattgttgctaacatttgaagaagatgcagctcttgattgagacattatatcaaaggcctaaccatcaaaaataaatatttcaaagaaagatgttaaaaacagaaatgcaggagcaaaacactaaaatttgaagcaaaggaccatattcaatcaataggcattactaagagcacgtccaacaaaaatgcagcaaccaatgttctagttgtgttactttgataggaaatactaaaatagatgaagtcttatagtattgttctataaagtcataaattgaggattttgattgaatgtagtctagcagtaaccatgcttcttttatacaagcttctatgagtggaagtagacattgtgatgagtctaattctctattggttccagtgatgagacgtaataaaaatagtggtttgtgagctattattaaacttgttttgttttctaacaaagtaccattcttatttatttgttatgtatacactgtttttattttattttcattttgttgatatatcaatgatttgatgctcccagactagcacaattaacttagccttcctacttgtattttattttattttttaaatctcacaaattttgaatacatggatggatcgtacttgtggcctgccttgtacatcaatgattgtgatccactactcaatttgtaatagatttcaattcatatgaatttgcatgcaggaacaagggaatactattc

SEQ ID NO: 3264 - DNA, 4894 bp, Glycine max
  Intron number 11 from transcript Glyma05g25790.1 (locus Gl yma05g25790) derived from phytozome v7.0 (chr-ID Gm05; pos 31861896 to 31866789)
cacctacttacgcccaagaagtgagaacttcagaggtatggtttatttcttgttaaagtatcctttttttttattaattaatacgaattataaggcaataacacatttagcagaagcattagaccaactgggaataacatctataactgtctattttattctcctatctacgtagaagtgagtttggaaaaaggattgttagagatataaaaccattaacatgtaaaggttttcaggagagttggtccttgacttggtatttgagtctttatgaacaagtggttaagaaattgatttttgctgcttctgtctttccaatcaaacaatagttccagtactttttttattttttctttaataaaaaaaaaactgtacaaggttgagggggcttgtgctttgttcatgtttcaagcccaaacggctttcaagtgagagtttatatttaaaaccatttgcatgctccccctaacaacttaagattccgaagatttggttcttgacaagaatacaaagggctctccttctaataataatgaaggattcttgcctgtctttgtatcattatttggattttgatattgtggcatgtatatgagggaaagaagtgttggtagtttattagatgatagttgatagttttagagaattgttttagaaagaaggctatgtcattgatttcttggataatcaattacaacataccaattgcctatttataggctcaagtcaccaacctctcaatggtggtgagtgtttctacattactttaggtctttctagagtttttatgatagattagtatagttctagattcttctatcttatacatacacttatagttctagattgttctaccatattcatacacattatagttttagattattctaccatattcatacacactatagttctaggatattctactatttcatacatattatatttaagaatattctagaaatttgtagctcatctgccgaacctgcccaatcactatcggtgtagccaagtaattctgagttggtttcggtagtataccatatactgaactcttttgttccttgtagatacctcaaaattctttttcctgctccaaagtgtatttgacttgggctttgcatgaatcttgatagaagacttgtagcatacattatgtcaggccgtgtagcttgagacttgatgtaaagtgtaggctcactcttgcttctcctgaatcctcgatccatgaaatactgatcgattctgctataccatacttgaggtgcttgcttcaaaccatagagtgtttttcttagtcttaacactttgctttctttgccttcagacacgaatccttgtggctgctccacatagatctcttcttcaagtacgccattaaggaagacagatttgacatctagttgatggatagtccatcctttttgtgacgcaagagctattagagctcttatggtatcaagacgagctactggtgcaaatgtcttattgtagtcaattccaagttgctgtgagtaacccttagctactagtctcgccttgtgtttctgtatggtgccatcagggttgagttttgtcttatagacccacttaaccccaatgatatctttttcatgtgaatgatttactaactcccatgtgttgtttttctcgatcatatgtatctcttcttccattgccttgacccatacttcatgctttgacgcttcttcaaagcttccgggttcaagtatggccaagttacaggtttcatatatgtccaccatagatcttacttgtcttggagtagactctggtaatgatagttcttgatcttgttgttgtggtggaggcgaaggtggttcacctgggtcttcttcttcagcttcttcttgaggtagttgagcgggtataagaacatttttctccacttttttttcatcccaattccaagaagcgtactcatcaacttccacatcttgactgatgacaagtttcttagtttgcaagttgtagacatggtagcccttagagatattgctatacccaagaaagatacctcgtatagtcttgtcttcaagcttgtgcctcttaacgtctgtaatatgaatgtagcatatagatccaaagacccttaggtgctttgctgatggcttcttcccattccaagcttcaattggagtcttgtcttttacagacttagttggacatctgttgagtatgtaaacagtagtgtagactgcttcagcccagaatgtgttaggtagtcccttctccttgagcatcgatctagctatttttataattgtgcgattctttctctcggacactccattttgttgaggagaatatgggactgtaagttgttgctcaatgccttcatcctcacaaaatctttcaaactcgcgagagatgtactctttgccgcgatcacttcttagtacttttatccgttttccactttgattttcagcaagggccttgaactttttgaatactaagacttctgatttttcttttagaaaatatacccatgtcattctagagaagttatcaatgaagagtatgaagtaactgttgttctcatgtgatggcgtcctcattggtccatagacgtccgtatgtatcagctccaatagatctttcgctctccatgcttcgcttgtgagaaaggaaatcagtgttgcttaccaaggagacatccttcacatacttcattattctgctttatgcttggaagatctctcatcatgttcttctcatgtaacaacttcaaggcatgtgtgttgaagtaaccaaatcttcgatgccatagccatgaatcatcaacttgtaccttcatgacaatgtttgttgcatattttaaatttagagggaagcttctattgctcttattcatctttacttggactatctcaaaccttttatttttgttgtctaagattttgcttacacctccttcaaagtgatctgtgtaacctctctccatcatttggccaatgcttagaagattttcttttagcttgggaactagtaagacatcatggatgagtcgcgtacctttatctgtctccaccatgacagtgcctttgctttttgattcaaccacacttccatttcccagtcgaactttgactttgacaactcatcaatgcttttgaaaatagtctcatccttagccatgtgattgctacatccactatccaagtaccagcttcctcccttttcttttattgagtcttgagtggcatagaacatacattgtttttgatcatgctcctttgcgatattggcttgatgcctatttttgttgcgacaatttttctctacgtgcccgaacttcttgcaatggttgtattgtgacatattacggaaccaacaatttttctctgtgtggccttgccttttgcatatattgcatggaggatttttatctgttttgttcttaaggaaattcctagaaccttctcttcttctggaagtttctccataatttttctttcctccattatctttgttttgggactgaaatttaaactttgactagaaagcattttcaagtgtatctttttatgcctatacagtctttgctcatatgcttcaagagagcccacaagttctgtctctgatagagtggactgatctttggttttcttaatcgttgtcacgattgggttaaacttttggggcatagtaattagaattttctcaacaatttttttgtcaagaatatcttccccaaaagctctcatttgattaactatttctttaactttagaatagtaatctttaactgtctcggactccttcatcttcaatagttcaaaatctctttttagagattgaagtttaacggcacgtaccttaacacttccttgaaactcctcctacaatgtgttccacgcttctttggcagtcttggctcccataattcttggaaaaattggatcagtcaccgcttgttgcaaggtgaacaacggctttgaatttttctgtttatttttcttcaactctttttcttgagatgcattaagagttgaagtatccgcgggaatagtgaaaccttcttctactatgtcccataaatcttgagatgaaaaatatgtttccattttaacacgccagaaatcataattttcaccattgaagatagggacaaaaatagttgacgattgagtagtgttatccatagtttagaaaaaaatattattggagtgggttaatagtacaaaggaaatttttgaagtagttgggaggattttggaatggtaggtaggtaatataactacgcccaatgtataaccgaacgtagctctgataccaatgttggtagtttattagataatagttgatagttgatagttttagagaattgttttagaaagaaggctatgtcattgatttcttggataatcaattacaacataccaattgcctatttataggctcaagtcaccaacctctcaatggtggtgaatgtttttacattactttaggtctttctagagttttcatgatagattagtatagttatagattcttctatcttatatatacacttatagttctagattgttctaccatattcatacacattatagttctagattgttctaccatattcatacacactatagttctagggtattttactattttcatacatattatatttaagaatattctagaaatttgcagcaatttcaataagaagatatctgatttgatttgcaaattggcataacttggaaattatttgcagttgattttttgatttggctgtttatctgtatactaaaaaaacagtggagacacttacaattcattctcagtgttccttaactttaaatcctaacttttcaatcttaaaaagttattccaatgaatgatattattgtacaaatgcagggagggc

SEQ ID NO: 3265 - DNA, 2417 bp, Glycine max
  Intron number 2 from transcript Glyma09g34000.3 (locus Gly ma09g34000) derived from phytozome v7.0 (chr-ID Gm09; pos 40442173 to 40444589)
cagtgctgggtatgcataaatttatttatattcgtgtctttgatcaatttcatggtatttctgaagtttgtttgatttgtgaatttcttgatgtttaagtttatctgtttataattggtaaaaaaaaagtttatctttatcaacctgttagcttaatgtgtgagattgctcaatttatactgtggacgataaagaaattggccgttgcataatgctttcttaattttctgctcggtggtgcttcatttttcctgaactttataactaaaactacctgtagtagctgggatgtggactgagtggggatactggaccccgaactgggcagagatgggtataaaattataggccattcgggaatcggggatggatataatattggggagcagggacgagagacatcatacccgtccctgctccacctcattaccatgccgtctcctgcataacttttgctatgagtatgcagtaaatgaactaaagcttctgtggcagttttaagcaagacagctcagtcgttaggtgtttatttcataggtctttcagtgagcataggtagagttgaagccagggatttggttagttagagtgctggtgccatagaaaacaacttcattcatttttatgagtttatttggattgttgtgttgagaattttaaataatataaactgggatcctcttggaattgttattattgttttttattccccagttatctatttattgtttgttgtacattctatatattagggttattattagttttcttgttggtctaattgaattttttggtttagttaaaagcatgcatggtttatgaaccaatttttctgacaaactgccgagttgcaaacttgcaagtacaaagaattattttttgggattttgtattaatcaatctttttgagctacattataacattttgtacatcttttgaacttgcattttcttggggttttgcaatttttggtctcctaaagatccattgacatcgacattaaaaaagagtggataagtatttgatgtaaaattggataaatttagcttagactgaattagcgatatcatgtaatcgaatttgtttatatttaaaagcttgtgagtttaatgtactgtgtttcggatgttgatcactcttgtagtatatgttataagttcaatactctatttttcttaatcttgttggagatggtacttttgcaatatgtcacttgtgcaactgtttcagaattcagattacttattttgttatgcagggaatgcttttattgattaaccccttattctttatttgttagcctttattattatgtgtctattatcctatgtatttgttcaatattctcaaaagttttaatatccagggattgccaattgatgtcatggtcttcaccattgccaccacagtttctttgaaactgctcaaggtctagggttctatttaacttctgcacctgagcttttatatttaagagtgtttatagatattgggctagttgatagaaatggaagcaaaaatcgcaaaggcattggatagggttgcactcaatctgaagcgcaagcgagcgacccgatatgctgcacatttaagtggagcttcacaaccaatgttagggcattggtcatcttttacgtcaccaacaagcagggctgtcaaacgcatgagattgggtggatatagaaacaggctgacaaatgctggtcctcatattggacggtccttagctaggcgttttttgaattataaaaagagtgggagactggagcgtttgatgttctatgagaatgggtcatggttggactttccaaaggatgttgttgatttggttaagaaggatcttgaaatcaagcgggcagctgtggagatagagtcacatgggtatcatcttttgtttgattttttacgtctgcataagatggaccttaaaactggcttgcaacaacctatagctttgattgatgaggcagggtgctgttttttccctgaaatctatgctgcttctgatgaagaaccttataatttgagcaaacaggaaggtggaaaaagtccagactcatatgcatctaatgaaataaaattacatttagaagttgaaataaatggagtggatcaatccaggttgagtgagtgtagtggggagtccaatgctctagttaagggtattcaaattgatactaaagaaaactgctgtcaatatgatgtagaagttgaagatagcattaacaaaaaggactgtggaaatgttggtgaagacattcagcaacatcaagacataggtttagatgcttatactgaatcagtatatggaaaattggatctgaattctgtacaaaagatgtttcttaagggaatgtgtagttttggcagtactgattctgacatagttgagatttaccactgctcaggtgcgtca

SEQ ID NO: 3266 - DNA, 4267 bp, Glycine max
  Intron number 1 from transcript Glyma13g27800.1 (locus Gly ma13g27800) derived from phytozome v7.0 (chr-ID Gm13; pos 30921221 to 30925487 reverse strand)
tacacgcaccacaacgagtcaccgtggcatcccaggtaattaaacgcatcataaaattcagaaattccaccatgcacgaacacgaactctacttaatcgcctaagcgacgtcgtttttgtcacgtcgctggtatatttcatttcttcgcatttggtagttggtggaataggaaatgcttccttcttcgggaatttagagcgtgttactaattaaaaagatattactgacacaaaaatggtagaatcgtctgtgatcggttgttgctgctggtgattaaagtgttaatccttcggatcgctgactacttacttgatcgtatctgctggattgcatgctttctatattctgtgatcttaataaatgattagcagtgtcttcggtatgattgaaagcggatttttagaagtaaacgcccggttaaaattttcatttttaataaattaaatatttttttaaagtaaaataatatttcatttttaattataacactcaaatttagaatcaagttgattccttttaatataaatatttttcactaaaaagaagaaagagaatatattcaccaataattaaaagagagaaatattaatgataaaaattattttcaaatttttataaattttagataaatttattgttatcaattaaattaattactttcaaattagatatttcagtcatttaaatagagaagaagaaaaatattataaaaaattatactgttttagaagaatttatatgaatagtatgattttaaatttaattttagaaatattatgtaattccataaattaaaaatttgtcctctttattaagttttttttttctttttgaaagctcatttttttaaaatatcatgaagtatgattgaataaattttattgatattttcaattagttataaaataattgttgatttatttttattattaaatttgtatttttcaataaatatttaacgtgcacttaataaatttgtctttttttaaggttttccatctttaaattttgtcaggagccaaacagacatggatggcttctctctctttctttttttccctgaaaatatttaggtttattgcaaatttaaatttagagttatacaactggaagatgaaaatagatattgaagttgttttgatattttatggaagataagttaaagaggacccgacagagtagaaaatacgtaatttcttagaaaatagtattgtgatgtgtaataactgtttggactatagtattgggtcggtgagtgatcctaattcccacagttataatttgacaatcatacggctaaagaggaaattgcgcgatgagatggggggagcaagtcatgggcagaatgtcagttagtgcgtgtttggatatctagcataatcaattttagccaaaaaaaaaaaaaatagtggtgaataattgaaaaatgaaaagcaacaaagagttgtttgctaataaacaaggcgtggtgaccacaccccatacccaaacacaccttagttttggggattcacccattaatgtttttcttttgcatgattgtcacgtcgtggcgaaggaataaacaatacagatattggttgatgagtgaaaaaacaatacagtcatcgcatgaaatcctggttattgatttttttaataattaatttttttttggagattggagaattcgatattaactgcatgccatagataggcggttggttgaagacttgtggctaaatatttatttgatttttcagaaacacttaaatacttttgtggcatgcttttatgtgggcagtttttatttcccctcaacaacagtaattttaagtttcgagctaataatgatggttataaacgtttcgatttaaaagtgtttgaaaatattattgggcttaaataaatttttattccttataaatatttgatttttgtttttattttataataaagttttttgttttcttcaagtttttaataaaataataattttattttctatctttaatattttattttagtctatgataaattaataaattttgttttagttttttttttaaatatttttatacacatctaataagatttgactattttatcttgttaatttatttattaatataatatattaagagtttaatatttatatattgagaatgtaaaaatagttttacattattatttaatcatatatcattatttaaattattttaaaagtaaataattttaacatttactataagttgttattaaatgaatgttacactataggacataaccttttgctctttattttatgcggttaatatggagtttttagaagttatatttacggaagacattataccgttgttttaagtactattgcagtatttcataaaattgcttatctgaaaaaaagtattatagttgttcaattcttagaatgaacttgaagataaatgaattagcgtctgcacggtctgcaggtttattttataaaaaaatattatttttaattcatgttcaactttgttctgtttttattttattgttgttaaatataaaagaacaatttattcattatgatttttgttgttttaatctttctaccgattagtactactatcttaagtatttattcattatatacatccttttattaagttctaataaattacgatgatagtatattctaaattaaataaaaaatgaatataattttacctactctacttactttagaggccagacgtcactgtaggctcaatattcattggcaataaatgatgtctttatttttttcgacgtgaaattcggtggcccctttaactgatgagttcacattccaattattagtctttgcgtctgcatcttccacttcaaaatgctgacttttttcgcccaacggtttgttttcgttccagtcttttatgcttttatggcccaaggaggatatgaatgaagataactagataaggataacatatattaggttggtgggaccgggggatagaaaacaaaaacattccgttgaatctattttctatttagtgttttgagttagatctataacgaaaaatagttgtttctacttttatagtatgccgttctaattttgagagaattttttattttgagtttgagatgatgattgtttcctacattacttgtcagggattaattttattcgtgccatgtaattaatattttctaagaaagaaaattttatgtacagtagaaatcaaatacgagatcaacggctaaacaggtcgattatacctatacggttatacgtcattgtgaatcctttgtgataacaaatgattcttatatgttattaggcacacttttttaattaaattaaataacggcagatgaatatttttaaacattatttttttattaaaattatgtttttgaatctgaaaaagaacacctacatgttacaatttgattgtagacattaaataaataaagaaacttgattcaagttttgtccaaaaatgaacaatatatgtttgcggaacgttttgctttcctagaaaacgcataatacacataaacatcgttttttaaataagtataattgtaataaattaaaggttaaattattcatttagtaatttacattttaattcttttttagttcctctagtttaaaaataatatttttagtctttatatttgtattttaattttttttagtcctataatttgaaaataatctttttagtccttataatttattttaattatcttttagtctttattaaaaaaatataaaaataattatttataaattagttataaattatcaactatttttttattacaaattatcgtacgataaattagttacaaatcatgaaattataggaataaaataagtgattaaacctaaattaaatcatagttaaaaaaacaaataaaatgcaaagtttacctttgtgtttgagtctttaggcatattatcccatattggcattgagagttgcacacttctttgatgtaaattgtgcactttgtatctctacatatcttattacactaacatagttattatattgactcaaaacaactactagttgagatacaaagtgcacaactactagtgtaataagatatgtaatgtgtttagctagattgcactgttttaacttttcttattgatttttatccatctatctacgtttttggtctaatttttgttcaagcaaaaaaggggccaaggcccctaaacgaacaataaattaaattaaagcaaagtgaaaaatggcagatcatttgctgttaagg

SEQ ID NO: 3267 - DNA, 1306 bp, Glycine max
  Intron number 8 from transcript Glyma05g32330.1 (locus Gly ma05g32330) derived from phytozome v7.0 (chr-ID Gm05; pos 37273121 to 37274426)
gcattgagcttgttcagaaatacagaggtacaacacttagtgttgactgttgaatcattattggaagaataataggatagcttcaaaagttcttcaccttatcaatatttgttttgcattttttttgtaactattctcttttgttgggatgccgatcatttctgaagttatgaattgttatcttaattgaaaccatataattggcacgaataaaagttttatgttagcatattctttgttgtttgttaccttggaatggtgacaggttttgttatattttctaaataattagaaaacaacttctgataactacctaggtgtaacattttttatgagctgcataatgaatctttgttgtatcccgaggttttgttgatttatatttgtaagtttaaaggtcagcctctgtaattctgttattgtctgtttcattgtattttttatacctgtcactttaaacagtttgaaatatcattggttgattagttaatagattaaatttgaaaaaataatccacaaactgagcttcttcccctcacatgggtgggatttttttattacaaaaattcactctagttttatgcagttaattttttaaacctatgctataatttcctcacgtggcatcaggatctgcttatccgataggctgatgttaggcctgagcaattgtcttacaaattggaagatgtagcgactctatttttaatgcctaatgtctatcctacctttctacatcaaattgggagttataatgtttactgtgttgggaggggaggggaagctttcttcggaaaggtttagttactcaactttgatagatttgtagttgaagttctgtttctttttctcttaaacctaatcacgttgaaattgtagattcatacatataaaaatggaattattcatataatcatggtgctagttatattctgtgcattctaatatgcagcaagaggcccgtgaattttgatttcttttggctatttccaactagacctattctgcaacctcctcttctacatgttcatgctcttcaattttctactagcaatatagtattgttttatcaatagcaagctttagagttatgtttagacactctattatattgtatgttttccttaattgatctttgactttactttcactaatttgtgacttcaatataatatgttgtctataccactgccatgttgataaatttaagatagtattttttccattgcgtacttaatgcttggttttcattaaaagttctaagcaagttagtcttactacttctcacaggtcttcctaagtcagg

SEQ ID NO: 3268 - DNA, 1378 bp, Glycine max
  Intron number 14 from transcript Glyma03g30310.1 (locus Gl yma03g30310) derived from phytozome v7.0 (chr-ID Gm03; pos 38271680 to 38273057 reverse strand)
acattgagctcctaaaacagaaggtaggtaatgttatatataaatcacggccttttattttatttgattgttagtagtctgtctcaagtgagaactctttttattttgagaaatgaaaactataaatttggatcaaacaattatacatggatggtcaagattaaaagttaattaatagtcacatgtccacttaacaaagtcatgtacatttttcttttaatcttgaccattaatgacatatatgtgtactccttatttcttatgatagaagagttatcgatgatatgttctttctatatataggtaaggggtcgacttagtctaagggtgactcttgtttaacttactccatttaataacgttttataaacattgaatttcattcatccaacttctggttagacacattaagcagatcaagtattctatacaattttaaaattattttatgtttcatcaatcaactttattttaacatataaatatttttcagaataaaagtaaaagttggatgtaaaacatatagctatgaatgtgaaattatctaaactttgacatgcatgaccatcaagataatatcacaagattaattggttgaatttgcaaattttaaatttatatcaaattattaagtgccaaaaaattactcctagagaaagttgatccttttccccatacatacatatatatagagaaagaggagggattcacttactccaagagtaactcttttataattactcttcatcctcaccattcattttcttgagatctaatggttaagagaagttacttattacaataattagatcttaagaaaataaacggtgaggatgagaagtaactataaaagagttactcttggagtaagtggatcccctcccatatatatatatataggatttcaaaaggtgaatatttctattctttcctagaagttgatcataaaccaggattcactacagtactccctctgcagtaggtagtgctgtattactttttcaaaagtacttattgattaattaaaattacaagttgagtaataaaagttacaaactaagcaataaaaacctttaacttcaattactgaagtctgtaacttttattactttattctgtaacatttagtataaaatatataattttagaaaaaggtagaattgtactcctgtttttggtgggagtacctatgtgaaccctgcatatatatccaaggaattttattttattttaattctaaaagcataatgtatggatttggaaatgagtttacttaattactgtgaagtaaatttgctgcatattgaattcatcagcattatgtaattagcattctgatcttgaatggttctcaattttaattatttaaagttagaag

SEQ ID NO: 3269 - DNA, 3375 bp, Glycine max
  Intron number 8 from transcript Glyma12g22240.1 (locus Gly ma12g22240) derived from phytozome v7.0 (chr-ID Gm12; pos 24017074 to 24020448)
cagttgtaagtgcatgtttggattagtttattgtgtttacaaaagcttataatcaaaatcatagaatttttgtttaaaatgtctttttcgtatataaattaacaaatctatcatgtgctaagtagctagcttattttaggttattagattactattacaatatcttatttggtagtcatgttttgtctatgtgaatacatgcgtattggtcctttgtttgtgcatgtatggaagagaatgaaaaatcaaaagatgaaatgttcagtcaacttttaaacttacatgatgaagtgagacattgtgtaacaagattgactatttttttcaaaacattgccaactcaccaaagcttactacaaaaatcacattttttttttgtttatatttagaattaatcaatcaagtcagtttgataaaatagcacaaatagatattgaaagttgaaacaacaatagccttatctcgctaggtgagattgactacatgaagtcatgaatcacatttttccattaggctcaattaaaaacctaattattggggatgttgtccactgtgcgattccttttaataatttctttaaatgtccttcttggtctccctttagcccccttttcaatgggttaaaaatcatgcaatctactctgtttattggtgcctctagtgacttctttgcatgcgcctaaatataatatctccttatatacagtcattctgttatctttgtttatgtgtgtgactacgcattcatcttaagatacagttatgttattcccatttttttatcttgttcttttagagctcaacattcagagtatagctagtcgtatagtagtacgataaaacttccctttgagcttgataggtattttgcaatggcaaataactcccaatgtctttctcgtgtttaactacttagcttgtatcatacatgtgatgacttcattaatttcccccatcaatttgtaatatctatctcatatacttaacttagaaacatatccaatttttatctgtaagtcattttcttcttgtttcttgctaaaattcaatgcatatgctcttagtcttacttaagtgaaactctttgtttcaatatttgtttccacagctcaagttgagttaacgtcttcccttaattcctcaatcaaaactatatcatccacaaaaagcatgcatttacaaataatcttttgtatttctctgaaagcacattgaagactatattaaataagtttgaacttaaggttgatgagccctgattgaaacctatccttataggaattttcttaacctttcctctaggagtttccatactagtagttatcctatcatacattctttttgaaagccttcttccacagaacgtctcttgacacttgattgtataatttctctaactcaataagaactctatgtaggtctctttgtttctttggtacctttccatcaaccccaatagaagataaatagcttctgttatatagactatcctgagtccctgacataaatctaaattgattctctgcattcttagtctcttttcttaatctatgcacaaatacctttttctgtagtttcatagtattgctcataagttttatccctttgtatttactcaatttttgttatatatcgatattgaagagctatgggataactatttctgtcagcttttcaaaaataggcatggattgaccaatatggaaggattagaaatagaagtagacaaacaaaaattggattactatagcaaaattcaagtttgagagttaaaagaagacattgagaatttgatatcttgatggatgagaaaaatttattttccttcatccttaatacatcatacttgatccaaatgttttgatttcctttccttattcttggcaagcttatatgtcttacattcttcattctttgttccaagatctgagtaaaagtcctcaaaagctttggattgtttgtcactcacaactttccatgtctcatttctaaacttttgatatcttgcccaatttttaacaatattgcacctatgtaaggccttaaaacactcccttctatttcatactttttttgaacactttcattccattaacaagattccttctctcttgctcaaaaaccttttcattcactcaagataatttggcaaccttcctaaccttcttaaacttcttgtcccaaataaggttaacactaccttgtgattctcaattatcttcaacaatttctttttgaagtcatttttatcatccttgagctgctaccactcaaagtagtcaatcgtgcccactttagcggtgtggtgagggtttcctaccacagtgattgcagccatgttttgatgtcaaattgttgtacacctgcaaataagcggctgcgacttcaacatttgtggtgaaaaatcgcatttgttcctttgttttacattgctgctccatttttgtttttgggttttaaggttttttaggtggcgcttggtttgagtgttttctgttttcatttttaaagaaaatagaaaacaaggatgaaaatatgtttgcttaaaatttagaaaacattttctctagaaatattttcaaaagcatgtcgaaaactgaaaactacaaattaacatttccaaccttttctgaagaagtgaaaacaaggtagcaccttagagtactttcttcttgatacatgttttgtaaatctcgaaaatgaaaattattttcagaaaataaacactcaaaccaagcgccaccttaattttttaaacctttttgtttttgtcccccctattaattcttttatctttcctttttaagtttcctcctttttacgtgaacattcgcataacatgttcccctttttatgtgtttctctcttttttttttggtttgttggacttcaatttgagtccagcttagtttctctacttatatatacaacaacaacaacaacaacgccttatcccactaggtggggtcggctacatggatcaacttatatatatatatatatatatatatatatatatatatatatatatatatatatatatatatatttatagcataagatatattgtaataaaataagtaatagtagtaataaaaaatgtgataaactactttcttttaatgcaaaatgtaataaactatttaaacataacatataataatactattattatttactaaaatcggatttaataggttatttgtgtaaataatcccatatgtataaatctacctgcttcctccatggaagaaattgtttatgaaaggaggtagttcaaggtagagacccttttaattatagtttaatgaaatttaattatagtttcatttattgacagaacaaaattggctcacggcatactttctggtaaat

SEQ ID NO: 3270 - DNA, 7376 bp, Glycine max
  Intron number 7 from transcript Glyma13g35920.1 (locus Gly ma13g35920) derived from phytozome v7.0 (chr-ID Gm13; pos 37299646 to 37307021)
taagcattaagtttgaagactaccctcttgtcactattctagaaagagcttaatttctatacaggacaattttgagggtttttacattgttaatcaattagaaatcatgttgagaatgagttttaagttaatatgataaaagtcaacaaaattatcatatataacaatttgttattgattgacaacgtaaaaacattttacattgtcattacaacaccaacatcaaaatcttatcccactaggtgagatcgactacatggatcacacgtcaccatttgacactattaaaaatcaaggtttcagaaacactttacattgttatgacatgtactatttattcttcttaaacttgatttaatacaaaattaaccaatagtaaatagtaatttggtcatttagtattgattgaactcaaactcacaatttagatttcatttcttctcaggcatggagattgtggagtgaagggaggactttggaactgattgatgaatcactggacgattcaatcattgaaagtgaagtgttgaaaattgttcacgtgggactcttgtgtgttcaagagagaccagaggacaggcccaacatgtcaagtgtggttctaatgctgaatggtgacagaccattgcccaggcccaagctccccgctttttatccacaccaagaagatttttcttcatccagcaagtgtgaattcagctcaaatgagttgtccatcactttagaggcaagatagtaaacctaaattaatcaagataaattgctaatttgtttagttttgagtatgtatgcctgaattgctgttgtgcactgttctaatactgttctcttagcatctaatgcttttgtaagtatgcacggacaatgaatgatcctttgaaaaaagaaaagcaaacttcgctgtcactctttgagattttgtccaatcacacaatattacaatgatcttcctgtacacagtgtaatattttttaaaccttaaggatgtgtaatgtaaaaagaggtaacagtgtaatattttaaaataattaggaaatgtttgtataggataaaaaaagagggctattttgataatttgacaaaatctcaggaggttttaggataattcactcacagaaacaaaaaaaaaccttaaccaaaatgagaaaagagacttttcaagatgtcacaactcacaaaatatgtaaatgccggtgttgtaatatctcatttttttaaataaattaaaaaagttttttgataaataaataaataaaatttagagaacggtgaaatttttataattaaataaaaagaaaaaaatagttgtaataaaataatactttgaatatatatatatatatatatatatatatatatatttgatttatttatttgataggaaataaaataaagttcttttatataaaataataaaaataaataaatagagtaaggatgcctcctaaataataagctttgagtatcctaggtataaataacgatatgttaagtcagttttcagaccaaggatgcttcctcttcccctcattttcgtttttctctcttatccttccaaaattctctctttttcccgcagaccaccaaatctgtcttagaaaaacaatgatctcagattcattcaccattggatcgtcgagaaatttaagcaccaggtttgcaactcaactctgagccttttcaccgttgggttttgaaatcatgtcggagctgagagaaatacacttcgcatcgtagtctttccctttcccgtagaaactcagagctgtcttggtaaaactatgatctcagactcattaaccgttggattattgtgaaatttttatatgtggttcgtgatttaattgcacaaaccttcaccgttgggatttatgagataatattcatggatggagaaaaaaggaattgtatgaagataatacaaatggaggtttcaatcccttctccttctccctaacgtttgggaaccctaacagagcaatcggaggaggagctctagagagcatcataaacatcacaattgataacagagaacgcttgagcgactacatcgagataaaggatgaatttatcgcaattgagggttagaataaacatgtgtagggatccttagaggattaaattgaggtttattttgggatgcttattgacttataatttttgttttatgattataaatacaatattattgtgttttatgtaccaattgatgttctgataagaattgattgataaacttgagtgatcttgatgtttttgtgttttgacccatgattttgatataattgtgtgaaattatttgaggggttttactccccatgttgtgataatttgaacctgtgattaatggtgaaatacatgtgtattgagatgtgagctatggactgtgcaatcacacaattgtaagaccctttaagggcgacgagtattgtgattgaatccactatgaaaactcgacgaattaaaataattttgaaaacaattgactagttgtatgtattgcatggttcatagataaagtgtatgtgttaaattaaaattataccattatgattgagattaagtgtagagtatgtacgtgattgtgatgttgtgtgcattgagttatgaactatgaattgtacaatcacacgactttaagaccctttaagggcgttgagttaattataagactcttttagggcggtgagttaatgctaaaaccctttaaggacgacaagttaaaactattttgaaaacaattgaggagtcgtgcgttgtgtacaattcatagatagagtctgtgtgttcaaatattttctaggttggacctgaatcaggagggagagaccttgacggactcttcggagtgtaggccttgggggccacccgatttgagtgctcttttaagcctatgttgatcccgtatggttggagcattctcgcaaaacaccgtaatcctgactggtctccctatgatcttacctaatgaaagtgacctgacttgctagtgtgtggtttgtcttgtcatgtactcttgggcgcctgacaaggtttttcactgacatgataccacattgcatataggattgagtcttagtgtatatgttgcataacgcttgtgtattgatcgatattgattgacttggtggtgttgattcttgagtacatgaatgttgtgaaaatgagtgacacatgttgtgttatgatgagatattgggtgacaaagtggtgaaattatgtgagatatgtttaagtaaattttattttgtttttatgatgtttatatgtacatgttgtctcgttactcttcattaattaagaatgtgataactcactcccagtattttatttgtgtttgactcatgtgatgatctcgaactttatgttcgtggaaacagatggataaatggatgactatgaagaatctcatgttagaggacacgggaacacaatgctctgataaaatgtgacattagggtataagttttatattaattgtatgaagttttgaacggtcttgttttgagccaaaatgaatttattatttatttggacaagttttattataatgttagaaagatgaatgtgagccttttacttttttgaaatacttgtattgtaaaaaatattttaaatacttctaattaatatttgaattattatttcttttattattagtatatatatatatatatatatatatggagggtgtcacaagtgttagtgtaaaaggaacacagtaaaagcctccaatttctattcaaaattgtgatattacacggctatgtacccatgattaagaatcattgtttcttactaatggagacacacccacaatacttagttggatgaggttcaaaaacaaccttcactactttccatggcgtaggaattttatctaaccccgtattgggggtgacttctaattttctataacattcaaaagcacgaaatagaacatttttggtaagaacttccctttcgtcctattgcatgtctttgacttctcgcttgtaccgtagataggctattgtccatgtcatgcgtaacttaaggtcccaaaatgggtgactcaaataacccgtcataatgtgtgatattggtcaataaaattgaagaaatcattttgatccaatttgacccaatactcctcgactcaagctaaatcgtaagtctaaaaatgtcatagttgattattgtagatattaagttctatttatagtttacttatttaaaaacaatatttatttatttttaagtagcatatggcttaaatatttgaatgtaaatttatttggaagtggtacaagagaattaaataaaacattcaacaatttttttattttaatcatattaataaatagatgaaaatgttagtcaacaagcattgtcaaataacctgcatatcgccctagattgcttttttgtactcccccccccccccccccaccaacatttttttaaaatatttatttcaataatatttttatattgtgttaaattttattgttctagaatttaaattacagaattataaaaaataatgagttcaaaatttaaattttagaactgtgacttttaaatttcaattttataaagccaattttttcataaatttgaaacgcaaattcttttactttttagaaatgtcaataaaataattgacaaaaaaaattaggaagagggcgaataaaaaaatatgggggattatgtacatagcccatttgattgtgaatgacttggatagagggtatttttcggaaattacttaatgcaccctattttttctttatgaacctccaattttttcaatatcccctttttgttcttgctctccgaagcaaaaccttagccgcctctcccccaaacctccatgaccactgcacttcaccttcaccaaacaccaccaccgcagccatccaatgccatctccacaacttaccaaacccaccaccatgctgccacccaaccacctaccacgggcacacgcattgctgtgagccacgaacctttatgccgcttcaaactcatcatcatgttgtaccatcataatatagttacggattcagtaatccataaaacaaatatatagatattttgattcttaatgatatgatataagttgctttctatgtataaaaaaaacaagaatttttcagtgtgggagatttgtttagcttgcccagcttccacctattaatgaaaggaaacttcgtttgtacaatttcctgtagttaaggaagatttactttaacaaaaaaaaaggttaagcaatagtaataacttgttctgatgaatgattatagttatgtgacataatgtaaggtctttatgctagtaaatttgtaactatcgaatttcaagatacatgatcacattaacaggccaaatacagcgtttcattttgtctgatctgacaaatagttggcagcttttctacaccggccctgcggatcggtgtgataattatgccatttgtggtgtgaattctaattgtgatgtcaataactctccaacatgtgaatgccttcagggttttattccaaaatctctagaaaaatggaattcacaaaattggacagatggatgtgttaggaaagttaatttggattgtggcaatagtgatggctttctgaagtatcagggaatgaagttaccggacacatcaatctcatggtttgataggagcatgaaccttgaggaatgtgagaatatctgtctgagaaacagctcctgctcaacatatgcaaatttagacgtcagagatggtggaagtggatgcttgctttggtttaacaacattgtggatgtgagaaaactaacttctggaggacaagacttttacataagagtggcagcttcagaattaggtgctgatactttattttcatctgccttcctgattttggcttttccacttaaacacacaagtaaaaaaatataaattctggttcttattaagctgcacattatgtttgttgcatacagtttttcgggcacatgttataaatttcatccttgttgcaggtagataacagaacatttaagagtatgatgaacattagaggaacaatttggcatgttagctaacagtgcttttaatctctcaggtcataacaaaggcttgaacaagatgcaggaattcttgttggttgtattgtgttcattgtggtcatgataatattgggagtggccatacttaggatgaaaaagcttgagaagccaggtatttacatccactcgtttgctttgttagtgtactatggtacagataatagttatttaataattgcaaatattctattttgataaaaaaaaatttgaaggtttggtaaccattagcttttcctcttgtgatagaacctagatataatgcagtcatttcttctatcttcatagggaagaacaaaatagttagctggaagaatcacactcacactggtaacacagagaaggaagaaattgacataccaatatttgattttttaaccatagctaatgcaactaataactttccaactatttaaaaattgggagaaggtggatttggacaagtttacaaggtaatttgattaagtttatatcctgccattggatttatcatctatgcataactttcctatgaaatgattgtcagggtacattgacaaatgaccaagatatagctgtgaagcggctttgcaataattcaggacagggaccaaaagagttcataaatgaagttgtgctaattgccaatcttcagcaccgaaatcttgtgaagcttctagggtgttgcattcaagatgatgagagaatcttgatatatgaattgatgacaaacagaagtttggactactttatttttggttggagattttatcctgtctcaatacttgattttctctagccatgatcatcaagtcatcttcatgctaactaactgaaaaatttgtcagttgaagctagaaaaagtttgctgaattgggctcagtgcttccaaattatttgtgggattgctcgaggacttctctatcttcatgaagattctagattaaggattatccacagagatctcaaaacaagcaatattcttctagatgaaagcatgaatccaaaaatatcagactttggtcttgctagaacatttggaggagatgaagttgaaggccaaacaaagagagtagtgggaacttagtaagcatgcttaaatggcttcattttgttactttatggttcataaaaattcctcccctctttctgagctccatttcgttttctgcattgcagtggttatatttctccagagtacgctgctcgtgggaatttctctgtgaagtctgatgtcttcagttttggtgttattgtactagagacagtttgtggaaagaagaatagggagtattttgacgata

SEQ ID NO: 3271 - DNA, 1262 bp, Glycine max
  Intron number 1 from transcript Glyma08g21420.1 (locus Gly ma08g21420) derived from phytozome v7.0 (chr-ID Gm08; pos 16254618 to 16255879)
gatttgggtatgactttcttttgtttgtctatgttattgttagttatttacttacagtaaattacataaactttcttagatttaaagaaattatacctgtacgtctttcttccttttttgacacacctacacacttttcttaatttttaaaacatacacaaactttcttaaatattattcagctagttgagtgaagtcatatgcaacatttattgagtatttttcttcaaaaataacgtggttttcctcctttgagtataaaacatttttattaaaaaaatattttgcaacaaaattcaatcaagttctcacaccagtaaatgagtcaaatgaatgtcgagtaacaaaaccgtagaatcaatctcataccaacaaaagcataagaaaaatgaacaattataagttttccaaatcaaatgaaattactccaaccaaattattatgatccaacacacaaaatcacctaatcaatttcataccaacaataataacattaaatctaaatatattttaaaaatagagaaaaaaacatgtgttatttctttaaatgtgaaaagaattttgtatgagttttaaaaaagaagaggaagcatattaaacctacagggagatttttgtaatttatttttacttatttgtcaaaaaatttcaactgcgtacttttagtaagttgttagttaattgcatatataatcacttaaaaaaaacatatacctttttcttttaacgttagatgaccacttagactaaataataataactcaagtgaatttgaatctttaaagctaggcatcggataaaacaaagtgttagctaaaactaaaagaaataataacagaccttaattttttttcttatgtgcagtgcaggctcgaccgattctgtgattaattagtcagatttattttcttaaacctgactatttctacgtatcccaattttttttgtagtggtttgtgttaaatcatctaaattaaatatctgattattacattgatttttgggatcgaattattaattaaacggttcaattttattttatttttcatccagctaaacattcttccgtatacagtatatcttatgagaaaaatggttattaacattataaaaagttttattatccaattataattaataatatttgtaaatttattgaattttaaaataattattaaattcatatctcattatatatttatagttaaacttttttacttaaaacaataattaatttcccgatcatagggtggagttatata

SEQ ID NO: 3272 - DNA, 1727 bp, Glycine max
  Intron number 3 from transcript Glyma18g44530.1 (locus Gly ma18g44530) derived from phytozome v7.0 (chr-ID Gm18; pos 54244188 to 54245914)
gttggcttggagacactggtatgttttactgtgttatacaactcaaacttgtgaattattttcttttacattatttagttgagttcattatctggcagaatatggataagaactagtctttaacaatatgtattatgtggtactcaaaatctgatgtgctgctgaaactgtgcagattgattatgttttgtgcaaagactggaatcttgccttacatggaaatatttagattgtttaaagtattcaggaatataccagtgaatttttttccatggtttgtaaattatgtgaacataacctctgataatttcatgttgtcagatgtttatttatggatttggttaggagaaatggagaatttgatctctcctcttttgaatactctttcgttttcactgaagagtaaatttttctatttgaatatttatgattgtggatctcaaaaacttttatttgaatgtgttctatatatcctcacatgggttatccagttgtaatataagattttattttatagctaacagtagtggatttaggtgacaatgcacgcttagcgtacatcttaagcctatccaagtacctatcagactagttaaagcagtaatttgcaaaccttattaggtttgattcaaatttctttattagttatcacaaatcatatttaaataaggccaaacctactactaaaggtggattggaataaagaatttctttgtgactttggttctttgagaactacgaacttagttgattctctcagtggtgttcaatcagagtaagaagaccacgacttgttgcttagcaaagtaaaaaccttggtatagggcatggatagtcaacaccacaactagataaaattacctagttgataagttggatgaacataccattgaaagaattggataagttcatacctcttggattcacatcactagtgtgcttcaccgcttgacactaggtaattgcaatgaatttttctttaaatttttttcaaaatgaatttggcatttaaattgccagctgggtggcttgaattttttatttttattattttcagtgaagagggaaatcatcaagccattaaactaacattggtagtttagtagatgtgacttacaaagtatgttaaatctcataatcaatgttttgagctatcttaagcaagagagatagagatagaagcaagacatgattcaaagtttcagacagctgaaaaaataaggggcaataatataaagaagttggaatcaattattaaaaatttaaaagttaaaaacaataactggttcttggtaattggttaagtttaatgagacagaaggtataaaaaaaatgttggtgatagagcattttccagattttgttatttttttataattatttatcatgttgaaaatgatagttgattcaattacttaatagtaaaccttagatcaatgacttgttgtgatcaattatattctatcaatttgaaaattgaaaagtgctcttttatggaaattctggttttccacacttttatctagaattctagtacctttatatgtcttttcccctaacctcctctgttacccttttcaactagtacataggaagtgatcccgcagatttttggcatcaatctaggcttgtttaccatgtctctcaaattgatataagttaggggatatcttaatttgtttgtatttgctaggttggatacaaagttgtaacaccctctcgacgga

SEQ ID NO: 3273 - DNA, 7144 bp, Glycine max
  Intron number 1 from transcript Glyma05g28130.3 (locus Gly ma05g28130) derived from phytozome v7.0 (chr-ID Gm05; pos 34014196 to 34021339 reverse strand)
accggcaagctctacgagctttgcaacggtgacaggtacgcgcaaaccgtacattaccttttatgatttccgttccgtacaccgtagcgtagtatatgtgtccaacatctttgatttagttccgtacaccgtagcatagtatatgtgtccaacggaaattagttccgttttatgccttttcttctgtactttgatttgtttgctttactgtgtgcttgctttccgttggttggaaactaaaaatggaaatgaatgattaactaaactagtgcaaagtgcaaaagtagtaaccattagctagatgagtcttgtcaaagttgtcacggttttcggagccttaggtatggatgaaaactacttgttaaaaggaggaggataattaagtttgtggtgtcagctctctgcactgctgcactagtggaagtcgatttgatataatttgaacgtttctgctgctagagtttgctagaagacattttttaaatctttttttttttacttgaagaaaacactttaaagtgtagaatctacactgtagataatttatttatttgtgctggaatatatatatatatatatatatatatatatatatagaacatttttgctaaaggatttatttatttgaaaagagattttcaaatgtacggatattgcttccatgagaataatgtcaagaaaaggtattttgttacgatagtaaaaagttaatattaagcatccataatcaactcgtcagatttggcgtccaaggtagacttaaatacacatacgaaacttccctaccactatcacatacttaggagtaggagatctgtaaaatcgaatcttacccgcgtgctgcaaaggagagtgataaggttttgaaaatctatgcaattattgtaaaatatttgtgtaatattaatcatgccaatatcacatacacaaattgtatgttgcattattgaataattttatctcaaaatctactatcaattgaattttcttatcatatttataaattttattttaattcaaaattgtttgatattctattaatatacataaaaaattatgtaatatttacttttagaatatataaaaataaaaacatgtaattacatatttatagttgttcaactttaataaaatttaatagaaatagtttaagtaatatataattaaaattcaatgattagactgatttataaaaataacatcattgtatataaaattgttgatggtgcaattaatatagcaaatgtgattttatgtcttattaaaatatatgtttttagttgttatcattaattttattttataattaaaccaatgttttggtatatataaaaaagtttcacgttgtttaggagttaaaattaatgatagtttatagacacattatccttaaattcattgaaatgtggataataccttgaatatggtgagcaaatgatcatgcaaaggttgaaactatttcaatatatatatgaagtctcatattgattagaagtcaaggtcttagtttataaaccttctcctttgttctattgagatgtattctaaggactaaattgtaagaattatgtgagacaaaataggcaataccttaaatgtgataagtctaacgatgtaaccgatttcaagttagaaccttgacattagaaagagagtttaggccacacaaattataatcacacatgccctttagcctcaattggagagttaccatttcgctatttatattgccccttaatccattatgcattttaagaacaaaattatggacaaaatgaataatatatacctctaatatatacctctaatacaatgaatttaatgatttggtatgtatttttactgtacccatatactggttccctctcagacctgttttgtctgagtttggaatcattgctatggtacccattctgctgtaatatagtacctctggtacttctttacatatctataaaatattatctttgctgatcaaaaaaaaaaaaaaaagaagtcaagaataagtggtgacatataatgtaatcacactatgccactcgctagtaatatcattgttgatggattgacaaatacaccaaatcattaatgatttttctctatttataattatttcaatttacatatgcatctactagtatattctaactttagttctccgagtctaatttatctattttctctcccaaattcttttgcagagttaaaatagtaaattgcattaaggatagagatatataatagactaaacaaatatcaacttatctctagtgataattttatttagataattttttccagttctattagaaaataactttttccaacgctacccctataacttatcatgtgaatgagtgatcaaaccacaaacaataatattaaatactggaaaagattatgcaaatgtaatattcatgaatagatagaaagataaattacatcaagagtagttgattgttaagtttccaacaaaaagattatgcatatgtaatattcataaatagataggaagggaaattacatcaaaagtaattagttgtcaagtttccaacaaaaagaatttagcctctcattatcatgaaagtttttacaattacaagaaagaaatatttagtaaaaaaaaaatctttatttaaacatgactatcaaggtcggcactaacaccaacttcatttaaggtatcaacttgtagataccaattgttactattaatctaaattcgttatcattatagtataattagggtacaactccaactcaatacaattacttttgttctaattaacaatcatctgcaaattaaggcttacaactgagttttcagcttgttacaattaacacgttgaataaccaaaaataaataaattgtcatataaacgatttaacaatcagaaaaaatgtttctaatattaggtgaccacgagcaaagaaacactgtcaaaaagacttccaatgaaaatatcagtgttaccaacattatagtaagactcaaacatatccaaggttcattaaagcattatcaacgatagcataaaatttgaattaaagagatctagaaatctttagaaatatgcttaattggaaaatgaaatactgaatctgacttaaaaatagcgttcatgtatatagtgtgggtgtttggacaagtataaaaagccttcagatcaactgcatggtcagggtacaggtgtgactttttcataccctgtaccatatccagggacgtgggagaagcgtcaattgataaataaaaaatgtctgagtggtttaaatccaacatactttaacttctatttagataattggtgcaattccgaaactttgacccgtggtcatgtatagaaactcagtgatgccatgtgaagagccaaccattttcaaagcttattaaatcgttttaagtaaaaatacaaaaatgattttatgtataatacatctttagtatgagttttgttatgaatcaggcctatctaggacccaacccgaatccaagtccggctcctctaaaatgttgaccatgcaaactatctcggagattaagtcactttatgttattctaagaacaacgaataatttctctcttcgaatcatgggcctctagcatagagatccagtccatccttactcctttatatactattggcatctgtgttataattacgctcatttattactattagtctttgtgtaaagttcttcactaaattggcatcggagtgtgcctttgcagatactcttaacaccactcatgcagactaggttcaagaagttcagactactaccctcacacttcaaggcaaaaatcatttatcggtctaggcctattagtcccagatagagagtttggaccaccactgtcaatacttcgaatagaacaagtctttaataccatttcttgaatcaatgactcctaaagcttattagtgtgtttgttttatggcttttccgtagaaatcctactttcacaaaggattcatgttcaatgaatccgatgtgagttgattcacaccctaagctgtttaggtaaaaacaacttaatgattttatgtgatatatgtgtcacatgtctctaatagcatatcatgaactaattatcccaagaatttaaactattagatgaaagcgtatcatggttttatgtcaaacatgagacaacacttaagcatcttaccttgttctaaaatattgcttagaagaatgggagcaacaaatttaaattacatctctagagaggatagtcatatatgatctaacattatattatgttatataacccaaaacatagcttaagatgatgacgttttatatctaataatattcaaggaagccctaaacatcgagaaaatctcatttaaagtagttggcacaaatgtgtgtctaaatgaatttatttcaagtaatactttttatttttttatacaactttttgatagaacttcaaatatatatatttttttaaataaaatttccctaacatgttatacagctgctgcggtttggttcctaaacatttattgaagaagctgctatttgggtgtaatttaataaatgcttctaaatcaaattgttgcaacgattaatcatgtcttgtaaggttcaatcgtccggatattattcgatttcgatccttagaagaaataattattgatcaagttttacttagcttttggtcaaactttggattagtcaaaatctctttctcctgatgaattggaggattaagaggaaaaaaaaacatttgcaactccaagtcacgttcttctaacatccctaatttttgacttctcaactgctcacatattatgacacttcacacgatggcatttcactcaacatctttgttaattagaatctttcatagatagtctttttttagaccttgataatttgcttcagttgctttgaggatcaatgactatgcccagaaaccaacataagacttttgaggatgttttgtcctcactcacacgtttaaggccagctatctcatgactattacaaaccaagacacttaattgtggagttattaagttataggctacttaaaaataaatgcatcttgtttgtatatgtaataccaattaatttctttaagtcatcttcaattgtataatctcacacatatacaacatttagatccctctcattttaatgtgatttgatcgggatcttacagttatcaggtagaaagacatgatccaattgaggattttttgagtttcaagccaataaataggccttgagaatcaatttaaaaacaagtctatttaatcctgcatttatttatcgcttttccttacaatttttcttgactgcttctatttagtgtttttgtttataaaccttttttaacctttacttttcaacccaaacctttcttcagcaattggttttgcagttggtaagagagcattgaatttagctttgatagatgaccactgaccaataatttcaagaatactcatgtcatgtttacgaagattgagtccacaactcatgacaagtatgaaaattggtgtagatgttgtgaaggtaagaatcaattgagtccacaactcatgacaagtatgaaaattggtgtagatgttgtgaaggtaagaatcaattgagtccacaactcatgacaagtatgaaaattggtgtagatgttgtgaaggtaagaatcaattgactgcaatataaagtacacggtaaagcagtatttttctcccaattttgtctatcctccatcacatattaaggttagtgtagagctgattcttcaacccttgtccaatacaccacttcataactaccttggaccatgaaacatagttggaggagcccaataaattcttaattgcaatgacaggggtagaagtgaaggtagaaaaaaggcccagacttgacccagaaacttaatcttttaattaagttgacctccaatccaacctatacaactaaggttataagtctgacaaggtcctctggaattcagatgtaactgcaccgtcctgcagttgtaatcccacggtccaagtttatatgaaatatatatatatatatatatatatatatatatatatatatatatatatatatatatatataactattatatcgtatatatgttaacttaaataaattattttaatagctgagagcgtcagatcctctacattatttttttaagtgtagaattataggttaacggttaacctatagatataataacttcagaaaaaacaagaattgttccttgccaaaggtagttagaacatagccaacacgaaagagagacaaatgcaaattaggaaagaagctaaaaatctttggtacttggccgcagaagttgagatagattagattgtgattggagatgatatcactacaataagatggtgaaattaaaagaatcaaataagaaagatcatagaatgcttacgatatgatagatatgtacattctgtaaaaaaaaatagatgtatatatttgatacaaacttaacacatatttattctactatattaattaggttaagccataatgtaataaaactaatacaagtcctgtccattaaaactactaacataacaccaatatgatcaccctaatgttctttttaatacttctactaaacaatcattttattgtttgaggttgttttagctaatatgaactaaaacaaattcctgaaaggaccaggtgtatagtctccctgggtaaacaattgctaaagcttatcatacattgcactgaaatgggataacctcccctccccttgaatttattattttcattcatcccatttttgtacgcacactaacacactaacattaattttttaactactagtgtgtttgaatacctcttagaatcaattttgaccctcaaaatcatggtggaaaattgaaaaagttgaagcaactatttgttgctttggcttttacttgattttagaattgatattgacataattgaaagttaatccaaacacagaaacatatccctggttagaaaaaagacctgttaagctacttgcaccaatgcctatcaaatatcatgcgtagttgttgtttagttatttcaatattagaatgaaaaatccgtgaatttaatgttctcagtttggccgaggtcgtgcagcgatattgggataact

SEQ ID NO: 3274 - DNA, 1558 bp, Glycine max
  Intron number 10 from transcript Glyma04g43540.3 (locus Gl yma04g43540) derived from phytozome v7.0 (chr-ID Gm04; pos 49086707 to 49088264 reverse strand)
gggaaaagtcagattctcctactgtaggtgggtgtaaaagaagttaatttttatctatgcatgatattttctggatgtaggtttagagcattctagtttgtactagctatagattgatgactaactttctgatacaagttagatggttgaatatttctaaaggtttctattttggaatgaggtagaagcaggggcttagtagtcataggctcatagcggggtggaaccacatacagccacagttatttgttgtcttgaacaacggcggtcaagtgtatgccatgatataggaggctttctcccttctgtcctgatcctgacttacgcatattgttaagatatcccacattggttaggaatatgatcagaattcccattacaacaagactctggtaatcatctgctttttaactatgttaggttacctgcagatgtccagttctgggattgaggtgtgtctgttactctgttaagatgtctagctaagaatatggccaaaatattccctataaggctttcacaatcctcttcctttgagctaacttttagggttgagtttggtttgatccatttctaatacatatcttaataagggtgaatattcattcccttcccaaaatctagatttttataatttttactatttctatcatttacttacaactcttgttaaagaggttacttacagttagattgattacactttgacatggtcttccagtagggtatctttggtttgaaatattttcaccaatgaaaagtaggtatgttaaccttagcactggctgtctgatttgggctttgtctttaattacctgaatattgaagcatgtgactggattaaataaggaattctatagaatcaaatctgaatccaaagcattgaatccagcctttttaatttcgttatttgtctctgtagttccgttttaatttcctaccaatttccttttccatgtttcttgttggtttctgcatgttggtctgctgaatctgatgttgtgctaatggataacatgttaataaggtgccccaatttggcatacaaccacaagtgggctattttagttctgttttatttccaatttctttttccttgttttttgttggtaaaaattacattatgccaaatgtgatacatatccttttgaacctgtacatatcattgatctggtgttttacagatcaattcaaattgatgattgcatatgctacttttaagctgattaggaaagatattattcttaacttactgaacttctggtggccagatgacgggaaggcttttttttaaaagaaattgttggatcagtattgagtgagatgcgtggctgtaccactttatattaactatactttctcgtaaaacaaaaaatgaagattgaaaaatactcaaaagagggatacagaacattaagattttcctgatgagaatgtccagtgcattttatgactgagggtattgatatcttgtccatattggttggtggatatgagatacactaaatcatttatttttgtttgaaatttggcctaggctggggtggacctggtgggt

SEQ ID NO: 3275 - DNA, 971 bp, Glycine max
  Intron number 4 from transcript Glyma13g21230.1 (locus Gly ma13g21230) derived from phytozome v7.0 (chr-ID Gm13; pos 24727915 to 24728885)
ttgtaagccgtgattcaatttgtgcgtcaataaaagtaagattttcttttgcttgcaaagtttgcattctaaatctctgatgctagatatattctccagatttatatttataacttcatatatatgctagatatacttctctactctcgagtatcttctgtgcaaatgttagaaaattcattgtgtcttgtcaaatgaagtaaatatatattctctactcacgagaagtgtggagatcttaggctaattgttccgatgctttatcaaattttctttgccatccgatgttcttgacagttgatcagaaatttgcaaagtatttgaatgagttaataattgagatttcttgaagacatatgaagtcgagtcagccagaaatatcaaatttcaaattggtagctggaggagtatagtgcatataatggcaagaggaactagaatatcttgacaaactatttatagtttttgtgcaataaagaattattaaatatttttttgtgtttatacatatttggttaagtttttttttttttttttgggtatcttggctgaggttggatgaaggagattggacagaatggtatgtgctataattagatgagtttggctattaactttacctgtttcagaattacttaacaccatatttatcttgatctgtttcctgtttatcaccccaaggtgattatagggaggcatgtgctgtaattaaatgagtttggctattaactttaccttgtacttttagaggctttcgctctgttgttgacattctctctgtctctaggtgcataggctgttcagttggagtttttgttggttcaaatgtagctcttctattggtatcatcagaattggggacttaattttacgcagacctttgattatctagtacatttaatgcaaaacagtacagattctgtatgacttaattttttgggatatgacaagaataaaacttgttgcaggat

SEQ ID NO: 3276 - DNA, 3065 bp, Glycine max
  Intron number 1 from transcript Glyma19g34520.1 (locus Gly ma19g34520) derived from phytozome v7.0 (chr-ID Gm19; pos 42118541 to 42121605 reverse strand)
agattttgaggtactttctctgattctgtttctttcttcaattataccaatttcctgcttaattaattagtttctattaataattggtagctctcgagtttgtgcttgtgcattacattacattacattattctgtatgttattgttgaattttgatgttatgaaaagaaaggaggctggttgacttactattggcaattgggagatcattctttctgttgttttgttttatggttttgctagttaggattggagcaagtgtgttagctatttagaatgttcttttcaatgaaaaatggtttgtaaggggagtggtataatcatcttggcttgtgatttaaactagttcttaatgtgcatttcaagttttattcatgaatagtgattttactatgtaagtgtgcttttgtgttgtttgttggacaagtttgttcttggtatgggtgcttctaccattttttgtcaagcttgagctgtcaattatatgttagttgtagattttcttccaagaaattcgttttaggcacttgtttggtgcatggtagtcaaagtcttactccatgttgtgtcagattctgtgatcctatgcacaggtgagaacacaattttctggaattggagatgaatcatgtcttacctctaaaagatctctgaatctgcatttctagctactctcaaatttgcaccaaaagcttgttagtggattgggcagaacaaaataataccatgtccagcccaccgaaactcacaccttgacttaaaccacccagttcagcttattgaattgaatttcaccttttcctttcaaaatcatctccctttcaacaactctgagactgcagctgtgtgtgtctttgtgtagcctatggtgccatgttacttcagctcaacaatggagtgtaattgagaatttgagatgggtgatgatgtaactttgataaagattttgggatgtcagacttctacttggattgaaattttggtttgttttgcttcccctgttcctggtttttgtattttgttgttcacgtgttctctgctgggtttcccgatttgtgtgacttgaactgaactgagtgtttgttttcctggttgcagctgttgtttctgacctgtattcctctatttatgtcctctatcatttcttgctggcatttggtttgtctttagtagttagaacctagaagtaattgttttgatagaaggcttgtcttgtctttggtaggttagactgttagaggcctttgtctttttataagtctcatacacattacacggtcttaaaatattgtcaagcaaaataattaaatgacatagggaaaaggacaagtttcagatttatttgatttgatgaataaacagcccaaatttgactccttaaatgtactatgactataaacttgtagttgcaattgtgatcttgtattgtacatgtgggttgtttatttgtgttttgaacttgttaaaacatgtgtttagatacttgcatcattaatatgtaccctatattaaacatgtgtttagatacttgcaacaacaataacaaagccttatcccactaggtccaatatatttgtcttctttaatatgtactctgaggacgagccctggtgcagcggtaaagttgtgccttggtgacctgttggtcatgggttcgaatctggaaacagcctctttgcatatgcaagggtaaggctgcgtacaatatccctcccccataccttcgcatagcgaagagcctctgggcaatggggtacgctagtttttttttttaatatgtactctataatatcatgattaggcagatgcagatttgggtttggtgttgtgtattgttcttaggtttaaagctgacgagttacaaaagggtagtggttagactactgtcatgatgttaccacttagaaactaggctatataaactataatcaattgtggttttctggcaccaagtatttgttattaggagttgcaataattgtgtcttgtgtctgtcaatcagtgtagaagttatttgcagttaaataaatgctgtagtgtgaagtgtaaaatgcgtagaataaagtataaattgttctgatgtttgtgaaattgaaattgattatcccttgaagttcggagtgacttgaatatgagactcatgaaattctatttatgaagacatggcactggtatataggataatagaaatttgtgccaaatgcttctaatcacacacagtaacttttgtatgtgtatacaatctatttatgtaattttttgaacttgaaaatttgtgtgtgtgtgtgtgtgtgtggttttttttactctgatggatcttgacaaaatggacaaatgaggcaagcatgatcaaaagttttgcttaactgaccaatggttatgcagtggggagtgttcctgcctcctgccaggctatttgagctctatttattcaacttttaggaagaatcatgataagggtttgctttaaaatactttgagataattaaataattatattggttacttagcttgcttaccagtcatctagtagaccagaagcggaatgcttgcgaacagatatacattgttttatccttttattatgtataaggtccatttggtttagattttgatagaattgatgttgaaaaaaaaaaaagactaatgtttgagaatatttgaagagtggagttttgaagaataattttgtttggatggtaaagtagaatcacttttgaagtataagtataggcatgcttttaaagttttgatgggtcacaaatttggaatcaagtttgttcaccttgaaatttaacttatttttattatctcaaaatcagttctacttactgcataatttttttttccgacttcaaatttatccgacatgatgatttgctgttgaaatcaagtttgcttactgtaaatggcattttgcttttaaacaaataggctaatattcattgaaacacgaattcaacattcttgatggccctgcttgcttacttgtaaattacaatttcaaaccttctgaagttataaatctgttattgacatatttatgatgaatacaccttgcagat

SEQ ID NO: 3277 - DNA, 1965 bp, Glycine max
  Intron number 5 from transcript Glyma02g46690.2 (locus Gly ma02g46690) derived from phytozome v7.0 (chr-ID Gm02; pos 50584426 to 50586390)
cagtagttaagcctatccgggaaccacgtgttgttgtacaaactttgagtgaggttgacatattggatgatgggtaccgctggcgtaagtatggccaaaaggtggtgagaggcaatcctaacccaaggtatgtcctcaggttgatgaaactaggaatagaaattaacttataaattccaatttaatgcatgtgccttgtcaaatgaacttttttattaatattgtcaaatgtcaagtttttgctgttgtacttgctgtctagacaacagttgaagtgaggaatcaacttgatataatagtttattgaagcctatatattcacttctcaaccattttgctttacaatctgtttctcttattatcatgggttttagcatagtctgaggctttgagacccctgttgcagttttgtagccaacatggtccatagaaaacagtttgtatcttacattagagtatatttagaatacagacgtgaaggatatatatatatttgcaaaagaatggcgggaatttttggtaaacaccgacttttgtgggtctaattaagaaatactaggaataactttatagatttgttttggtaagggatactgagatggacatatgggtgaggcggatgattttcatgttttcaagaatagcaatggaaagtagtatgctagattctgaaatttttatactttgaatgttaagctcatgcaaggattaggacaataggtgtacaaatttcatgtggatgactttggaagctgttttttacattcattcagaagtttttttttggtcggttttctgactcatcaatgtgtgatacttgcaaaattgtacctggtagttgaaggttgatgagaactggtgtggatggaggatcttaaaaaggaactagaatgattaaatcacggtaactaagatacaagttggaaattaagagcatgatttctaaaaatttgcaaagaaacagtggcaaattaaagtggcagtagactattagattttgggaagtattgtggaatagatgttgctcccaaaggaaaggagtgaatattaattttgcaagccaatatgaagttataagaaaacttagggtggggggaagaggaagggcaagaaatattcaggcatcattgcagtctttatactcagttatgaagatggtaggaaagtaggattaccatcctgcaggttttcatgaatgactggtgtagccgatcccaatgttacaactaagcctgcttattgatgtcattttataaagtcatcgggcacttgtgaacaattacttataaatagggctatattcacctgagttagttttgttatagttgtcctaggaaatgtctgtaccaatgctttctaatttcatggtgacaatcattactgtggatgtcattattacagactcaaaaggttacttctcatgattctggttatattaatgtgtcgctacttcaggaaatgcttgaaagcatggaattaaaatcaaatgtgtgcttagacctttatgaatgaggcttgtttcacgttaatgatcattgatctatgcttatgatactaacttgctgcagtgctaaaatatgctactcaactacatatttcttgtttattttgtatcttactatgcttcttatgcaggagctattacaaatgcacaaatgctggttgccctgtccgaaaacatgtggagagagcatctcatgatccgaaagcagtgataaccacatacgagggtaaacacaatcatgatgtacctgctgcaaggaatagcagccatgacatggcagtaccagcagctacagcaggtggacagacaagaattaagttagaagaaagtgataccattagccttgaccttggaatgggaattagctcagctgctgaacatagatcaaatgggcaagggaaaatgctgcattcagagttgggggagacacaaactcacgccagcaattccaacttcaagtt

SEQ ID NO: 3278 - DNA, 1889 bp, Glycine max
  Intron number 6 from transcript Glyma14g25910.1 (locus Gly ma14g25910) derived from phytozome v7.0 (chr-ID Gm14; pos 31553200 to 31555088 reverse strand)
tgggaaagaggaaaggcttagggccattgaaggaggtaaggtaaagattatgcctttcctaactgatgtgccatcattttcttctattttctaaaccctttttgcaccattttaattattgattggtcttaattgtcaattaattaggcagttttattatttgggcccattcagctaatttgatgtttttaatctaatttcaggaattaatgaagcattgggcttgaatctagaattgggcttggacttgaagagggcaaactaatttattctataaaattagatcttatcttatctagatattatttagatttgatctcatctagatattatttcatctagatcttatcttatcttatcttatctagatttgatttgattttacttatgggcttggatttaaaacatatttgtaagctttggggctgaaaaaaactatataacagcaccaaggttctagtttagggggcccctctctccctcgggggagactctctctctctctcctctctctcttctatttttcgtttttagttttagtctctcttctctttctcttttattttcgtttttttttcaattccagttcagacttttagttttatcaataaaatttcattctctatttgattaatggaaggctaagtccgcagcgttgttttcccttgaggatcaagcacagttctctttgaggttctattattactgttaaattctgtttagtttttcctcttcactaatttctttgaatttgttgcttttaattcatgcatgcttagtgcttgattaattgtctctgcgcttaatttacgttcatgcttaatgatcgtttatgagtaattggtgtatgtgatgcttaatcacataatgaatgccttatgttgaatttcgcttagtaatttaatttagggttggattaagtggttaaactgataaaggataaactctcgtaacctaggataagagacttgcttgtgaatcaaggggaagcaacgtgttttaattctgatattttctaattcacatatattcgctgtttaatttacaaaagcaaacaacccccccccccccccatcgttactgttactgttactgcaagtatattatgaacatttggcttgtcactgctcgttgggaaacgacctaggatcacttcctagttactacattttaatgtttatttgattcgggtacggcctcgatcaaatttggcgccgttgccggggagtagtgtccaaaggttcataatagctagctattgttgtgtctttaatcctttcgtgttttatgtttaattgttagtattgtgttagtatgtgtgttagtgttgattagttcactggtattgataacagacaaatccagaatccatatatctaggctaattagacttgtcaggttttagcgattttaatatatagattttagtccttattttcattgtcggtcttccttagaagtagttattccttattttttactgttgggttttaggagtaagtatttagatttagtagatttagatcttatttatttgaatttcttagaagtagttatctttatcgcaatttaaatattttatcatatcttatctttaaattttttatcttatcttatctattatctttatcttctattttgatctttcaatcttttatcttcgaattttatctttaaatatcttatcttttcttttatcttctaattttatctttaaatatcttatcttttctttaccttatcttctatcttctattttaaattcttatctcttgcttttaaattgggtttgcattaatctcaatacaaacaaagtccctgtttcagtcttgggtgttttgctgtgaagattgtgcagccaagcaggaaagattggagtaccaggcttg

SEQ ID NO: 3279 - DNA, 8887 bp, Glycine max
  Intron number 3 from transcript Glyma15g00300.1 (locus Gly ma15g00300) derived from phytozome v7.0 (chr-ID Gm15; pos 91998 to 100884 reverse strand)
tggttggtgtccaccctttctttgtgtgtgtggggttgcgtgtgtttttgtgtaaaaggaaatttcattagagaactatgatttaggggaatgataaggatcctctgaaacagaagccaaatggctcaaaaaagaaacaatgccatctattctctttgcataccaaatcctaaactcccttaagataaccatgaatggtcccctagagagaaactgtaactcttgttgactgtagtgtttgttggggccaaatatatgcccttgaagggtgttctcctcctatgaagttgagactcctacacatacatgaacaatgtggccaacacccaaatatatgacactaagacactgtatatgtgtatgtgataaggaaatttcattagagaactatgatttaggggaatgataaggatcctctgaaacagaagccaaatggctcaaaaaagaaacaatgccatctattctctttgcataccaaatcctaaactcccttaagataaccatgaatggtcccctagagagaaactgtaactcttgttgactgtagtgtttgttggggccaaatatatgcccttgaagggtgttctcctcctatgaagttgagactcctacacatacatgaacaatgtggccaacacccaaatatatgacactaagacactgtatatgtgtatgtgaaagagagagaaactcaaataaaattaaatgagtaacataacacaatatctaaattgataatcaagatttgtatatattttgtacatttaccttcttgcaatgatgatgaccctcacaaaaaatattaacagacattattttatgatgttagcactttacctctttataaaaatctcaacaaaaagatgaattgcgtctttctagaaaggtatatttgcttcttttttttacactggtatattcatcttttcaaaacaatttgctaatttttatgcccttctatggttatttgcctcaaaaaaataatgaaagttgttatttttttagtatttattcatagttatcaattgtctgcgatagcattgtgatcataaggcagtggattggcaccctaccgttgcctgtaatcaaatcgcataaactacaacattttgtagcgaatccggttgttccactatgttatcccaccaaagaagattgtgtctgtcgctgatcatgtcaatactgagtatgaagcgtgggaggttcaagactacactccttgtttggctccaatctactctttcaaaatcggttctgtcacgcgttcttggttcgaatcactcttatcaaaatagttgttagattttgctaacaacacctccctctttgctattaacagttgtactatcttagttcatagtcctataaatatctctctgtaactaactctgtaactaacttttgtgatattcaataatatgagattctctctctgttacaacaaacttttctctcaatctattttagatggtatctagagtttttttagtgtggtcatggctctcaaatttggataaggattttaagctcccttttaatctttggtcatctcacatcagagaaggttttttgggctaggcttcagtggctcccagtaggagctgcagcagatctttagtttagtttttgtagccattctatggttcctcttcaaactggtgtagtttttattggaaccatgagcatggaactatctctgtattttttcagtacctctggtacttttataaatataatatttttgctgataaaaaaaaaaaaaaagatggtatctagagccaattttttgatgcgcttctctcttcgcaagttctaaatcctttcgtccatggcttccgcatctccgaatttcgtttctaagtcctttcctaattccatcgctgagaagctcgatgatttgaactatctcttttggcgacaacatgttgatcttgtaatcaaatcgcgtaaactacaacgttttgtagtgaatctagttgttcctctgtgttatctcaacgaagaaaatcgtgttgctgattatgttaatcctgataatgaagcgtgggaggttcaagaccaaacattcattgtttggctccaatctactatttcgaaatcagttctgtcatgcattcttggttttaatcattcttatcaaatttgggaaaaagattcacgagtacattagtcttcagatgaaatcttgtgcgtgtcaattgcaaactccgatgcgtgcaatttcgcttgaaggcaaattgattgatgaatatctgcgtaagatcaaattctatgttgatgagctcgctagtgttggagtgtcagttcgtcacgaggaatatgttgatgcgcttcttgaaggacttcagtccaattatgcaccgatgatctctgttattgaaagcaagaagcgtatgccgtccattggtgaaattaaagctttactctatagtcatgaaactcgccttgttcgttacaacaaggaaacttaggggcttagttcttcatccttgaactattctcaaggttattcgctctctaactcatacaaatttggtgattccggtggttctcggggttcatatggttgcgacggtggtaattgtggtggtttcgctgaccgcggtggcggtagatgtggtgccagtcacaacaatggtggcttcgatagaggtcgcagtggtggcagatttgctaatttttagtgtcaatttttccgtaagtatggccatattgcaaatgtttgtcactttaggttcgacatgagctttcaacctcatgaatcactaagggtgtgtttggtttgcattttcattttctgtttttatttcctgttttcattttccgaaaattgttttcattttcaaaagattagaattctgaaaacatgtttggtttgactttttattttctgttttcatgaaataaaaatactgaaaatttatgatatattgacttcttgtctttttgtatttttaaatttgcttaaaatcatattcattgccaccgcaatttcattttacccgaaatgaagtttctgttctcaactgaaaacgataatttattgttttcattttctggttgtttcctgttttcattttcactgaaaatgttttcagaaatccaaccaaacacattttcatcaccattttttgttttcagtgaaaataaaaacagaaaacaaccaaaccaaacaccccctaatcttctctgatccaataacacttcaacctattccctactcctatggttatgtcagaaccttcaatacttggattaatcccaattccaaatttggaactgctgctccagcctcaacacagccaagtgctatgctcaccaattccaactcatggaaatgctaactccatctggattccagattttggtgctagttttcatgtaactggtgaaccttagaataatcgaacaattttctcactttgatggacctgataaaattttcatggaaatactaactccatcccaactttcttcttcccacccctctcctacacccagtgttccccctggtttttctcctattccagtcaaccctcctacagtatcacattttgtctctcaacaatcttctacctttgagtccaattctttgcactcacaaacatcagagttcaccacatctagtttactaccttttgagtctatgcttgttgctaaccctgccctagttaacactcatcctatgcaaacaaggtccaagtctgggattcacaatcctagacttcatccttcattatttcttgttcattctgagcctaaaactgtaaaacgtgcacttgagaaattctgattggtttgctgccatgcaacaagaatatgatgctcttctgaaaaacaaaatttgggatgggacttagttcctttaccctccaatagacaagctattggatgtaagagttaaggtaaatgttgatggctctattaacaaatttaaagcaaggttggtggcaaagagcttccaccaagtccatggttttgatttccatgagaccttttcccctatggtaaagcctatcacaatccatattgttctcacccttggtctctcgcatggttgggagctgtttcagctggatgtaaacaatgcctttttaaatgggcttcttgaagaatctgtgtttatgacacaacctcctggctttgaagttggggataggtctcttgtttgtaaactcaacaagactctttatggcttaaaacaagccccaaggtagttgtttgataggttaaagtctactcttctctagtttggttttgtgggcagcaaatgtgattcttcactttttatctacaagcatcagtctcatcatgttgtctattttctggtttatgtggatgatatcatcgagagggcgagccctggtgcagcggtaaagttgtgccttggtgacttgttggtcatgggttcgaatctggaaatagcctctttgcatatgcaagggtaaggctgcgtacaatatccctcccccataccttcgcatagcgaagagcctctgggcaatggggtacgaagtttttttatgtggatgatatcatcattacaggtagttctacttctctcatttagcagttaactactaaactccacaatgccttctctctcaagcaacttggtcacttggattatttcttgggcctagagatcaagtatttgcctaataactctatagttatgactcagagcaaatatcttaaaggtaccttgtctcatgggatacttcttcagcttgcttctcttaccaagcccttggctcttcgtgcattttgtgatgctgattgggtgtctgaagtgaatgacaggcgttccacctcaggaggagccatctttcttggtccaaatctgatatcttggtggtctcacaaacagaaggtcactacacggtccagctgaagctgagtactgtagtttggctcaaacctctgctgagctgacatggattcatgccttactaacagagttgcaagtcccttttaccactcctgttcttttctgtgataatcagagtgctgtgtcaattgctcataatcttgtgttccacagttgcaccaaacatatggagattgatgtcttttttgtcagggaaaaagttctggccaagaagctctccatctttcatattccagttctggaatagtgggtagacgtgctgaccaagcctctgtcttcagctcggtttgaatttctcagggactaactcaatatgaagagtttttcctttgaaaactcttctccttgagtttgaggggggtattagagtgtatatatgtatatctgttaaaacagtttaataagagctgttagcttttgctaacaacacctccttctttgctattaacagctgtactctcttagttcagagtcctataaatatctctctgtaactaattctgtaactaacttttgtgatattcagtaatatgagattctctctctgttacacaaaacttctctctcaatctatcttagaggcctgatcgtcgtggtgtttgcagtgcattttgcggctattttcatggtcaatagtaggcagaatggactcttttccaaggttctgaatttttttagttttctggcgaggtagagacattttgcaacttccaatgaggcagaggtgttaacttttggcaaggcaacctatagtcaaagttttttctgccctagatttagggttgtagtagcaacgaacattagtttttcagaaagaaaaggatggagttagggggtggcagctattgggagacagagaaagaggctagtgtttcttttgtttcttgggtgagagtgggtgttgtgcctgcaccccaaattgggcactctccacgcctaaatagtcctacaattatggaggtgctttttcgctgtttatatctctgtgtgtgtatatatataatattattataaaactataaagtactctataatatttaaaaatatagaaaaatattaatacataattatatataatacaaacaaattgtaacatgataatatataaatatatataaacaaaataaataaacaaaaagtgtaataattaaataggttaatacaataaccagaaatatatataacactaagtagaaataatataaaatattattaggcaattgttaaaattggttaagttactccaaaggtccttaaaatatttgacaatttttattaggtccttgaactatttttttttcaattgggcccttgaacttgtatctgttttttaattgggttcttccatctaactgttgttacagagcttgaaccagttgtgtgaatttgtagcaaggttgttgtagggtgaagcttgtgaaagaatagttaggttgagaggacatgcaaaggtgagaatactggttgaagaacttggttgagaatactggatttagaacttgcaaatactagcctggaaaggtgagaatattatcctggagaggtgagaatacttcgtacagacttgcagaggtgacaatactagatttagggactaattaggtccctgtggttaattttctgtaatggctgttagacaaaaggacccaattaaaaaacaaatacaagttcaaggacccaattgaaaaataaaataaaatatttaagggacctaattaaaaatggccaaattgttcaaggacctacaaagtaatttaacctaaaaattttcagaatagttgctatttgctatcctgcattagcattttgctccgtgtcgctatatgctattctactatgatttattttatttagtttgtctttgttgaatggtgaaaaattgaatacacacacacgctagtgtcctttaagtgtctatcaatatagaggtgtcaacttaagtattcaagttgtataaaggtgctggttcaagactaaaagtgtttgaactgataagaaataatattttaattggatatgtagtgagaagcatctgacgagtgtcatatttgtgttggaaatgtgtttgtggcttagtgcttcatagaatatcctttaatcaaatgcactagagaactgcaaaagttaacttatttgcatcagaattctggtctttcccagaagcctgttgaatttaaactacaagtttgttctttgtccaatttgattagttgaatttggtcttcaaattttgtggaaattgcttcatcgtgcctttgaaatattgaattggtgtaaaatgaattttgtctagtggtcatttcatttgactgattccctttattttttccgttttaactaataccattgtgtatccatgttaggtgcaactggattctgttctgttgaagtttcatactctacatcatttttggtttcttttattgaaattactcaaagatgagggtctacttgctccagagttgcctgaaaatacacacagtgacctaagaatgccaaaattctattcacaaggcggctttttaaagcagccaactttcttgcctgagaatgttggtaaacatgctgtcaatgttgaacaaagaataaaggaaaaaattggttgcttactatgtgaaatggcatggccaattttctgcaggtgcctggtaaatggcaaaaatttcattgattacaatctttgccaggtattatctttgtttctgctggttattttctctgttcagtttttttttttaaactacttggtcatttaaaagggcatgtagcatagtgcttttgtagttcttctgtcatttagcgccatgcagttatgaaatttctgtttctttgttgtcatcaaacttatgcttaaaacagcttgtattttttttttttttgctcagcaaaagtaggatgttattaataataatagtaccagaggtactagaaagatacatgtttaaagtaactgaatatctggttcttgtgtattcacagaaccaagctattgcagttgcaggaaatacatgattacaaaagctcccaaccccatctagctagtgaaagcttcttttaggtttgaggaccattgattgaaatgtgtgctaaaatccttctccatggttttgacccacgtccaaagtagcagaaccgcatcatccagcagtctacttccattaaacgtgtgattttggaacactattttgtttctgtgtttccaaattgaccattccaaagtagcagaaccgcatcatccagcagtctacttccgttaaaccgcatcatccagcttgtattgaactctatttctactactacaaaatttattaatgaacatttcttgtttgttaattatttgatacattcaatttttgctgcagatttcataattgaggttaaaatcacatttgggttgaatttctctttttcttatcttccttacactaacctttgaaattgtttcttttcctctataaatttcttcttctatatacaaatcagtcttccctttaaaacacaacttggtgtcaaagcctggtttgtggaggtgtcaaaatgggtttgagtcaacccggttcacaggttgaacgggttataaaaatggtggctcttttttttgcgagttgtcctaacctggctcacttaacatgtgagttgaggtgagtccacctgagcctggccagccttttttttaattataaatccttgagattattttattttatttgtttactctttgggttttctattattaattagtgtattgttagacattttgtatttatgttgttctattttttttatatttctcttatattttttacattttttattttcttaaatttagtttgtcaactcatgagttaactcgtgaacactaaatgcattttaccatggtgatacatgaatataatatttactaagtgcattagctaccattattgtcaacagtatttacaccatcttggttttagaagcagaaaattcttcactatatagttccgtgtttttcag

SEQ ID NO: 3280 - DNA, 3186 bp, Glycine max
  Intron number 1 from transcript Glyma03g21620.1 (locus Gly ma03g21620) derived from phytozome v7.0 (chr-ID Gm03; pos 27273496 to 27276681 reverse strand)
aggccttgcttcacaggttcgtggaatgataatttcttttttgtatacccctttggtttttctgttgattaaatttgttttgatgtgttttgtgaggtttgagtttcatttgggttgtggttggaggaggatctttgtatgttaaaatgttgatcaaactgtttgtgtttgtatattgttatgtgttgttgtttacttgagatttgatctatgctaaggttttaaattgtggtcgtgattgtggtttcattgtgatccttgatattgcaagaaattgctgataaatgtggccgatgatgtggcagagaccccaaaaaccctgacgatgcagccaaaattgcagtcgtggtttcatcgcgttccttgatattgtgagaaactgcggataaatgaaaccgcaaaaacctttatattgcggctaaaaacctaaattgcggacccttttttaaaaatcttgatctgtgcctttatgaaatatgtgacttcaatgaggaaattttggtgatcctgtgtctaaaattatatattttgcatcggggttttattagtaaatgtatgtggttgttgaagtgtgttaaatgggttattatttttctgatttatttgggtggatcaaccatttttttggtaaagttcctgattttatatcaaaggtgaagaaggttgaactcgattttctaaactggtagaggttagatgtttatttgtttgtttgtacagatacagcgaatgtaaggaatgagaacaaaccatgttgtgaaccttaacaagcttgatttggttgttttgtggtgatccatgttcttttgttagataaagacacttgtttggagtgtgagagagaaaatataactaaacaaaacatgagatattttccacaacagaggaaacaggacagaatggtgaacaaagaaagaatctagaaggcagcttatttgatatggaaaccctcttaaaacattcataaacagaacactaaagaagactccaaaaatgaagatctcatcctgtataaattttttatggctgagtgatgctcttgaggatgcaagcatgtcactccaaatctccaatcatataggccatagcatataatgcagtttggtgagaaaattttggcttacatattttgaccttcgtagctgaacatttgaacctgtccatgataaaaggacacaattagtagtcatcaagggcccctaaaatttgttctacaggaaagtaaaaggcttaaaaacaagtttatattaatcctatcaagatttgatcaatggggtgggtctaatctggatcaggagtttatgtttctcagaaaattcagacagaatttactattttttatgattgtactcattccataaatattgctaatcatttaagtagtgaatagcttctggctccagggttgaggcagaggactggaaactggatctgtcatttcaagtaaccataatttggcacgtatgatctgcagatggggttcgtagagtggcctttttcatttttccccctttattttgcaaggtgacactggaaattctaggaataatataattaaaatgtttcatagctatcttaactccatagtccttatcaattcagagatgggtataatgattttctctagttatattgaattagagatagtgtattgtaggatgtagaaggtacaacgaatatttctacaaacatctgattgcattcttgtacgttctaacttgtaagagtaaagagttagtatttctcatccttccactgaatgaagtatatattttgcaaagcaagcttgtataagtaacttttatggaaccataaaacatttacatttcgcattagaagggtaatcaacaaggtaattttgatcaacatttcttagcaaaatttaaaagctttaaaagagcatgtcaatgatatattgatctttgtcatgttgatttgccttattattttcttatgtattatactacccccggttctatttataagaaacaagttgtagtgtaaaatgcagtacaacttgtttcttataaataggatcggaggtagtataaaatattcaaaaccctgagcgatttggaacttctgagttcattcactctattataaactgtgctgaatccaccattgtgattatttgtttggtcagtttctagtgataacagaattagccatttccttacaggccttcaattattttattatgattgtctccaaatcccataactctgatgatcagcattctatctaacttttaatctatgagaataggtttacaccaaaggttgacttctgctccataattttttaacttggtatttgacattctcaaattgcacatccaagagccagtgcctcatttaactctttttgcaaatgatatagtgatagttaatgaatcaagagaaggactaaattataaacttaattgcggagaattgtggagagaagaagctttggtatcaatggttttttgattaggtaggagtaagacaaagcctatggaatgtaagttcaataagatgtgaattattgatggtttggaggtgaaaattggggactgtatcatacgacaagttgcatttgttggtcagcgttcctggtctaaagctaaaccaaactttctctgttcttgattgattgttttgcatcccctaacatttggtggagaactattagttttgcatcctcatctctggattgtaccttcaaacttggagtatgaataatcaggatttcttggtgtctccttatctgctgataaaacttcttacttcttaattggaggatagcatagctaagagtaaattttttatctcctatgaagccctcaaatagaatatacaagcttttattagatttgagatgatttaattttagcttccttttgaatataggcatttcctttgcccactttgacccaagttatcctgtagtattttttacatttttttaattggagttaaatattcatggacttttcagatctgaagcagtatctgcatgattaaatgaattggggtattgcctgacatcaagtcataccctggaatgaaataaacagaaaagataaactttcgtcttaaattccttggtagttacataatacaattgtagatattcattgaaaagatgttgacttaatccttttctgaatgccaggaggattgcactagtaaaagagaacca

SEQ ID NO: 3281 - DNA, 6721 bp, Glycine max
  Intron number 12 from transcript Glyma12g03130.1 (locus Gl yma12g03130) derived from phytozome v7.0 (chr-ID Gm12; pos 2034315 to 2041035 reverse strand)
tagatcttcaaaattgatttttcagttcaaaagatgtaattggggacttcataacattttttacatcagtctggcaacctcccaacccaaacctgcaaaaagtatgtttaatcttgcatttagggcttggttttgaattttttttttcttgagaatgttatagtgggttagttgggattttgtagttaaggtcatacaaaggaaggagcttgtatttaggtggaagaatcaactgtgaaccatggacttggacacaaacattggacaatggatatgacacggatacagatacaattgatgtttaaaatacaggacacttggtcattacacacacacacacagaggagaggtgtccatgcttcatagggaattaacatcttgttagcacttgctataggattaggaagtgggttggagttaagttgttttcattttggatatctggtgccttctttcctttgggaaggtataaggagataaggaggctatgctttgattgcattctgttaaaatatatgaaaattccaatattatcttgatcatatctcagattatcctttaggattagtttgcttatttctttgttatctttattatgattgattaccatatttccttacctcatgatttctttccttatttagtttaggattatgatttgagtaagtgtaagtattataggttttatgacaatgttgttaatggcggatggcggttcatggcggaaagtcaaaaatccgccataaaagtatggcggatgacgtagcggaaaatggcggacaaaaaaataataaaaatatacgtatacatataaataaaaaattaaaaaaaaacaatggattgcattcaaataacagaaaaaaaaaacaaaaaacgggtgtcaaaaataaaaaagggtgtcaaatagaaaaaggaaaaaaaaaagctaccctcatcaaaaacgggtgtcaaacagaaaaaagaaaaagccctcagcctaggaaaaaagaaaatagacaattctcaaatgcctagactttcttccttctttgtttaagaggtcagtttgccgtcgcgcaccagagcactgccgtcgccgtcaacgtgcgtcatgcggcggtcgcatgcgtcatgtgttggtcgtcggtctctcgcatgcgtcgtctgcttttctgctgccgtcgcgctcgagaacgtcgtctgcggttgtcgtgtgcgtcgccggtgcccgcgccgccgttcgtcgcgctggagactgatgctggtcgcgccgctgaagaggagaaactcgggtatggttggcttgggtcagtccaacccctgtcgcaaacgttttttaaaataaaaaatccgctattccgccattcatgcgattccgccatgaccgctatggctatggcagctgccatagcgccgccataagcaacccacaacgccaccgctatttggtggcatttttacaaaattccgcgatgccatgttttatgatcataccatccacattgtaagacaacacataaatcacatccattatccatatcaatttttacagtatttctctccttttcctccatctatctatatctaaaccccataattttaacacattcaagtagtgtgtggtttattctgttttacagtgtgtttggttggataagaatgaccatcaagggtggatgcacacacttgagtatgtgggcaattgcccccacaagataaatgttttttgtttaaatatatttaataattttatttgatgttgtccctataagacaattttttttaaatcaatgataaaattataagagataaaagagagaataaattgataataattttatcactttacctctctatcttttatcatttccctaacgccaaacatcatatttccaaaaagaaacatcgtccctaacatagaaaaagattaagaaactcataaaagatttcttgctcccaccaaaggggtctagttcagttgattgaacaagatgcgtgagttgttgtaaatttcctggtacctgtcttcactttctacagataaaaaaaaaaagatttcttgtccccacaaaagaaattttctggatcctccattgatgaccatattgtcaaggtcatcactttctccttacatttcttgtgatagcatagtgctgatggtcagtcttagtgctttgcttgaggtttattaaacagaatttctgttgatatgttttgaggaccaatcctttcacatgaaagatttgagttataaacatggtaaaaaaacacgggcttctttaaaccttgttctgggcctctaatatcattagaagaatgagtgtaacatagagtttctagtgacatattatggatactcattctgagagcttaagcttttggctgcaagctctaaaatggtttgtctctaaaaatatgtgagatttgtcatcttattttcatttttgagctcttttaacttttttttcaatttgtgtgtaaatactgtgggatttattgtcctctgccaagtgtttttttcctgcttttataattttttattgttttgccataaaagaaagtcaatacatgtcatcattggttcttgctgtagggtaaatcaaaaaagcgactctccaaaagagatctggttgaaagggttagggtcctggatggtccggaaaaggataatgtatttcgaggatttagaccagtagctgcaccatctgacctgtgagtgttgtttctaacattattgtaatcatatttctaactctaccatgacatgtacaattaggtgcattaacatcatctaattctgttgagtacttgagtatggaaaattgtaaagaccattgtgagttagtgttgactgttaaaggtgattgaggcattgattctagttgatagattgttgtggattaggattctaattgagggttgattgatagataaccattcatatgtatactcccttcccccacttttctctaatttttcatcaaatgctctagttaatgttatttttttggtacaaaatatctttattttcaaagagtttgatgttaagctgtgttggaaagctgccttagttgtggtgaccccgtcccactttaatagttgatagattgctgttgattaggattatatttgattgttgattgatagataagcaatcatctgtatactcccttccccccaatttcgtctctttaattgcggcctctttggaacaccttcattgtgctgagtttgagagggcatgtttggtctcacattgatatatccgatttaatccttataaaagcttggacaattctcaccttacaagtcagttttgtggagttgagttaggctatatatgcccaaacccttcacctttccaatatttgtatggtacacatatcatacatgttatctctacatcatacatttttttgatcagcaaaaaataatagtatatattaatatgataaaacggtaccagtggtactgatatatatacatgtcaatactctcccaagtagaagtatggtccctaatacaccctacctagcaggcattaaggaaccagaaatctgactatggagatttcgtaaatccacccaacacctaattctaatttcccctgattacaaatccctccctgatattactggaccaatggtgaaaaggtatatcgaaacctttttgtagctttctcaaccaagtccagcagaaaaaaatagcatcctccatcaatttgttaatgtttaggttgtcatttgagaagtcatcctattcctatggtgccatacacaccaagttagggaaatccaccaggtgagccaacgctgaattctaataccaggaaagctgctacaaaatgattgctgaagaaagtgctgtcttgggttattcggaaaaggcccgaccatgttaatccaagacaatgattcccgccaaattggttgaattttaggacagctgaaaaataaatgagctgcctcattttccttatccctgcagaatggacacattttgtcatttatttcaacatttctcctgctcctgcacaagttggacttagtgggcaatctgtcccttatcagtctccacgcaaaaaaggcagctttgctcagaatttttaacttccatatgtctttaaatgtcccatctagattctcatctcttgagccattgtccagcaggttgtatgcactacggacagtatatatcccacttggatcattcagccacacccacttgtcttgttggtgggcatttatggtgactccttggaccattcagccaatacgaactctaacaccatctgcgatccatgtcccttctaggtagataaagccacaaccactgcacttcttttctagtctgaaagcttgttccctccatatacataagagtccttctgctttattaattgctggttgcacttcccagctaatttcagaatctccccacaatgtttggcacaaaaccttatccacttgttcctttttagtttcttgtaggcacaacatgtcaattctttcttttcttattaattttcttattgctgcccacttgaccccctccccaatcctctaatattatatgataatatcttcatgattccccctccttaattcccagcctttttgcctcttccttgtctctttcttccatttctatcagctttgaaatcactgaatctttctggaagtggcatgttacacccataatacttacacttactcaaatcataggtggtttgtggtgacgatgtttgacttcgagacatagctgtcccggctgcggtttttttaccattagtagttgagtgagtggttgtcggcaggatctagaggttattatcctttggtcaacacttgtttctttgtccatcggtcttctgctgctcactgtcccttcgtgtctggtttcccccatcatcgtcaagttgtcggttttctagacggatctctgcctccgacgaggcacattcagaccacgcaagcaatgccatgtcgctctcgacaaagcttacatcgttggaggacccaagtgaacaccctgttaggcatttgtgcctacatgggttgtagcatgtctcctcaaccaagtgaatcgtgaagacttccccgttaatcgatacaaccaccatgtgctgaatggatgattttcgtggagtttttatgagcactcttgccctatcaagccttaataattcctccacatcgtcatccacctccacctcttcccctaccgccgtcgcaatctttgaaatattattgacatcccatgcgtgcaatggggattccccagcacatgatccatgccaacctatatccagtacgcaaaccctggttccacttctccaatgaatggaacaaggaccatccattttctacgtcctcgctacacaacccttctactctggaatcattaaggcccaacaataggaccatatcatccccaaggtactttggtttaaattcctctcttccttcccacatgatctcatcttctagtctgtcaaacattgacagttttttcagtctccctacccacgcgtcgttgagccacttcgccttttccatggggatgtttagctgcaatgatgattgggatcttgttgccatatgatgcgcatggccttgcacgaccctcctccccacccttctattagctaacgccactaagctcacgtacattgttgtttttgtctgctgttgtgggtattggttccacgaccttgcttcccttgccttgtatgccatctccttcctcctatgatccttgtcatcgcctccagtactggccttgttcgtcccaacattacgctgcacctctaagttaggtttcccatcattcgtcctccccctttcgtgctttggtaggttagcatggagtttcaggccgccaataaccatactatccagctgttgttcgagcagcttcacttcactcctttgaaacgtacaaagccaaacctctggccatctctatttctgtgctttgcgatgaaaacctccctcacgtctccccatttcttaaacttcatccacatccttctcccccatttcctccgggaatcttgtgaagtaaaaggagtgcacatctgttgcgtccatccagttactctttcccacgtcccttcgccttggtgccccattccacggtgcttccttgcttgctgtaccattttccatcgaagttgttggttcctttctcacccatgttctgtttctctctctcaccaccctctctctctctctcttgctctatctctctctctttccctctcatccttaccgatattgaccataatccccactcttcatgatgaagttatctctacatcatagatatacagtcattattctctacaaatcctttgcagatattacaaccaatttttttgggtgaatagtttctcttattgtttattttttgcatgttgttggcccttgctacatttgtatataaagtgaaaagaatttctcttgttgttttctgaaattaggttgaaagcttccagggcaaaaaagttgctccagaagaaggcaatggaaaaggagaaaagaaaagctgaggcactggcctctggaattgactggctaagtgatgattcagatgatgagcctcaggtaattggtttgctgttgtgtactcacttctagaacagatgtcttgatgataatgtgctaactcccttgtgtttattggatgtaatatttttagaaagaaaacagagaacctcccttgtgtaatcttctcaaag

SEQ ID NO: 3282 - DNA, 1904 bp, Glycine max
  Intron number 1 from transcript Glyma09g35170.2 (locus Gly ma09g35170) derived from phytozome v7.0 (chr-ID Gm09; pos 41362452 to 41364355 reverse strand)
caatgtaagtgttggttactctcctctcttcctgccaatggatttctttgccacacatcgccttcattgcttctttctttttttcccggtttttgcttgatcatttcggaattacatttcaatcttctgttttctttggttggttggttgtttggatttgagttttcagttcaaacccaactttgctttcacgttttcattatctgggctctgttcatttcttttaaagttgattctttttgtgaattcatggccgtggacgatattactagttttgcctgcggatggtttgtttcattatattaacttttttttttcttttttcacatttagcctcgttctatcaatcgttgtttggggaggtgtttgtgctatttgtgcatctatgtgaaatgctgatatagttaagaattccctgttgttgccattgctataatgtacttggtatcggtatcactaatagacatgcagaggggttttttattatgttttcttgttcctctctcgccgctgctctaagtagattctttaaaaattggtttgaagttctggcttacctttcacttctaatagaagtctgattctggaactgggttcattcttttactaattcatgaatccagtaagcgcatctagttgaagacactcggaaatgagtttctgtgatgcccttttctcaaatgtggttatatgtatcttgagcaaagacactttgacctttggaaaaaaaaaaggacatttgttttgtaagcttgggatacagtattctgcttaagtaaatatgctcaatccaatcaactgtaggaatagttttcgtgaacgatgcctaaggatttgaagtcggagcatatttaaatactctttcactaggagtgttcagtgctctatggaaggttgatttgaaaatgtggccaagttaaaagcagaagaaaatttgttttcttttttatttagtgtcatcattaaaaaatttgtttccgaaacttgcacctctgtatgtcaatgtgtatgtgtgccttgatcggtaggaaacttgttgtaacttccatggaagcttgtaagattatgaccttatatttgctgctcatgttgccagtttgttttagctgtgggttgcgcatttgaattagggataaatgtgttctccaccatggaaagactaggaaaattagatgtttgattagtgttggtagttcaaatcaagaccagctgctaaaattgaggctaaccatttgaatttttttaaaattttcagtatatttcttcaagtgataaactgttaggaattaggcaagggaaacttagagagatagttagttaaagacttgaagggatcaactagataaatagggggagtaagcaaaaaggaggcattctgtcaggtatcatttgagagaactaagaagtagcactgatgtgaaaggagaaatccttgtaggataaggagaattctttctcctatattctgttcaatatcattcaagcaataaaatcaatctcatggttcctaatgttgacactaaaagccatcaagttttttttttttttttgaaaagcttttaagttgtaatgtaatatggatttcttatttctaatatgaagtcttacagttgcatcattgtcatctaagggctgtgcttaaatctatttattccagtgaagataaacagttttccacttgtttgtttgcaccataactgattaatccccaataattttttcacatggatttattgactttgcaagatgctgtgacaaactgtgttagtgcaacatcatggaacttttcaacatgtaatgattaagaaggaagatcattcatttaactgattaatggcacggatttctgagataactaacataatacttttggtgacaaggtctttttctctacttagattggc

SEQ ID NO: 3283 - DNA, 1884 bp, Glycine max
  Intron number 6 from transcript Glyma10g04430.2 (locus Gly ma10g04430) derived from phytozome v7.0 (chr-ID Gm10; pos 3417687 to 3419570)
ggtctaggacgaaaggcaaatcaagtatgttattgttgaagataatttctttcaatttttgtttccccccgtcttcttatattcccttatctattgtgaaatctgtatacctttttgtgaagtttaatgatcaagaatatgtatgaaccggggggggggggttaaaactggtgttcaaagttcaaacatatggcaggatcattttttagctgttatcttcacgccttgctaatgaaagttcttgttgagcacatccaagagccaattatgtatgccttttgtagaaaacatagtcctagtgaaatagttttttttggtgaaaagtcctatggaaatagtttgtgaaggaataaattgtaaactaaagttgttgggagaagctttagaatcacatggtttatggtggtttatgattaaataaaaatgaagtggagtaaatggaaatgcaagttaaacaagaggtgcacaagcattggcatagaggtgaaaattggagattatttttagtagggtatcttgtatctatcatacagagtgaaacagaaagaaagggagctccaaagatgtaaatcataggattcatgtgggcaggatgaaatgtagaaatgttccaggtgttatttctgattgaaaggtgtctcaagctcaaaggaaaatttattgaacagcctagatcagcattgggtaataaagtagcaaaaaaagtataatacaagaaaatataagatcatgaattaatgcatgagagaaagtagtagcacctacttgggaaaagatgattgaatcttgcctatgatggtttgaccatttggggagtacaacagaaaccctactaaaaataattgatcagatgggggatggactgataaataaaggcagaggatgaccatgaaaattgagtagttaagatgaagatctaactagccttttggaagtcttggtttttgactgaatataatggcatcatttgatccaatatgcttgtctctgtttggaagattttggttgtttttttagtctttgatgtgtaaatagaaaggaaaggaaaattaaagtgattctgatgcattaaaaaaaaattcaaaatataagcttagctgaatgctattggaattggcagttatatactaggattcccgtgtttgtcctttaattggtctagaacattcttgcttttttttggtcgtttacaatccctaaacaaatttcaccagtgcatttttcttattttttctatgattctatgatgttttagttcataatacatcctaacactattgtttgatagacttcattttgtagccttcttgctggtcaaaacaattggttttttgaaggggaaatgttttccttatcattatatatgcttagttattggccagatttgagttaattttctgttaggacttagggcagacagaaggggaggtgaaattgtttgggaaattttgaacagttagttaggcacaagtaaagcagttagttagaggctattggttagatgaataggggaaatgaggatggaaggattcattcaaagaattatagttagtatgaaatgggaaaccctttgtgaagaggacactgttggagaattctttttcctattcttggtcatttaataaaattgttcctttttttgtttctctcaaagtctcaatttctcgactctctttcctgggtttgtaacattcttttcttattttaattaacttgtggatgttatacatgacttgtttgtccatcttttatttccaatctattttaatggattccaattcttttgtccgactaaataaatgtttgataagaaataactcagtttcacatgcaaatttcagtttttttaactatacatcattctgggtgtctcatttcaggtgt

SEQ ID NO: 3284 - DNA, 1775 bp, Glycine max
  Intron number 2 from transcript Glyma10g34460.1 (locus Gly ma10g34460) derived from phytozome v7.0 (chr-ID Gm10; pos 42612319 to 42614093)
agattcataggaagcagatcaagcatttgttccttgtatgtatatgttttcctctctctatatctcttgctttgttttgttgtgcttcactactagatctgaatttttttttgctgttactattcatcatccactcattaagcaatcaggggtaactaggtggatatagataaaataactaaaatttaaattttattctcattaatgaaaattaatttttaattaatatttataaaacaaaaactcacatatataaataaaaatatcacgttgacaaaaaatctaatacaattttttcatttaaaatatttttgttcttaaaatttattttagacatctcttggactttcttattatcagcagctctcataattattggatgaataccaaaaacagcaattctgataattataggatgaatataccaacaaagtcgagacatttaattgatggaccactgaattgatgatatagacatggtgcagaaagagacaagacctactttaaaataaaataaaaagtagtatctaattatagatagggagatatcttaatataaaataaaaagcaaaaattgaatgaatacgcaaagactcatattttatctcagttaataaattgaattaaaacactcattctaaattttaaccgttcctccatccagcaattataaatggagagctgctattataaatatataaatggtgggctacttaattacttatcaagaatttatctctacgaaagtggcgaggaaagtcaaggaattatacgggtcctttttaaaagactttattatctttgctttttcatatatattttatttgttagagtatttatattatttcatattttatatttttattttctatacattaattaagaaaaatcttttagtttttttcttcagtattttctcctactaaacaaccttaaaaaatcattttatttctacttactttccttctttccatttttgtttctttcactgtcctacgaatctaagggcctagcgtgttagggtaaatttctttaaaagtaattttaagagaagcaaataaaaataaaaaaatgagatgattgattaaattttaaaagctctctcatataactttttcaaaagatgatacatctacaaattagtgaatgattagggaatggacaactaattttaacttataaagaaattaatttcattttattcttcttattcatttctcttataagtgcttctaaaaaatttacccaaacaagcccctagtatagttgtttattgtgcaaataattgagtgaatttgaatattaaacacaacaaagagagagaaataaaataaattaatatattttaaagtctgaattgagatatgcttattaagggttgcatcaaaattttctcttttctaccatttttgtgtctttctaaacaataaaaaacaaaaaatctatttcactatttttttttttttgtctcctatttctttccctccaaagtcacgggaaggataaataaaaattcatccaactattaattaagtaagtaataatatggataaaaaatcaactcatagatacaattacatgagttcgactcatatttataagtggataaattgtaaatatttggagctctggagattcaactgtctcaatttttttatttatttctcatacaaatgcttgaatatgtggaaatgtgagggaatccagttggagtttgacagtgaatgtaatttgtaacaggacctattcgttgcggggacggatacaacagccta

SEQ ID NO: 3285 - DNA, 3282 bp, Glycine max
  Intron number 5 from transcript Glyma04g40920.1 (locus Gly ma04g40920) derived from phytozome v7.0 (chr-ID Gm04; pos 46833032 to 46836313)
tattgattttgggctatctgattttgttaggccaggtaatatgactaaatcaacctactatagtcagtctcaagttgtatccaagtttttgtattcaatgcattagcatggtcctttgaatttactcatgtaatcttccggagaataaccaaggaatcaattatcataaggttttgtgcaatattgttaacacttagattttgtgagatattgaaacagtataatgaaggattaatgatattttaccatatcacagttcatcagtcattaatttggaataaatatctaaaattgatttttatcacttgtaacgaagaaggcaagatgcctgagaatttttaataatatttttcatctgattgaaatatctgataaatatcttaattttaacattgattcctgatacaatttgtagttccttgagagtatgatttagttttctctatatgttagtttctttttgcagaaacaaaatcgacatcatataatcagagatactagtagagttgaacaggatgatcttatttatcatgtcatttctgttcctctaaggcctttagtttgatttattttccaattttatgatcatattctgagcaaagcttgcttttctcttaacttcagcaattttgatgactgaccactgttgttttttcattgccttaaatattactggtttaataaagctttaagtgaaattgatgttaaattattaatctgtgtttgggaatgatattctaaaactaggtttagaagaattgatgtttggatgttgtaaaagtaaaattacttttatatatcaaatcaaattactatcaaaggcacaatattattttagttttaaaagacaccacatggatatgaggttatttcagtaactatacccatttgtttttacttgtttctacttttgtttctcatgtaagctaacggtcatttcttccaaaataattgatttgtctttttctgggtaagttgagaacaaatataggagtaaccaaacacttttcaattttgttgaactgtgcaaacttccacaaatggccatgtgaaacacctcaaaatctaaaacagacatgttcatgtggtaagcatgtttgcatgcgtatgtctttatgcttctgattttcataattttatttggatgcttaggttgaactcctctccataactttttaactaaatcgagagaatgaaatttaattttatgataaccgaatatgtgagtgttaactcattggtaagtgaatcaaattgtcacaagtagtaaaataaaacggaagttcgagtgtcgagtccacatggactacttagattggtacaaacccaagtttgaagccattgatagaattgtaagtgaaaaattagggggcagaagtaaaagataaaaaagataaggaaattaaacaataatttgaatgcggaagatgaattcagaatgcaaatgtgttgggacctagcatgctaaactactaatgttaataatttttctctatctaatgttatcccagtttttacctgcatttattatgatattctatctttgatttctggtttcccacatgaagaaactaatttatatattttctctctcaacttcctttgcaaagataatagtaaatcgcattaagaatgcatgaaataggctaaacaaacatcactctattcctagacatacttcatttagatgccctttcctgattctttagaaaataaccatttttcaatgcattacttcctaaacaatcagcaacaataaaacacagaaaagaacaataaaaaccaaaattgcattgaatagatagtagggaagaattacattataagagtttggccgctagattctcaacaatggggtttagtctctcctagtcacgagagactttacactttagggattgatggggatagaagaagagggatggatagaggagtagaaggcgataatagatatagaaagacagtttctactagttgagatattcagactggatttattagagagttctaagtctcagtacgtctttctcctttgtttcctactcctttaggtctgaggtagcttaaaattcactccacctctcactaagcgggccttctaggcttagcgagcatgtcggtgatcacgcgcttagcgtggtttcgtgctaagcgcctttagacttcttcgtgggtcttcttcgcgctaaacttgggttaacctaggcctgtcttgtgcactaaatgagctgtcccaatcttcagcttttcttcaaggctttttcttcaaattttgcatcaattttcctccaaagcactttaatcttctttcttttgaatcctgctggtcaagaattaaaatgatattaaaatcctcattatttcatgaaaatagcaataaagtagaggaattctaatcattcttagtcaaatttgactatcaattaaacccaaatttcgcagttatcaattagaaaataatttcttgttacacatgttgggatgatcaaattgatgattgttgaagaaaggaagctattaaataatcctctagcttgaatacttaattgaaattgtttttcatattttcatattattctgtttctgctatctttttgggagctcctgcatggtgcttgcccttaaaaagacattaactatgatatactgttctcacctggtgtgttgagaatgtacactccaattttaagtgtggcatagagctcacagcttggcaggaatgaagaggtctttaaaaacagaggatgtgctatctcaaattgccttgtcaattttcacacccaacatttcatacagtcccatattcacttcacattttccaccttccaatttttactcttaccaagcacatttaactccatttaaaaccaactattttctccctttcattttatattcttgcagattgtattgatctagtttgacaaagaggctaggggaatattcgttggaaaactttgccaatatctgtattgctatttttttctctacattggtcaaaatcatgtaggcatattaagaatagattgattctttcctaccaacgcttagaatttccttgttttaagctctgctataattgtacaagtttgtttgcgtaaggcttttcaccaatttactggtttagatgaatttcagggcatgcattgattctctgtttaggattgcctccagttttgaaataaatagttatcatttattgtcttgtaatcagtgatatcctcttattaattttttgactaccagcactgacttctactaaacatgcagatcaacgcctca

SEQ ID NO: 3286 - DNA, 990 bp, Glycine max
  Intron number 10 from transcript Glyma20g03040.1 (locus Gl yma20g03040) derived from phytozome v7.0 (chr-ID Gm20; pos 2777244 to 2778233 reverse strand)
ggagacatagaacaagttatagacgtggaaggtactactatgataatggtaaattgtgtttgagcattattcttatccttatgtttacaacatacaatgattatatcaagttgattctatgttgtaatgaataaaacttttctttttccatttttataatagcttggatcttataatattctgttcatatgtcactgtcgattcttacatctttgcattattcatgggtaagtctagacaatttgtcttttcaattggaaagaatataaagcatatactttaataaatttcctctggtttaaaatgttattccactcactatgtctgtaaaaatattgaataaactcctaattttctcctccaaagataccaggattatcattttcatcctctaaaatttatcattaatatagtttctcaattataaaaagtgtcaaaatttctgtttgattgagagaaataaatgttatttaatcctaatttagggactactttgacaacgttttgcatgattgggggactaaattgatgaagctttacgaaggactaaattgatgacataacatttcaaggaccgaagtaatgttgcatatctgtagatgatgaaaataggtttcactaaaaaatttatcaaactgaatgtacttgatcaatatttatttagaagatgtctttttttttcttcttaatgtggtagtttaatgtatgcttaaatatgattttggtccctgaaaaatattaaattttacggggactaaaataaaaaataataatttaaaggaccaaaatcaaaatgaccctatttttcagggaccaaaatcatatttaagcctttaatgcactttcactaagagaagcaatattaatgaaattcttaagtggcctgattgttaacttaataatactgattaactgtagaatgtatgtgcattatctttttaatgcattctgatggcgtatagtatgccttaatcagttggctggggttac

SEQ ID NO: 3287 - DNA, 1159 bp, Glycine max
  Intron number 4 from transcript Glyma12g36540.2 (locus Gly ma12g36540) derived from phytozome v7.0 (chr-ID Gm12; pos 39582972 to 39584130 reverse strand)
gtcaaatcttgactacttacgggcaacaagttgtatgatatatgcaattatctctatggtatttatgaaaattgctcccatttgaacaaatctctttaatctgtagatctgaactggcccacctctgtgactacgaaaatagaatatatattttgtttggtgtatagaatagatattttgtgaacctatatttgtgcataataggcttatttatagattaaaacatttatttttgaaagaaaagggttgatataaaataagtagtatttttgcccttgcaaggacatgtattatgcttatttattagtttggtataaaaaatattgttttttggatttttttatgattatgtgtttgtatttgtgtgtgcacatcttttcatgattgtgtgccattaattaaatgttttgaactataattttgttctataaagtattaccttattcttttgtaaatgtatagaccgcaaattagaagcacaagatgatcacatagaagttatcaagtatagtgagtgtcatatctgatgtttatatattgaatacgcatatactttataagtttcttctttttaaaactcatcaattgtttactttcacagaatattattttttaaattgatctataatatttttcattattgtatgtcattgagtaattaagtatttctttataagattgtttcagaggaggatgcctgttcggcacttgatttgatgtagtataaggttataaacatcttttttggatgatgcttcataaatacttgattagatgtggcaatatgaggtttgaagtaatttgagcatatttacaaatgtaacaataagcttggaaatgcctttggttgtaagttgtggttctttctgttttccattacactatggagggctactagacacttcacatccttgtaacaataatcactaaccactgcatgagtgtcaacttatgatggtagtagcacttaatttgtgcaggctttctttctctttatggacttccgtatctaagtttaaattcaacctctctttctcttcattttttcctccgaggcttcttatgactttcaatattcttgttgaaccaagtaactgctcttctactttatttctagtcctaacagatattgtatgatgctagataaatcctcagttgt

SEQ ID NO: 3288 - DNA, 1333 bp, Glycine max
  Intron number 2 from transcript Glyma10g27200.1 (locus Gly ma10g27200) derived from phytozome v7.0 (chr-ID Gm10; pos 35913133 to 35914465 reverse strand)
gttctttacttaactatttaggtaaatgcttttacatattattcaattttatttcattttctgtttccctttctagctgatgctctcttcttacaacaaattatagggtgttagattttgattgccttgtttatggtttattgtaggtggtttcttatttaacttggatgaatatttttaagaaatcatcaacatggtgaatgtgtctgaaatatacaattattttattctgctgacgtgattagtaaagtccatgcttaaactctttaggtgtagatgctttacaaattattcagtttttaccttgttttatgattttcttcctgtctaacattttattacagcagatgatagattgctacggtagttgccttgtttctattgcgtgttataaatgtggttttttatttggctttgacaaatgaaagttttatatttaagaaactatcactgtgaggaaccgcatgatgaacatctagtattaatgttaagaaatacagtcttgggtgctgtaaaaaactgacagtacatggtttaaagtacattattagcagaagaaaatacataatggcatgatcaaattatatcatttatgtaggtaggtaaaacacaaaagaaatagcaaggaaaaaaaaatgagagtttgattataaatagatacaaagattgactgattaagtacactaaataaataaaaaagttgtaaatgatgattaaaaaatggaagagaacatattacgtagcaagtaacaattaacaaagaaatgagacgaagcctgtaatgaaaagaatataatacatgggtataaggagaattgagaacatacttgtggtatttctaattcaagacaacatcaatgaatataacattgtgagactaggtacttgaacaaatccaaaacagagatgatattcaacaattacaaaggaaatcaaaatatattcctcaaattgcaagcagaaagaaaaaagttattttcccctaacgaaaatacagttattaatagagataaggacaaatttggaacactatatgtatacttttctttatacgtaatattttctcacattttccatctttactaccagtttactctctttttttgttttacaattaatgactcatctcagattttttagttaatatttacttaattttcttctactaatggaacttatccttagttttacacttaaaattaacaataaatattgttttatttattcaataagtatttattagagttcaatatttaaacaattgtgtaaaaaaaattctgttccctcgtttgacacaggacccgtccttgctggtcttgccaatcacaataga

SEQ ID NO: 3289 - DNA, 2224 bp, Glycine max
  Intron number 1 from transcript Glyma08g26890.2 (locus Gly ma08g26890) derived from phytozome v7.0 (chr-ID Gm08; pos 21217481 to 21219704)
cagttggttcaaaaggcacaacaaaactcaatcaggtcattgtattgtcattgataaattctttaaatacatcattgcatacatcaagggaaatatcattcaagtcccttcatttaattgtagtttctagtaagcttgcaaatgaatgaagggcttggtttatggaaatttagatttatttctacctatgctctttggattatgatacactctttgaaatttgaatattttataaagcatcaaagctggagttacctgccatcagggctgtaaatgaggagcaccataaaaaatcattgtcattccaaattggagaaataatttttaagaatcttgatttcacttaaaataatagcatactttctaaacaacacaaaaccatcccagaaactccattttttttcaaaaccttagttgagttgacaccaactcctaacatttttatgcagagggttagactgcctttttgtcagttatatgtagacaggtttgtggtatgattattgtctccaaattgactaatttgatagcaattaatccccccactggtgggatagaactatagaagtactattttgttgattttgccctttcactatttttcctatcttctgggtcttctgattgcagcatagggaatgattcttatacttacatgacgcatgcattttgtatgttcacttccagttgtatcttgtatgtttagataaacttttgctatttgacaaagaaaaaatgaaataaatttaaccacttgtggatacttatctggaacagggagccttgttcttttattgttttcctttggctaaaatgtaacttttgttcctctatttttccaaatttgtaattttagtcctattttttaattgagacattttgtctcccacttttaaaaaatccttaattttagttccctattttttaattgagacattttgttccccactttttaataatctgcgattttagtcctctttttcaatttcagacttgactatgtacctttttaaataaattaagcttgttagtaattaaataattaaaaaaaaattatcatgtagataataaatagacacgtgtctgttaaggtttacaaagtatatatatcaatgtttgaaattaaccacaaaaactaaaattgtgaatttttttaaaagtgggggacgtcttaattaaaaaatgggggactaaaatggaaaactttttaaaatgggggatgaaatgtctcaattaaaaaataggaggactaaaatcacaaatttgaaaaaataaagggacgaaaattacattttagccttttctttttaactacatttgtagctttctatcgatactttaccctccagaactgaattcttataactttcttgaacaaagaaaaattaagtgcaaaacttttctctcaaacactgttgatctgtggctctgttctgatttaaatatgttatcttgtgctgactgttaatgcttaatattccaggtattttctctgaccttctatgaagctaaaagcctgacactggacctgtctgttgggccattggtttgtatgtttgacagggttttcagttttggaggagtaggagggtgcttgtggcttcacagcatatgccctgtccaatccaagatgttattctgatattttctttcattggtaaaattgctgcaatatattttgtggcatgcttttcagccatgccctcctctagtcctgcatatatggactgtcaatttcctgaagaaaagggtttaccataccagcaccaaattgatgccaattcgttaaattgaaaaaaagacagttagagataggagaaaatataaaactagaacatgagatatcatagcaaggtataataaaaaaggaataaaataaaaattgtttgtatgggcaaagtaaattaaaaaagctctttcccttgattggttatcctttgaagagacactcttagaacatcttacaccaccattaattcttttatgctaccaatcaacccattgctcactaaaatatccagttgtgtgcaagattttttatcatgatattttacatcaatgctacatttggtattgcttttatcatttgcagttcagtcttaatttgactttgtagtttggcatgttggaacaattagtaaagtatctgattcaaaagttgtgtttgggtttttgttttctcccactctaactcaattgcagggattgcaacctctaaaacctt

SEQ ID NO: 3290 - DNA, 1735 bp, Glycine max
  Intron number 5 from transcript Glyma05g28440.2 (locus Gly ma05g28440) derived from phytozome v7.0 (chr-ID Gm05; pos 34254470 to 34256204 reverse strand)
ttcctccggtagacgttttgtgacaaaaatcacaggttacactcttcctattatttttatcctttaaactgtttcattttcaaaagacatctaccctatcacccgtaggcttgaacattccagacccctctgaatttaacattttgtaaggagactaaagcactgcaagcaaataaaaaattacattctctttcatgcactcaattatcacaaaagtccccccaaaaaaaataatttgtgattgtatgatagagagctcattttatcatctaacgtaaccaattaaatacaaaaaaagctcctgtcacattttatcatctaacgtaattaaaatgtataaaaattgaaaccaacaaaaattgaaaaaattaaacaaaagttcctatattcatcggaactaagtacaaaaagattaatgagtagtgtaacaattaaatacaaaaaaagttcctgtcattttaatttttttttatcacattaaatcctatcctacttatatttttttcatttttctgttctgttttatgaataaaaacaagtatctacattgtaaaggtcaaaatagcaaaccacctatcttatatggggagcaattaaattttctgtagaaacaaaaattaataagcatatttagataaatttcctgtgaaaggcttcaaacaaattaataaaaaaaatcactaaagcctacgcaggagtgcaggacgcacaaaacaatttaataagcatgtcacaaaaaaaaatcatataacatttttcaaaaaacaaataaaaagaatcacagtcagtgtcacacacaaaaattgctatcggggtcaacagctcatgtcttcctcacctcaagcaaggtggcggcgcagcgcagactcgtcatcggggccgccggacgcaggacgcaggtgtcggggtcgcagcttcgtgggatgtagactcgtcgtcgtcctcgcagcttcgccggtcgcagtggagactagggttttcgagtggtttggacggagagctggccaagtaatacaaaaagcaaaatgccaaaaataccctcactttcccacattaagtgaaggcatttttgaaatttccacggcgtcagtgtagcggcgcgaaaatccggtccagatcccgtgccgctccgccctaccctgctgcgatagcggccccgacgttgaaccgcgccgctacgaccctcttcgtcgtggatgggtgccgctccgctccgccgcgatagcagccgcgacgcccgctattaacaactatgcttgctcttatatgcttggtgagttgttgcctcttttggcattagtctccaaaggaaagcgccaaagtcatttaacctctgaaagcattgtttgtgtgttaagatgccaaattaccaacccctaatcccccttcattttaggcctatgacaaacctcccaagtcccaactaataaaatgttctcttctctgtttacccacagctgatcaatgttttgtgtctttgggtcaatctgaactcacattgcctgtctgatattgagaactggtgaaattagaaagtatgttatttctgtactcttttgtgccttctccaagatgttaattgttgtaaggttattgttacttggtagctaaaaacgttaaagaaataggtattgttttactgtcactaagattttatttgatttgtgcattctgtgttttcttggattttgagtaattaaatcatcatgtttttggtctgaattgcagcctggtt

SEQ ID NO: 3291 - DNA, 6333 bp, Glycine max
  Intron number 6 from transcript Glyma16g08030.1 (locus Gly ma16g08030) derived from phytozome v7.0 (chr-ID Gm16; pos 7259852 to 7266184)
cagacctgacaggttcatcttgcctaacttcaaacacttttgcatcatatgtttacttttcaattgattctgttaaagagggcatgagagcgtgctaaatattcatgtaaaagaatttatttttatatgcaattgctaaacaaaaaagggtaactatatgttagaaagtgagtttggacttaactcagccctacaaaaccgacttataagataaggatttcccctccacttatatagttgatctcgtcactatctttagttgatatgagatttaaaatgtctccttttgcctatggctatccgtcatgtgggactttcaacacattctctctatctaggggtgaccacaatttaggtgacttttccaacatcccacctcacggtctaggctacctgcatagagtatgacaaacatagggacccatctaggatagacgctaataccatgtagaaagactgaaagagataagggagaaggagaggcatataggtaaatggttattaatactctacaatgtgtagctaccctcatatttataatactaggttaagcatatacaagcacttgggccaagcccgtatacgtactaaaacccttttattctaaacaactctaacataaacaactctaacattccccctcaagctagagcatagatgttaatcatgcctagcttgttacaaataaaatcactacggaccccattcaaagcttttgtaagcagaactgctagttggtcgcctgccttgacatcagaggtagatataaggttttgttgcactttctctcggatgaagtgacaatctacctcaacatgttttgttcttttacgatagattggatttgatgcaatatgcatggcagcttcattgtcacaccacaatttcataggataggtattcgaaaattctatctccaaaatttgtctcacccatatcaactcacaagtggtttgggccatagtcctgtattttgcctctgcattagatcttgccaccacatcctgcttcttacttttccaagagatcaaattacctcccaaaaatacaaagtagcccgtggtagatttatggttcataagagacataacccaatctgcatcagagaatgcctccacctgcatgtgcccatgatcttgatacacaatcccctttcctggagctttcttcaagtacttaacaaaacagataagtgcttcccaatgaatgtcagtcgagaacctcatgaattgactaacacttactgggaaggcaatatccggcttggtgacacagataatttagcttccccactagtcgtctgtatctctatggatcagagaagggaactccatctgaggtcaacttgacccctggctccataggggtctcacatggtttggctcccatcaaaccagtctcattcagcaagtcaaaaatatacttcctttgtgataggacgatccctttcatcaagtacataacctcaatacccaagtacttcaaagcccccaagtccttagtctgaaattgagattgaagaaaactcttcaagtcgtcaatgcctttactattatttcttgtaatcacaatatcatcaacatacaccacaagtaagatgctgccaaggttagtattcttataaaacactgtatgatcactctgactccgcttcagtccaaatgcaaggaccatgtcactaaatctcccaaaccaagatctaggtgattgcttcaagccatataatgacttccttaagcgacacaccttgccaaactccccctgagcaacaaacaggttggttgctccatatacacctcctcatgtaagtcaccatgcgagaaagtagtcttcacatccaattgaaacaaaggccaatgatgtgtagcagcaagagagataagaatacgaaaggaggaaagcttagcaacaagggaaaaagtatcagtataatcaactccataagtttgagcataccccttggcaatgaggcgagcctttcaatgagccataaacccatcaggattcattataaatccacttgcaaccaataggcttcttccctgtagggagagaaatcaattgatgtggctttggacctaactcaaccctacaaaactgacttataaggtaaggattgctccctacttatatagttagatcatagatgtgttttcttctaatgttagtgaatttctggttgaggtatctcaaaatatcttcctgatttcttaatggtctgtttcagacagtcattcttagtttgtgaattgtggaaggagaataaaacatgataaactatggattatttgggaagataataaaggttgtgaattatttgagggttgtatttttaacaaattgagtatgctatgagataaatgtaggtaaattgttatgctttttaaattaaaaaataaattttgtttaatatatataatagtttggtttggtttattttttaatttaatataaattcaccaaattatacactaatagagttctaacagaaggataaaagatattttgagaaaggaaacttgaggaagaagaaatgaaaaatgatattagccactgaactttgtgttgcagtttggtatatataggctaggatagttagttatgacagctgtcaataactaacccactaactaactcgatgcagtaaactaactcacttaactaagagtgtagttgaagactgcaacgctctgtacaatgctctaataccccccctcaaactcaaggtggttgagactttgatgaagcctcaagcacattgagtttggctcttggaaaaataaatcttggtggatagagtggcttggtgagtgcatctgccattcatcaagagcaggaacatgatgaacaatgagctgcttggtcaaaaccttctcccgaacaaaaaaaacatcaattttcatatgctttgttcttgcatgaagaactgggttgtgggcaatgacaactgcactgtagttatcacagaagacaatgggagtgcagaaggggaactttgagttcagtcaacagtgtctgaatccaagagatttctgcagtagtctgagctaagcttcgatattctgcttctgtgctggacttggcaacaacctgctgcttgcgggaccaccaagatatgagattagggccaaagtagattgctgcacctgatgttgatcttctgtcatcaatatcagatgcccagtctgcatcacagagggctctaagagtgtagcgctgacccaggacagcaggtctgagatgaagaccatgtaaaacagttcctttcaagtagcttaagattctctgggctgcaatctagtgagaatctaagggattggccacaaattggcaaactttgttaactgaatatcctatctcaggtttagtgatagttaaattttggagagcacctaccacagacatgcacatagtaggatcagaaaaaagatctgaacctattttggtgagcttgcaactggaagccataggagatgaaatagatttagcctctgccatattggttttctgcaacaaatccctgatatgtttacactgagtaagcagtatagacttgtcagattgagttttcacttcaattccatgaaagtaggtcagcaagtcaagctgtttgatagaaaacttagagttaagtcaagaagtgagatgttggatgagagaagtagagctaccagtgattattatgtcatccacatagacaagtaggtagtaaactgtgtgagattcagtcttgtagatgaagagtgaaggatcacattgttaaactaaagaaattgggatgaaaattgtgtgttctcctatggagaattctcatttaaataatatgatataatttgatttctagccttgaagtttgctaaaaaaccatgtatggtaacctacagctggactaactaattaaggatataattacacagttacagctatacaatcatgcaagatatgctggtttaaagggccaacaaatctgcgcaaataatgcttaataatctgcctatcaattctattggcatcccccctcaaattgatgatggtgaatctacaagtatcaatttgctgacttggaaattatgctgttgacgtgtcaaagatttggtgaggatgtcggctagttgaatagatgttgagacatgaggcagagtgataattctgtggtcataggcttccctgattaaatgacaatcgacctctatgtactttgttctttcaaggtatacaggatttgctacaatctgtatggtacttatattatcaacatacaatggagttggtgttgcttgtgaataaccaagttttgaaagaaggccttgtaaccaaaaatctcggagcatgcggaagacatggaccgatattctacttcagtagaggatttagagaccgattcatgtttcttgcatttctaggagataggggcatctcctaaaaaatacaccaaccagtagtagacttccttgtgttgggacatccagcccaatcagcatcattgtatgcttgaagttgtattgttgcacttgtaggaatgaagagaccacggctaggaatgaccattaaatatttaatgatttgttgtattgctgtaagatgcaagtgtctaggattttgcatgaattttctgactgtgtggaccacaaaagagatatcaggtcttgtgatgataaggtagatgagacttccaaccaactttctatgtaaagtttggtcttgtaggagttcaccttcatcccgtcttaacttgacattaacatccatgggagtgtcaatcgtggttgcaatggtgagactggctagctgaattagatcttgagtatatttgtgctgagtgacaaagatgcctttttgttggaattgtacttctaatcccaaaaaataagtgagctgtccaagatcttttcatgtggaaagttttatgcaacaattgtttgattgtagtgatagcctcttgatttgagccagtgacaataatatcgtccacataaacaaggaggatcacaattccttttgaggtcctttgtagaaagagagatggatcatagctactttggatgaaggaaaaaccaagtagtgttgtgctaaacttttcaaaccacactcttggtgcctgttttaatccatacaaagaacgttttagcttgcaaacaatattaggtaatggtgagggcataccaataggaagtttgatgtaaacttctttgttgaggtcaccatgaaggaagacattttttgacatctagctagggaaaaactttcagtttttggttgcaaaaaatgacttgtttggcaccatttgtgcttgtgtgtagtttatcgagggagattcagagagagattatttgaaaacgagtttcatgagctaaagaagagcatcaacttgcacgataggcataggttcaaattttctttcgataattgcaatgatcgagttataatcagacaagaggccttaagcaatcgagtcaatatgcttctgaagcataatcggacttttgacagaggcaagggaatcagaaatccattcgatctgcgataaaaactcacacatcaacttgcctccgagacttgtagcatgtagctgagttcgtggttggcgtgctgtggctcgtgtttgcttgtggaagtaatcgtgaatccgctcccaaacttcatcggagtaagcacatcctaacacacgaaacaagatcgacgttgaaagtgtcgattgaagcaatgtaagaagcacctgatcttgttgctcccaagcttcatacacagaattttcaatcttcctcagaaagaaaacgtagcggaatttgtggatttgcaacaaatcgctgaagacgatgagacttgataactggctcaacttgttgacgccagagaagaaaggttgaaacatcaagtttatgtgcgatcatgttgggaaaggcagaagaagagaggatcacattctattgtttcgccattgatgatcttaccaagctctggataccataatagagttctaacagaatgatagaagagaaaagaagatattttgagaaaggaaactcgaggaagaagaaatgaaaaatgatatttgccactgaactttgtgttacagttaggtatatataggctaggataataactaacccaccaactaactcaatgtgttaaaggaatgtcaaaattaagagagaacctacaattaaacagcaattgtttatttggtttctgttttatgtcatttgtggttatgctcctactgttcctttgtttccctattttgatccttttccttctgggtccttttgcattctttacttcctcacttagaaaaagcatttcatagagatgtaactgcaggccggcaattgc

SEQ ID NO: 3292 - DNA, 3959 bp, Glycine max
  Intron number 1 from transcript Glyma11g10600.1 (locus Gly ma11g10600) derived from phytozome v7.0 (chr-ID Gm11; pos 7552630 to 7556588 reverse strand)
gaggtacgcgcttatttactaactcagttcctcatgcatatatttattatttatgcaatcgtttttatttagttttcactttcatgactaatacataattaactcaacgaaactgtgatgtttttaattatcgtagcatcacacactcacactctcgcacacatgtatttgggtaaataattaatggtatatatcatgcttaattgatatatttaacctagtgaatcccgagtcttatcgattgatgatcttgtgaatgattgcgacaagcaatgttggtaatcgtatattgtcgtatattaatttcccaacgactgcgatattggtgatggaatatataaagtttgttaaagacaagaaaggaaaactgctaaaaacaattctgaagcaatcatggggcctttacctaaattcaagtagtttcagcaaaactcgtttatagctagcctcatcagattcacaagatgtaaaagtaaatgcgttgattagaataaaatcaggcacataattagcgaattgaattatcatatataattttcatataactccgagtgatctccaggtcattccttcgcgcaagtcatgcagcactcattgtcatgatgattccttcctaaataatatcatgaaagtacatcaagataaatgcaaaccatcatagcttcaattagtttaattaggaaaaaaacaaaaaactaagaggttatgcacctgccgctgcgcacatatatagcattataattatgcagtcaacaccgtgccccttgtgaaacaagttatgccaaataatatcgtaagcttgccctcctgcacaagagatatttactagagtgtgtttcttgaaagttattatttctaagaatatgaatatgaattttcgagtgtagtattcttttttttttacatgattggaatgtggtattctaatattctatgcttgtttagagttttaaaaaatgatcaaatatgttttttatacttgtgatttattccttttttagtttattatcttttattttattttactaactaatgttttcaaacttttatttttggtatttatcgtgagtctaagtatgttagtttatcacattatcatttaagtaatgatataacattttattagtttgttatattattatttaacggatcaagactaatgataaatattaaaaacaaaaatttaaaaatatcaaagtattttttagaaaatagataataatctaaaaaataaatacattacagtattaaaaatatatttaagccttaaaaaatattcttaatttttgttaattcttaggaaagtaattagaacctaacttatttcacttttattctcaaggtgagggagtgggagagctgtattcgatcccataaaaatgtgaaaagttgtttttttaactcactcatagcttccctttcatctcttattttttattttaattttttaaaatttgaaaaatatttatataaatattaaaatccagcctaacacatttttaagtattttttggaataatatttttatttttttgaaaaatacaatatcataccttaaatcaatattaaatgcgttatctttacccaaccaagtttgatatggttatatttggatatctgaaaaaaaaaggtctatttggataaaatttaaaaaaatacttatagaaaaaaataattttttccataaattaatttataaaaattctcgcatataacttcaccaagaagattacttttaaattatacaagccaaaacccacagatcgactataaattaaagttcgaaaccttggtttatttgaaaatattgaattgaattttcattgtgccttttaaaaaacttcattggtagatatagatactagtcttatccatttataatccagtccacgaaacttaagttttagactgatcaaataagtctgatttatgaaataaataaatttttttaagatttatatttaattcacaaaaatccacaaataaatggactgatcgtcagacctaaatattaatttgaaaaaaaaatattttttataaagaaaatgtgttttagaaagtgacaaatgtatataactaaaagaaaaaaaaattgactttattttttatactaaaatctattacactaaaatatactaatattttaaacacatcaaaataacaattacaacttaagttaaaagtcaaaatcttaccctaacaaatcaataatacttacctattaaatttagaaggattaaatagatagtccacaagttcacatataaaatttgttaagtccttaggcttaatataatagactagactcgaaaattcaatataattatacaaaacttttaagataaaaaatccgttatccacccgatccacggaattagcgagccgattcacgaacatggttccatatatccaaacggtgtgtatgaatgttacgggacataaacaattaatatagatgtaaggattttttttttctctttttgacgagagcaaaccaactaatttgccacatccatattaaatttttactatcataaaaaaaaaatattaaaattctactcgtatttgttataattaattaatgagttgtttcttgcacaatctgccaggatgacatgtttaattatgtacttaatttataggttacgtaatccttttccaaattcatttgtttaacttaccaatggagataaaaataaaaataaaaacaaaacaaaaaatacaaacagaaaaaacggccaaaattcaagacgaaggttgtgtacacgatatgcgagttcatttaatttctttgtgacttctaacatgttattggctcccagtttgttagcttgtggaccaagaggtcgacaaaaacaaaaagaaaacaactttgcaaaaaaaaaaaaaaaccaataattgaatatggagcaagcatgcggttattcaaaatttgatcaaagtcttcagtcagtggcttcaacttgcagcagaaactgccataataaaattccattgaagcaatgaatattgctttgaaccgaagtgaaaacccaactttttttttcttgtgctgataggaacataaaggcaagaaaactttatattagtgacaccagcaaaaaaagggggccaggtatgataaaacaaaattaacgaagcatgtgcataaataaaaaaaggttctaacttttgaagtttgactatgttctgcttattcgttatctgtttcatcgtaatttattaccttaattacacttttgctcatttaggtatcacaatggtataattttgatgttccatattcttattggtcaatttagattatccaagcatcgcttgtaaatggaatatacaaataaaaataagagattttattttcttggctagttttagagattttattttttttgctaattgtagagataatatgtgaaccacacctcccaagttgagaattatattttacaatataaaagtaaattaatttggtctataaattttatattgataatcattttataatgtagttgcgatttccccatcttcttgaaggttgttaaactccgcaatgatttaattttatgaaagttaaactcttgaacaactccatgttggaatcaatggattcattcaattttggaaccgcaaatcattactgaggcttctttgccttttgcttttaaataaatatgacttactttttgtttacaatgataataacattacgaactttccgaattagtttaaatttgctttttcaattcattacgattacgatatgtatgaagcttatatcatatcctatataatagtacatatcatcctttatagtttatagttgtcactttcaaagttagttatacgttacatctgtagtatatttacttatttatttatttatttacactgattcattagctattaacatgaagaaaatgcatgaatgttttcaggccctggttgttcctcaattggtt

SEQ ID NO: 3293 - DNA, 5281 bp, Glycine max
  Intron number 12 from transcript Glyma19g43910.1 (locus Gl yma19g43910) derived from phytozome v7.0 (chr-ID Gm19; pos 49461181 to 49466461 reverse strand)
cagtgtggaaggtagttatttacatgtgtgtggtcttatattccattttcacttttaattatttaattaatttctaataaaaaataaactagtataaactcagcagtctagaagcctggccttgtgcttgtgatcagataatagcctaatgaatctgacattagttacagctcaattgaaatgtgtgtattgatgattatatcttacagtggcattatctatttggaaaatgatatgattggttccatacatgtgggtattggctcatctctcttccagtttatttttgatacatcattgtctgatttttcataacccaaaaagaggcaaaaacttgctcttagcagcaccaaagttttatcaatcaactgtataatggctttctctgtgtgtgtaggaagttactcaagtgagaacatttagttgatgtgagaaatgagaacaatgaaatagtgaatattgactattggattatataaaagataaatgcacatcactttttttaagtgatcatgtgagtactagggctgtgtaaaaaatccaaagaaccaaataaaaaaactaaaccaaattaaaaaaaacatttaaaatggttctttaaccaaactaatttattatttggatttggatatgctgctacatttcttctaacaggtttggcgcaccaaaataaaccaatccagattattcttaaaatttaaaactaaatattaatataaatactattttttaatatacattcaagtatcatttcaaccttttttatgcttattttcttaaaaaatattcttttataaatctttcaaaattaattattaatcataaaatacataagtaatttttatttcaaatattttatttacactagcagttttaagtttgaatgaacgggtaaagtgccttacacaagatgggagaaggtgggatcgctatttgatggaccaattctagaagttaatgtagacaaacaagacgtttggaaattagaattttcatgttaaaataacatttaaagaaaagagagaataaaaaacggaaagaaaaataaggtaatgatgacaaatgtcttgcatttaaatgtcattattagatagaataaataatggaaagaaaaaaaaaattaaggaaaaaagataaaccaattcattggtaaaaccagtaaaaacacgattgtaatacaattgaaaactggttaaaattgatttaaaactgattccacacttagaaactggttcaaaaccagttagcagtcaaaactggtttaaaattgtttctacacttaaatcaatgtagtacccattcaaaaccactttggaactggttcaccaaaactgaattggttcaataaatataatctggtttcgcatagtaaactaatccaaaaaagtggtataatttggtttggtttttattttgccatgcatagatctacatgtgagcatttgacctctaaccagtttttaatcttgataattcgtatattattagaatctagacttatagttctcatttgtcacaataaccaaaatgctcacttgatttttttaagttgtcatgtaaccactaattaacttttaatcttactatttatgtatggtatgatcaagatttattattctcttatgcttaaaataagatttactaattaacttgtaatatgaaatcatttgtatgcctatactcaacagtttaagctttgtgatagttggttcatgatatgctattagaatctctatggccatatgtcgaaacaaggtagtgtcctcgatttaagtccaaagggcttgtgcattggggggggggggtgttagagatataatataaaacaaattatgggtttgctgataaaaaaaaaaacaaattatgggtcttcacctattagattaagcctttggaatagttggttcatgattgttacctaattctataaaataaatcttgtaactaagcaaatataataatgctaatgatgaatatagaattatgggtgttctctcctatcattgtacagaatgtttaggcattaggaagcttaattggctgacttatagatgcatacatatacattttgtggtgcacggttctttacttcaaggaggtatactgtgcagcatgtacttttctgatattattatgctgttaggggttaaagaaaaaatatccaaagatttttggtagttggggagggtaaaaggtgggagtatgtaacacacatacactacccttctaataatgttaattttcaaccattatgatgatttagttttaaatattacaaggttatgctgtttttttttttttgtgtaaaaggagtaacatcattaaacagaagacaaatggttacaaaagaagtcaaggatatactcatttctttgaagccaaatgccaaataccccaaagatctatacatataatccatccccattaaaatgtcttttaaactaatcaaaaaaatttgtgctgaaatgggagggaaacatcttgaatttactaaaagcattaaacacatagtctagctagatggaagtatatctttggcccatacctaaaaactgtatgtattatttttcaatttttttgttttttaacaaggcgtgtttagaattttttcgttgacaagcctttgaatgagtaatctactctggttttgataattatctgtgggatgatcatcatcattgtttttactttttactagtgtaaatggcatgtctgtgtgcctgtaaatatacatggtgaggggatctttttttcggcccttttggttcccccccccccccccccccccccctctcttttgaattgttagctaacctgtttcattctttttccagaggctctccaagtgtctgcagacacatggttttgttgtcattgatatcatttcagctaatgtggggggtttcttacaggtaattgtgtgattgatgtacttcatatcttttgtgctttcttctatatggttagagtagctgtctgattatattctgaagcgatgaatatattaaatattaaaattttcttttcaatgtatattatattttgctaaaatcaatgatgctgctgcacattttgttgtgtgtttgcattatttgaatcaccggattgactctaatccaatgaaatgttctggacagaactagttcagatatgattccatgatgtcatagtattgatttatgtgtgatagagctgctatagcggcatcacgttgcacctgtcacttttgcgtggctggttgtggaatgggtttctgtagtggttgtagcagagtgaatggtatctgcttttgcatgaatttgtggacatctctgctacttttctgcttatgggtgaaaatcgctcttttggccctggaacggtgttgtttggtgctgttttatttttgtgggaacaatcttgtggttttgcctcattttcatttaatcagatcagaaacccaattcgctccccctcacttgcatgccctgctcattgagtgaggaacccagatccttgtctctgatgaatacacacctttctctggcaagatatctgacatcgcagcattttctggcaagcttgtcactgttctagccaacctcactcacacaacattgctccgttttatcctctgttctctctactctctcaatgtctctaataggttttttattccctgttctgtgttctctaattcttctaagccccgcccattaatttttatggcttaattaagtttttcatacctggaatatagtccgttttaaaaaaactacctaacattcattttttcccccaggtacctggaaaatttttgcatttcattttagtacttgccgtcaggctgcatttgttaagtgatgatgtggcagacagaatgctacgtcatcatgcctagtcactaaccacgtaagcacatgcctctccacgtcattaggcccaaactctcatccgccagggccacactgtcctggcccattcccgctccgaccacttcctcgtggcccaacaactcggcgtcaccttcttcccaaacccccacgacctttgcaaagaacaccctgaagtgattctcttatgctcctccatcatctccactcagcgcgtgctcctcactctccccctccagcacttaaaatgcagcacactctttgtcgaggtgttttccatcaaagagttccccaaaaacctccttctccatgcgctcccctccgattttgacgttctctgcacccaccccatgtttggcccacagagtgccccccatgcgtgggtcgacctccccttcgtctacgagatggtccgaatcggcgccaacgagcacccaatcgtgcattgtgagaaattcctcggcattttcgcgagggaagggtgcaggatggtggagattagctgtgccaaccatgataagtttgcggccccgaacaagctaattggcaaaagagaaagttgaagcctttggaattgcagggtctaatcgatttggagattatggaactgattttggttgggggaagcctgcaaaggtggagatgactttcatttttttaaaataaaaaaacaaaaattaatggcatggacacttatgcctacatgtttagtgattaggcatgatgatgtggcattccgtctgccatgtcatcacttaatggatgcggactaacaacagatagtaaaatgaaacccaaatttttttcaggtatctgggggaaaaatgaatgttaggtagttttttgaaagcgggctatatttcaggtattaaaaacttaattaagcaattttttatttattctaactggtgttgtctacccattgatcaacaataatagctttatccatccattataaacatgtctttaattttagttatttttttaaaatttattcgtgtgtttagttagtataatttatgtaatgtgtatctaaactttaaaatagtggttatcccattacttgctatccctctgtagcatttttggaaccactatgtgggattgactacgatgatctaaaatttgccacctattgtttgggaagagaatagagacactgattgcctagcggaattggctatatactttatattgtaatcatttgcttttgctaaatttactgaatggtttagggaaacttcattgctttctttgttatctgtttatttgtgttagtacatatttgtgttgagttttgtgctaattgtttgacctcaatcatgtgtaaactggatctccttttaaaggttaactatgttctactaactgccaaatcatatattgtgttgcaggtcttactaggacca

SEQ ID NO: 3294 - DNA, 2153 bp, Glycine max
  Intron number 1 from transcript Glyma01g11130.1 (locus Gly ma01g11130) derived from phytozome v7.0 (chr-ID Gm01; pos 14321456 to 14323608)
cacacctaaccccaattcaggtaattgattaaatttaactcgattgttcttattattttaaacatactatttggtggttcagcttagtacataagcgattcaaagtatttttcccgcaagcctaagcgctattcgctacaatcaaatttaaattattacttattttggaataaatatcaattttgcatatcaaagacacatggcatgcgatttaacacatattagtcgacctaagaataatgagctagcaataatctcaacagcgacacaagtcgaagacacattaacgggaaatgacttgaaataggctaattacgataagtttacgagacccctcaaaataaaacccccaaagaaaatacttgtaataagttacatgaacattagagtcacaagggcaacactataaaatataaataggtatcttatgctacacagacaaatcttgtaaccacactaagggatttagctagacattttttacttaaccacacttgacctctaaaatctctctctaatcctctctttctctctcaccctattttatgctacatgagacaaatcatattttgtatcctacatcataacaatgtctaaatcccatggtgtggttacaaggtatgttgagcttatcgtaacaatttgtgttgagggtcctattttgaggattgtcataaacttatcataagcctatcaccagtcggtttctgttaaggtgtcttcgacttgtgttgctattgagcttattgacgactaattatccttagatcggttaagttgcatgccatgtgttcttgatgcattacagttacaaagaattaatagacaaacgtgtcttgggtggcttcaattataatcaagaattagcagcctgactggaaaacgggcactaggatgaacatcttgcaaatcacaagatagttacggtaactttaataactattacaccatttttataacatgatatataatgtgatttttatttatccaaccgttgaattatatatatatattaccaaaattgtccatgataaattttgtcaaaattgaataacaacaaaaacataattaaatgatccatattttaatatattttgaaatgtttaaactacgtcaatttaaacttatatgaacaagatagtaaatgattttagattaatatgaaattttaaatatgtgatctatgaaaaagaaactttcaatccaatgattattttttaaaaaatattatacaattgaaagttatagaatgatctaatagttgtcaaagttatatatatatatatatatatatatatatatatatatatatatatatatatatatatatatatatatatattatctctggtatagtttataggattcattttatcacataataacaattgatgaaaaaaattctcggaaaagagagtattaaaaatttaataatttagtatgtaattttaattttgttaatactttgtatttttctagatttattcttataatttgatgatttcagcttcttgatttctttttacctaattaatgtatttacactaaaaaaagataaaattgtaagaggaaataataattaatattcgtagtggacaataagtattataaaaataattacaacaaaactctcaaaagattcctataaagagttcccgagttaataactcatgattatctgagctataaactaaatagataattttggtgtctatttcacgcgcaagaacagaatcctgggaaataaatcatattgataactttcataaacataacaaacatttccttgacctttttacaatttttactttcatagactgatttcaatttctcgagaaactagaaagcatgcaactgaatattttgaagtctgcggcaactgatgtcctttccaagcttggaagattttacattccctttaaacacaatcttgttcagtaagtaaattattgtgcaagtaaccatcgtttcagagatcagctttcttaacagaagacagatgagagaacaaaaactttaaagaactaattaaccgggattcttcaaccacgtgttatcctttcattttttgcccccattacacgttattcatctttttcctttattcctttttttcatctcatgcagtcagggtgctgcaagccaccaacaaa

SEQ ID NO: 3295 - DNA, 628 bp, Glycine max
  Intron number 3 from transcript Glyma02g39130.1 (locus Gly ma02g39130) derived from phytozome v7.0 (chr-ID Gm02; pos 44395687 to 44396314)
tgtttgaacgccagctacgaccatccctaccttcagtaagcctaacttatttgttttttttttttttagtttgctcagtgtcaagaatcgagtttgttgtgtatgtttattttgctgtttgctttgttactatgatgtttatactttacttgtgatgtggtaatacacaccatatattagtttggctctttggtctatctaattaagttagtcagtattgtcaacttttaattacaacattgaaattattctaaagcaaccttgatttgccgagttttatctgttattctttttagttgtttctggcatttgtaggtatttataactatgttgctccttaacattctcacctcaatctacttttgcttcaagagagagtctagtatatccttttagtcttacccagctaaggatctgcgaattatgaactgaactagtgaactatacatgcttcaagttgcaacaattgataaaattctacagacattcttggcattaaggcatctatcattccataatgtttatgtttctatgtctcaggttatttatctcacatcctagtattttggcattctgattgtgatgatttttttttgtttttcttttctacgctagatcaagcccaaat

SEQ ID NO: 3296 - DNA, 5437 bp, Glycine max
  Intron number 11 from transcript Glyma15g12790.1 (locus Gl yma15g12790) derived from phytozome v7.0 (chr-ID Gm15; pos 9463624 to 9469060)
agggccagaatcctcatcaggaccccgtggaaaccgttcttccatcacactgtttcagttaccataggctaggagggggtgagcaacgacgggaggcacaatttctcgggtcgaagaccgtcatactcatcggaagagcttgattccgatggtatcgacggagagtcaataatatctccgtactcgccccggtatgagatccggcgtcaaccaaacaacccacatgatgacccaaaagctgtcgtagatagcggtggcggtccccgcataggcaccggtatacccatcggaagagcaacagacccaccggaagcgaaccactccgacgaccccggcggcaaccctctgaacgtggctcatgtgcagtcgatctcgtgccgggggaggaaagcctcctccgacggagacacggttcctgtcgctaccgacaaaccgaggtcccctttacccaaaggacctacaacaatcgaaaacacagtggatattaaccagggaagctgggtaatactccccaacctcggaaatggctcgcgtatctcgtctgaaagggttatggagcaggaagacaaaggcaagggatcagagacaacaatcaacaatggagaaataaatgtaggtgaggcacaaaaaaggaaacagcaaggggaaattgaatcactgacagagacagttgttcacccagaagctacaataagggaaatagctgttgaggatgtccaatttcaaatgagagttgaccatgtaacttcctctgggccctcccactcacagctgccacctccaattgaaacattgggccctcctcaacattttcgatccagcccatcttatcaagttaaggaccatgaactgctaacaccatcaacaacaaggggaaattgaatcactgacagagacagttgtccacccagaagctacaataagggaaatagctgttgaggatgtccaatttcaaatgagagttgaccatgtaactccctctgggccctcccactcacagctgccacctccaattgaaacactgggccctcctcaacattttcaatccagcccatcttatcaagttaaggaccatgaactactaacaccaccaataggaatccaagacttacaaaatgtcgaggatgggccaaacaatggggtgggccttcctgaatgcaccaccacaaatagctttaatcaaaataatgcaggcccaacgtatcaaacagctgagggtaataagcagtggaaggtgtttattaggagaaaggggtgtaaacagcagatgacccaaaaggaccttactaacggaaaagctacaaagtctatatttttgggaattaaccctcacacagaatccataggaacagccacatcaaaacgatcaaaagaagccaactcacagatacctgtaaaatccattggagctgatgaagggtagattgaagaggcattaacccaatgggagcttgcaaaactcatgggggtgtctacagattcagagcagacaacaatcatccataaaattattgacatggagaccagagacaagaaagaggctgaggatttgggtgacaaaaaacctgcatcatgaatattgtttcctacaatgttagagggcttgggagaaaggtcaaatgggctgctgttcggaggcttgtaagaaaacacaaagtggacatcttgtgtattcaagaaacaaagaaggagcaaatcgataaacctatgtgtcaagccttgtggggagacatggatgttgtttgggaattccaaccagcagtaaatacagcaggaggattattgtgcatatggaacgaacaaactttcaaagtggaaagaagagtaaagggaacaggatacattctattggaaggggtctggacacaaaaaaatcagaggctattcatagtcaatatatattccccctgtgacagccaaaacaaaagagaactatgggaattacttatgcaactgagacaacagatccctgaaggaatgtggtgcttcttgggagatttcaacagcattaggcttccttctgaaagacaaggtgtgtctcacaggggagtggaagtagctagcatcaacgagtttaatgaatgaatatctaaaatgaagcttactgaaattcctagtgtggggaggaaattcacttggttcaaaccaaatggggcttcgaagagtaaactagacagatttctcgcatcccatgagtggctcctaaaatggccagattgcaccacctttgtcttggacaggaacttttctgatcactgtcccattctccttagtgccaccaacactgattaggggccaaaaccttttaaggttttcgactgctggttgaaggataaatcctttgtttggacagtcacaaagtgttggagaaatgcccaaccaaaggggtggggaggttatgttcttaaagaaaaaattaaaaacctcaaggagatattgaagtcgtggaacaaggtgcactacggagacacactcaacaaagagtcggtgacccgcaagaaattgcaggaggaattatgggcagcagcacattcccacgagtccttgatgagacaaaaggcaagaatgagatggattaaagaaggggattgtaactcacgctactttcacttgataatgaatgctagacgtacaaataacgcagttaaaggcataatggctaatgactcatgggtagatgaccctagaagagtgaaagaggaaatctacagattttttgagaacagattcattgaacctgaacaacacaggccaatccttgatggaaccagattctttgggattgatcagcagcaaaatgacatgttggtggcaagcttcactgaggaagaaataagagcggatgtttagaattgtggaagcgaaaaaagcccgggaccggatggtttaaatttcaaatttattaaacagttttgggagatgttaaagcccaaaatcagccgattcattgctgaatttcatgctaatagggtattttcaaggggcaccaatgcatctttcattgctttgatcccaaaggtgaaggatccacatcatcttaatgaatatagacctatctcattaataggctgtgtttataagattgtggctaaactcctagcacatagactgaaggtgtttccaaacataattgatgagaggcagtcagcttttatcactggaagacagctgctgcacagcgttttgatagctaatgaggcggtggaggaagcaaaaaggcggaacaagccatgcctcgtgtttaaagtggaccacgaaaaagcctatgactcggtcttgtggaacttcctatcatatatgatgaagaggctaggattctaccttaagtggattagatggatagagggttgtctcaaatctccatgtttgtcctggtcaacggtagccccacaaatgaattttatccccataaaggcctcagacaaggcgaccctctagcgcctctactcttcaatattgtcgcggaaggactaactggacttatgagagaagcactggacaagagcctctacaacagtctcatggtgggaaaaaacaagataccagtcaacatattacaatatgccgacaacaccattttccttggtgaagccacaatgcagaatgtgatgacaataaaatccatgttgagagtttttgaacttgcgtccggtttaaagatacattttgcaaagagcagctttggggcaataggtaaacctgatcattggcaaaaggaggcggctgaacaccttaattgcagaaatttgattgtccatatacgccagcttgaccaagcattcgacaagatgagctttattcttcgatgttttcttttgaatcaaagattcaagctttgtccataacttatatgcattgatataagttgatacatgctcgaacaagctgtggtcaatatacttacgaatcatagctacagtcttccgattaaggagctcctattctttgtccttcttccccttcggcttattctcatgtgtgattggctcatgcaaatcattgcagtaccgatggtcttctatcattagctttcaatgagaataattttctacgattagcttgaacatatctccatcatgagtgacaactcccttcatcttgaatcacacaggataatagctccctcctaacgaatcgagctttgataccattgttggaaaacaccaacactatttccttctctgtagactcaaaataggcacttagcggaaacgaaaaaaaaaaaaacaagaatagagattagaagaatgacaccaagaatttttaacatgaaaaactctttcaatgtgaaaagtaaaaatcataggatcaaatcagtaaatatctccattattaaaaaataggattacaatgactctctcaatacaaaagaatatctttcaacctcacccaacaaggatgatttataatttctctcaattttcacaaagtgtggtggaaagtagaattctctttctcactatcactcttgctttgcttctctttggatgggatgatccaactcttcacaagcctccctatttataggagaggggtgtgatttccttcaagagtgattggtgaatgttaataaatgagttacattcccaaagcttcttgcaactccaatcttcactctcctaagtggagtgtgtaagtctcaaggtcaaaaaaaccaattccaagtcctaagaaagtattccacaacttcttatgcatgccttggaatgtgctcctcaatttgttatgtatttgaatttgcatgtttacttgaatgtgaaccaaccttaattatggaggaatttccaacaatatgtggtcgttccaatgaaagttgtcaagttctatttttatcttgactattattatgccagaataacacgaaagtgtttttacctcatcataagagtctatatcttactttgtcaatcaaatttattgaaattataataatagtgggtgaaaataatttcaataatttgtttgtatgtaattttcattttttgtattactcggtcataatataagatgttacttagtaatgaaataggatgaaaagccatatgtcattttgatgattttggtctaatggtgacaaagccacggaggtccggttccataattgtttgtccagtgcatgaattgtgaaaaatgagagcttgttatatggaaatatctaaaggtgtttccttccttctatatttgatttattatttttgacaaaatcttgttacttctcaactgccccattgtccacagattttggtgtgaaaattttcttaactgccaaaaatatttccctagttttgggaggcttttctttttggctcatcttacttctcatatgatccttatccgtagatgctggcatatagaagaaattgtttaaggataaacaatagtatagaagatattacatgttactaagaaaatattttgctggtgatgtaggactatc

SEQ ID NO: 3297 - DNA, 1522 bp, Glycine max
  Intron number 4 from transcript Glyma10g43870.1 (locus Gly ma10g43870) derived from phytozome v7.0 (chr-ID Gm10; pos 50422741 to 50424262 reverse strand)
aaggaggtgagttttttagttttatattggaagaaggaaatatattaatacattattcctttcatgtaatcaccagttctaaacattctgctgtctatgcattggcttgatttgcttgcccctccattctagtttagcagtttttgcattatggtaaaatgatacagttgatgcacacctatgatgtttttgaaacccaagatgatttatgtgtgtatataaccttattttgagcaaacattactgggtctatagtcttggcctttgttatgctgagcaaaaagtatatgattctgtaattttttataattgcctttattttgttaaatttacactagaaacattgagaaaaaagttgacatttgtgtatagagctagtggcaagtgatagatggcataaacaaatagaaaaagacacacccacacccatacccacgttcataattatcatgttttttaatagaataaataatatatgcatttctcatttatattgacattgtatcaaaatctaactcttcaataaatgcatgttgccaaatctttatgtctttgccatgtcttgttaattttcccttctaaagcacaaatcccgtgtgcacccataagacaaaaggagaaatgtcgagggagctgttgaatcttattatcatcttgccctcctccgttgtctttcttctctatgtacatttttgttccttagcgataaaggatggtagcatcgaagccaacaactttattgcttggaactataagttttaacttgcaatatggaaattgtgaagcttgaaacagaacctgaagttgttaaaatggttctctgaaactctgctaccacttccttggttggtatcgtaattctgctttatatgcaaattgctgaatattaagattacccactggaacccagtttgaattctcagtgctccattaatcagatgtattaattagtgttttggcgaagtgtgcaagaacaactacaataaagtcttatctcattaggtgaggtaagctacatggatcacatgtcgccattcagcttggttaaataccagagctttaggcatattatttaccatgagatctcacttgacaacttcttccaaagtccttggtctcctcctccaaagtgtgcaagaacattactgaaaaattattacagtttttagcagcaaatagacacaatttttctgaaaatatacaagctgaaaattggaatatatttttattagttttcacttagggcaattgaatttggagaagaatctttgacatatttttcagtctccatactcacaattctggtcatcttccagccaactactaggccacaagataatgcactgtcctattagatccatttggattgcattgctgtggataaaaaaatatttaattttttgcactgactacttgtccttcttattgatctttattggcatcagtcatagaagtttttttctagattttgtttgtcagtttggttcaataatcttgtcagattccttaacctcctttgcag

SEQ ID NO: 3298 - DNA, 3623 bp, Glycine max
  Intron number 2 from transcript Glyma09g24630.1 (locus Gly ma09g24630) derived from phytozome v7.0 (chr-ID Gm09; pos 30420288 to 30423910 reverse strand)
attctgtgaaagacttggtgtaccaaaacttccaggtaaacatgtaactatgctactatgatattgcttttatgatgttcattgttaatgttttgctcaatgatgacctagtgatatatagggatgtatcatgtaaattctatggtatgtgtaaggccccaggaattggttattccaatctaactcagtcatgggccttcggtttgtaagtcatatatcagaagaaataagaagaaatgcaggggagtgaaatgggatatacaagtggaaattagcaaggtttttaaaatcgaaccagtgaagatactgattcaaggtttaacaattcaactgtaattggaacgtggtcaaaccgattttaataaaatatatttttttaaaattcagtatatacaaccttaagttataatttaaaatatattattatcatctatttattaaaattatcatacataatttaatacatataatatatcaaatgttaccttatgtacatgtatcaatgttgttaatggcggatggcggttcatggccgaaagccaaaaatctgccataaaaatatagcggatgacgtaacggtaaatggcggacgtcatggcggaccaaaaatatatatatatatatatatatatatatatatataaatatttatatatacatataaatattaacaaaacaatatatatctagaagagggctgaacagaaagaaaaaaaaaaacagaaccaaaaataaaaaatgggtgtcaaacagaaaaaaaaaaaagccgaaccaaatataaaaaacgggtgtcaaacagaaaaaaataacagaacaaagaaacaacaaaaaaaaaaaaaaacagaaccagtcgcatactttcgccgttgccgtccgttcgtcgtttgcgtggtgcgtcgtgctcgcgtgtgtggtgcagggtgctcgcgtgcggggtgctgcgtacctggtgcgtgttgctgctgctgtcgtcgtgctggagactggagttcgccgtcgccgtcgtcaaacgtgccgccatcgcactggagctcgcgtggtgccgctggagttcacttgtttctgtttgtgctctcgctctttgtctccttttgcatgcgaaaatcgagttagggttgggtcgggtcggcccaatacgacgcgttgcgaaaatttcaaaaaaaaaaagctctcttccgccataaccgccattccgcaacaaccgctatggctatggcggccgccatacaaaacccgcaacgccaccgctatttggtggtgttttttcgaaaacctgcgacaccataccgccatggcgccaccataaccactttttaacaacactgacatgtatgataaattgtttgcttgttattttttcaaactatttagtattttaaaagaataaattaattaaattattcttaaaaaataatttatttatgtatactataataatgtctttgtacctgtggttgcttcattaaagtaaaattcacactcatagaataagaatagagccacgagctttattgtttggacagtgagcaaattaaatttaaattttacttgggcagtgggcatttcaacgttttaaagttaaactcttggttagctagaagataatccttccacgacctttcatttcagattggtcttccctttcactttcaagtttcttttgaagttggaaaatgcaagactggcggtgaagctgtgctcaccttcagctttcactcttgttcttcttcacgaaccttccatcttcagctcaccattcttactccttttcattgcaaatttttggctcacattcatctcttcactgcaaatctttgtttggttcacattcttcttctctgcaaaaacttttgacccttttttttttcttaaaaaaaatgccttttcacgaaaccggtgcaaaccatacaaaccgccagtttgcactggttcttcactggtttgtgaacaaagcggttttaaggaacatccggacaggttcaacctaccttgagaaccttggaaattagagataccatatgtatcaccttaatatgaattaggaagacaggtagtggagtgacaggagttagttcttgtgcttttctataagtaatgtgagttggacttagctctgtgtaggggtgttcgtgggccggttttagtcaaactcaggacctaactcaatcaaatttgatcggtttggtttggttcaattttcacaattttttttattttgaaatccaacccaacccattcatgagcagtttggttcggttcgggctcacgggttaccaatttaaattttgatctttttttttcttcttaaaatcattttttatattatgattcatttaaatatccaatacaattaacacactattatcaaatgtataaaagtagtaaattgattcatttaatatcatcaacataatattctaaaatagactaatataaattaaaacaaaatattcttcaacgagatttataatagtatgaatcacaattattccctacaaactaatttctagcaataagctttgttgcgactagattttctacaatcagacttgttgcaactagatttgttgaaacaaatgaacaaaatatgatccattagtattataaacatgacagaaaaagtaaatatggaaaaaatggtgaaacaaataacaatgtatctaaaagtaatacattaagaagtttcaacactagtattcccaatacttgcaattccaacacttaagtcttactattaacaatatttaaagtcaaaccaaacaaatctaaaaaatttgatcggctcaattcggttttgattggatttataaatctaaacccataactcaacctgtacatgaacggttttgatcgttttcggttttgatcggtttggttccattttgacccaaatacataaatgactcaaacccaaactgtttggatcggttttgatcaattcgggttcgtgggtgacccgtatccatgaacatccctgtgggtattgcagaattcatctctgtaatacattgtttctgaatacagttttttccatcttttactgatttcggacagcatgctagattttacctgtgaagtttctctgtttgagatattgtttctcccagtcaactttgatacttatctttgaggaaacccaattcctgttagatagttatatgctcattatcatactgtaacccaagttccattctattggctttcttactaattttgtatggtagaagaacatatctatttagatcaatatgcattttattttaagaaaaaatgttgttggcttggatttcaagtgtgtcatttgaatatagggagtggaagttgtaaaatgatatagttaaggcaattagtgttatagggaagggtgatagatatgcttatacctgaaaaatgaacttggtagtttcagaagtacttgcacttgcacccaatgtaattgggttttagggtatataagataatttcccacttcttgttttaaatttatatgctaacttgctaagtgaaggaggtttaagcattgatccatccaacttgtgaattattgcttctgtacattacttttctgtttccactgtgtattcttacaacttccatgacaggttgggttaataggtttgcca

SEQ ID NO: 3299 - DNA, 1329 bp, Glycine max
  Intron number 7 from transcript Glyma19g34420.2 (locus Gly ma19g34420) derived from phytozome v7.0 (chr-ID Gm19; pos 42013918 to 42015246 reverse strand)
ccaaggtaaatgcattttttaaatggattagccttttatttttcacctttgattcaggtgttttttgcttttggctaatgttgaaccctgatgcaactgcttagaaataaaactgatagtagcaaattcaatattaacaaatttagccatcaattttttttcaagttagtcccttagtggatactttttggacagttgatgtccctcaagtctcctccttatcagccaaaactgtatctacactaaattgcagtacatgtcttcaattttttatgttgtaaaaaccattggagtgggtggctataggacatgcaaaaaggatgcaggattctaactccaatttgatctctttcttatccttccttgaccccacttattcttggcatttgattttgaaatatgcctgattacattgtaaaagctatcttagttgcagctcttggcgctgcagaagttaatgaagaattaagaagtcaaaccagtaaaaacacgagaggatatatgatctttcataatggaataacacttataaatcaaacttcctttaaaatacttccctttttcaacattcaacaccttagtttctgtactgctctttaaaactgagtttatgtattttgcttacaaaaaacatttccaataacatcacatccatcattaactaatgaagaaactttgattttctagtgaggaggagttctttctactttattagcttctcagcactttatagaagtgtctatcttgtaacttatacaagagatgcagtgagaagaaagatgggattccctaataagtaactcattcctgtgagaatgcagtctggtgttctgtacccacatcaaaccctgtcactttatgtttagttgatgaggactggattccttttatttatgaaaaatgctagcaatacactctttaatgcactattttaaacacactctgttattgactgaaatttattagcaatcatgaaattaaattgtgtggctctcacaccttgtttaatgaaaactcgctattgcttttgtagtttccaatcaattttaaccaatagtataaagtgtgttaaaaatagtgtattatagagtatgttgttagcattcctttatatttatatacaacataaatataatggcatcaattgatccatttagtacatttcacctaataaaacaagacttgattgtgatgttataacgatttatttattggagtttgtgagaaagttcttattgaatatgaagataatagttaagtctgtgtatagtgacaaaaaaagtgtgacaatgacttttaaattgcagaaaaaggagaaacttgttttcc

SEQ ID NO: 3300 - DNA, 1877 bp, Glycine max
  Intron number 2 from transcript Glyma01g01970.1 (locus Gly ma01g01970) derived from phytozome v7.0 (chr-ID Gm01; pos 1534011 to 1535887)
acgttcgcggatccacctcgtatcacatcgaggtggtttgtatattaatcacttaatgatctctctttttatgatatcttctgagtttcttagaatattttagaaaactattttggtactttttggtttcagttgattaaaacatgtgaccctaaatcttatttgatccttgcattaagttaattgatgctacctacttcagttgatggcttgatgctcagatccttgatttcatcatggtgtgaaatatcagtatttgtgtgtgttttcccatgatatgtatgcaattatacatttggcatcataagggaagctcactcaaggttccccaccctgttagattagggaggatacatgtgcacagccttaattcaaggtggagaggctgtttccatgaacctgtgacttctgactcacaaggtagcaaccttactgttgtgcctaggcttgcccttggccttgatattaaaaaaatgtatactctctgaatcctaaatcacatttataatcatcaactcagggatttttcacaaccccctggtttttagcttatttttgtatgcttttgcctattccttcactttatttgatgaacatatgaacaaacagaactcaactgagtgcctttggctctaccaactaatatatttattatatgatctagtaatgaattcttgaaagcagttactttcttggtacatggttgaaatctggtttggattatagatggttgtctacatgtgctgtgatatttacttaaaactcatctgttcatatcaaaattctgtgcaataaaaacttttgatgggaatctgataataactgtcatgactcatgagtactcactagttgttagaactgagtccaaacaaaaatctgtagcaggaaagagtttgggtttgcaggtttattataggaagaggaaagggtcaaaaagttgtaacaaacacttagagggataggagagttagttagttctgttatttggagagagttagttagttctgttatttggagaattataactcctataaataagagtcctctcttcagtaagagggggattggaaatatacagttactgggctattgccagtgtaaacggagaaagctcctttggaggtatactcgtataccttggctcttggtttgttctctctatttcagcaataagaaagctattccagtttttccccgttgtgtgtgattttctcttgtgggttctatttttcctactttagaaagaagttcctaatactagtcatgtattattagatttaagtgtaataataacggccagttaaggatagaagttgggacttgggagcagtaaaggattattagaatatgtgatagaaaatagcttgtcttgcattagttgttcagtattagttctgtattagaatttgaagctccctttagaaagtttttcatagaaaataaccccgatgacagttatgtattagggtatagttgctagtccgggtgtgtaattaagaaaaggttaatgttatttgtagtttgtggacagagaacattctctacaagaatcttttatctatggaacaacaattgtattgcaatatcgtgtgtgatttctgttttgaattatattttattagtttatgtttatcaattggtgttctatcagctttcaagtttggtttgcatgtttacgataacattgcattttcactatgccctgccttttccttatttgctgatttctttgacataagtagaatggtatgtagtaagtatagctctttttatggtcctcacatcatggtttgcctggttgagcattagtttcctttgtttctgtcgaacattctgctgcaggtggtcatctctataggcccacagaaatttcaaag

SEQ ID NO: 3301 - DNA, 1081 bp, Glycine max
  Intron number 20 from transcript Glyma20g12070.2 (locus Gl yma20g12070) derived from phytozome v7.0 (chr-ID Gm20; pos 16971838 to 16972918 reverse strand)
atagtgagtatcccagctatttaatatatatgtttctgtactgtttttctcgttttgaagttgcatgattgtggcttgtgtggctatctagttggcttttgtatcccttcttgacctttgtccgaagtatgcaagccttttcttatagaaatctatctttctttatctttttttaattccacttgtttgtaactgattttttattgctgatagtctgatagttaaagagaatatttactttgattctagttttttttttggtcagcatttactttgattctagtattccacttgtttgtaactgatttttttattgctgatagtctgatagataaagagaatctttactttgattctagttatttaaagaggtagtgtggaataaaggttggggattcttattttcattttattaaaatagagaaaactagttacagttgaagtatcttctatgaaatggtagttggttgcattactccattttttctgtaaactgaggaattcttccaacgtcaagtttcatttgcattgttattttgatctgagttgagtgcagtattatttctgctgcatcgggcttctaccatacatctttgtacatatttttagttgaactcaattttttttttgttgacgttgaataggatgtttgtaaacgttgttccccccgccccagaatgatctccctttgtacatttgattttgatataatcaactggtgtgtaaaggtccttttttgttttttctgccgtttcctctatgcattgcctggtcttgcaggcatttagggagttgtgaaaaaggtgccccttcacctgccctcaattactgtgttagtgttgtttataaagctgttgtacttgaactacttaatgccaattggttgttaagattacagacatggagggctatatttgattcctctttccacatgtatttataacctataaattaaattaaatgtaggtggacctagttgtgtgtggggaaaggtttttaaaattaaaaactttattaacatttgttttatattctccctctaattgtggtgcccagggaactagtaggcctacccattatc

SEQ ID NO: 3302 - DNA, 2569 bp, Glycine max
  Intron number 6 from transcript Glyma01g09660.1 (locus Gly ma01g09660) derived from phytozome v7.0 (chr-ID Gm01; pos 11999909 to 12002477)
tttgaggtttggttccttgttatattttatattttgattgaacctgattgtccattcaatttgtgatagcaaatttacttataagaatatagttgaattaaaatatgggagaaagataaataggacattgagtagttgattacttgatttagattggtatgccatgtttagacacaaaccataacattatttatacaattgatttaggtcaagtacaagtgtagaacaatcagtgttataaaataatcgttatgacaccatcatggcgctataacggggctttttggacccctccaccatttgccattcattattttcaattgtatggtgttgtctaccatatctgacatggtgcctgccatgccatgtcactgtgttggagcttcccctgtgtgaataagttatgctgtgtttagacacaaaccataagatgtttttataaaattgatttaggtcaagtacaagtgtagaacaaccaatgttattaaataattgttatggcgccatcataacactataacatgacgtttttggtcccttccaccatttaccatccgttattttccatagcatggtgctgactgccatatcagccatggtgcctgctatgccacagtgtcccccctgcccccatcttttgtttttttttttttttggatttcatttttcaaaaaacccttttatgggttgctttgtacttgaagcatattgaaccaccatttcaatatgtgtatcgctctttctctcttgtcagtctcgtgaaagtgtaaacctagggttttagttgtcttctctcttgtgaacctcctaagctttagccaagcactcagttcttctctgttctttcaaaatttcagagtttagttctctgttttgtagaatttcagaatttagttctctggtttttagaatttcagaatttacttctctgttttttagaatatcagaatcatgttgttctatgcttttatttattaaaccaattctttttcactttttggacaatgatatgcacccaaaatcagattcttttgagacttgtgatttcttggattttttagtctatgattgcgttgtttttaatttaatttttgtttttttagtttttatacatactcacacatatatgatttttttagactcacgtctgtaggctgccatccgctattgataacctttagtacaactagtacaagcccaacctaataaaattggtaacaaaagaaatctcctacatgaataacgtgattttctaaatgatgtctgtaaggatatttaaaagggaagtttataaaaaaagatatttaatagagaatgatgcataacgtggttattgaatcgcataacaaggccatattgtcagattcgtattgtttgagaacttagttgtatgacttgcacgatgaatttcaaattgtgtgatttgtataactactaacataaataaccttgacaaggaaatttagtagggaagtttataaaaaataactagtagaagatgatgcatattagaacagttgtatgtaattggctccaagtaactacgagagttttgttttacagacagtatggaaatttgatctgtgcagcaggatttaagtagctaaaacacaccttgctggttgtggaagttcaacaccttttgatctgtttctgttggtaattcttttaaattagctcaacaccttttgtggatttgactgttttaaaaaatatgattaagagtaacaacattttggatgttaggatagatttgctccttcatgtaggtgctggggctgataatactaggaactatatgaagctaaacatcttttgaagtttgaaatcagctctttcgaattttgttttcatttttctttcctaacctctctttattcacttgcatatgacattaataactttttagaatgttgaaaacaaagttaatttacatctgaaaaagactattactggagtggaggaggagatgtacttttgatcttcacaagaaaggatgaagtaattttatagaaagtcagtgccaataaatagagaattatgctttgaaattctttgtattacactccaaaaaggtgcactagattattgtgtacagaatagatcgccacatcatttattgcccctcctaaacactctaaactgctacgtttgttgatgaatgacagtagtttggaattctgttttgatgcttgaacattttcaattctgctgtttctccaatgttgggtttattaagctacaagtttgtagtagaaatacttctgtggaaataatgtaagatttgtttttcatttttgcactttagaatttaaaaggctcatagtttgttggttggtgatttcctctttcatttctttttggaccacaataatacgcattttcttgccttgatatgctattaagatctcatactttggtgttttgtgcattatatatatatatatatatatatatatatatatatatatatatatatatatatatataccaattctccatacacgatttgaagagaatgaactttttacatggtgttaactaattgatgtcttgtaacttttcagga

SEQ ID NO: 3303 - DNA, 1807 bp, Glycine max
  Intron number 2 from transcript Glyma12g34800.1 (locus Gly ma12g34800) derived from phytozome v7.0 (chr-ID Gm12; pos 37944637 to 37946443)
ggagttctaaacacggcttctggtgctaccaatatgtaagtaacgaattgccttcacagtgatgaccgatgagaggtagataatggattttactttactgcccctgtagagagattaatcactgtctggttttgaagctttggtcattggtggaccttgcgaatgttgccaaaatttcaattaagtgtttgtttcaattacttggaaaagtggattctaaaagcatccacttggtgcactgtaaggtgaagctttgttaatattggccgtgcaattagggtttcatttcaactttataaatacaaattcaattcagtgttatgtattataattttattaaggaagggaataatggatagctctggaatgtttttgaagtaattttttgaaaaatggagattttatcatccatagactatggaatctggaagatagaagtatcaaatctgatctagttacttagcaagagaggtgcctgtttgttaggttgagggtgtttacgaagttaagcgggttaggttgaaattttatctactaacaattggtatttgacttgattattgttacaagaaaggcataacattgcatgtttaatcagtaatagagactttagagatgaaaattttcagaatatcagaagaaaataaattggatagttataaaatgaaaaggtaatgaactgaaagtaccacatttagtcctctccactttgggaggagagagaaagccaagaggaatatttaatggtcttagtagcaaaattcgtttccatttttcctcttgtttctttctacaatcacagcacattggattttttagttacattttctctcatctggacagggtatacttggttttagtgagagttggtgggggaaaataggctaggcatgtcaggttgtaatagttgtcagctctgaagggtctttgttcattttctttctgaacatgatagggtttggtggactctgagttgaattccatatcttctcatttccagcagttcatataatgcagtttccttcttgcatataccatttatttgtaatgtatcaaactcaaggcaacatgtgctgccttcccctctattttattatagctgcaagaacatagatgtttgtgaattgtgagtacatagatgaacacatcttgtttttctgttgctaaattacttttataattgtcttctatattaatcattagaaaatgaatcatttactaatggaaaatatgtggttagtgatttcaatgctttgttcaacaaaacagtgtaagttctaaacttcatgccagtttggtgcattgatggattgtgtatattgcttaacgttgtgtgactgatgttttctgagagtcttgccaactgttctaagaacaatgcttaagaagcatgtagtagattttattagctctcgattacttaaaaaaagtaagtattaaatgatttgtgctttaagtataataaatgttttttttttccattaactgtttctatttttgtttccttaaccagtgtcataaaagcatttgttaacattctcctttctttgatatttctgctctgttggctcccgttttgatgtgggtcatgtgttaattgttacctatgtcctcaagtatggtagagatcttaactcgataaaacagttttatacctcgagagtgaatttatttacatgcaagattaattctctctaaccattaggactgcattctatttgctttcttatatagaagtgtctgctcctttaatatctacttgttctaaactgctaccttttaacttgacattttgtaaaacaggaag

SEQ ID NO: 3304 - DNA, 827 bp, Glycine max
  Intron number 21 from transcript Glyma20g32430.1 (locus Gl yma20g32430) derived from phytozome v7.0 (chr-ID Gm20; pos 41031311 to 41032137)
ctgaagcagtcggtccaggattcatttttgaaagagtaagtatggttgccctttattagcaaatcttctaattgttagggataaccgcacaagtgcaacctagcttgtgttgtgaatcgttaaaatctatgccctgggaaggacatgcttgatattttatttttgttggaagagtcatatggtaaaattatgattatttagctactcattttgtgttgtcactgttttaaataattgaattgcatttccactgttgaatgtcatttttttgcactgtttttgattatccattgctaactatctgaagattatgaggtggaaacttgcctcaaatctatgtggctttgaaaaagatggttggcataacaaacatattgtagcatatacatttttatttaataagtttttggctatttatataatcaggtaaattgtatatttcattgtagaatcataatttcttactaaaattagtgagtaaaaaaaatctttttatgaaacttgacaaaaagttcgtcagggtaaaaaataatatagcggtaatatttttttggatattctgtgtttgtgattttgtagcataatcaaaatagtaattgggcttagctgaataaaagttctaaaataggctttgtgtaagtgtttaaattttgtaggtaattcctgctattaggttaatgcctatgttggaattcatataaaattcaggttgtaccttttggctgtataatatttttgtttatctttatgtattatcaaataatgtttgaaaaactctaaattttactgtagctttacaagatcttgaaggagcataagaatcctaa

SEQ ID NO: 3305 - DNA, 6110 bp, Glycine max
  Intron number 7 from transcript Glyma10g31180.1 (locus Gly ma10g31180) derived from phytozome v7.0 (chr-ID Gm10; pos 39724037 to 39730146)
tcgggaaggtatgcttatagtggctatgtatttttagttttcttattcttaaagatgttgtctttattaataaagaatttaaaatttcatttaatcaaccttaaggggttggttgagtgaagcaacacatggtgtgcatgtgttgcatttcactagtcataattttgaacctgcacttatctccatggagtgaagtgtaaatcttccataagtattctttgaactcaaaagctttccctacgttggattggggcaccatctccttaacctaaaaattttgtaccccctaaaaaaatgtcatcccatcttctgggtgaaatgtaaggagatctgaggcatgtatcctacagttgtactaaaatttcagctcaaagaagaattttaggatattagagtataggagcagaattactccttttctgtcttttaactattgatagttatgttaaatgagttagttactcaactaaccttaggatcgctgacagtgtttagttgacagttactattgttagttgtaacaacctttagctctagtataaatacgagagatgtgttacttttagttgagttagttaatatcaaaaactccatttctgagtttaagctttttctctcatttcaattctgaaatccttttatggtatcatagagcttgttcgatccttgtgttgttaacaatgtcttcggcaaataattttcaacctcctccttctcctccactgccaagttcttcagctccagtggcggattcttctattccggtgactatggcttcaacactggcgatggcagttcctcaactgtttccagcgacggcggttcagtaaccgtttctaacggtgactcagccttttctgacgacgacagagtttccaacgatgactccagtgtttgcaacaccgtttcagtcgatccctactccaacagcggcaattactccgacggcagcgattccagaagcctcaacgtctttgtcttcgcagccttactctttctcacatgcgatctcggcaaaacttacaaacttgaactaattgttgtggtgtctgcaagttgaaactgtattgaaaggtcatcgtcttcatcactttctggtaaatcctactattcctccgcgtttcagaaccctagcagatcacgatcttggaatctcttctccggagtaccttgcttgggaatcacaggatcagttgctgctgtcctgtcttcaagcaacaatctctcctgaggacttcctaggcttcttggatgtcgcacctcgtggcatttgtgggataggctacattctcactttcattttttaattcgtgcaaaaacttgtaaactgagaactgagcttcgtagtatgcagttgcaaaataagtctatatctgagtacttgctacaaattcagactattgtttattcacttggttcaattggagtcacaatttctcctgatgagcgacttgatgttattcttgaggggctacccagggattatgagtccactatgccactaatctgcagtaagtttgaaccactttccattgatgaggttgcgatgttactgctaggtcatgaagctaggcttaataggtttcagaaacttgactcccaaatcagtgttaacttgactcaaggggcttctactaactctgctgttaatttctcccaaggagcttcaacttctaacagttctgcctatgtccaaccagttcaagtgctacaaaatttgccaagttcctccagtggtagctcaagcactcaaactgttaatgctcaagctcacctcactcaagggaattataataattccaatgtttcgaacaatggaagcaatgcaaacaatggtaacagattttttaattctggtagaggtggacgtggctatggaggttgcaatggagggagaagcaatgccagtagaggagatggctgtggtgatggtaggtttgcaaatgttcagtgccaagtttgtcacaaatttggtcatgaggcttcattttgctaccatcgctatgaagtttttattatgttgctacacagcccatggtttatgaaaacacaaaccacgtcttcagttcagcaaccttccactcagcaagctgtaacacaacaacttccctctgctcagcaatacatgcctatcatgtccttttccttactactgtcctcaaatgccatatgtgcatgatgctggagttcaagcaactcttcctcctcaagcccctcctcaagctaaccttgctactgctggttcagctccttcaaacagttggtatccagattctggtgcctcccatcatgtcactaatgtttctcaaaacagtcagctgttgacaccatttgaaggtccagatcaaataaccattggtaatgggcagggtattgatattaattccacaagtctaaccttatttccatctcctttaaaccctaagttttctctcattcttaataattttctctttgttccttcaattactaaaaatctgattagtgtgagtcagttttgtaaggacaatttggtctattttgagtttcaccctaccttctgtttggtgagaacacaggtttctaaagaagttcttctcaagggcttggtgggacaagatggtctctaccaatttcctgacttgcttcaacttcccaagtcaaagtcttacactactgtttactcaagttctagttctgattctgtaaatagtactcagaataatacttctgttggcacttctgccacttgtaaacctttttctgctgccacttggcatgctagactaggacaccctagtgttgatgtcttgagacatgtatcccaaatctgtaaaatttcaacaatcaataagaatatctcagatttcttttcccatttctgtcttggcaagtcacatagactgccttctccttccctatctgcctattctagtccttttgaacttgttttcactgacctgtggggccctgcaccatttttatcgagtactggtaccaagtattatgtttcttttgttgatgctaataccagatttacctggatttatctacttaacaacaagtcataaactctggatgtgtttaagcagtttaaggctatggtgaatactcagtttaactttcctattgaagctgtgaaatctgactggggtggtgaattcagaccctttactaagtttctgagtgatttgggcattcagcacagattaatatgccctcatacccatcaccaaaatggggtgatagaaagaaaacacaggcacatagttgatatggggttggcactgttatctcaggctgctatgcctcttcattattggggtcaggcctttctaactgcagtatactagatcaacagacttccatctacatccatccaaaatgaggttccttttcagcaattgtttcacaaaacaccagattatttttttctcagaatatttgggtgtgtttgtttccctcttctaagaccctgcaacatccataaacatcaatacacatcacaagaatgtgttttcttgggctactcttactcacacaaaggttacaaatgtctagcatctgatggcagaatttacatctcaaaggatgtactgtgtaatgagtcaaaatttccctatcctaccctattttcttcaaagcctaaccctattattgctgaccaatcaaatccaactcctctcacagttttaccaactatccctgcttcttctgttgtttctcaaccttatccctatccactgcttctatacaacagcagcaatcttcttatcatcccacacctgaacctagcctttcttctcctaccacaactgcttctgtttcacagctgcattcccctacacctacactccctctgatcctgttatccccacttctcaaaacttaccacctgaccctccctccccaattcctgaacctttacagcctgcttccccacctcaaccctccttatctagaccagaaaatactcatcccatgtgtacaagggccaagtctggaatagtaaaacccagacttaaccctacactgctgttgactcatgctgaacccaaatctgttaaaactgacatctcaaatcccacatggtttgcagccatgcagtctgaatatgatgctttaatagaaatggaacttggactttggttgagcttccttctgacaagatagctattggatgtaagtgggtctttcggttaaaacaaaatccagacggttctgtcaacaaatacaaggcatgcctggttgccaagggttttcatcagaggcttggtcatgattataatgaaaacttttctcccgtgataaaacctgtcactgtaaggattattcttactcttgctatctccaataaatggccccttcaacagctggatgtcaacaatgccttcctcaatgttgtgctggaagaggaagtgtacatgcaacaaccctctagttttgaaaattctaacaaacagctggtttgtagactgaataaggcaatctatgggcttaagcaagcacctagagcatggtatgataaacttaaacacactttgctgcagtttcagtttgttcccagcaagtgtgatccttctctatttgtctattctaaggcaggttctatggtttacatcctcatctatgtggatgatattataatcacagggagtgactctaaactcattagaacactggtttctcagttaaatagtgtttcttctttaaaagatcttggggatttggattacttcctagggattgaagtactcatcaggctgatggctctcttactctcactcaatccaagtatctcagggatctactagccaaaacaaatatggatgaagctaatctcattgcacctcccatggttggagggtgcaaactatccaagtcaggttcagaaaggttctcagatcctactctttatagatcagtggttggtgcacttcagtatgccactatcacaagaccagaaatcagtttttctgtaaataaagtatgtctgtttatgtccaatccttcagagcagcattggcaggctgttaagaggattctgcgatatttgaatggttccattaccctgggattaaggctacaggcttctaaatcatccagtttttctgttcaagcatactgtgatactgactgggcttcagacccagatgacagaaggtcaacctcaggagtagctgtttgcttaggcccaaaactggtgtcctggtggtctaagaagcagaaggttgtgactagatcaagtactgaggcagagtatagaagcctggctcttgcctatgctgaagtaacttggattcagactttgctgtctgaattacatgtgagacactctactccagtggtgttctgtgataataagagcacagtttccttggctcataatcctgttctgcactccagaaccaagcacatggaactgaacttattttttgtacgagaaaaagtcatggagaaaagccttcaagtgattcatgttcctgccattgatcaatatgcagatattctcaccaaatctctctccccttccaacttcactatctttagggacaggctcagagttgttgacaaacactttgtcaacccctcgtgagcttgccggggggtattagattataggagcagaattactccttttctgtcttttaactattgatagttatgttaactgagttagtttctcaactaaccttaggttagttgacagtggttagttgacaattactattgttagttgtaacaacctttagctctagtataaatactagagatgtaactactttcagttgagttagttaatatcaaaaactccatttctgagtttaagctttttctctcttttcgattctgaaatccttttataggagagtagttgatgggtaacccgccttgccattatatgtagaagatctggttccacaatacataatcatttttttaaaatttatttttcttatattttgttgcccctgttgagaccaagaactttgttactaaagataaccatcatggtattgccttctctctggagttcaatttatagttcataaaatcttatgaccaaaattctcttggaatgctttgcctcaacctagttgtcatttttaaattcaggaagaattgttgaa

SEQ ID NO: 3306 - DNA, 2159 bp, Glycine max
  Intron number 1 from transcript Glyma20g04230.1 (locus Gly ma20g04230) derived from phytozome v7.0 (chr-ID Gm20; pos 4292225 to 4294383 reverse strand)
aagcagaatcaacaacaacctccgcaagaccaaaagtgagaaccctagtttttttttttaatcactgtgactagctcaagtttttgtcataataattggaattggaaaagagagtgttttcttaattggataattggattcacagctctgtctctgttcaattgatttaatttgccatatggatgtgttatatcagttgcttattactgtctaccaaggggttctggctcgtttagttgagtagtgtgcctgagttattgcaaatttcatagtatctgatttcgattcttacttaaaaagttgctgttttactgtctagttacttgttcatgtcatagtaacaagactgcaagagtgtgtgatcaaggttttaaattgcagttttgtcggtgttttttctgtggtccttgatattgtgcgaaattgtggttgcggtggtgactccagaaaccttgatgttgtgactgtttttaaaattgtgtgtgatctatgcatgtctaactctaggatagaaaaatattcagttactgaatgtgatctatgctagtagtgaataagaaatgagacttagcttgatttgcgaaacttaagtgctagaaagaaatagtagtgaataagaaatgagaaatagcgtgagttcatgattctcaattaagagttagtttggataaattgtaagagatgaaaatagagaggaaaatgaattttttttttctccataagttataaatagatcatgtgtcttggcaaggttttaaattgcggttgtgatttcatgcaatccttgatgctgttgggaaactgctgacaattgtgatgtggtcacttaaaaatattgacattgcagttgagatcacagtcgcacgcagatcgtgttttaaaatcttgtatcttagctttttgagatggaagatgagagagctcttaaaaaggttgagacttgagatggatattaacttaaaagaaaaaatgatttgttttatcgtcttatttttttttcttataagtacttcttaggaagcttatctagctcaactcatttaacttctacaacaaagtagaggtgtattagttgattttagtgtatgaaagaagtttggttcattttacttgttttttttcttcttacaagtgttttctgataggtttgtccaactctagctactatattcagatgctgtttcctgtagattctgcaagttgaagtctcttttattctttttctattccttcaatggcagcatttatactttactctgtatttcagttatattttcatttccgtttgaaataaataaatataccgtactgcttgtgttaatgccagtaacatgtagcctgtttattttaccccaaaaatcatcttatgggccatataacatggtttatacagtacttctgcaaaaattgagtttgtgaaaccaattccgtagtagaattgatttgaacttttgaaggaaagtaaaatcttttagctttttttgttgagtataattcttgaaacatgcctatattttccctttaaagttgatttactttatcctccaaacaaaatattttcaaattcaattttaacatatgattctcaaatgcaaacaaaattttgtaattgaaatctattgtttcaatgttaatgcctctaaaatgttaacaatattttagctatcctattgatttgaacttttgaaggaaagtaaaatcttttagctttttttgttgagtataattcttaaaacatgcctatattttccctttaaagttgatttactttatcctccaaacaaaatatttttcaattcaattttaacatacgattcttaaatgcaaataaaattttgtaattgaaatctattgtttcaatgttaatgcctctaaaatgttaacaatatttagctatccaatgatccataagtcagtggaaggttttgcattagccattcacatactattggtaggaattttgaggatgaaaatattatgtttgaggtactgaccttagaagtggatgaagtatgaagtgttgaagctctcggatatttgaattatggatcttctatggtgaaattttgaagtattaaagcagtgcatggatactcattcttattactgcaaattcattctcagggccgagaaggttgttgaggaagtagccatcattg

SEQ ID NO: 3307 - DNA, 3651 bp, Glycine max
  Intron number 1 from transcript Glyma19g05360.1 (locus Gly ma19g05360) derived from phytozome v7.0 (chr-ID Gm19; pos 5790331 to 5793981 reverse strand)
aaaagcaacgggagttgggttccaacggaattgtacgtacggttaatgaaaaattcaagctttttagttgggtattattgttttgttagcacagttactgttctccctctattgggttttgtgcttaatgttgatttgaaaaaaaaattgaaatttagagaaaatgtgtcttttgactttgattttgtttttgatttcttagtcatctgatatttgtcggttgtggactaagttttaattcatttgatatttgaagtgaatattttggttaatgatgtggaatttgtttcattttagatcatttgtgtgataccagattatgagattgaataagacaaaatgaatgtgagtgctccctgctcccctggtgcttgggtgggaatatatgagcgtgcgttggtgtgttttttgtttgagcaatttgtgaaagaaaaataagaaagggagaatcaatgtaaactgtgtaaattaacggatcactgtagtttatgaatattggtaccatattccttttttttttttggagtagatgagaaagctcaaaaggtatttttctgtgtgtttgttgaaaccaagtacttttcttttacataattggtgtaatcgtcaaattttccttctaacttgacctaaattttgttactttctgaaactgaagaatatgaaagagggcaaaagttttttattttttatttttatttgtaccaatcatatttggaggggcatggatttttagaatggaaccttaaggttagtactttagttcataataggattgaaattaacaggtctgtttgtgttttttgctactctagatacattcaattctgtttttttaggccagtgctgagtttctagccttcatggttgcaatttttaccggtgtactaattttgccgtgtttagcaatgagataagctttaccatcctctcttctatcatggttttttgcctataataaggtgtaaaccacctaaccatctcataattatttctggttattaggattggtaagtagttattctatgatttttattttgtccatttgttaagtagaccttgaaaaatttgataaaacacagtaacttacatggctgcagaacatgctattaagtattgtacgtgatgccacaaattttatgttactggattttgatttttgcttttggagaacttttgagaatgaattttgtagttcaatgtattctgtgttagctgacaacactgaatgcttaattagggaataaagggcttagatgtttagaatctattctggcaatctttaaaagtattaccgttggaagaggactccccccgtgcatcagtctatggcatctagtacctgcatcagttttagactagctatgttttagggttctatagttcattaagctcaaatcaatcaaagggacgatgcattgacacctaacttatagacacatatcaaaatgcacatatgcttgacacatggcacaacatcaccacaacatatatcacattcctttgttcttcaatccttggccatttaatgctcattaatcatccaacctgcagtgcacttgatatttgtctgtagctcacactttcatgtatgatttaataattatttattgttttattttgttcttaagtgactttttggcttcttgatgttagagagaacttttttattcttttttttattctctgatagaaactggtagtatattagaggaaataggtaaaattccaggagaaaaattcccattcaactgatcagtataactcagcgtagaaaagaaaaccaaaggacaacaggaatagcaatgcagaaaaaaaagaagaaaatatcacctaggatgcctttccaattcctcaccaaaatttccttttcccccatactttccctacacctctgtccgacaacatgtcctccactatctttcccatcatgccagaatattcctctccaatggacattatgttatgcatcacagctccagcccttgtaattccatgtttagcccatttgttcccagctcatctcctttccttttatccttcctcttataaacataggttaaaggctcacaatatgataacattgtcttattgttgagataaggctgttcattttttcaaaatgggatatttagactgacccatttatttttcaaatgtttttgttttatgtctgattttctaaagtatagatcaactaactaggcagtaaaccacacacccctttcggtccttcacaagtcatgattagcccgtggctgcgtatctaaagtgaacgaaaaatgttggacaagtagcctcagatatcttaagaaggggggggggggggggttgaattaagatatcacagactattccctaattaaaatttctattttaatttaacccaacaaccctagattccttttaaacaagaactcctagataataatgcaaattaatcttactaaatagaaataacaagcaataaacaataaaggagtttaagggaagagaaaatgctaactcagatttatactggttcggtcacacccttgtgcctacgtccagtccccaagcaaacccgcttgagagttccactatcttgcaaaatccctttacaagttctgaaccacacaaggacaaccctttctttgtgttcagatttctttacaacaagagaccctcggtctcttaatccctgttgagaaatagaaagaagagaagaaaaaatctctcttgaaagagatagattgtacaattgagcacacaattaattccttattgaattgcaagtatattggccaaggaattcttaagaggataaaatgattttgctttttgagaggataagattttttgttctgaaaaactctctgcaaaatcgtgttccaagtcacatataaatagacctttgatgaccatgtaaaaaccatttgaaaagttgtgacccttggaaataattttctgaaaatctcctctggtaatcgattacaagacttctgtaatcgattacaggctttaaaatttgaatcaaaacgttcagtaactgctggtaatcgattaccatccatgtgtaatcgattacacagtgtaaagtttgaattcaaatttctaatagctgttataagtcattttggccattggtaatcgattacatcctctggtaatcgattaccagagagtaaatctcttgaaaaagacatttttacttaaatttcttggccaaaccttttgcagtttcaatttgggattcccttcctagaacactagagatcttcctgatgttgtatcttgtattcttgaatttttgtctttcataaggcatcaaatcatcacgatcatatggcatcatcaaaacatcaaagtcaaattctttgcttctacaaaaaaccctaatatccagagtgcaatctcattcgcaatgaaccctaatcgactaagcagtgaaacctaatcctccttcccatggcctcatttgcgacaaatcctaatcatgctacgtgcattctcagattgctctggtaacagcttatatttctccttcaatttggtctttgattctttgtgtatggaaaacttatttatttattttttcaatgatttaaaatgataatcataatgacaattttttttttttgcatttctatttttcaggttttcctcattgcg

SEQ ID NO: 3308 - DNA, 1693 bp, Glycine max
  Intron number 2 from transcript Glyma17g31060.1 (locus Gly ma17g31060) derived from phytozome v7.0 (chr-ID Gm17; pos 34199234 to 34200926)
agggctcctcgaatcacttccaaaaatctcattaggtaaaattaataattggactctctatgtatatttatttaatttttaattggactccataaatatttaattttggtgcttctcggttttatttttcagtgatttttgttatagtggatgagttaccgagaaattttacgatgtttttttttcctgtagtgctcggttagatgcgttcggtttaagatagagaagttaggttgtgtagtttttgtttcggtcgaggattggaagttggagatgaattgttagttgaggtgaagaggagagaattgtggtaaatttgcattgattagagcttgcagcaattgcatcatgatgcggttcacaactttcccacacacaaaagttgtgtttgttttgttctgatgggttgtgttgttttctgctgaaaggaaatgtgaaaggttatgataaaatgaagtgtttggtatcaaggaatcgatgtagaagtgcttttttgtcgatgacttttactggatctgtatgggaagatttattggtggcttaatgttggtttctctgataaatagcaatatattgatagaaaagttttgatacctgtgattttagttttgagtgtgaagtgattttgctatgtattgggcatactttttttctattaacgaatgataaattgatagtctttctacaaaatcgggagtaagtgatcatatgaagatgttttcttaaaagcattttgcacaccgggactcctgagagtacagattttctataaaacaagcatacaatctatatgtgatagtttattggaggggaaataactttaagcctttattgttgtgtgaaacaaacaaaagctgaatgatatttatggaacgtagcattaaaaattctatgactactttgtttgtgagaaggagaaagatagtgagtgtggggggtgcttttttcatttgtctcttaatataattatcagttgaccttccaatatagatttcaactactagcaaaatcactaaagtggtaaaattaaggttgttaaacccagtatctaatgtaaatttcagaatcaacatttcaaatgtatgagattaaggtagctctatttaacttctctaaagattcttgtgattaagatctttgtttacatgtttgggctattcttgggattattatgtcagctcaagcaacatggctctcaaaagatagtttgccttatatcagagcatggaaagccaattacggtagagctcaatatgttttctttttggctttgagtgcatgttttgtctcgattattgtagaacttttagttttataagctctatcaataagattttgattgtaaaataaggttgttaaaccctatttttaatgcaccacgttgcagtagagtttgattgggtgggggatggcttaactcctattgtctggaatgaggtggtgttctagttatgttaagttttttttatagaattaaatgctcattggtggcattaattgtgggggtggttattggggatttagctttcttatgccttaattcttagtaaccatatttcaaaatgtgaattatctacatatatcctggcataggtgatatagttccaaatgtaaacatttgttccatcttgacaacatgattcttgatttttgtggtatttcagtgtaatcttctgtgaagctgttgctatat

SEQ ID NO: 3309 - DNA, 2621 bp, Glycine max
  Intron number 2 from transcript Glyma05g38290.1 (locus Gly ma05g38290) derived from phytozome v7.0 (chr-ID Gm05; pos 41669529 to 41672149)
cttcagatacctcctttgctaattcaggtttgtgttgttaattaattatgactcttgctaactagtttactttaagatatatggatattgattaaaaattaaaaaaaaaatatttattgtaaaaatcatgatataaaaaaaactcataattaacatgactgattaatatttattgtaaaaatcttttaatttttttaccaatacctaaaaatactgattaatatttatcattatttattaatcctctcaattacatctcttaataataataaaaactaacaactacgtacgaaaaagagatctagagtgctagctattgctattctttaaagagagagtcattgttcaaaggcaaaacttacggtgtcttgatcggcatcgcgtcatctagaatttgtctttaacgtaaaagttattgttggcagttttatttggactcaagtaatatggttctattattattatcttttttatatttgaaatcacatgagtaatgtgtaactcgtatttaaatatgttttttttttccttttaggaaatattcaaacatgcggttagatgcaagtttttcagagattttgatgttgttttctaattacaattggatttagtttactaggatagttccacgtaacaaatttttggaaaaaaagttaacataaattcataaggtgaaatttcaattttaatcttataataatattaaaaataccagtatttggatggagaaatttaaaattctgaaaaattttaaattttaaaaattttaaatatttcaattgaaattcttttattttcaaaattttgtgttcagataaaaaaattaatattatgagaatgaaaaaatgaatgagaaaaaagaaaaaaatataattggtaatgttaggagagtttaaagggtgttttgttgaagaagacgataagaagataatttcgatttctcaccttttagaaggaaattgaaattccagatttttagttgtttaaaattccaaaattttaaattcttcataaaaaaacatccaaacaattaattttaaattacaaaaatttaaattctctgataaattattttccttagttaaaattctctatccaaatcctttgtttggatggaaaaatttaaaattctgaaaaattttaaattttaagaatttcaaatacttcaattaaaattcttttattttcaaaattttgtgtttggataaaaaaaattaaaattatgaggatgaaaaaatgaatgaaaaaaaagagaaaatatagttagtgtgctaattataagtgttcgttcacatccgatcgatgttttaggagttcgcagatgtttcttgaagaggactataaaaagaaaatttcaatttctcaccttttagaaggaaattgaaattccaaattttagttgtttaaaattttgttttaaaatttcaaaattttaaatttttcataaaaaaacattcaaacaatgaattctaaattacaaaaattcaaattctctgataaattatagctaaaattctctattcaaacatactaaaaaaaaattataatacagaatagtgaataccatgggtaattcccacacggtcacacggtcacgagcagtttcgtggggacggagggggctatgcctcccaaacttttgacaatctctctatatatatataattattaataatttttagtcatttaatatataaccccaaagtgacattttagttgaaaataatctttagttattttttattattattataaaagacaatttttaacattattaattattaatattttcatacataaactattccatcaattagttgtattattattatcttttttatttttctttttttatgatttttttaattctcattttgtacaacataacttatacctgcaagtttttcttttaggttttttatgcaatttttttttacaatttttcttccaatttaactatgattttgataaaggtataattattttcttaaatctattgtaaaataaattgaaaattttaaaatatcctcatataaattttgttattaaatagcttaatttgtcttgtagattttttacaaaaataatttagacataaattctctattttttttttagtagcatagaagagtataaaagtcataaaaaaattaaagattattattaacaaagtagaaaaatatatattaatattataaaaaaataattaagaaaataacttatatttacataatatttttaaaagtttaaaattactcataagaaatagttttacatgtaaaaaaaagattatatttaatttatataatataaatttaattattttgtagacacttaaaaaaaattatcacgtcacttaatgaagtgtcacaacattaattaattaagtaatgatatgacatattaattatttaacaaccttgattaattaaccgacagtaaaatcaaacataaaaatattataggtagtaaaataatttaatatgaaatttaaatagtaaaatcagattaggattataatacaggtataaaagaagatttccattgcaaattaaaagcatatatacatgtttataacttaaggtgcaaccaaaccctctcttttaggtgacaaagttcaa

SEQ ID NO: 3310 - DNA, 2728 bp, Glycine max
  Intron number 3 from transcript Glyma12g29310.1 (locus Gly ma12g29310) derived from phytozome v7.0 (chr-ID Gm12; pos 32728074 to 32730801)
tagccttgggtgcaagggacaagtgcgcagcccaggtatgtatgtagggtcaagatcctcttcatgtatgttatacgttttcaaacattgataactactcattctttttgaatatattgattactaattgaaatttattaaaaaatgtttttttctcaaataatttttattctaattttataataaattttaactaataatataatgtattaaaaataagacttgtttaaatttgaataattattttttagtcattcaaaaaaattatttttattagtctctcaaattttttaaaaattatttttaatctttttatttctttgtattaatggtgttataatttgtggttgcttctcaccaccaatttttttaatttaatttcttagaaaatgattttttaaaaattaattttaatctttttatttctttgtattaatggtgttataatttgtggttgcttctcaccaccaatttttttaatttaatttcttagaaaatgatttatagtaatttaaaatcagcagaattcaacatttatgtttttatttcttctttaaaaccatcaaaatatgtaaaaagaccatacaccaattcatatgaatcaaatattttagcaatttaaaattaccaaaatcattttaaaaaaaataattttggcaattaaaaattataaaaaaaaaataaactataaacacaatgaataactaaaaatattttttcaaaaatttgaggggctaataaaaataattttttttgaaggactaaaaaataattatctaaatttaaatgattaaaaatatatttcgacctaaaaataatataataaaaatcgtgttactaatatttggtgtattgttgaaaaataacatactctaacatttttaatatatatatatatatatatatatatatatatatatatatatatatatataacacatttttggtatgcttaaatttattaaaaattacaaatatagtccattattagaaaaaaaatcacaaaattttgtttcaatacatttctgtcaataataataaaacaatgaaaataatatgtaaaaaaaaatactaatagagaaacttccacaaatttatatactattctgcttccgattcttttggcactctagctagaaattaaaaccaatatctatttgagtttactataattcttttgtcttatgtgatgtgttgttaactatattacaagagttgtagtaatgataattgacaagagaaaaatatttctccccaacttaattatagtactatgatattgacctctccatgtacgaattagtttgttaggtagaaatgcactcgcggaaaattttcaactagacaaaggaatggccattgttctttgccgtaaatacagggttagaaatatccaacattaattgttaattaattaataatgttttgagttttatacattaattcatttttggtttgaagagaatccatcatgtgaatccttgtcaaagcttaagggactcatattaaaaaaaaatagagaaatattaaccatattttctctaatactttctcaaagactctttcatgattcattaaaatttattaaaaatcatcaattttaataattttattttttatttaatgcaaatcaagagaaaaaattattaaataagaaatgaaacctaaaaaaaaataatttttaatgaaatttaatcaatcataaaaagaatatttaaaaaaagtatcaaagaaaataatattctaaaaaaattcatataagatagttattaaaagaatgttatgaaacacatctacaaaacctccaatcaatcaaaacgcataaaaaagatagtataaatacaatattatacctcttgatcaaatataatttatttttttatttcaagtagttattctattcaacttgttattaacttttttgttaacgtttcttaatttatgaacacttttaaactttatcttaatcacgaagcatgtatcgacaggttgaaaagagggaaaatattgtaattgagagagactcacatttcattcgttccatttaaagctagtcatttttacctttgttctaaattttaattctttaatccaattagggataagcaaagaataagtttagacaaatttacctttgttctaaagctagtcacttttaaactttgatatgattatttatttgaatccaatccaatcaagactcaaaatataaggaataagaccctaacttttgaatgtaatatatgtcaatcataacaatatttaaagttaaattgtataataaaacaagtataaaaattaaattaaagtacatattacaatatagttaaaacaaataatataattataaatataatgttatgttattaaaaaattatctattaaataaattattttattattaatatacaattattaaaaaaatatagtttttaaaagaatataactatataagacactgaatcatattgaaatgatttaaaaaataatttgaactttttcacaaaatacattggatctaatttcaaaactctacataccaaaatcaaccttgaatcgggctgaattagtaggatgatccgggttatactcacccctaaatctaactacatatattttcttattcagggttaagaaaattaatttatttagcgggtcctagctaatgtagtttttattgtataaatgcgtagggtaaagtcccgtttgtctcatccgaggccattca

SEQ ID NO: 3311 - DNA, 7218 bp, Glycine max
  Intron number 7 from transcript Glyma11g30140.1 (locus Gly ma11g30140) derived from phytozome v7.0 (chr-ID Gm11; pos 31143628 to 31150845 reverse strand)
catatcttgatatagattctacagagggaattaaggtaatttagtatatgtttggttctgcacttcttccttttgcgtctacaagctcagacgtgcatattttatgtgataaatggaagcgaaaaagagtggcattttcctggacgcagaaattcaacgcacataacatagtattatttgtttaacaaggatatttatcaaataaaaaaattgtattttgcattgacataaataagtttgttgctcagcccatggatttgtccaaccttatttgtagcacatttcagtaggaattgaacatgatgaattttcacaacatattttacatacattttgtttggcttttattctattattttactagatctttgcttcattgccagctgtcaataataaaattgaagaaacaatttctctattttttagctcgtggatactgaaattagcagcttaatatcaatttgctgtttttcaaatgatgttgacttgaaacaattattatattcttatgtaaatgctgcctttatagagtaatggtttctgttaaatgtgtgtgtagttttgagtgtggttgctattgtaattcaactttatttagaggacaacagtattgtgtcattgtgaacagctgtccctctcctactcttttgtactctctctctatatatgttatttgaaagcaataaagaaagtagtcagtgagtgacattttcctcacaaattcaaacttcaacttggcatcagagcaggttctccggccaccgtccgccactgtcttcggccaccatttctctcggcgaactcagggttgggtgcgccttgaagagcgcgactcacccctggaagtcgcatggccaaactcccttccacgcgccgccatagtctcgtgccagtttcggcgcgtggccttcacgcgccgcactccagtcgctggaagttcatcggacctgttccggcatctttgtcgtcttcacctgaacacgttttcaggccttgtctttcggttttggcaagttgtttgttccagcccttgcgtttccctcttcttcttcattagggtttccgtttttgatcagaaatggcttctgctaaatagtctagtgaataagaagctggacaagttttacatggttcttatcttgaggagcctacactcagattttgatcatgtgcgtgatcaagttcttgctggagaccaagttccgtcaatggactctctcatcactagacttcttcgtgtgcctcatgtgttgaaaaatgaaaatctagttgatgttgtggaaacatcagccatggttgcacctcgtggaagaggaggaggccgcagtggaaggggtggacgtcctcatttgcaattgcaatttttttattgctgggacaaggtttatatgagataaattcagtagaggaatgagtcatgtgatccgtagctccagaatcaacaacccatgtcacttgtgcagtagattgtagaacactgagagcataggcttgggaagtacttgacaatgccaaggaagaactacatgtgtttgtgggtttgactaaagtctctaggacttccctcaattttttaatttcttctatattgtaatttgtaaggggtctggaaggacttctcactgcagcacctgactgagttagatgggcttgtgttggttctcctcgttgagtacctttggtggtccaattttagttttgatttggaggcttaccatgaagtttccaacatctgtcttgggtgtgtctttgcttcttacaaaaggtacaccatagagaatccttgttttcccctttgtcgatctccatcttgggggctacacctccaggttgaccggtctaacattgatcaatcttcttttccttttgtgcaactaaggcagaactttcagtggattgagactccatcatcacccccccgacgtgctttttctacccggaaggcagccatggtttcattgagtgaggataactgctttcctagcacctgaattcttataggatgaaactgactatttagccctgtcaagaacttatagattttgtccttctccttgtaacgtttgagtaaatcagcatcttctatgcattttgattcaaattgttcataatggtctaacttcagccaaagattctacagtctgggcatactcactaacgaatcggtctccttgtttggtagtcgcgatcttcatcttaatttcataaatttgagcagcatcaccaacctcgtaatagttttgcttacagctatcccacacgtccttggcggtcttcatgaacatgcaagcatcgctcacctctagcaccatggaattccattgccacgacatcactactacatctgcttcatcccatgcaccaatggtactgtctgtggattttgtgacatctttcccaataagatgattcaatttgcccttcccttttagaaaggtttggacaaagtgagaccatttaaggtagttttttccattgagaagaaggccgggttgaatattttgcagctcaacagtgtcggtattttcggcttgggcggggttattggttgttgtagacattcttagttttgttgggtgagattcaaaggcatggagggtgttttagggaagaaaaaaacgacaatatatgccgtcaaagggaggggaaaaaacccggcaatgcaggccgttcagcggaagaaaaaacgtgtggcaatgctggccatgagtttacacaggctcccataaattttggagcattgataccatgtcaaaggataattttcttatattattgatagaagagcatgtgctcttaaatagaatacaaggtaatctaaaaaagaaaatacaatatacagtggtattctgacagtcaccattttggtggacctcgttcacaggcctcctgaagaaattcatatcagtgaaagagaaagagataaaactgaaagctaagaaactgttattgtattatgaaattggtttgttacaactgaatgctcaacaatgtatttataaagaattctaactacataactgttagtctaactaactgttatgctgagtcagcaatgactcagcataacagttagtggtattctgacagtcaccattttggtggacctcgttcacaggccacctgaagaaattcatatcagtgaaagagaaagagataaaactgaaagctaagaaactgttattgtattatgaaattggtttgttacaactgaatgctcaacaatgtatttataaagaattctaactacataacagttagtctaactaactgttatgctgagtcagcaatgactcagctgctaactgactaactgtctgtataactgactaactgttatgttgagtcaacaatgactcagctgctaactaactaactgtctatatctattaccactggatccacccacccgacccaatccgtggagccctagatctggcccgacccactcgagtccagcgtttgcctggttgggtacccataacttgtcttacccaaaattaatagaccgcaggagtcgcgggctttgcttcaagtgtggcggaaattagggctcgacccatgtttgcgcctaccaacacctgtgccttctcatttgggaaggagacgacccaccaaatgattcgtccccatcatcaaatccattcctcaatttgatgacgtgctagacgaggatgttcatgacatggtctgtcatattttggtttattgcgcactgatctaggtgatttggtccaatctaaaattcttaaactcaaagggcagttggtcggctatcccattttcctggtcaatagtggcgccaggcacaacttctggttagctccctcaaccttccagtcacaactactaggcaattttgtgtgggccttggtaatggcaagaagtgctcatctcagggcatttgcaacgctctgcgtgtcaaactgggtcgatacactatcatactcaatgcatatgtcctggatttaggtggcgttgatatcattctttgtgtagagtggttggagacatttgggaagaccacgatggattggcagaaaaagacaatcagctttgaagacaatggccagttgattacattgtagggccaccacatgcatgatgctcaccgttctccaactttgtagggcctcttacacggtgtggctatggtggataccaccctcctccaactcgattcttcgtgcttttcctatatttgagactctagagttatagcttgtcttggaccaatatgcttccgtttttgcctcccgaggtggcttacccatgatcatgctatctccttaattttgggttccaaaaccgccagtgtctgtccctatcaatacacttaccaccataaagatgagatcaagaaataagtgggagaacttctttatgatgacatcatccgcaattcggtaagccctttttccaatcctattattctcgtcaagaaaaaggatgagacctagaggatgtgcgtcaacttctgagctctgaatcgggtcacagttttggatgagtatctgattcctaccattagtgaattgatagatgaacttcatggctcccaagtttattccaagatagatttgatatctggtttccaccaaattcggatgagggaagcggatattcccaaaattgcttttagatcccatgagagccattacgaatatctcgttatgccatttgggctggtcaatgtgccttacacgtttcaatcaacaatgaattcggtgtttcgtccctcctctgtcgatgtgttttggttttcttcgatggcatctggatatatagccccgactggccttcccatctcgttcatctcacaaaggtgctacaactattgtccctccaccattttgttgccaatcgtaaaaagtgtgcttttggtttacccttcgtctactatttggggcatgtgatctcgggtcaaggtgtccaaatggacccaaccaaggttcaagtagtggtgaattggcgtactccgctcaatgccaaagatgtatgcaggtttctgggtcttataggttattattgacggtttattcgaaagtacagcaagattgtccaacctttaaggcgctcaccaagaaagatgggttttgttggggatcggctcaggccagtgcctttgaagatctcaaacgccgtttggcttcctttcctgtcttggccttactagcctttaccaagattctttattgaatgtgatgcgtctggtcatggcctcggtgcagttctcatgcaagacagacaacctaatgcctattttagtaaggcgctttcaccctggacgatctccaaattagtctataaaaaggagattatggctctgactttatctgttcaacattggcgtcattacctgtttgggaggagctttaaggtttacactgaccattgcagtcttcaccaccttttacaatagcgccttaccactacggaccaataatgctggttatccaagctcatggggtatcagtttgaagtcatttacaaaccaggccctgataacaaggatgcgaatgctttatcctgtcaacaccttgctcctgaacttcatgccatctcgatcagtccttattgggtgtatttcccaaggatacgtgcagaagttcagcaggatcccaactcggctcaattgagcagtgccctgcaatccaaccctaacaccaatcgcaactatacccttcgcgatggatttttattctttaagggtcatctaatgctgcctaagaccttagctttgatttccacactcttagcttaatttcatgacacagttgtaggaggacattcggggttcaccaagacttacaagaggctcgctttgtcctttctttggaaggggatgcagaagtccattatggactatatttgtcggtgtgatgtttgccagaggaacaaatatcacgccatgtcccctgtgggtctgctccaacccattccaattctagagagaatttgggaggaaatctctatggatttcatcacaggattaccacgctcccagggttatgaggtgaacagtagcggaagccttcatacaggatgttgctaaacttcatggatttcccaaatccattatcaatgatagagaccactgttcctcatcaaattctagactgagttgttttgtctctaggggaccacgttcaagatgagcaccacttacacccccggatcgatggccaaatggaggtggtcattggaaaccttcctttgctgctttgcttcaaaacagcctaccaagtggcatttgtggttgtcctcggcagaattttggtataacacctcctcgcgtttggcaatgaccacataagcaacaatctgttgcactacgcattaatcccaaattgtccccacgctactttgggccttatcaaatcctttcgcaagtggcagaggtggcctacgaacttaagcttcatgattcggcccgcattcatcctgtctttcacgtgtctcagctctgaaggtcagtgcagaatggttccgcggtgagttccttacccctgatgttggagattgatgactcagaaacatccagtccggaagctatacttgctactcgtgtcaggaagcatcagggcacaccaatggaggaatggctgatcctttggacgtcacaacccacggaagaggcaacttgggaagtggcacattccatcaaggacaaatttcccagtttctaccttgaggacaaggcaaatttcataggggatggtattgataggaatttagtttccaaatgaaataggccctttaagacatactcgaaggcccaagttgacaaaggcctgacccctttctgttagaggagagtgttagtggaaatcagttagaggagagagagagagaatgtttctgttatattgaagtcgagattgtagaaggtatgcgatattttgtcaatagaattgggagctgtgagaacctttctcaagcttgggggagcatctgctctcgtttggtttacttttatctttgctgctctgtttctttaccttgtttttggttatactgatagtagatacctatcagaccaaaagtattggtttcggattttataccagtgaaaaccaacaaaaacttttacaaggaccaaaattaaaatatgcttatttaacatagacaaaacatatttgaccagcatttttgatataatgttattctctgtttttattcctactttttaactttgtatctttggatggttacagg

SEQ ID NO: 3312 - DNA, 863 bp, Glycine max
  Intron number 10 from transcript Glyma02g42560.1 (locus Gl yma02g42560) derived from phytozome v7.0 (chr-ID Gm02; pos 47607387 to 47608249)
ccaaaagaggaaatcttcctggtgctgagaagctggtatgtcaattttttttttcaagggtgtttttagtgagattaaaaaaacttggatgcattgtcaattaatttcttgagggcatttgtttcacaaaatgatattgtattcccaagaatcacattcctaggaatattataaccaggaatgttattcctgggaatacttaaaagtacatttgactagattttaacattcctaggaatatttttaaaacttaaaataattgaaaataaaaaatagagttggaatggaagagttatagttgggttagaaaataacttcccatattctcatgggaatataaatttcccaccccttatcataggaatagaaatgacttgaattattgtatataaccactgtcctgggaataagtaatacccaggaacattttttaaagctcgtaacatacatggaaatactacataagttcacatttctgggaaagagattttaatccgtgaaacaaacacactattgggctttcatgtagctgataaatgcttacttgcatgaagtttggttacaaactacaataaaaagtgcaatactctgatgagtaattgttaactcttctttgtagcagacagccagacacttattcagtttacttcatcaatgcaatctacactgtttaatctctttctctctctctctctccctccctccccctctcaatatatatttctaaaatatttgatattgatcaattgattgctatgtttagcttcttaagaaatgctctctcttgttattgtatttttggttcttttattcatgaatatgatgtccatatttgttgacattacaggtagtggaacgttttc

SEQ ID NO: 3313 - DNA, 6304 bp, Glycine max
  Intron number 6 from transcript Glyma04g26800.2 (locus Gly ma04g26800) derived from phytozome v7.0 (chr-ID Gm04; pos 30718851 to 30725154 reverse strand)
gttgctgcaagagaagaaagcattagccaaaacaggtaggaacgctactatcatgcactacaactttaaatgctattacttattgcttttttgtttttacatcatgattaagatcaaaaccagaataggaggaaacagctaaaggtttatgccaaaatatctggtgctagtgagttctatgtatttctttttacgttactgatggacaagtttaaacacagaaaaagtcggaatacattatggtttatatgcatcttctggcaccactttatgagtaaaatatctggtgcttgagtttcttgtattatattcttggaagtccaaattttactctaaggttaagtccattgttgaacataagttctgaatattactaataccaatgacatgttgcagatttgtaggccacataaatctatttcccttgagatgtgtggtcgaagtccaaaatcagctcattgtctgttcttaatttgttctgtagctggttctttatgatattttttgaatgttgggtgtgccctaggtcattgaaccagtttttcttgacttacttcagtggttttggtagaagtaaaaaagtataagagaatactttcctcgagtatctctttgtaatctttcttgttttctatctttgtacattcactgtacttttctttctttgtaactgttcctgtcagttatgtttgtcactgtcagacagttataactgactcttttcttaccggagtctcttaagtatatataggcttctaactaagagactcactcacctttagcaatgggttacaaatcaacttaacccatcataagttactcagggaataggatttgccaatttatgtctattcccatttaatttcattaggttacagtttattggaaaaagcccaagtcttacattagctacagatagtaccaaaaatagagtatataagtggaagacaacccttaccctatgagctcatggtagttaaaatcgcgatctgacgcgtaaggttgtacgagtttatgatcttctttaccatctccaagtttgtgtgtgttgagaatcacaatttttccggatcatccaggatcatcattgaagatcactattggacagggcatggcgcttgtgtgcgactttgtgtttggcttttcgcagtttaggtttatgacttggtatacaaaccctcggcctaaaaaaccctagcccacacctttctccttctttcaattgtaaaatatatgatatgatatgttttaattacagcagtttactatgggattattttccttttcttattttgtaaacctctattataaataagagtattttgtgtggtctgatatgacaacacacaatagttaaacactattacatggcatcagagcttatgctggatccattaaatgggtcacccaccatattatccacgttttgagtccccaaaagttctgggtgtgagggggtgtgttggggcatataatatattctaacactcccctttaagctgaagcatataaatcatatgcactaagctcattacatatatagtaatcaatcctaggacccctgaaggacttagtgaaaacatcaacttactgatcattggaatttaccaaacgggtcttaatgtcaccaaataagatcttctttcgaatgaatgacaatctacttcaatgtgtttggtcctcttatgaaacaccacattggagtcaatgtgcaaagtagcctggttttcacaaataagggtcataggtgagacatttgtaaccttgagctatttcagtagttgttttagccactcacaagttcacaagtagctgaagccatggctcaatattttgcttcaacactaaatcttccaacaatagtttgcttcttactcttccaggaaactaaattgccacccatgaagatacaatacccagaagtggacttcttatcaataggagtgctagcccaatctacatttgaatatcccacaacttgtgtgtgacctttgtccttatacaagagaccttttcccaatcctccttttatatatttctaattgttaacaacatctcaatttcttcacatggagagttaagaaattggctcaccacgctgactgcaaaagaaatgcttggacgagtaacaatgatataattcagtttcccaaccatccttctttacctcttagggtctgaaaagggatccccctgttttttgcatgagtttggtgttaggatccataggagtatctataagcttagcattcatcaggtcactatcctctaagatgtccatcacatactttctctgagaagtcacaatgccattattggattgtgccacttctatccccaagaaataatgaagaaaatcaaggtccttggtctaaaaatgatggcaaagatgttgctttatttgagagattccatggtgatcaccacctgtaatgacaatgtcatcagcttatacaataaggtagatattccatttgtttaagtggcaatagaagactgagtggttagtcaagaccatagatctgtgtatatagcctttagcaactaagcgagctttaaggcgatctacttgaccatctaggccaactttgactgcgaaaatccaatgacaacctacaactgtcttgccaagtggaaggggggtgaagtccctagtaccactgctctgaagggcacacatctcctcaagcatagcttgtcgccaaccagggtgagaaagggcatcacctacatgcttaggaatagaaacaaaagatagagaagaaagacaggcataatgcaaaggagataaacaatgaaagctcatgttaacataatgaagataaggattcctattggagcggataactttctaaagagcaataggaaaattcaactcaaaaggtaggtccagataagttggaccaactagagttggagagtcattggcaacactaggcaaagctggggaaaatggacgagggcaatgatgatacacctgtagggaggaggaggaggaggaagtgtgggaaaaccaggagaagacgttgcaagacaataatcgaaggagatatgaggaagagaatcaagagatatagagaagtcgggtataggggtggggggattattcccaaagaaagtaatatccgctgaaattagataatgacaaagagaatgagagtagcacttataacctttttgagaccaaggatagcccaaaaaatacatttgtgagacgaaggaaagtttatcaagacaaggagagaaattgtgaacaaaaccgatagacccaaagacacgtgttagactattggcaagcataccaatgtcgtcgcatgttacagatttataaaaagagatcatctccacagggacttgaattactcaattccttcgaataaaggttattagtataataattatgtacaagtttaattgaaatatcatgggtttgtttaactaatgaaaaataattgaagtaacaaaataacaaaaataatgaaatttagtgcgtcagaaatacgtaaaattacggaaacaataataacaaatttgattaattcaagaaaacgtaagattgaatttcatcgtttataccctcagtatcctaataagattaatatatatgaatcattttctaacattaccgatgcacacattaagttatcctgaatctatccctcgtactcaagaatcttaagaatatttactgaatatcgatccctcgcatatgaagtaaatatcccagcattacaatcacaatctcgtactttttgcaatcaaaacgttatgctctattcctagcaacataatgtaaagagtaaattcattcagttcaaattttaagagtacttcccagtcaaacttaaaatccaatttcatgaaactaatgatcaaatagaatcaaacattacgaacaaaatgaaatcaccaataatgagtagaaaagacacacacacacacacacacacatatgtataatatcgaaagagatacataagggtacgaagactacatccaatcctttgaagaaactaaccgatctttgtgtagagcacaagatcaacaagagaaatgatgaaggatgcgatccgaggttataattgtgcagtgcccaggcttcactttcccctttcttcttccttttggtgtttctcatgttttctctttgcattctggtgttcctttctccaccatttgcatgactatttatagaaaatagcccagaggtgtggacaaattcgcctaggcgagctgtagcttgcccagacaaatttcttacttagtgtcgaaggcactcactcgcctaggcaagttgtagctcacccaggcaagttgattacttatgcctgaagaaacttgattagcccaggcgatctggttgctagcttgggcaaatgaatgtctgaaatgttgggaaaatgaccattttgtccttttttttaacttgatttctggatctaacaaacaaccatcaaaacctatagaatcatggatgaatcttccatatttaaaaaaaatagtaaatgtacaatatataaaacaactagaaagaagggaagtttataagaaaactattacaatcaaaagataagtgctaatattttaatcctaaaaacaactaaattatgacacttatcaacacgcggaggtaaagagtgaagatcttgatgaggaaataaaatggagtgaagtatttggttgttaagaatggaggaaggcatgcgattaacaaggtagcatgtggtgagaacgacatcgccccaaaaacgatgaaggatattctatggaaaagaagtgttcgagtggtatccatgaggtgctgattcttatgttcaacaatcccattttgttgaggggtataagcataagacgtacaatgaagaatgctatgagaatccataaactgttgaaactcgtgtgagaggtactcacgggtattatcactttgtaatgtgcaaattggtataccaaattgatttttaatttgttggtagtatgatggaaagatagtaaacaattcagatctattttccatttaaaacaaccaagtacgtcgagagtaatcatcaataaaggtgacaaaatatctagatcccagggtagatacagtacaattaggaccccgaacaacaaaatgaactattagggtgtagtttgacagcgatagtgacatctctaacaattccctaagattttctcaagcttttcctttggttgttctattagggtttccaagcgttagagagaatgagaagagattgtagtcttaatatcactgtcttcgtgcgaggggaatttctctctctacatatattattttgcaaatcccaacagtgagaatctgcgaaaatgagtttcgaaggtggtacccaaattttaggacaatctaacagttaacgagtttgagatcgtaattttactgggataaatttgggtgtatgcgagaaaaagggagagttttgggagaggaaggagagaatgaatttgggaggaaggaggagtgtaaagacatatcgtaattgcaaaaactgacctaatctgtctctatttatagctagggtactctgagacgattattttttttttttttttataaaaatgaactctattttactctttcataaaataaataaccaattaaaacattttttattttataaaacatcattttactctatttattttctaatactatgaaaatcttattttaattaacaaaaactcttttctttcatttatttaatttctaaaaattctattaatttttaaataattttttttatttattttatgagaaaatggggtgttacttgctgaacttggagtggttaggggatgagtctttttggaaagtttctcagaaagcgtgagtgaggacaaaacacattaaaaaagtcttatattgatttctggggacaatcaatgatcttcagagcagtcaagcggtatcagagttgattgtcgagatcttgaaaaggactaattacgaaagattctgataggcgaaaggttttgatcaacaaggatgttgagtgaagtgtcaccgtgtaaattgttatagtgtgaaagctgtcgagaagttgacaatcaaggacattactagtattatcttcaaactccaatagaactataagcatgcttattttgcaaaagcaatgatggatctaacattttggtaagtgttagatccatcattgtttttactatatgaaccatagatatgttgattgccatgtaaatatggtacgtattatcactttgattgcattgtaaagtagtatgctgctaactattttcacttatgaaccatgttatcacagat

SEQ ID NO: 3314 - DNA, 3256 bp, Glycine max
  Intron number 7 from transcript Glyma19g24310.1 (locus Gly ma19g24310) derived from phytozome v7.0 (chr-ID Gm19; pos 29784013 to 29787268)
gtttgacatcaagtcttgcattcacaccagtgcaggttagtgcactttgtttctgtagattttctcctgctctttaggaccataattagtataaaagttgtcaattttgcacaagatggttatgggaagctgtgaatggaaccattgtaaaagcatgagaagctaaaaaggaaatttagcgacagaaaccagtgggttacttccctactgctattgctacagatttataagacagctacaaggtgggcaagaagatatataggtgtttgactattactggagctgggagagaggattgttataaactttgcattgacatgcatatttctagttttcttaggttgcataaacacagtctgtacctcttgtgtatttctcatcacttcatttatttttattcctccccattttttggcagcatatttttagctggataacctcttaatttaatggaaatcattattaatttgatatggtgaactcctgttatgaacatcaaagataaaagcacagaatacagaaggaggaagaagcttaagatagtgggggaggaatttccttataattttgcatatcccttctgttaatacacctccagtatatatagtcatatgcgtttgctacaagacaaaagctaataacagaatctctaaggcactaatagagagcactataggactaacagaattacataagcatagagcactactgctcataacagaatagagcactgctgcagaaacccactaatggaattggtgccaaaatcactaaacataatctttcaagtgttgagtcattatcttcctcttcctatcaactcctgtcctttgctcctctgtttatctttcagtaagtcggtggggatgtagttgaaccaattttttcatatgggatgtatctgtgtgagaacggaggatcatgtgtggatgggttagataacattgtaagtttaatagaaaaagctctttgatatggcagaaaatcagacactacaaaaactgaaaatggaaaattgcagaacctgctagcttcctgccaaatcccactcctcaactgaaatcttgcatacccctctcatctcattgctcctctattatattccccttttctctaacagaatgccattatcactttctcctctcccttgctgctacaagactaggaagttacaagaaaatacccaatgcatgttcctttctcatgtgaatcattaacaccctgtgtttctgttcattttcattcattcaatcaatggaaactgggtttgttgcaccatattacgggttaattgataaaacagttcacattgcccttgctgcaccttcattgagagtatgacatatagtagtcaatagcgtgctatagtggtgttgtggagtataacagagtggttttcagtagcttccatagtggctgcaattgtggcactatagcagcacaactgtgatgagttttagaaaccttgttcaattttttattcatgcaacatgcatttctctcacctgtctcaacagaccatcaactctcagttcttgccagtgctgtttccagtcaagtccaggcacacactatgtattgtcctgtcaattgttgcacatcctctaccctttcagttctcataaaagtctttagataggcctgtgcccttcctctgctcttgttctgttgctcttctgtttcttttttcttttgtgtgaatgtgacctaagtcctcattctattgcccgccccctcagtatgttctgtttggattgccttttctttttttaataattaacatcaatggtcatccttgaagcagttgtagcttcattcacttggaggcttacacttatttaatttcttgaattttgttgttattgactaacgtgttaagctttaagaatgtgatttctgattatttatgtaattttaggagaagaaaacgatctttttttgtacattgatcgtaattacatgagggatttatatagacagagatggctaggtgatatccttaccaccctgattacaaaataaatacaatgatagaaagaaaataaaggagaatcaaatcagatttccataatctgatcttgatgtcaactaactaaatcttcaagagtaaaggagaataaaatcaaatcatatttggataatctgattttgattttaactgcctaaatcttctaggatccttgtttgaaatttaaatttacatacagctgtcaacaattaacttcagatgttatcagaattctgagatgagatgctttgatgaaaaatagttgtaactagtgttttggggctggatgctatccaggattgatagtattatgacttaccttcaccccatttcctagcacatgctgaattgaacgctttttatgattacttgatttgtgaaaagtaatttacccatttgcgcaactccttcggtctccccttgagtgttttgaatggcactttgcccatttacccaactccataaaccttgtaaccctctccttttaaaagccaatttgtaatgaaactctcattttgtgtgattagagaaaagagatgccgcgtgacagattgactgcacagtgcacaatgatcaagcaaatctagtggtttcccttcaccattaacctaaggcatcttataactctacagggcctgctcagtaaattgaggttgaaattggaaatatctgttttagtatgtgagatataatttaaacatgagaagcaccaagtaattcacaaggcaagagagtaatcttaaacacattagttctcgatgaaatcctattataaaatagtgaccaacatgtatggggataagtgtttgctttctggtagaagcagacatttcttaaccttgctttggggtaggttaggttcctgagtaatcacaatatgctatctaatggatgtttgcataattatttgctattcgttgttgttatggtgcaattttttcgactttgactaaaaactacgactttttgtgactttttcctgtctcttttttcatccctgaaatgcgttgttatatttcaatatgctttcacaggatttatattggatagcacatagatatgttctttcttatttaatgcatatcattcatttaactgatatttatcatggatgatggaatattttattttgataacacttttagcacaataaccataattagtttttcttttgttgtagttttgcattctttttgaattatttatatattctttttcaggggattgagctgtcaaatccacaggctc

SEQ ID NO: 3315 - DNA, 2088 bp, Glycine max; identical to SEQ ID NO: 2763
  Intron number 9 from transcript Glyma03g26630.1 (locus Gly ma03g26630) derived from phytozome v7.0 (chr-ID Gm03; pos 34094369 to 34096456 reverse strand)

SEQ ID NO: 3316 - DNA, 1199 bp, Glycine max; identical to SEQ ID NO: 2270
  Intron number 4 from transcript Glyma18g49130.2 (locus Gly ma18g49130) derived from phytozome v7.0 (chr-ID Gm18; pos 58513708 to 58514906)

SEQ ID NO: 3317 - DNA, 3271 bp, Glycine max
  Intron number 1 from transcript Glyma18g03600.1 (locus Gly ma18g03600) derived from phytozome v7.0 (chr-ID Gm18; pos 2479671 to 2482941 reverse strand)
ctcttcgaattcgcgttttcttctctcttcgcctcgtacgttccaatttctatgactctgcctccatttaacatttgatttattgtttttccgataatttacttgtttcgtgctccgctcaaatgaaattaactcatccgtcgattttattttttttctgtttgtttcgcttatcatatcgaataatttagtcgttgaattatatgctggtgttggagtgaagataccgtcaaaattttatatcagctttggacttgtttttaattttgtcattccgaaagacatttttgtttcctgtttatatgttaaattacgagggagatttttttggtttttcctgttagtcagagtaatccatcatcatattagtttgtgtttgtctatggatgcttaggttaaagacaataataatcttgtgacattgtgtgtttggtgtagctaccctgcacttactgttaacttatgcaggccatcaaatttgattttgtgcaattaacccctagtatgtttggatggaggaaattgcatgggaaagggaaagggaaagggaggttagtttttcatttttgattttaaagaattattaaatgtttgttttaaacagaagaatgtggggtgattggaaggttacatgataatctcactattttaacaaatataaattataaagaatgtttacttgaaatggaaaattgcccacctaacttatccatccagaaatactcttaaatgattcaaatccacccttcttaggtgttatggccttcaatggatttagaaattggggaatcctaactatgaagaaattaaagaattttatgattgacttctatatttatttatttttgttttgtcaaagctgctgcaggcagtgtatgtactgcaatcctcccaatttggttgagactccacatatgcgacaaggactgcactctgttctagacctttgtttgaaattaaacattttacattaactttggtcattgatgtggcccatatgcttgctattcaacaagattctcaaggcaggggatgaaagagaattaaaaggagataatttgaatgtgatagatccatacctgtttcagcaaccatcaagtaacatagattcccatcctccctccttgcgccgttcacacttctttgaagtaagagcatgggatatgtggactaaaactcattctttacatattatatactagaaatatttctctgttgattatatctgtaataaactttatctaattatgcttataggtaccacacataaaccaaatatatacatgggattgtggccttgcttgtgtcttgatggttttaaaaactatcggtgtcaacaactgcgatattccaacactggctgaactatgccgcacaactaggtcttttcctctataaaagctctgtcatttgaagtgcttgaagatcctagactatccatggctatttctaatgcaattaagaaggaagcatagtttggagtctttggacttctttaataggttaagaaaagtaaagtgccaaaagtgtgggactcactatgggttctacacaaagttgtgagaatatactctataggactatgcctatgcaaatgcaagtatatttctagtcctcctctctcctctgtctctctttaattggaaatcattgccaatcttaaaatgttaatcaggtgacagggtttcttagtatctatacattttggaccaaattatcatcaaattttgtagactaaaatactaaataaatgtatttgatgcattgtgattaatgtagtgatattacatatataactaaccttcctccttggcccagagttgtcatacattgttgcctaaaaatagtcagatcatctggcaattatcatgttttagtacacattttgtagatttatatttgataatcccatggctgttatcgttgttattattatttaatacattttcccagtaataagtcaaatgaataacttgattatatttctaacaactctcgtgtaagagcccattgagtttggacttgaagggtggacaatgcacaagctctccctacatttgtcttaaattccacataaaataagaaaattggggatggcatgaggcaatccgtagactagagattatctgcatgtaatttatgtctttacgtacgctgtatggattcaagttagaaaaccaaagtgcttatcagatttttcatataggggaagaaaaaaggaaaataagatttttttatttttattttaatggttgaatataaacacaagttatgtttttgttacttttcaggatgctgctgtcaatcgttgcaactttatttttgccaacaatagcatcaatatgaatcaactagtagaacaaattaatatcatgtacaaaaacaaaacagataaacattgtaattcgatatgaaaatgtttgatgaacttctcactagtctcactgtttactactgttttgcagcatttggactgttgatttggcatatttattacagagatttgctgttgctttttcctacttcacggtgacatttggggcaaatccaaactattgcattgaatcattttacaaggtgattcattgtcatactgaaatagttacaagctctttagttttttttagtattagtaaatccccaatatggtcatcaggagaattttgaaacatcaatttggtcatgaaatcatgattttggtcatcaaacagtaacttagggctattttgtttttgatgcagcaaaactatcatttgaagtctgaatagtaaatagatgtaataatcttttaaagagcaaattaatgttacaaaaatgttttgaggaccaaaatggggggttatttgactctagtgtctttgcttgtgtctgtttttggttgaagcaattgaagatataaaattttcgttaagagtggccaaaattgggtttgggatatattggtatcagagtattatccaagagaggacattttaaatgtcataggattaggtgattcactagtgtaaacagaaaaatttgtctttgcccaaaatgtaccagagcttggctctaggtcttgttgataatcatgattgagcagaacaggtaccaggttataggttatggcatgtccggttttatgattgtcactttcaatgttggtgttttgtagaatttgaaacaaccttgctgtatggatctttcttctgcatgcattcaatgctttctgtacctattgcataaagttgataggattttgttttaaatattgtgtaggaggaactgccta

SEQ ID NO: 3318 - DNA, 6698 bp, Glycine max
  Intron number 1 from transcript Glyma09g06220.1 (locus Gly ma09g06220) derived from phytozome v7.0 (chr-ID Gm09; pos 4966661 to 4973358 reverse strand)
ggataccgcgccgaagaagtgctcggtcgcaactggttagtgccctctctgtagagaaatttcgttttttttttaggtttaggttttcgctgagcattttttgttttgcttcggaaccctaggaaaaattggactttgtaatgcttgtggtaccgaattctagtggtagcttgaatttggaatttaactgttgcgtagggagtgtttggggtttatgaagggacttggatttcttttgggatttttgttgtctctgtgttgagcggtgcgtttctcggttctatgccggagaactcgttcgggtatcaagggattggggaaattcacttaatagtgagttagtgaacgtgatgagatgccgaaagtgttttttttttttttttggactaatgctatatcttcttacaaatctttctaatatgttatgaagagattattaaatggaaaagtagatacatttaatgtattggcaactttgtagtcattcaatacttcctttatttagtatgtaggagaattaggaagaagatttttaatgatgattttgaattattatttttttttttaatttgcactaaatcctgaaactccactgttggaaaactgtgaatgattttgtgtgcttcaagaacagattgtgaaaatggatatttccagatagatgtcctgagtaagggctttttctttgttttaagtactggttcttattattattttgatttgaagggtttgggaatcccattctgtaggctatgcatggtgtaatgaacttgtctgcatggttggtgtgtgtggaaatgaaatgggatttttattggggccaagactatttaatgtcttccgatgagatattcattttgtgcacctttgtctttttgatggattttgtgaaacagtttgatacggctctttggtagggcgtgttatattgctcatgtaggcggtaatatgacaagttaaagtagtttgaattgtacaaaacctaaatagcaggggtagatgatataggatttaggtgggaaagacaaagaagcagaaagaaagaagagtgaataagagcagaacagagaggatagagagaaaagagagaaacagataaatcaaagaattgagtagtgcacttctattattatcattccaatatgtgttgaatatacaacaattatcttttatttataggcagcttcccaacagctataaaatcataattaacagtagccgactaactaaccaacttacattcttttcctatttatatttacatttacataacaatacccctcccccaaaagaggaccttgcccttgaggttcttgaacttcaaactgaatggtaggaggaagataatttcagttcaatccactaagttttcaagaaattcttctaaatattactcacaaaatcaggatccccattactaattatccattggggctccatatagtctgtaaatctgctacatgaagtgctgagcaagtccaaactgaatggtaggaggaagataatttcagttcaatccccaaagttttcaagaaattcttctaaatattactcacataatcaggatccccattactaattatccattggggctccatatagtctgtaaatctgctacatgaagtgctgagcaagtgttactgctgtatatggacgtgaaaggaccacaaaataggactttgatagaacaccaattgataaaagtaataaaaaatataatatagaacactgaaattatacacaatacagcaatacacttgctgtcccagagacaaagtctccttcagagattatcttctgtccacaaactacaaataatttcagactgcctgattacacatcatactatcaaatatatactcccaattcgtaactaccagctgttattttctacacataactacctttctgcaatttctaatacataactgttttctaaagcagttatttgagtttctaatacagaactgatttctagaacagctattttctacacataactgtcataactgcccctaactctcagttttcatcatctcttctctgttttttgtcatctcacctctgaaaatttagaattgttggtagattacttacaaaccttggattaacatgaaatctcgaatgctcaatcacctaacaaatcccagccacataatctcatcagtcaccactatctcacagcccctgtaagtcactcaaactaagacacctaatttcccctaccgatttaaatcttctttgctacaattggaactaagggactcattggaggatcttgaacatttttgtgaatgatctgggcattaccaattcaccctgggaattacagaattcccgtgtttattgaacttggaaatgagtgtagtttattgagaggaacaaggttcagtgttctgtgatttaatattcctgtgggattagatggcaaaattagaaaaaggaattgagattgacaatgagagtgaatttgaatggggaaattagatttttgtgatctttttggtttggttgttttcttggttgagaaatgaattttgagtagaaggctttttacttccccagttggtgtgatttataaggttgggggttgaaggcatttcatgtccccaattggtgatttctagtatgtttgttctcccattgtgtcgacttcaatccgtgtcaaagagaagctgatatatatatatcttctaggtttattttgctatttgatgtgcttttacccactgatgctagtattagatgcagtacaaaacatgcatttagttgaaaagttgggagaacggtttaagaaaatgttatttttgagcatagtatgtagttgggttagtgacttttaaaccacatggcattattttttcctaaacgaactgtagttaaatggagttttgtggattttatggatgtggtagtggtactgatgatttcatacaaatcttactatgtaaagggaaaactggaaaaggttttagcattcacccctctgcttgaacatcaatgattgttgctgatgtcacttatcctgcaggagggttttttttgtaaagaaatattgttactattgaccaagacttaagtgcatgcatagtacttgtgtatttgtgcataaagattggataaattaaagagtttatgttagacatgggcaagagccacaaacagggattaagagagccctgcaggtttactatagaaagaggtttaaaaaggggaataataagtctgattagttaattagaatagctaacagacagtgaagtagtgggttaggagttggcctctaaataaggtttttagagtgtaatagtggcatgttttgtaatatatgagttttgactgggcatattccagtgtgaaaaggagagggctccttttatacttttctgtacgattctttaccaattctttgcaataaagtgtcttttttggttctattgttaatctaaccagttctgttttagaactgtcttctctctctgagaagagattcctaacagtttaatatattgctcctggctgcaagaggtgtttccaagaattttgttgcatggcatttattgatgatggtagaattagatagtgctgttattattagaacttgttgatttcaattcttcaggtatccatcccatgtacaattgctaatctcagtcatgaagaataacggaataagtaagcctgtttcatcttgaatggtctgttattggtggttcctaattttggaatgtatataaagtgttttcatttgatactctcagaagttggacaactatgttccattttaaagtttaagcctcttgggtttatctctaatgtttcaatttctcctatcttctgaataggaggattcttaccccctatctagtctgttgttttcacacatttttctcttataaaattaatgatttttataaaaaaatgtcaaaactggatgcatgccttcatggttttggtttcccagctttcactgtccagttgcttatattgttaattggtaaaatatgttgttaatgttaggcttaaatacatttttggttcctccaatttagtgacttttccattttcctccctgtattttttttcctgtttcagtccttgcaaaatgtgattgtttttgttgttatagtgttttagatagtgctttgaacagtaaaaaagtgttttgaacagtgaaaaaaaagttagctaaagcacttggaggacgaaaaacaaaaaatcacattttacaaggactaaaacgattttttttttgtagggacaaaaatgaaaaaaacacttagttgcaaggacataaaatgtattttagctttaatgttaaagatcaaatgcatttgtaagttaaattttttgaaataatatttttctttgttgagggcgagctgtggcacaacggttaagttgtgtcttggtgaccgattggtcatggattcaaatccggaaacagcctctttgcatatgcaaaggtaaggctgtgcacaattaccctcccccataccttcgcttagcaaggagcctctgggcactggggtaccctagtttttttttatttgtcattgctaatttaagtaagatatattgtagttttactaaaattttttatagttgtatgcagtttatatctttataaattgcttctctttctatctagtacactgctatctacattagaagttgttttggcttgacagattatgataccatgtaagaatggtgggttacaagtctaactcaaccttacaaaatcggcttgtaaggtgaagattgttttccacttgtaaactctatcttggcactatctctagtaggctctcctgttctggcaaacatttgtgtgtgtgtgggggggggggggggggggagtgttaggaagtctcacattgcctgcctcaattctcgtggtgcaacatatatataatatatcagttgggcaactttacttaatgccaattagttttaagctgaaatctaacatggcatcaaagtcaatagcccatcttcttgttctggcatgcatctgtggacgtgttaggaagtcccacatcacttgcctcaattcttagggtgtagcttatatatctgttggacaacttcacttggtgcaaattggttttaagctaaaatccaacagaatgttaagacactgggtttgggcctgagcccaaccactcagctgaacagggtagttagagaagatctgctgatgtggcagttagttaggatatgcgagtggttattgggaaaaggggaataggtgtaatcatcattcagtatcttttctgttagaaatctaatgggttgggcagagagagaattatctcttctctgaggagctttgctctgagattacagggggtctcttgtaatatttcttacctttttctattaataatatgttttgatttctctttgaacccaagttctcatagaataagtgttttttgagataaatgaaagatttgtcttgtatgctgagtgtcataaatgtcctatttctgttaaattttctgtaacatttgtgagaataaatttgataatcatattgtcacttctagtgagaattcttcctgtctttaatatgttgcttcttttttttttttttatttgggacatttgatgatgtaattgacagccacttgtcaatagtttttagagatgtaggaagggtgtattcagagagctttgttatttccaatgaggtgatgtaggacagaagtgtctcaatttaagcttatataactggctaactgttagagaatctaaggtggttgataggcttaatgatgaataaaaaagcactaaaaatttggtgcttggcatagttttgaaatataaatggtttatgtatgaatgggctactagtctggactctgaaccaacttgtggactgtttaggtgagaacagttatgcaaatttagctttatggtataatgataattatgataataaattgctagaagagcattttttggtttttcctttcagaatttcttgtaaagcagcaatttggggcaaggctttaagactgttgcagaagtcatattataattttgaaaataagaggattagcgtaggtgttgctgttgcatgataatttatatggttgtgtgaaatgtaaatatcagttctaaacagcattaataatggtgacttttatttttcttttttttttttatatcttaatatgctttacgattaaggtgaatctcaagattcaaacgggtgtagtttcttgacagtaatttgtttggagattcagtttttctcttatttctactgcaagtgttgtatgttttgtgtttgcatagacatgctaagaatagctaagctggggtgttataaaaaatactttattgactctactactcttgacttgtaagctcattgggactgagccactgaggtgcattggtggctcatgtagacagacttagcttataacctgtgttgtaataattttgaagcaattttctccaggaagtagaatgagtaacctgtacactgcactagggaaaaaaaagaaagaaagaaggccaaatagcattcttatataagcaaataaacaatacttgtgggccctttatgacatgtctttcttgcttaagtctctaccttttcgaattcaatgtggctttgttctaatcgtttaaaatattttgcagccgtttcttgcagtgtcgaggtccatttgctaaga

SEQ ID NO: 3319 - DNA, 349 bp, Glycine max
  Intron number 3 from transcript Glyma07g06130.1 (locus Gly ma07g06130) derived from phytozome v7.0 (chr-ID Gm07; pos 4856242 to 4856590)
caccttccaaggaagaaatttactgattttggtattctgttacataaaacattttcacagacatatggtttaatgtatattgcacttaacatcagtgtgtggtagcaattagcaagtaacttatcttaatattttaaaagtaaatgctgcttatgatgatttgcagaagcgagtgttaattattgttctctttcatggggaggggggaggttatcaaatattcaaatgttgcatttgatgacttctgcattaactagttttcttattttatgttgtgatctttatgtttctgttttgtagttactaattttgtcctgttctgtagctgctgttaggcaggagatcgctg

SEQ ID NO: 3320 - DNA, 7214 bp, Glycine max
  Intron number 1 from transcript Glyma02g28210.1 (locus Gly ma02g28210) derived from phytozome v7.0 (chr-ID Gm02; pos 29524438 to 29531651 reverse strand)
ctggtaggtagccttttcttccaatgccccatttatacaatcttttctctttcggttactatcttatgcttattccttgttattgtatgttaaataatttttaacagcaagcaatcaggaggttgaaatatgataatacaaacttttgttttcagttacactgtatatgtcatctttcttaaacggaaatttgcaagcacaattcaaatggtttatatgtaataaattggtttctgtaattgtgtgttgtatcacacaaatgatccttcatttatagtgaaattgattacaaaggaaacataatattccctaataatgattataatccctaatgatggaaccctaatttgcggattgaatttttagcatcaacaaattggagaatctatttgggactttctgaaattggaaaaaataaaaaagaaaaagacagaattagaaatggagatggaaagaacaacgccacaatcttggaagattaataacttgagaatgattcgtcacaaagaatagaattctttgataagaacataaggttccacacaagaaccaagagagacattctctcaattgtgtctaatatgaaatttcatcaaaagctaccaacaagtgttcaaagaatctatttataactcttgttaataaccccaaattaggcccaaggcccaataactaatctaataatcaaaagacttgaaaataacaataaaaaggtaactgtccatcacaggtccaaaaataagcccaaatatatatatatatatatatatatatatatatatatatatatatatatgaacagaatttaagtaccaggggtactatgtacatagataggattccatacacatggttcctcagtgaaactaatatagtttgattaggaaccatattatggctacatatgtaatacaattgccagaaatccaagcaaaactaccctctactgatacataaagccttgtcgaatgtgacttgatcattgattaaagtgaattgtgaaatctttctccaagtttctaagtcaagtccagattaagaatattgcattctcgaacaacttattgccattgaaaggtgcattggagaatataattctatttcgcatctgccaaatggaccatgctacagccatccaccaccattgccatctcttgacccttatgccatccacctgaacaaatgaatgttggaggaaatgatgtcttgggtttgatggaaacacttttaatattcatccaagacatagtttcccaccagataggctggatcttcatgcaatgaatgaataaatgggaagcctcctcctccatacaaccacaaaaagggcatgacaaatccatgatctgcacttgtctcctctgcaaatttttctttgttgacagtctatctctaaataatctccacgcaaatacagcaatcttactagggatctttaatttccataactcctcaaaacaatcctccttacttccaactgctcccccctcccataacaactgataggcactatgagtagaatatgtgcttgatgggtgtcctatccactctcattcatcatctccttgttgctctatggtcatgccttcaacctctccaaggaaactgatagccgaatcaatttcacaatcgaacaatggtcttctccaggtaaagtgccacttccaccaattatccttgtgagatcccagttgtcggatagtctggtgttgctgtgatgagatgaggtaaagtctaggatatttttctgctaatgattcctcctgacatatctacctatcctcccagaatttaattctatctccaactcctaccttccatctaaatccatcttggagaacccttccctggtatgaatgatgtacaaccctttttaaatccatcctccatgctgactcgttggctgccctacctgcttcctccaaaaccctccatccaccatatttagactccactactttagcccaaagttccccttggttcggtaaaagatgccacttccatttgcttaggagagcgagattaaaagtgttgatgtccttgatgccgagccctctcctttcttttggtaagcacattgtctcccgcctaatccatgcaatcttgttttggtcagaatctcctccccataggaatctacgttgtattttcactagcttatccaccactgattgaggcaccctgaaaaaggaaaagaaatagataggaattgatgttagtactgattgtattaatgtcactctccccctaaacgaaatgtgcctttgcttccattttgctagttttctcttacatttttggataatcgaatcccacatctgacactacctcgggttggcccctatgggtatacgaagataaacaaaaggaaaagccagcaaactacagtccagataattggccgcatcttgcttccattgatctgttactccgaaagctccaaaacagttcttaaaaaattgatctttaagccagagaccagctcaaaagaccttaggataacctttatagcttcaacattctcctgagatggttccccaaaaaagattgtgtcatccgcatactgtaggatgctgatgggcacattattggcaccaactaggaagcccttgtacaggttttccttaatagctctcctatcaacctagtcaaaccttcgacaacaatattaaataggaaaggtgtgggtccccttgcctgtcgggctaccattcaccagaatagaaatagatgcagatttcacacacccttcaatccacttgacccatttcggactgaaacttgttctcttcagcatatatagcaaaaaattctatgagactgagtcatatgccttttcataatccactttgaagataaggcatgatttattactcctcttggcttcatctatcacctcatttgttatgagtgcactatgaaataaatgtctcccttcagtgaaagcagattgggcctcgttgatgatagatggcatcaccttcttcattcgtttaaccaatagtttcgccacaatcttatacatacaacctataagagagataggtcgataatcgttcaagagatgtggatcagacaccttggggattaatgctaagaaggatgcattacaacccctagggaaaacaccattggcatgaaattcatctaaaaagcgaagcacatctggtttaaacaactgccaaaacttctttatgaacttgaagttgaagccatcaggccctgggcatcggtcacttccacaatcccaaatagcttgccttacttcctcctcttgaaaaggggccaccaacatactattctgatgttggttgatggtctgaaaattaataccatcaagcctgggcctgcaataatctggttcttgaaatctttgtgaaaagaaaaccttgacttcctccttcaccttatgtggctcatctatccatgttccatcaagcatgaccccttctagagaattattcctgcggttagcactaatcaacaggtggaagtagcgtgaattgcaatcactctcttggatccatcttgatcttgctttttgcctcaacataaattcatgagcttgggccgctacccatagggcttcctgtaattgtctcctcttcatgccttcttgtaaagatagctgcctctgaattgtgtcttcctctagtttatttagttcagactcaatctttttgacctttttgaaggtatcaccatactgttccttgtttcaactcttcatcctttgttttaatctcttaaatttatctttgagcacaaatcctccctaacctgattgctgatgagatgtccaacattgatgaacgagttccttgaaggaattgtctgatagccaacagtccaaaaccctaaaaggtttaggaccccaatcaatagccttagatcgaagtagaattggacaatgatctgagaaatttctggtaagagtagtttggaagcttgcaggccatcttccaagtcactctggggataccagaaacttgtccaacctgctccttgaagcatcatttggtttgtaccaagtgaactttctacccagtcatggtacctcaagaacctccatatcatctatccattcattaaattcattgatgttgctatttgcaaataccctttggcaactgccaaatctttcatcaaggtccctgatggaattaaagttgcccaagatgcaccaaagcccccttgacactgcttcttttagctgctttacggtatcccagagaagtctcttattatggatgtcacatggtgattagatggtaactatgttgacctgctgtgcttctctgatccattccctcaccaagagaataaaaccatttccaataactttcctctgaagcttaaataatttttcacactacgcacaatataccacctgctgtgttagtagcaggctgaatctcccatgaaacctctacatccccccataacgcctgacacatagcattgtcaatcatttctttctttgtttcttgaagacaagacatatccgcagcctccatctttctcaatcttctaattgctgcccattttacacccctccccaaacccctaacattgtatgaaactatatttattgactccttatgctatctccccgcctttccgcttctgtcctgtccctttcttccatctgcttaattttttcaatgattattttctgctcctccacacctgaaacctccacttgtttagccttgctccagatatgaactacctcttgattgtgctggatttcggattctgaatttgcacctaaatctccattttgaataataagggatatgctctgataccatcttaagattctttgaatgtaaatttaagcctaactcaatcccaaaagctagtgcgaggggtgagagttgcccttcacttatatactcttaagtgactttatctttagccaatgtgggacttgagttttttccaatacaaaatatgcagctaatcaaatcttataattatgggatttaaatcctatctataaaaggaaataaaatatatagtgggattttgacagtatccatttttcaaatcaattttggagaaataactagaaccatgcaactcatctaacatgtcatcaagtttagggataagatgtctataccttacagtgatgttgttgatgactctacaatccatgcacattctccaagtttcatccttctttggcaccaagatgatgggtatagcacatgggctcaagctttctttcacccatcctttttccatcaagctctccacatgcctttggatctcttttgtctcttctaaattgcttctatatgttgacttatttggtaaggacgctcctgggatgagatcaatttggtgctctatctctctcaaaggaggtaacccatgaggggtgtctttggggaagacatccccaaactccttcaataattcttccacaccttaggcaaagaactagcaacagaagacaaaccataatcatgaaacattagtaaatacataggttgcctagctagcatcactctcttcacctctttttctctcatgaacaagctctgtatttttctctcttcttgattttcatctttttttacagtttcgcttttttttttatctccactcttttctttcttttctctcctttcatgctttctcttttcatcaattttgtttttctcttcttttctctcttgttctcttttcactctcatttttatttgatcctcacaaacctcacttggagacaaaggtgtgagggtcaccttttttcctttatgtacaaatggaaatttgtttgtgacatcattatggacaacatacctatcatactatcaaggccttccaagtaagaaatggctagcctccatagggactacatcaaacagtatctcatcaacatactttccaatggagaagcatatcaaaacttgtctatctacaattagctccctattctcactcaaccattgtagtttgtaaggcctagggtgaggggaagttttcaaagcaattaaacgtctccgcatcagtatctcatcaactgtccatgttgtttgtaaaatgtctccgtgtcagtagtaaaggacataaaagtggaatattccacaattaaacgatccagcttacctaggatgtctgcatgtccatgttctccagcttaatgttcattaggctggtgagtacacagtagaagtgatggacattgtaggaataaactttcttggacttggtccacacatattaacagtttgtcaaagcctagtaccatggttggaggttaggggcaagagagaaccacaagacactacataaagaggtgtcaatttgcttccaacgagcttggttgttggttggaacatttgtcaattttttcgtcaagtgatcggcacggccttggcctcggaaccaaactaaacaacagcggcccaagtgctatagctggctgtcctgatgagttttttgcacaggatcagcggaacagtggtaaaagtcacagcggaactcaaggcggatgcggtagccatgagaaaagtgccaaatagcagtcaaaacaaccaaatgtggtcaaacagtagccaagcggtgccaaacagtgctcaaacaaggccaccataagtggagggtcatgacgggagggtcgccggaagagggtttgtcggaaaaggtgtgccatgcactgagagattgctggcgcatgagatccatgccataaatagtttttctgacatctagcttcgaaatattattgtgtttctttttcagcatctgcttgaactttctgactatatatagttaagtaaattgaggaatgactcgatcattgtttagttgtagggaagggaaaggatttggggggataacatttccgtggaatcaactgattttttatcttcaacattgctatatttgggtggtagaaacttagttgattttactcaagttatgttccacttttgccatgttatttctgttattgatcctaagattcacatttgtgcttattcgttattattttaagtaaaagtcatatgttttgaaattgagtgaaaaattatgagcatctttttatatatgaaaattactgtatctgctggcatatgggtttctacaaataaagtattccatgtattatacataactgagttctaatcatctcttattataatttattccatttatcatgggttgacgattcttttgatgttaataggttattg

SEQ ID NO: 3321 - DNA, 2016 bp, Glycine max
  Intron number 1 from transcript Glyma06g22730.1 (locus Gly ma06g22730) derived from phytozome v7.0 (chr-ID Gm06; pos 19470262 to 19472277)
atcatagcgaagatcgggtccatcacccccttctggtaaaacgacgtcgtaccctcactccctctgttttctatcaatccatttcaatgaataaatgaacaaatgaaagaatgattctgtttttgtaattatattaatttctagctggtaagtggtaacttatatttgtatttacaattttgcttaatactgttttgtttgcattagcaatttagcaattgttatatatatatatatatacacacacacacatataaagcaatttagcatacaagaagatattggattttttttttgaatgttttgaagcaattgaattggaaattgtcaatgtgcatcatgttcgatcttgaatctcacaactgtgtctttttcttgtttcacatttacaagtttgatatctgtggaattgaatgcttctactttttttcattggttttgtgaatatttgttaatttgttaataatcttccttgtagtgtggttgtaggcttcctcttttcatattcgtggtatttgtttccattttttattattcttttgtgcaaagaattagacagaaatcatagcgttatggcttcgagaaatatttcttatttttgatcctctatatactagacactaaaaagagtgagttaaatttaggtagttacttcataattgaaattttgggagtcaattgtggtggttacttttaaatatggtgtaccggtatatatgtgacaaatcaccttttgctatttgttgttctgaagtgaagcttaacattagtgtaggtcgatcttcctgtggtttgtgatgttatataggctatggactatggttgatgctgagataatagtctagtagttagagtgatatttaagtttactctggcaataagatgtgctataaaaactgaaagaagacttgttacttgattatttctcgttgtaaattatgatttgccttttttttaatagattaaataaattatgacttataattgtacattgttatggtcacagtaatactgtctgtgggtggatgaggtattgggcgtcaggaaccctctgggactctttgcctattggaaagggaatttgttttaatatttctttttggcttttaatgaaaaaatgaccgaagaacagataaggatatactgtaatagaactcatgtagtgtttgacaactgtttagtgtgtgtttggacccacgtctaatacatacataagataatgaaatcacatcgaatgtattcatttatatagaagacaagcttttaataattggctcatcatttcttatgcctccagtgcttgtgactaattcctatagtcattccactcttcaatattaatctaatacttgtttagtttatttcaccagtttgtagatatatatctagctatgttgcacaaacaatctgcctttcaacattgtgttaactataaagctttttaattaataattatatcactttcctcacaattgtggtagttcatttttttttcagtcatcctacattgagaaaaatatctaaacacatgcttgtctgtgaaagcttcttcatgattatggtgttatttatagcaattaatggtattaaaaacaaaaagaaaagaaaagaaagaattgtacactcaagtttttggatgatattctaaacagaatttgaataattggtcatttgaagtgtaaaacgtgaagtatattatacatggtaagtgtgccttggtagggattcttcttctaatgcatgaggaaaataattgaaatatctgttgaaacttgaaatgaaggacaagggacacagaaaacctatccatttgtataagtcattcgatgcgatgtaatataactgttaatgcttgaacaattttacattgttgtgcagctattttgtgctccatgtaacggaatgacttttatgctttcagtgacattgctatttgctattacaattgtttccttcccccaccccctctgggtagtgggtacttacagagcaagttacttactttgcaggagagaa

SEQ ID NO: 3322 - DNA, 5211 bp, Glycine max
  Intron number 12 from transcript Glyma04g38420.1 (locus Gl yma04g38420) derived from phytozome v7.0 (chr-ID Gm04; pos 44834159 to 44839369)
ttcttgtggttggaagcatactgcagccatttctggtaagttcttcccttgaacagacagaagaataaagaattgcaattaagtactttcttcctatcatattgatgtaaaggcagctttcttttattataaacgaataatttcatttcatcaaggcacacataaaagagagcaaacaaaacatcaatgaatacccagtctcttgacaaatctgtaagggaaacccttttaaatactatgtgctttacaacaggtagtggccaaatgttagaggtggccatgggttaacttttattctgtataactttatgctcatcttaaattgaaccaacccatccattaaaaaaaaaatctgaaaaaaggacagaaaaattaataggatggatttgaggtggataggatcggaaggtaaaggattctatgacagaataattttgttctgtattttatgttttgccaaggcaaaaatatatataagagagtcacagcaaaatctcctaagattgagctatacatattgattctccaaataaaactcctaagattacgtctagactaaacaaattgatttacatgatctcaggctaatagtacgggataataattgcacataattgcatacagattctattatctcatcatgatctcattacccccctcaagttggagcatgtaaattacatatttccaacttccacaacaaagaggtgaactgagtgggaccaagaaccttagtaaaaatgtcagctaattgtgcaggtgtaggaacttaagtaggtgcaatatttccagtgagatactcgtcgcgaatgaagtggctgtccacttcgatgtgcttggtgcgctcatgaaaaatcgggttcttgacaatatgaagcgctgcttgaatgttacaatgaagtcgcataggctatggagaagaccttttaaccatttcaattctcttgttacaactgccatggatcaattctcagcctcaacaaaggagcgagatactgtttgttgttttttagtttttcatgaaattggagaagatctaaggagaacaaatcattccgtaaggaacctacgagttaaaggacatccagtccaatcagagtcacaccaactagatagttgcaggtcacaatccttacgcaacaaaataccctgtcctggattccctttgaggtatcgaacaacacggagagcagcctcccaatgggtctctttaggcgcttgcataaattaagacagcacatgcactcagtatgaaaactcgggtttggtaaaacaaaggtaaatgagacgacctactaaccgcctatactgattaggatgaggaaaagacaagtctgctgcaagtgccagacgatgattctgttcaattgacacatttgatggcttagctctcagaagtccagcttcggctataatgtccccgtgtaaaaatgcattgtgcacatccatctgatgtagttcccaagatcgtgtggctgctacggctaacatgtgcgtactgttatcatttttacaatgggtgcaaaagtctttgtgtaatcgatccctttcttttgatgattgccaagaattactaaccgtgctttgaactgttctacacttccatcagatttatgctttattttgtacacacacttcaagccaagtgctttctttcctgaaggcaattgtgtgattgtccaagttccatcagtctcaaatgcatgtatctcatttttcattgtatctttccaccgactgtctttcaccgtgtcagtataagtgacaaactccttttcttgtgaaatggatgcaagaaaaacacgatgtgcaagagaaaaatggtcataattcacataatcagttatgggatagggtgcacctgagtctgtctttggagagggtgaacagttggatgggctcaatcttttggtggtatttgtcacataatcttacaatcgagtagaaggttgtttggttctatgttctctatccaataatggctcggttggtgatatagatggaagtactgtatcttgtgtgtccatattttgtagagtaacaccttgttcatcgaaccctacatttggctaaccccctctatcatccattgtcatatcaccattttcttccgtacctcctgtgtgatccgtttcttctacaccattagtcatatcatcaacaattttttcacagctccaatttttaggaggaacatcttttctggtagtaacatcaatagaaaaaggatacttggtctcaatgaattcaacatctcaagagacaaaaatctcttttgtttctaagtcaacaacttccaccctttcttggaatatgggtacccaataagcacgcacttcttactcctacttgcaaatttatcatcattccttctttgattatgggtgtaacataaggagccaaatattctcaaatgttcatatgcaggttgctgcccatgtaccatctcatatgaagttttttcattcaaaacaatggaaggagttcggttgatcaaatatgttgcagttaaaatacattccccctaaaacttaataggaagattaccttgaaatcgcagtgctcgagccacattcaaaatatgtctatgtttttcgttccactctcccattttgttggggtgttctggtgcaagatgtctgaaaaattattccgcgatcaagaaaatattttttcatgcatgtgaattctgtcccattatcacttctgaatattttgacttgttcatgaaactgcctctcaagcagagcaaaaaaattgtgaagcattgtcaatatttctcgtttatcacctaataggtatacccatacaacacgtgaataataataaattattgccagaaaataaaaagcaccacaagtagaaggagttctatatggtcctcataaatcacaatgaattaattcaaatgcactagtgtctttatgttcactcaaaggaaacttctctctagtatgtttggctctaaaacagacttatgttttattcactatattgctatctgtgttttctaacctcaggaatcaactgagtgattttcaaggaaggatgtcccaaccatttgtaccacaagtccatggaatgcaaaccatcagttttgtaagctctcacatttcgaactcctctgaagaaatagagttcacccctccattcacctgctccaatcagcgtcctcgaaatatgatcctgcacaacacataacttatcagtgaattgaacaacacatttcaattcatccaccatctatgaatcaaatatcaaattgcaattcaatttaggcacatagagaacattagtaagttttaagcctccatctagcaccacgcttccttctttaatcactgttgtatgttgtccattaggaagtccaactagacaactttgaatatctcgtagttcatgcatatgattcaggtttccagtcatgtggttggaagctcctgtgtcaattatccatgtattggtatcacgctcacctgtcatcttgtcattagagtttgttttttgagcatttagtaattctaccagcgtctgccactgctctgtagtaagcccaatcaaacctgaactatctccttatgagatcttggtgtctgcacttgttccaccactgtgcacagcatttgcacgcactgttcctccttttcctcgtccagttcccgagttgttgttggaattcaattcatatggtgatgaaatcttcttcaccatatcatgttcttcttgcttatgagactcattcttaggagcctcctcttcatgatgactcattgtcactaaatttcaagcaaaacctgttggctcagataccataaaggattctatgacagaataattttgttctatatttcatgctttgctaaggtataaatatatacaagagagtcacagcaaaatctcctaagattgagctatacaaattgattctccaaataaaactcctaagattacgtctaaactaaacaaattgatttacatgatcacaggctaataatacgggataataattgcatataattgcacacaaattttattatctcattagaagggtttaaattttatcaacccaagttccaacctgaactaatcaggactggaaatgtctactagatttaacttggatacctgactcaagccagctcttttaagatttaattgagttgggtgggttcaagagtatatccaacctatgtccacccctaccaaatgcgaaatcttggtccaaataaacttctcatcacaagaaatttccttaaagatgtaagggttacatgttacaacctttgaaggtaagcatgttgttagtgtaacaatagatgtttactcaaatgatgagaagtttgttactcaccttgctgtctctagtccacatctgctagtatgagaagtagatgttgagtttagagggagagaaattgagaggctggaatagtttgattgatattgcttgagtaagtacttaggttatgttgaacatctatataataaattctttatagactaagtggggactatttcctagacaaagagtaaatgggtgctacttcctaaatactaattcctatgaaaactaaatgcatttaacttgtgatgcacaaactcgtttagagcattttagttagcaccatcatagatatagtgttatactagtgatgagtgattcctctgactgccacagaacctgttagaaaagttgtttttctattagcaaattatactgccttttttacaattgtcatataggcagttagctgtttatatttcttaataagaacaagatgtggactaaaagttaataatcagtttcatgcctcctgaagaaacttgatcatttatcttgtttccagtatctgttggtggtgtgcttagtttttcttttaaagatcaagaactgcaattccctgcatgttaactggcatatcctttatagatttcttcagagctgtaggctttcgatggagatttgatgtaatgcatagctcctttttggattgtacaagttgtgggatggattttacttctagtttgctttgataatattttatttaagttgatttaaattttaacttccactcacttgttaggcttgtacctgatgcttatactgtacttgtagttgcgaaagaaaataattttattcctgccatttatcctggaacttttcattgactttcagaaggaagagtgttcacgtggggctggggaggttcc

SEQ ID NO: 3323 - DNA, 8701 bp, Glycine max
  Intron number 5 from transcript Glyma08g40250.1 (locus Gly ma08g40250) derived from phytozome v7.0 (chr-ID Gm08; pos 39946702 to 39955402)
ctgttcgtcgggcaggggaacttgatcaacctgtggtaaattttgaaacattatttaatatttattggccttactcgctcgacactcacaggcaggaaagaagaaaacatccttcccttcccactcccaggaaggtaaagatgcaaagatgtttgaaacctaaagaagctttgttccgaaactccaagaaccaacttccctcatctcactctcaaattcaaaggaacactattaatcaacatatcagtaacgacaacaacacccatatccttgacaaccttacccgtttccatgtcgcacgtaatcaagtcgaacatgctcgccatgtgtttgaaaaaattccaaagccaagtgttgttttgtggaacatgatgatccgagcttatgcttggaatggcccatttctacaatctattcatctgtaccaccgcatgttacaactcggtgtcacacccactaacttcaccttcccttttgttctcaaagcatgttcagctctgcaagcaattcaagttgggagacaaatacatggccatgccctcacacttggcctgcaaactgatgtctatgtttctaccgctttgcttgacatgtatgccaaatgtggggatttgtttgaagcacacacaatgtttgatatcatgacccacagggatcttgtcgcgtggaatgcaatcattgccggtttttcgctacatgttcttcacaatcaaacaatacacttagttgtccaaatgcagcaagcgggaataacgccaaattcttcaactgttgtatctgttctacccacagttggacaagctaatgccttacaccaggggaaggctattcatgcttactctataaggaaaatcttcagtcatgatgtggttgttgcaactgggcttttggatatgtatgccaagtgccatcacttatcttatgcccggaaaatcttcgataccgtgaaccaaaagaatgagatatgctggagtgctatgattgggggatatgtcatttgtgactccatgagagatgctttggccctttatgatgacatggtatatatgcatggcttgagccctatgccagccactcttgcaagcatacttcgagcatgtgcaaagctcactgatctaaataaagggaaaaacttgcattgttacatgattaaatcagggataagttcagacacaacggtgggaaactcgctgatttcaatgtacgccaagtgtgggatcatagatgactcacttgggtttcttgatgaaatgataacaaaagacactgtgtcttatagtgctatcatttcaggatgtgtgcaaaatggctatgcagagaaagctatacttatttttcggcagatgcagttgtctgggaccgacccagattcagcaaccatgataggtttgcttccagcttgttcgcatttggccgctctacaacatggggcatgctgccatgggtactcagtcattcgaggcttcactgaaaatacatccatttgtaatgccattattgacatgtatgcaaagtgtggaaagattcatatcagtcggcaagtttttgatagaatgaagaagagggatattgtttcgtggaatacaatgataattggttatgccattcatgggctatacatagaagccttttcattgttccacgaattacaggaatcaggcttgaagctggatgatgtgacccttattgctgttttatctgcatgtagtcattcaggccttgtcgtggaagggaaatattggtttaataccatgagccaagacctcaacatcttaccaaggatggcacattatatatgcatggttgacctcctggcccgagcaggaaatttggaggaagcatactcctttattcaaaatatgccatttcagcctgatgtccgtgtatggaatgcattgcttgctgcatgtaggacccacaaaaatattgaaatgggtgaacaagtgtcaaagaagatccatatgctgggaccagaaggtactggaaattttgttcttatgtctaacatctacagctctgtaggcagatgggatgatgcagcacaaattagaagcatacaaaggcatcaaggttacaagaaaagcccaggttgcagttggattgagatctctggggcaatccatggatttattggtggggatcgatcccatccacaatcagtatccataaataacaagttacaggaattgttggtgcagatgaaaaaacttggatatcatgctgattctggttttgttctccatgatgttgaagaagaggagaaggaacagattctcctttatcatagtgagaaaatagccattgcatttggaattcttaataccagtcccagcaaccccattctagttacaaaaaatttacgtatatgtgttgactgccatactgcagtaaaatttatgactcttataacaaaaagggagataacagtacgagatgcaagtcgatttcatcattttgagaatggaatctgcaattgtcaggatttctggtgagaaaaagaaaaggtggaattgtaggtctatttagaatcacccagtggcaaaagttcttcttgtgccacttgctgcctgaaccaggtaatgtcatttatcggtacctttgttttaatttttcttttctttttgcataaatcctgacaactaagagtgtgtttgtttgctaaattttagaggattggactctttttccgaagttacaaactattctttattgaaaaaaaaaaaaaattaagttcttattaagtaaactttgataaacgctcaatacccgagtaggcttttaaaattgataatgctttctgggtgatctcaaactttgcaattgttattctgtccaacaaaatcttggaactttttacgtacagagaatttacttgttactaatataatccaacccgtgttcttctttaaatctacttttttccctccgatagtatcaaaaatcgaatcaatgcataggaaatgaaagtctctaccattagcctgaaagaaattattgtttttaagaatcctgttccatctaatcctcctctttcttccctgatcccaaattgtaatttcttcttacagtttctcttaatttctaaaatttgaggaaatcaaaagttttttggtggttagattctgatttgtttttgcagcaattgcaaaagcatgcaagtcacatgaagaaatcttgagtggagctaccaaacatggtttgaaggctctgcagaagtgccatttgcttgaggaagctgctcatgctcctgctattctagctctttctagacccatcgttttatatttgctatgaacaatattcacgcttcttaggaattacctaatttgtgggactatgcttataccgatttccatccctaattatgttttagaaatttgttcaatcatcggttccgatagaatagttcaatgaagtcatcgtcgctcttaccattgtttcaccatagttacttgatttatcgtgtaaattgacaagttcctaaatttcaatttcaacatccatcgcaacccttctttcctgtactagaaaaaacccaatatactaaaccttcggcaaccacttcaaccaatgtcgagcctgagccggagtgtctacttcgctgccttcgcaatttaataaagccattgaattgggagatccaaaacactctgcaccaacccagaaatcaaacaagttcaagcaaacaattgcaatcgaagattcaaatgcaaacaccatagtcggtgcattcaaataattagatagaatgaaccaaaaacatgaaatgcaagaatgtggaagaaaagaaaatatgcatgtgtaaagagggagaacctaacctgtaaaatgaaaaagaaaagttgctggtgagaatgacgacggtggaagcggtcatcggaagtgccgtcagaggtggtgaaggtcatcagaaggggcagagaggaaggacaatcaagacttggtgaaccactttaaatgtgggcagtgtataacaatattctacaccttagatcaatctaaggactgtaaaaaatattacttggtgaaccacttatgaaagtgatggaaccataaatacgtcaaggagagagtttcactcttgccaggtaggtcactttgacttcgggaataagattgatagcttttctaatggggcgtccaccttagaagcagtcattttgtaatgttagttggtaaaattgaggctgaatatcggaagtgggacatagatgaatctggaagccacactcattttccaaaatcaaaagaaatgagtccagagaagacttgcttggctcatagccctgtatccagtagtagtttcaacaagggctttttcgacaatgaggagacactgcatagagagatcatcagggacctgggagtttcatttgctgagataaccactactaaagacaacaatgcctctgcagatattaacagtagaataacctctacatcagcaggagtgatgggtatgaagtccatggagccatgaatattctgtcattcaactctagaggcttgggcagtggggtcaaaaggtcagctattaggaagttaaccttggctcacaatgtcgatattctctgtattcaggaaaccaaaaaggagtccattgataaaaaattatgccaatatctatggggggatgataatgcatcatgggagtttgttccttctaataatgcagcaggaggacttctttatatctggaataatgaagcttttatggtggatagaagggtagtaggcagaggattcattttgttggaaggtacatggactaaagacaataagaaggtgtacatcaccaatgtctatgccccctgtgacttacaaggaagaagagatcagtgggaagagcttaaacaccttaaagctctttaccatgatggcccatggtgcttattgggtgattttaattctataagacaccaacaagagagaatgagctcatcctaatctgtggggagttccattaacatctctgagtttaattcgtggatagctgacatggatgttgaggaggttaggtctgttgggagatgcttcacctggtgtagacccaatggaacagttatgagcaaactggataggttccttctttcagatgaatggttgtcacattggccagatactacacaatttgtgttagatagagacttctctgagcattgtcccatccttttgaggtctagaatcatggattgggggcccaaacccctcatggtcatggattggtggttgaaggacaaaggttttcagaatatggtggttcacagctgggggaattatcaccctagtggctggggtgggggaattatcaccctagtggctggggtggttatgttctcaagcagaaattaaagttcctcaaacaatgcataagacaatggagctcacagaatgggtcagtcactgttagaaagataaatgacctaaaaaagcagctaaatgacatggaggcaggtattaatgcctcaacaataacccaagatgaagtacagctcaagaaatccttgcaggaacaactgtggagtgtagctcttgcctatgaatccatgcttaggcaaaaatccagagtgaagtggctaagagaaggggatagaaattcatcctatttccacagaatcatcaatcatagaaggagggtaaatgcttttcaaggcctgtgcattgatggggggtggattcatgagcctagcaatgtcaagattgcagtttttcagtatttcaaagaaagattctcagaacagaatcattgcagaccaaccctggatgggattcagttttcttctcttggtcaagggcagagggaaagccttgttactagattctcggaaggggaaattaagtctgcagtttaggcttgtggtggagataaaagccctggcccggatgggttaaacttcaactttattaaacagttttgggaaattctaaaacctgattttatcaagtttatggatgaattcttcataaatggcacattccccaaaggaagcaatgcatccttcatagcccttatccccaagaccattaacccacaatctattaatgattatcgacccatctctcttatagggtgtgcttataaaatagtatctaaagtccttgctaataggctggctcttgttttgcctcacattattgatgaaaggcaaactgcctttctcaaaggaaggcatattctccatggtgtgatgattgctaatgaagtcatagctgaagccaaatgcaaaaataacccttgcatggtattcaaagttgattttgaaaaagcttatgactcggtatcttggggatttctaaactatatgatgatgaggatgtgattttgtgatagatggagaaaatggatctatggatgcttgtctagtgcaactatatcaatcctaatcaatggcagccctactggagagtttgtgcctaagaggggactaaggcagggagacccccttgcacctttcctatttgacatagtagctgagggccttactggtttgatgaggacagcggtctctaaaaacattttcagcagttatcaagtggggaggcaaaaggaagagatcaacatactgcaatatgcagatgataccttgttctttggaactgcgactacaaccaatgttagagttatgaagtctatcctcagaatttttgagctggcttcagggctcaagatcaattatgctaaaagccaatttgggtgcttaggtaaatctgtgacttggtgcagggaagcagctaattaccttaactgtggcctgttgggtttccctttttcttatcttggaattccagtgggttcgacctctaaaagctggaatgtctagcagcctcttattagcaagtttgaatctaaattagcaaaatggaagcagagatgcttatctatggggggtaggatatcccttattaactctgtcttaacagccctgcctatttacctattgtctttctttaaaattcccaaaaaagtggtacataaggtagtatctatccaaaggaattttctatggggagggggttctgaggcagccaggattgcatgggtaaattaggacattgtgtgtcttcccaagaacaaaggagggctagggattaaagacctatccaagttcaatgaagccttgcttggtaaatggggatgggaattggcaaacaaccacaatcagctttgggctagagtcttgttattcaaatatggagggtggaataccctatgttctggtagggacagtgcacatttctctcaatggtggaaggacttgaggtctgtttttcaccagcatcacagcaacagcatcattaataatttgagatggaaggtgggtgatgggttaagaatcaagttttggaaagataagtggagggagggtgacttaagcctaaaagataaatacctaagcttgtacaaagttagtactcagcagaaccattcaatcaattcaatgggtattttagtggataacagatgggagtggaagtttcaatggaggagaaatctctttgatcacgaagttgatatgggagcagcttttatggcagacattgttgagtttcaaattcaaccttcaagcagggaccttctgctttgggggcctgattctggtggaccctactccacaaaggcagcatacagcttcttgaaggatggtgacaatcaggttactgaagatagtgacttcaagacaatctggaatctcaaaattccacctagagcaagtgctttttcttggagaattttcaagaaccgaatccctaccaaggttaacttaaggaggagacatgtggagctgccttcctataactgcccgctgtgtgatgaggaagaggaaacaattggtcatgtcatgtactcatgtataaaaactaggaatctttggtgggagattatgagttgggtcaatagagtgggtccattctccattgagtctagagatcattttaagcaattctctctgtggagtggaaaaagttcagtggataaaagatggcaagtcctatgggtagctctatccatgactatttggaagcatagaaactgtatggtttttaataaccagaatttctgctctgaaaaagtcatggacgaagctttatttcacacttggtcttggttaaatggcatggagaaaattttccatatccattttaaccaatggtctactaggctgaaggcagaaatgtcctaggggtgtttgaggtttgggcttttaacttatgtgatatacttttgtagatgggtttggcagaatctgcctttgtaattacttaccttttcagtacatctagtaaaaacttcgtaccccattgcccagaggctcttcgctatgcgaaggtatgggggagggatattgtacgcagccttacccttgcatatgcaaagaggctgtttccggattcgaacccatgaccaacaggtcaccaaggcacaactttaccgctgcaccagggctcgccctcttttcagtacatctagtactgaagtattattaatacaatcatatttttgcagtgcaaacaaaaaaattgggtgttaagcttttatagttgatgctggtcatgtatgatgatagagttaactatggactgaataatttcacacataatttaaactctataaatcattgatggattccaatatatgtggagtaataattgccattttaccacaggaaactgcatttagcaggaaaagaagcttccgcaa

SEQ ID NO: 3324 - DNA, 1251 bp, Glycine max
  Intron number 3 from transcript Glyma13g04900.1 (locus Gly ma13g04900) derived from phytozome v7.0 (chr-ID Gm13; pos 5166696 to 5167946 reverse strand)
ctaagcctcctcgtgtaacccataaattgcttcaggtattctcaatttcgagaggaaaataagagggtggttgtttttgtatgttcaatacgtagattgctagggtgaggttgtttgtgaactaaattgtggaagtgatgcattccaaggaaagtgtggcctacactttagaggagtttaatttaatccccattttcctgctttcttttccttcctatgtaatttaggttggctgcaccctacgtgtatgatgaattgccaacattcctaaaggttttaagataattatgattttatcacttttgtctcccttatttatggggttcatactttcctagtcctacagttggtcattcttgatttttaaagataaactcttctaaaagcttaacctggtaatgaatgaagatatttgatgggcaaaactgattctgatgatcatttcatggatgccctcttggactatattctgtttgtctgatgaacttgggctaatacttaaatttttcttcccgagttatgggatataggatggaaccactttgtgtaaaataactaaaaatagcatggtaattttattccatttccttccatactactacattctatctcattccacccatcattgcctagatctgtttatctcttttttaatttttatagttcattttaaggctgccacatctattttggttgtaaactaactttgaagcatgctatcaacttattaagctttaacacttaacattttactgttttattttgttctaaatgttatgcttaagtagttaaccacaaattaatgtaatacagtcagatatttaactgttgtcttcttttctgatgctaatgcctcttgcctttagttgggcatgtcctttttagtgcttcttgcctcaaaatgttaaaaccttaaggattgatgaccttgatttactgactttaaatcatatacaaattagtatttaaaaaatattgacagtagccttggctttatttccaatgactatgaggctggtagaatgacttcaaaaccacagagggggtcgctaaatttgagtcctatagtaacaatgggtgtatggctaactttttagttttgcaaaatcatttctaaatcaattttggggctggtagaattgattctgagagaagtgcaaatttttaacttttctattggtataattgattttgggtgtgaaacggacccatgtaggttcttggaggaacagctcgaagagtgaagctact

SEQ ID NO: 3325 - DNA, 2247 bp, Glycine max
  Intron number 2 from transcript Glyma13g01080.2 (locus Gly ma13g01080) derived from phytozome v7.0 (chr-ID Gm13; pos 801829 to 804075)
aaaggtataccatcgtattcgtatacatgtttattgcatacatttattatcacttatattcatcgtcgtgtgattttaacgcatatcctaaatatcacagaacaatatggtggcgtctcatgtatgttgtcttataatcagagagaaacattagtttttttaattcacaaatgctaatcgttagtatgttatattagtattgactttcttatgacttctatccctatgttttttcccggccatcaccacgaaatcatcgtatgatttccgaaaaacacttattataatagttaattgagatggtttttcatcgactggtcaaaatgtcttctttgatagtactagatttggtttaaacatctgaatcaattgtcattttcatattaagatatctttgtaggggagtacactcttagtttattcccaagaaatttggtaattgatatataatgttaaaaatttatgttaatctttgtaaagtatgttgattatattagtctttagtattttaatttgtattaaccttttaaaagtctaagtggagttgttgtgaattgtgagctcggtggagcagaatgggtggatttggttgctttagtttagatcattattattattatcacatttatatggcctctaggatgtggtggggacggtaaatatgtgtgctacagttattcaaggtgtgaactccacaaaagtttcagcgcctcaaacgtgtgaagcacctttaatcagccaccaaaccatcggcaataattttacagagggtttattgtgtatgatatataaataaatgaatttaatttatgttgaagtacaataattttttaagtaaaaattaaattattttaaaaaattatttgctatacttagtttaagatatatacgtgttttttaatttccagttatatactttcaaaattaaaataaagtgttgaaaaaaatcttaaaaaaagtgtgattttattcttattcttatacaaaaaaagtattgtgcgtgcccactaacaagtagcattgagtaacagtcacatgagcatatgatattctggttcctccactccgttaaaggaggtacgtatatatgtcgtatgtgatactgtgatcatattcatatcgattgctaacattctataataataataaaaaaacaactgtcgtatcgattgctaacattctataataataataaataaaaaactgtggccacacttgcatgcttattatattttcaatagccgtgttgatatgtctctcatgtttccctccatattataggtgtaaaatattttgctgataaataacttattctgaatcaaagtaaattaattttctgagttgaagctttaataactcattttgttttgaagccagtaaattgtctgtgatgaagattcttggaaaattaaatttgggaaacatcctagtagatggttggattaaagtttacaaatttaagttttagttaaatttaaatttgcaaattgaatttacaaaagtatctcaagtcttgttttttaaattgagtttttagataaaatatcacttaattcattttatatagttataaaattcttaattttctttattttaccatcattgacagttgttgaaacttgtatggcttgtaataaataaatccccaccaaaatggaataattactcgacaccaaatatctaaattcaacaccaaatggcataatgtcaaaacgacattatgccagctttgtagcggttcaacatggaatcttgaagcctgaaggcgttgatataaagaaattccgcaaacagtttggtaggtgagtaaacttgtaacagaaagttgacacggaaggtctgtgccaactttgtttggaagtcaatagtcgtattcgctcaccacttaaacgaagtccacatcctcacctaactcatttacctgtttttcccacaatgacgatattacgtagtccaatagacacaattatttaatcatttagaacgtgtaagtcactcattatgctccacagctaccaagagtcacatcattttagcatgaaaatagacagtttatgaagtagctgatcagcgagcacctgcctattactggactataaaatgtgtaattgattataaaagaataaatgtaaaactccacaaacctaaatttaattagcctaagtcttgtcaaaggtaatatgttacaaaaaaaataccattacagtttcttgatatgttcaatttctggttggtcaggatatctaa

SEQ ID NO: 3326 - DNA, 2839 bp, Glycine max
  Intron number 12 from transcript Glyma02g09340.2 (locus Gl yma02g09340) derived from phytozome v7.0 (chr-ID Gm02; pos 7315590 to 7318428 reverse strand)
ggatatcaacccttttatccagacatcgtagtgaggtgattcaatttaattcatcttttattttgatatatttttaggctgctattaatattcagacttttttttttgctcagcaaaaataagttagatatatatatatgagtactagaggtactaaagttacatgtttgggattgggtagacatttggttcctaagatcagacttgacagtctggataggaaccagaagctacttacagtataatctgtatactacttagatcctatatctgctaccctctcctgattacaaaaaccttttcttaggttactcgaccattgattgaaatctgttacaaaatctttttccatgtatctgaaccatgtccaaactaagaagattgcatcatccatcagtttacttccattgaaggtgtcatttgagaaaactatcttgttcctatgctgccaaatagtccatgttagtgctacccaccagcacttccatctgttagcccttattccagcgtccaacacatttgcatggtgcagaaaatgttgtctcggattatgcgggaaggcacctgagatgtttacccaagtcaaagactcccaccaaagaggagggttttactgcagttgaaaaatagatgagctgcatcctcctccttgttcctgcagaatgggcatagtaaatcattgatctctacatgtctccttcgtaggtttaattttgttggcaatcggtctctaattaacctccacgcaaaaaaggatgttttggttgggatctttaatttccacaattcctcaaaagctccatccagattctcattcattgattcccccatcagccagattatatgcactttgtgttgagtattggccatttggatctgctttccacacccagttatctcttctatgtggctggattagggtccgcgctatatcccccaagaagctgtcagccaagtcgatttcattgtcaaacaaggatctcctccatatgaaattccactcccaacctgcatctgtgtgacttaatctagtctcttaatgtgttccttggagtctttgtcatatagctcaattccatgcccctttctgttgtttatgcccttatatgtcatgaccgacccttgattataggttttcttgagagttttatttctattgattaataatagaatttacttggctgtaaccagtaactaatgctattttgctctttttatatttttacccttttgcttgaatatcaaatgagactattctttccgtttggttattccaggaataagggatctactttgattttatttgatatggtttaatttattatggttagaaaagatcttagccattaagtgaatgcttgtttgtgcttttccagaaaaaaactgtttttgttttttaattaaaaatatcttaaaaaattcagaataaatatgcaatgcttttgaaaaaaccagcaaaagcctaaaataaaaatctgttttacgacttcctcagaggttgaaaatagcttttggaaaaaaggaacctttaaaaaaaaatgctgaattatagaattttaagttttctaagctttaacagccaggcccttcactcaattctgcaaataattatgatgttgtcatgacaaccaaactgaataaaataacataactttctttctttatcacaacaacaattgttttatcccattggatgaggtcggctacatggatcatgtgacatcactaggttcagtcaacaatcaaattccctggatattatttactctgtgtgattccttttaaggatccccttcaatgtcttttatgttcccccattatcactttttacagggctaaaggccatgcgatctactttcctctccagtgcctttagtggctttctttgcatatgtccaaatcatcttaaacaattttgtgtcatcttatcctcgatgggtacctcactaatatctcctcatatttaatcattctgtaccctatcctttcttgtgtggcggtggcctgaccacatatcttagcattctcatttatgctaatttttctttgtttattatcacacaacacacaaatatagtttgtgtacaaatttattgtttggtgtcaagaaagcatgatacttctaattagtagccatgtgtcaaacatgcattaatgttggacatggcatgggcacttcaaacgattttagctgcattttacaaattttattacttttagtttttacaactttgataccaatacaaattggaatactacaatattaagataaattgtagcagttaattaattatgtttagatgactcatgctctttattagaattaaccctcatgtattttaagaattttattttatgttcatttcagctttgttttgcggttttgttaacaacatcccttagagctaatttgaagcaacttcaaatggaaagttatttcttgggaaataaagtatttattgcattggagatacaaaagttgaaataatgaactctttccagagaaaaactttccacctttagttgctaaggactgatgtatacaaatcagctctaaggactgatgttagcaaaactgctaattttatgtatattatagaagtgccatgtcctgcaatttttgaattttgacgtatatttgtgtccatgttgtgttgtatccgagccttctagtttggaaatctttttccttttgtgcacaactttatttttcttaatgtcagcccctttgaataattactttttcaatttgcacaaaatattttgtaagggtgtgattccattacgtccatgttcactgaagactttccttgtctgaaacaggttttgacatttctga

SEQ ID NO: 3327 - DNA, 1680 bp, Glycine max
  Intron number 4 from transcript Glyma17g11730.1 (locus Gly ma17g11730) derived from phytozome v7.0 (chr-ID Gm17; pos 8803403 to 8805082)
ccttttccctcttcctcaatcacacaaggaagcaggtgaatcctgtcatcactattctttcatcttgattttcttatgagcagatgcataattaagcttagtttaatcatatatatagtcaatatgttagtagttagttttagatttaattactcatttagtccttacagctacacaaactttacctttttagtttttatacttaagaattatccattttggtccctacccatacaatttttaatccgttgatatcatttttatcccttttagtttttaccatctaaatttatagggactaaaatggattaaaaatactgtataaaaaggaatgattttaagtagagagactacaagataaagtttctacaactataaggatcaaataagtaattaaaccttaacatttatttaattatgtaagaagttatttaattggtgcccaccttccaagaactctgatatatattatatttgaatcagttttcctatccattacccttaggtaatagttaaggattcaaaagtggaaaacttttattgacaagtatgaggttgtggttaatgttactaacccatctctaccgtgatttgcaataaacaatttttttattgattccttgaccattgcacttgggacaatagtaaaactgtatttgaataattccttaaccaatatatttcaatcaatttcttaccgaagatttgacagtcacatttgctggcccagttcactttaaagttaaaactcacatgaccaaatgagtgtgtctagatgcctcatatctcaatgtgtgggtggcattgtttgaaagacaagaaattgtatcactgcttaatcgttttcaattttgggtacacacggaacaaggaatgctagtctttggcaaaaaatgaaccattcctagtatcttccttgcattatctgttttctgaaagtaaggatgcgggtaactctaggcatgaagctagataggtatatcgtaagataacttcagaatacaaacatgggatggagtgatatcaaatgcaagtgcattggttatcagaaacctgaagagataactcaggtctggaaaacagtcaattcagagaggttcattttaaacagctaacttttactaactactaagtgactttatgtggctgttgttagccaaattttgcaatgttgctctggtgcattggtgcttgaatttcgacagaaacaaatagaaagaatacttaataaataaattagagtttgatatttacttccttgatgattaaaaaaattcttagaatgaaaacttaagttctattactttctgcatctatgaagaattttcagcttgtatttacaccagtacatgtaggttttttatttcattgtatatatttgtcattgatcctttttaaagagtcaactcaagcggcttcttggggcagttgccattgctttacataattgatgattaaaacattgttaacaaatttagaacttgagattgcacactgatcatacattcatactacattgaacctttatatattgttgtgtttactttgtctgatgcagttgcaatttagtcaacctttttttttatataccatatttatttttatattttcttatacttcatgctttgtgatttgaacaatgcagaattattcagaaattatttgaagcagattagggaa

SEQ ID NO: 3328 - DNA, 1199 bp, Glycine max
  Intron number 1 from transcript Glyma10g41860.1 (locus Gly ma10g41860) derived from phytozome v7.0 (chr-ID Gm10; pos 48836408 to 48837606)
gaaattaaaacggcttacagaaagcttgctcttaagtacgttctcctctttcgattcccgtttgagtttttcttttctttttcttttattattattattgttggaatttttcatgtgggtacttgcatatgcggttctgtttgttttggaagctgctgttttttgttttctccaagtgtgctaggttttcttttgttttgttgtgtagttttttactttcttatgcaaagggaatggtttccatcttgttagatttcggagattctttttatgcaaaatagggtttctctctgaattttttcttgtgttaaacgctactacaatcttcttaagcgaggtttgttaattgaagaacctttgagggtgacgaacattcttatctaatctgataagttgtaacctttcgtgttataaagtgcactgaatcgaagaaagggactagggtgcagagattggggaggaggattaaatacggttaggataaaacttattcagagtttcacttcagtaatctatacaataaagctttgcatcagttttttaaccgaaggagcggtctagtatagtggccatagcggaccaaatagtgggtgaatagcggctgggatgacattgccttgtgttgattccaaaaaaaccctctgaacagagacattagggtttttttggggggctatttttgggatttcatatttctaaaaatgaaatctacagctgtaatagtagtgaaaatgactaagaagacttggattcagaagatgatgattggtgattcctatctacgaaacttgtatttgacttttgttggtatttaagacacctatgactttctattgttaattatgatcatgaattcagaataaatttttttcatttttgagaatttgtatgcatacaatatacattgataaactataaaaatttcagaataacagctatcttgctatagcgttttatggggtcagccgctactcgctgccatctggtattcaaaactctaattctgttttttgaaccacaccaaaagcatctaaggaaatacaaagatttatccatagttatgtcagttttttgttttggtcttgtagaattgaggagtttgtttacttgttttctggttaagaatgacaattatgatgataatgtctggaatctttttacacatctctatatgattgacaggtatcaccctgacaaga

SEQ ID NO: 3329 - DNA, 2345 bp, Glycine max
  Intron number 8 from transcript Glyma15g43220.1 (locus Gly ma15g43220) derived from phytozome v7.0 (chr-ID Gm15; pos 50768847 to 50771191)
ctcacgagcggagaggctactacacattttggcaggtctgtttttttaattcttccttattgactgtccagttcattttccctaagctgcttcttctgctttctgtttttgtttttattctcaacgaaacttatagcgatttaccatctgttttgtgttgtttctattcatcttataagtcaaagttctgtgggaaattatttattatctaaattagaaagacaattaaaatctgctgtgcatttatttccaatgaacgtactagttacttacctaaccttagggacccggttgagcatacgtatcttgcttttagatgatttaaagatagtgattggcatcctgaggatttaaataataccttcttgttataatttatgtgttgtgcatgtgggtcacatggttcatcttaatctctatctatcaattaacttgtggtttatcttgatttacaataaaataactttaatgttatcaaacttgttattaagcatacaaaattatgtcttttgtttttatccctttcctgtggttaaacactctggtcaaacattaaatatctgtagaataacaatctgctcgggatctcgtcaatctcatcagtaagttccagatttgagtcgatcaattatcggttgaacttcataatgaatttatttaaaactagctttgaataccatctattactcttgtcgtaaatcgtaattcaacatactaggcttaattgataaaaacgaatcttttgtttgatagaactgaaaaattaacctgaaactagaaactaaaaaactaatttattaaattataatattgcatttttcatctgtagctttttcatttcaatttgaatttgagacataatacatacattcaattaaagaaatttgatacaaataaccttgtattttaacagattcaaaattaaaaataattatcaaattatgaaagattacaaagataaatttaatcttcctcaactttgattatcttttatagcctttttatttcaatttgattgtcttcatcattcaccattctttagaaaaaaaactctctccaaatcatttaaatctgtaaaatcttcgaacaaattgcttccacatcgtgattcattgacttcacctagtggggagagcgatatctaagaaaaagaacaatgaagataaatttacaaatttaagttaattcttagaaattaaaaatggtccataaaacaatactaacctaactgggatggagaatataaatcgcttgctatggaggcaggttcttcaacatgtttctctttattcaagaaagaggaatattggaaagccacattctgattgttccaatttataattcaatgaaagatttaaacaaaagaaaattgtatcattttaattaaaacgtatttcaattaatttcaataagaaaatgcaagacaaatccaatccattataactgatttataaaaagtcaattactactaattgatttatattttaattcaattaaattttttttatgggacaatcaattaaaattgaagaatgaaagaacaattactttcttaaatcaaaatgaaggattttttttattagggtaattgaatagtgcttagaaatgcattgcacatagtttgattgtacattaaaaaatgaataattaaataatttcattgaacattttatggagggaatgaataaggagttatcatgtgatgttatcccatagaataatatatatatatatatatatatatgattttgaactttattgcgtgttcatgataataaatacttttgcttcaactatttccatttgtcttattacgatcatattaattatatcttctcaaggataataaaaatatagcaatgtttttcctatattactgctggttaatattaaatggttcatcatctttctacgatgtttgtgatcttgggattctgctggagtcatttgtttgagtttcgtaattaatgggaactacactaactatgattggtttcatattgaatggtttatatagaatagtattataataggcaaaagttgagttatacaatggaggaataaaaatcttattccttggactattgaattttggtacaggatatgagttctattcttgtcaatacgaaaaacccatgcaacgatgcgttgattttgaatctgaacttatatgataagtgaaaataattgaagtcaggatcagaataatttagaaataaccttggggattgaattgcttacctgtccaaatcttaattcagaatcagaatagttgtttagtttcttggttgattcatctaaatcattttagttgatctgctgatttgcttatttgtcaccagcac

SEQ ID NO: 3330 - DNA, 1875 bp, Glycine max
  Intron number 2 from transcript Glyma12g03550.1 (locus Gly ma12g03550) derived from phytozome v7.0 (chr-ID Gm12; pos 2359754 to 2361628)
ttgtctttgttttttctgcatcatacacaatagtggtacgtggtgttagtatgactctttttaatgcttgcactttgcattagaaatttgctgtgaattgtaagttcttggcatggacattttctcttgaaacattaaataatttgtacagtgatgaaagtttggccagtgcataaaaaatgtataaaattgaaattttcaatcatggtaaaggcaccagtcatgtcagatactaaatagtgagatcctacaaagattgtgagcaagtaattgattaagatggaaataattgaagacagaattgtaggaagtgtttagaatgcaagaataaaagcgactagggtacaaaactccattcttgtcttcccatgcaactgaattcaattcaatgctaatcaaatcatgaaattggagtttgaacctatgaaattagatttagctcaattccttgagtcaaaaccaagtatatttcttattccttacacaatatctaacttgatttagcaacgaaatcaaagatttataaagaacccccaaatttgatgtctgttcttatacacacccagacttctggcaaacaatttaaattctagtctaagcccggtgttccaattaccccacaaacctaagatcagtttctatagcgaaaaactaaagaaacaccaagagtattgagaaagatgcacaaatttcatggaataaacttagataagaaaattcagattacataaagattcaatatcaaccttatttagcttagagaggattagttacacatggaaaacgaaacagaagaacaagaaaatagaagggataaaattcgtttgtcctgctggatcctttccctaggactccaaggcttcaggaatgttttggaactctttgatcctctattcctgcatatgccttcttttggtccaaagattcaaaataaactcttgacctgcgaccttcagcgcctattgttggcgctgactagatactctttagtctaacccttggtgctggctttgtagcattgggcactccaagatagtatctcactgtcatttcatcacatgatgctttagaggaaacacataatgctgactttgttgaccttcaactcctaacactgaatcgctgatgatctagttctcaagactaggttatttttagatttttttgcacaaataaaatataaaaatcattaaaaaaatgtaagtaatttctaaaaatataaaatactaaaattttacaattaagtgccaaaatgtaaatatgagaatctaaattccctaataatgatgcctaaaattagctataaatttacattgtgttgagctaccaaggaaataataacccctaaagaggttagagcaaagcctaattgaaatgaattgaattattgattgtgtcatatagacccttatgtccacgccctaattgttaaggtagacttatgatatatctcttgcacttgtaacctgtggatgttgaccgtttgtttgaccacttgcaagttagaacatttccttccattagcatctctacatttgcacttggtagccataaattgtagccaatttatatttcttttcttggtaattgttttgaagttagaaggagtttgcaggaggatttaaatcagttgaaaattcattttcttataaaactccagactccgggcaaataatgtcttaaaaatacttttagggataaaaaagtatgccatttatttgatggacttggttattctgtctatttaatacattgttactacttactagtttgtttttctattttcattgttttctgtttcttctatcaagttttgtcttaattgtttatgtattaccaggcctgtgttatcttaaaagctggtaccaatcttgg

SEQ ID NO: 3331 - DNA, 3004 bp, Glycine max
  Intron number 2 from transcript Glyma16g25680.1 (locus Gly ma16g25680) derived from phytozome v7.0 (chr-ID Gm16; pos 29703389 to 29706392)
tctgggttggtgatatttttaataggattctttttttcatctctcgaatctaagactttagtggactaagattagtgacattcggaccaataacattgggtttctgtctggtctggctttctagggaacggcgtatatattttaattaaatttaatttaagtttagggagcgtttgttttggagaaggccaaggactgataaggttttgtgatgatttgtttgttttgtgttttttcagacaggaaaatgaaagtttgttgtttgcaaacgtgaaaaggattctctacgtttgagatggtaaatttcggggctttttaaccgacccgcaaccaaaaagcccttcttgtgctttcatcccacaccctttttatcctcctggggatttttttatttatttaaaaacaattgcccttttattctgtgatacagagaacacggttttggttttctatttggattctctaaaatttataatttggatacaaattactcaaataattttatatctaaactatgatttgaagattttctaattggcctaattgatcttattggcatccaatccctttcaaagagaggatttttagcttattgattgagaactccttagtaaaaaatcatttttatacaaaaaaaatatttagtattattattactattattattgaatatttaatatttattattaaagttaattatgcattatatttttaaaagtattttgtagatgcccgtttttatttaaataaattacagcacctcttatttaaatattttcctgagatatatttttcttttctattttatattttttaaattaaaatttggtggaagagatgacagactggcaggataaaatgaagtcagaacaataatttaattttatgattaaagtaattaaatattttgtctttcctattgtcatcttaaaaatgttaaataattataagaataaatgcaataataattgctggacaggaaataaaaaaataattgttgaacaccaaaacaaaatatttattagtaggttatataataatatggtataggttccctgaatatcaataatgataataaatattgataaaaaaattcataataataaattatttaataactcattttcagtaccttcatatatgataaggatgaatactagagtaatttcctttgcacagcttgaggttttgttctgagatgtgctttatgttattaaccttaatttggactttcttttgaaaacatattaaaaatattattttttaaagcgtgttttaaaacatttgatttcattgtaaatttttcaaacacaaaatagtttgttaatataaaaactaaatacttacagaagattaagtattaactgtgtgataaaaatgctattaagtattatctgagtttgtatagttctaagtctctgtaaaaaagaaaaaagaaaagaagtccctattaatcataatatttggaggaacggtggattatggggattggaaagcaatgctttggcggtgcaagtgggtaggcagctattttcatagctttaggaaatttgggatgtttacagtgatacaaatcaatttattccataaaaaatagtataacataaaaatcaaacttatggttacattaggataaaaaataatatgcattatgctattaagtatttaagtataagatttgtgttgtcatggttcattgtcttttgtgtcaataagtacgtgaacagaggattgtggagaaagaaagtccggcttatttcacggtgcaagtgggtaggcagcgtttcatagaaatctgggaagttgacaaacaaatcaacctatcatcaggaaaaaaggacaatacaaaagtaacactttaaattattaaataatactttaattaaaatgttattagatattttttaacaagttgataaaagtttttgagataggacaaactttagacgtcatgatcttcaacccatttttcctgagatcgcaaatcttacatttgtctttgaaaaactgatttaatcatattaatgcttatcataaccttttttttttgtacaatactaatctcattggtaattttcatattagtgagataaaatttaattacaactctagcataaattctgccctttagatatatcattgagcaacacgtaatattctcattaaatattttaatttttactctaactttctaattattatcacaagtcttgttctctattaaaataagaaaaaaaaagtcatatattaagtgtaaaataatctattatcaaaattaagtttattacagtcattttttattataggatagtacaaactaatatataatgattaaactcttaaaagaattattaaaatattattaaaatttaggacaactatatatgatttaatggttataaatatggtttttttgttcagaagttgtaaatattgttttatgttcatcaagtatcgtccttgtagcgtaaagacaaattacttttgggttagttagtggttaatcagcgtgagttgggtttagcaaaatgctaattcctcacaataaatcacggttaggatctttgttagaatttagtctcgaacataattatcttacaagagaggatacatatgagaactaaacaaaaaggttgggtagtggctattatcttttgggtgacaaggaatatgccacttcaattattagttatcgtatctttcggaacacttcaatcgaatatgccctggtccatttcctagagtattgaaactcgtaaaagaattctctacatttactacaccgtttcgggtcaaaaacctattttctccacatttctcccgtgaaattcatgttcataaaaaataggccttgttgaaagagtaatgttaagttttttttttcctctattaattttgatcctaaacatgttcacttattgagcaaatttttacccaaactctcaaatttgtgacacaggtagcacaaaccattcaatctcttctcactgtgccagaacccaag

SEQ ID NO: 3332 - DNA, 1868 bp, Glycine max
  Intron number 1 from transcript Glyma07g33790.1 (locus Gly ma07g33790) derived from phytozome v7.0 (chr-ID Gm07; pos 38743902 to 38745769)
agaggctttctcttccttcggggacgtcactgaaggtatatatttttattccatgtgttcgacgttatgtctctctcttccattttccaagtgttgttacaaaaaaattgggacaaatgcttgtctaagaagcgtgattcttgtaacatatcaaatttaatactctgcttgattaggtgtcattatattattaagcttttaaattgtgccttgccttgtttgtttgcataatatgcccctttgctttgatggtagtagactagtaatattttaaacctacctgagagtggagccaacactttatatgaatgtagtttgtagaaatttgatcttatctaagaattaagggcaaattcttcctatagtttgaacgaattatgtaaattaaaacatgtgatataattttgaagcaagacagctaaccaccttttagtagagattagttttgatattgtgtttgatgtaaaactttgatggcttaattagctgaaagatgtttgttctatatttacaatgtgatgctcaatcgacaatggatttaacttaaaaatatcagtagatcaggattgtagagagaatagtatagtagtaaaaaagaaacacatcaggattcatctacaactcctcctcaattcatctcctattcccccccccccccccccccccccccccgcagcttcctaagacctgcacttgagagtagttttttgggtgactctcaatcgccagtggaaatctccctctgctacttcgtgtctgtgatttaccttcactattagtgtcgtcgttatcgtatttcccccatgtctcttgatgagacctttcttcaacattgccattatcgccacctacttctcacctgacttggtatgcattgctaaaactgttttgatgttggccaatttgttctcctgagctgttaccccgtaaatacccccaactctgccattttctttggtgacattcacctccctcatttcctgtgttggtctcctgagagagcaaattaatgattcctctcatatctggtaggaccaattttgataaaaatcagaatccacacaaacgcagaaaggtgaaacaatgatttggtaatataaaaaaggcttaattaagtttttcatacctaaaatatagcccgtgtgtataaaaaggcaaaggaaagagagaacagaggatgcatggagcaaaacggtgtgagccaaaaataaaaagactgctaaagggtttgtcagtggcattgctaactattgtttaatgctcattaagatcttctactgttatttatattaaattattatttcaaacatctgcacttcatatattagattagatttgatttgattaaattaacaaacacgttgtgcaacacaaggagtgatcacagaacttaatgtgtccaaaatttggaatcatctgtgctttaaatacctgtaagtgaaacaaaagagtccaattcagtgttgtttgaaccatgcacatttggcaattcaaatgtcgaaacctaggttttaaaaaatcacccatatttgcaattgtggacactaggtttttgagctctctacaacgcatttgtttgcaacattgaggattgcgaccaaaccaaccacacttgtgactgcaatttaaaaccttggtggaaaccataacttatgttctggtttggcattgtgtaattgagagcttttagttggctttagttattttgggctacacattgaggaccacttgcattttttccatagtcttatttgttcctttccattgattcacgtcaattcaatatacaatatagttacccttgattctgttaatgagatcatctgctctaagttatttggatccttttcttgtagtgacgatagtgt

SEQ ID NO: 3333 - DNA, 1506 bp, Glycine max
  Intron number 1 from transcript Glyma04g18410.1 (locus Gly ma04g18410) derived from phytozome v7.0 (chr-ID Gm04; pos 19894174 to 19895679 reverse strand)
gtttgggtttggaatctttcactccggcattgaaggttcattaaatattatttccattttatttttcaccattctttttccccattcaccattccataacgttaactgtttctcttttccatttgccattccataacgttaattatttctctttcacatttgcctctaaggtatcaatggatgcttttctgtttttttttttaattattatattattatattattattactgtaagaattgctgcataattatatacaattttgtggcgaactaaagttttaatttctgtcagcttgccaagcgaggtattcacataaattaaaaaatatatatataagaaccaaataaaaattttaaatacaattttttttttctcagaatagaatagccacgtatgtatgatttgtgcatatcgaccttagcaatgttgtagcttctgcctggtgagtacattcaaaagaatgaaactcaagggaattaacagaacctgctcaaacggggagagcatgtggtttaatttgatatataggtgtttgattgtcttttataaaattccaaaatgattgattgcattacctggaatagttgccaatgttccacaagtaaagtgcaccatatgctttagaagaacgaaaaaatcaaatattatcaccctgggaagaatcagaagaatctgcactaattccagacaataaatgcaggtcctagaccgatgtaaaacccaagaggggatgattatatttgacatttagaagctttaaacccaaacatccagaaatgcttaatttagtcaatattcagaaagtgtggtggcttgtaatgaataaggtttataaaatagagaacaagccatcgaaagagggaaaaattaagatgcctatgcaatgagcagcaagaatgcacttcaagggaaggaatgaaactacttgtggaaaaggctcataaacaatctatcattcatcaagaatttgttccaagaacctaagggaaagcttcctcttttccctattccagaaacagaaccctggaatcaactcaccttaacagccaaattcttgaactagattacaatgtcatataagattagattaatacaaaataagtggctcaaaatacagcaactaccatgagtacttgacctatgataaccttccatgtttatttgtggtcaagtgaaggatattagtggtaagtataaaacaatcttttgaaacagctcagtttctttgatttaatgctctaggatatgacacattctgtacattagccatatttaaatatatataactttgaatccaccaagtaggatttaggaattcattttaatagcattccatgtttactgttgtagtttggaaaaactttttttttttcaattattctgcaaatgtcataactgcaggaaagttttcttgcttttgttgcatatgttgatgttctttattgttgtttctgttgtttaaattctttttgtctctctctttgaacagtgcacggtaaggagt

SEQ ID NO: 3334 - DNA, 1175 bp, Glycine max
  Intron number 6 from transcript Glyma05g14430.1 (locus Gly ma05g14430) derived from phytozome v7.0 (chr-ID Gm05; pos 15511934 to 15513108)
gaaaaactgtcagtacagattcttacctatcttcgcttatcttgttttcacaagagtattatattagtaattattctttgatggtttgtcttatgtttgaaataaccaaatattgaaattttaagaagcctattaatcaaagcctaggtttcaaaagtttttgtctatcaaatttattacaacacatttagaaatttatatcaatatggaactaattgtgtttaaaaagtttatatgtagaactatttagaaaattgtgatcgagtaaaatagggatcatgatgtaatacagtttttccccagaactgaaagatttttttatagcttgatttataaatagtgatcacactaatttggaggtaaaaatcttacaaattttaatctattacgaagacctacttatattcctttaattcttaagatgtggagtattttttttttattaattattattccctctagaactttgaatcattttgctgacttatataattaaggaatgtttattgtgcacattttacaaaaattctttgaaattaaaataccaaggataacaaaaagaatctgagaaagtaattttgttgaatggggaacaacaggaaaatcagaataattcttgaatgtctaaaaatctgaaacatgtaccatctaaaccaaaaataattcctcttcagatttgatagttgtcaatgttatagtcagatcaagctatttaaggcattgcattcttatgcattctcgtgttattgtacttgactgcatcatatagataaaacatgtcattttagaatttcactgttttggaatgccttgcagcttttagaaaattctttgctaatacaagtgtctggtaattgctatctatgatatgccacaaggattgtgtggcaagagctcttcgaaggttctaattttaaattcataaccttccaagtcttagtacatttgtcagaacaacgtagtagtatgaggttacaacatcaaattgtttcagtttatttatgcgggtgacttattgaatgcattatatataaatcaacagattaattagattttcagtatggaaggactaagattgtggtgtgaatcccatgaaagactttatttgtgttatgcttctatttaccactgatgcatctaacagtgtgtgattttgtcagatcttaattcaagga

SEQ ID NO: 3335 - DNA, 443 bp, Glycine max
  Intron number 5 from transcript Glyma16g04340.1 (locus Gly ma16g04340) derived from phytozome v7.0 (chr-ID Gm16; pos 3679305 to 3679747)
gattcaccaaagggtgtcccttttattgctggaaagtaagaattttgaaaactgaataactttattttgatatgattgttccagtatcagttagttttgaaccttggtagttgatattcttgctcttaattctatagaattgttaaacggtccatagaacaagagttattcttttagtcattggttttgcttgaagtggcttgcatctgaatggtcttggataaatatataaataagctttcacaaatcttctccatgccctaatacttacttgttctaattctaacatctaactttaaccttcagaaacaaagttactatgcttcaggacaggataaaattcctatgtattctgttgattttgtagttagtatttagtttctgaaatactcatgtattgctggacagagaaaaagttataggttgtgctaagcactacgtgg

SEQ ID NO: 3336 - DNA, 1130 bp, Glycine max
  Intron number 8 from transcript Glyma13g14410.2 (locus Gly ma13g14410) derived from phytozome v7.0 (chr-ID Gm13; pos 18060173 to 18061302 reverse strand)
aaggttgtgcaatagctacttgttggactatagtaataacagttttattaataaggttccgtagcatctaaatgtactgctaagtttcataggggaagaatatttatcacactttgtattttttatgaaaggaatgtatcttatcttaacattttcttaataaaaatttcagtttgcataaaaactttttatatatcaactgattgtctgattgaaaagccatataacttcgaagtgcataagaaagaacaaagagtaaaaaggctagtaaatttttgttttttacattattatccaatcacaaatcacttgtatgataagtttgacttttataataattagacatagacacgaatgatgtgtggatttataaataattaaagaaatatttaaataaattatttgtttgataaattaaatttaaaaatataattgtcaatgatattttatattattttctattaaaggagataaaaaaatctatatactatctataaaagagaaccctttgaaaattactgaaatacccttgcttaagattgtgacagctgtccatttccttggttttttggtcttttagtccttaattttccactcttctgatgcttacaggtgtttaattttgttgattgtggcatttacacgcgttttgttttgcatgttgtgcatgtgttggcctttgcttctttacgtggtttcttgcatttcattcttcagtttgcgtgtttttggttttcattttcgcagatacagaccagcttaatttgggttctgtttgatgctgttttgatgtatgttttgttacgttcgatgttagcttatggttttctggcttttcttttcttacatgcatattacctttcgggtttttggcttttgtttctgtgctgtttttatgtttgttttgttgcatgcatgttattttttcattttgttgtgttggacgatgtttggtttgcatgtttggtttagggttcatggtagttctgctgttctggtgctgttttcatgtgtgttttcttacatgcatgttagcttctcatttttgtgtgttgaacgagattttggatttttgcttaggttatcgtgtttctgttttgatggtggttttgttgtttttttgtagtatt

SEQ ID NO: 3337 - DNA, 4494 bp, Glycine max
  Intron number 4 from transcript Glyma07g16890.1 (locus Gly ma07g16890) derived from phytozome v7.0 (chr-ID Gm07; pos 16526528 to 16531021)
acgacgtcgaggaacttcccggctcgaactttcaagttcgtgaagaaattagtttgaatgaaggagtggtagttcgtgaagaaagacattggagtcactgcaaagaaaccaggttagtgaaaaaattagcttattttactcaagataaggttgtcgtggtgttaaataaaggtcgtgggttcgatataacctagttttgctgatgatgtttggtaatggtggttgcagggaagatatttgatgtattgaatgagttattggtgaacaacagttgatacgtagttcactgggctgcaaacgggtcagtgggcatttgtttattttctctggttcatgcatgttcgtatggtatcttgatatatagttgatacttaggttggtgttgtttaagggacttgagttgaatggattgaagattaattatgttgatcttaacaattttttatttcctgtctttagggaaatttgtgtttgcctgcatttatgtgtttatagtgtatgtaattttaatttaaggtactagatataatactgtaggttttgtattatatgaatgaatgcaaggtatatgggttgggttttggtagcaaaagagccatctttctttgattttgtggaactgaagtctgcattttgttcatggtcctgaccttaatcatattttaatttcctgagttcacgtcagtgtctgtatttgcctcttccataacttcatttggagagcaagtctcttcattttgattcccttcatttctattctaaggtaaatgaacttgcccatctggttctccatctccaaaatcatgcaaatgaagcacttatgcaaacttagaaatctcgtaagttgtgtgcgccttgcaaagacaaagaacttgttgggtttttttagaagaaaagatttttcaaaagaagtagtgatatgttaggcattaggcaaatgaacttattaaacttttattctttagcattatatatggagtcaaagggtaacctaaaattaaaaaatttcaacagacaacagcactgtaatcttaaaatcaaagtgattgtatccttaagtctaaatgataaaaataatatcctaaaaatttgaaatataacaaaaattcctaaaaactagggaattgcagatatttaggcatattttcaaccagactcctatatcaattgtaagtgcctataattaaccaacatccaaagtcatgtctttggcatcaagcattcaagcttctatgtataaaatgcaaaagtttcccgttttgagtcttgaatccttgtaatatgtatatatatatatatatatatatatatatatatatatatatatattgttgaaaattcagaactacattgcttaaggacttgagatactctagaacttgaatttgaatgaatggagataattgtcacactcagcccttagctttttattaacacacacacacacacacacacacacatatatatatatagtacaaagaaagaaaaagagagagagagagagagagagagagagagagagagatggggaaagctgcctttggataaggattagacactcagcttcccacacactcaacatgacaacacataaagcttaatacatactcaacctcactcacacactcaaaacaaccttttacctacacagttgtctacacaatacagttgtatacaatatatatttaacactcttcctcaagctggagcatataaattaaatgctccaagcttggaacatgagctgaagcataagaaagattcttcttctaagttagatgatgcggtgaagcttgattgcttgattgaaacccctgattgaaactcagttgactaccaaactggaaaggactgcctccagatgaagttgatgattccaaatacaaaatttgatttaactggggcaggttgctgacttgtgtggatgtcgaggctgctgctgtcggagtgaatgaggattgaggagttgatgcactggaggttgatcaaaacattgagggagaactgtcagaagtaacaaacacagtggatgacgatgatgtactaaatgtggagccaaatgcagacttagtgggctgccaactaaagtagaacttagaccacattggcagcccactaagagtagaccaccgaagaggaagcaggggtgccaagttcaaaagatgtggcaagacttgaagaaggaaacaacaaattcccaaaaacaaaagctgcacttgctccagggctagacttcaaagtgattagtattgattaggagaccacacactccccctcacgagatggaaggtggagtcaacacttccagcttgggatgaacaataaagtacaaaaatagacaatgaaacatgtcaaaaatacattggcagcagattgaaaatgactgaaaaacattcaaagacaattggaatatgttaaaccattaagcagaagccacaacacaatgcttaaccacttaacagaagcaaacacacttaaccacctaaaaggtagaagcaaaccaaagcttaaccatcaagagcagaagctaaacatggtgcttaaccactcaagacagaagcaaaacacaatttttgaatgcttaaccactaaaggcagaagcaacacaacaatgtttaaccatccatggtagaagcttgacatcaatgtttaaccaccatggatagaaacttaatgacctttttttaatagtaggggttcttgaccagattgaacccccgggaacaacaattgcttcaaggacagagacaaggaagaaattgctggacaacaggatcaacaaatgacttataatagggttcttgaccagattgaaccctagggacagggatattaatcagtagaccacacaacaaatgaataaaaggacatgagacaatggagctgcacagtaaagggttaagagagacaaactaaaagaagccttgtgagcacttctggccaaactaaaagaaaacttaaaaaaaaaaaaacagtagcatccctaccaatctttcttcaaaagtacaatggaggatgaccaaggaacagaaagaacagggtctaaagttgacatttttagaaccataacacaatggaacttcaaaggcagctggaaggggaaccttggcaacattcaaaaccataccaaactgagtaactgcttttaaggaagccaaagcaatgggtaacgacagtggccttaaataggaccagaacatgccatagttctgtagacaaagaagaagggccaaaaggagaggtttgagcggctaacgacggtggctgacagtagagaaggagaatacgggatcaacagaggccatttctgatcaaggagaagaagccctaatggagaaagagaagggaacgcaagggctggaacaatcaagttgtcaataccggaaaacagggattgaaatgtgcccaaaaggagacaacaaagctgttaaaactgggtgcacagtgccggaagaagccatttctgaccaaagaaacgaaaccctaatagagaaaaaggaggaaacacgaggctgacacgttccaggtggtcaaaattaaaaaacaagggctggaccgtacccaggactggccgacgaagcgactggaggtggtccggagaggttccgacaacaggaaggcagcacgtggccttcacgtgccggaaatgatgcgttgctgatcacgcgacgtgcaggggtcggtcgcgctcttcgaggtgcacctaaccctggttttgccagaaaatttgacggcgaccggaggcaacggcggcagacagcggacggcggccatagcaggtcataacgggatcgttcctgctctgataccatgttgaaaatttagaactacattgcttaaggacttgagatactccaaaacttgaatttgaatgagtggagataattgtcacactcagcccttagctttttattaacacacacacacacacacacacacacacatatatatatatagtacagagaaagagagagagaaagggaaaactgcctttggataaggattagacactcaacttcccacacactcgacatgacaacacataaagcttaatacacactcaacctcactcacacactcaaagcatccttttacctacacagctatctacacaatacagttgtatacaatatatatttaacatatatatatatatatatatatatatatatatatatatattaaataaaagttgcattttttatatatgtatactttagttgttttatccttgagtcggccctgcctttcaactggatgaaattcttaattcaagagtcataaccagaaatgtcaagcttatttccctcattcttgtgaaatgatgtattcaaccaatcattaaagctactagggaagatgcagatgttatcaaaggacaatttccttgttttagccttaaggacaaggctgcttctgcacctgggagtattgatagcctagtccaacatgatatgactgaatttttggagactgaaggtcttgtcaaagtct

SEQ ID NO: 3338 - DNA, 6886 bp, Glycine max
  Intron number 7 from transcript Glyma10g26240.1 (locus Gly ma10g26240) derived from phytozome v7.0 (chr-ID Gm10; pos 34388565 to 34395450)
aaactgttggctacaaggtagctaattctctaacttcacctgccccaaaattccaatggatagaaaagaattacatagttatcactaggtagtgattataaagatttttttttataacttttttgtggagagggatgccatatcaatttataattgatttgtaattataaaaagcacgatctgtgtgttctcttacaaattcatacttgcatttaattaagataccataagtacaagataatcatatatttcatatttgaaattcttatagcatttttttgcctgcaagttatttctgtattgatttatgtttaatgatagtaacttgttgtggctaatagtaacatgctgtagaaattttattagggaatttatgtccgttccttcacatatgcgggttggattttatgaataaatatgcttatttcatatttgaactgttctgcaattagtattagcatgtccaaacctgggctttaatctccccccctccccccccaccctttttatatccttgaataacaaccctagtgcttaccagtgacagagtgacagttactagttatgattactcagaggatttagtagagatgagagagagggatagagagagagagagagggacagggagagagggagagtgagaaggagagggagatggagtgacactgaaaaaacgagggggagtgacagaaccttaacaggtcatccaaggacatggaggagtttggaacaaaatgtcaaaaccgaggtttgtaaacactacaatgaggttggtgggaatagtctacgtgacgacgaaggggaatggtctatggtggtcagaagaaaggtagcgaaggaaaacaagaaggcaccagtagaggagagacaaacgcccattcgcgaggcacgggataactcaactcatcatcacttcaactggaggaataagggggatattagttcttattacttcacccatttccctgaagaagcaaatgaagagctgctctggaaacatttcaaacgttggggtgaggtgcgtgaagtcttcatcgccaaacgctgtaataaggagggtagaaggtatggatttgtgcggtttaagggagtctcagacgaaagagatttggaggtgaagctggataacatattcattaatgattataagctgtttgtcaacttgcctcggtttgcaagaacaacaaggactcaacagccgaaacagaaaggtaacctcggggggaagtcaaatgaggagttatagaaacctcgagtagaaaccattacaccacctcggagaacatacgctgaagccacgaccaagggagctgctccaggtgtcaacatgagaggtgaggcggcaacacacaccatttcgatcacacctatcaaagacaagggctactggtgtaaggatggttgggtagggaagttgaagaaggttatggcggtggagagtatacaggatcgagtagcatgggacttaggatataatatctgtactaagttcctcgttgatgatatgatcctccttatggggttgtcagaggaaaaggcacatcacatcatccaaacggagaagaacaatggaagttcattgttctattctctggagaggtggaggtcgggatgtaggccacataatagggtcgtttggctgcaagtatggggattcccgatagaggtgtggggcgtggaccacttcaggaaagccgcttccttcatcggcgacgttatcgaactagatgacgataccgaggaccgacgcagactggaccgagcccgtctactggtccgaactcctctcccgctgtcgatatcgaaggagatcaccgttcgcgccggcgagcttgactaccaggtctggttcgtggaggagacagggattggcgacgtggtgaaccagaagagcagctctctgtccgacgtctggttagatgaggtcacgccggaggacgaaggtatcgccggagatgacgacgatgacatcgacggttcttcctcgtactcgctggagctgccatcctcgaacccggaatcccctcgaaaccaccaggtagaaggcaaatccaatggtcactgcgatgaacacagactgctgggtaaaacccattctgatgaagatcacagagatgagacagagactagaaaggagggaacccagggcccttttacggcaaacgttgaccctggaatcagagaagcagaaacgaaagcagggattgccttacctaaagagccaattgagcacaggtctcaagctgactctcgaaagaaggggaatcgttctaaaggcaaaaatttgaacagtggagtaaaagcatttggagatcaacccccttatggggtatacgtggaagacacactgctaatggaaccccacacacacttgtaccccctacagacccaatcagtattgggccaagtgatagctcgggcccattgtggaaaaatggagtaataaggatggccacacttctgtagcccaaacccctaatgacaagcctgaaaaatactccaaagtctacaaaagacatagagtttctcactccaaagccccccagcttgaacccgtggcagaagaacctcaagggctaggagtcaaagacatgcccatcacaactgatattcagaatcaaagtaaaacccacaagcaattggaagcagaagggaaattaaaaagcaaaattgtttgcaacaatcaggtgttggaagaggcccaacaattatgggacttggggacacatatgggcttggaagtagacaaatgtcactctgattttattcaaagttttgcagatatggaggccagggacagaaatgaagctatggagttgggagagaggaaaattcatagatgaatattctctcctacaatattagagggctgggtagaggcattaaatgggcctctatcaggaaactggttgggaagcataaagtggatgttctgtgcttgcaagaaacaaaaagggattctctttctaaggcagattgttaggttttatggggccatccagatgttgcatgggaatggcaacctgctgagaatactgttggggggctgctgtgtatttgggataataacaacttccaggttgatctcagaatctctgaaaagggatttattatgttgggtgggacttggttggctgagatgcagagagtggttgtggtcaatatctatgctccttgtgatattgaaggtaaaagacaactgtggcagagcttgagtagaaggaaatctcaaattcaggacgaatgttggtgtctggtaggggatttcaattgtgttaggaatccctctgaaagattgggaagcaaccgcagcaattcggataatggcctaatatctgaattcaatgattggcttactgcaatggaggttgatgatattccttgtgtgggtaaaccctttacttgggttaggcctaatggttcctgcaaaagcaaactgaacagagtgtgtgtttctgatggctggttgtccaaatggcctgacagctcccaatttaaccttgagaggaattactctgaccactgtcctattatcatgcactctaaatgtattgattggggccctaaaccttttaaggtttatgatggatggttaatgaacaagcaatttcagaaggtagtgagggattgttggttagattatcagcctatggggtggggtgttatgctttaaaatgcaagcttcagcatcttaaacagaggctgaaaatttggagtaaagacaacataggagacctgtgcagcaaagtcaaacagcttcaacagaaactaaatgacttggagaattctatgccagctcaaccttctaaacaacaagtcaaggagctcaagaaaacccaagctgacctttgggaaaaagctactatgcaggagtctattgtgaggcagaaatcaagatgcagatggatcaaagagggggacagcaacacatcctattttcgtacagttattaatttgaggaggaggagaaatgctttgagggggatgcagattggtgacacctgggtggaaaatcctaacattataaaggctgaaatccttcatcattttcagaacaggttcaatgagcctcacttgagcagacctaacctggatggggtttcatttaaaagtctgacttctactcagagagaaattatgattgaaccttttaaagaggaagagataaggtgtgctgtgtgggcctgtggcaatgacaaaagcccagggccagatggttttaatttcatatttattaagcacttttggaaggaattgaagcctgaattcctaagatttatagcagaattccatgtgaatgcttctttccccaagggtctcaattcctctttcattgctcttatccctaagattaaggaccctcaatccttcaatgatttcaggcccatctccctcattggatgtgtctacaaaatcattgctaaacttctggctaacaggctcagcaaggtcatgaaccacctcattgatgaaaggcaaacagcctttgtgaagggtagacagctgctccatggtgttttaattgccaatgaggtggttgaggaggctaggaggtctaagaggccttgcatggtgttcaaagtggactttgaaaaagcttacgactcagtgtcttggcaatttctgttttatatgatgggaagaatggggttccatgatagatggattggttggattaaggggtgcctcacatcagcctctatatctattcttgtgaatggaagccctacctctgaatttaagcctcaaagaggcttgagacaaggagaccctttggcccctttattgtttgtcttggtggctgaaggcttgacaggaatgatgagggaagcttcaatcaaaaactgctttcaaagcttcttggtggggaagcataagatcccagtgaacatcctccaatttgctgatgatactatcttttttggagaagcttctatggataatgtcaaagctgtgaaggccattcttagaagctatgagatggtttcaggcttgagaattaactttgccaagagccactttggagcaattggccaatctgaagaatggtgttgttctgctgctgattaccttaattgtgccatgcttcaattccccttttgctacctagggttgcctataggcattaatccgagaagaaagatggtgtgggagcctatcattagaaagtttgaggctaggttgaacaagtggaaccaaaggagcatctctatggctggaagaatcacccttatcaatgctgttttaacagcattacccttgttttacttgtctttttacagggctccctcagcagtgattaatagattaaatgctattcaaagacattttctttggggtgactattctgaaggaaagaagattgcttggataacttggagtcatgtatgttcatctagagaaaggggaggtttgggtattaaagatatcaaggccctcaacaatgctcttttaattaaatggaaatggttgatgttccagcaaagtgatcagctatggagccatattctgaattctaaatacagaggctggagaggcttggaaggggggccaccaaagcctaacttctctcattggtggtctgacttgagatccattaaccagcatgggtgtatggctgaggtttctaagtagtttatttggaggctgggaagaggtgatcaaattctgttctgggaggactattggatggatggggggatagctcttaaagagaaatatccagaactatatcgtatttccttgcaaaaacagagatgggatctttctgtgaatcggggtgggaatggaaattctcttggaggcgtaatctgtttgacaatgaaatggggatagcctcagattttattgaccagactgctgtcatcaatttaaatgttttgtcaaaggatagttgggtgtggggagctgcttctaatgggatattctcttctaaatctgcttatctttgcattaaagctgagcagtcttctgaagatcaacagcttggtttctgccagctgtgggatactaaaattcctcctagagccttaaccttcgcgtggagattgctttgggataggcttcctactaaggagaacctatctaggagacatgttgatcttgtcaatgacttaagccccttctgtcaaagcaattctgaatctgcttcccatttgttttccacttgtcaaaaagttctgcctttgtggtgggaatttaacacctgggttaaggaggatagagctcttcactgcaggcccatggatcatttccttcagcactcttccatagcaggttcgaaggcttcgaatacaagaaggaaaatttggtggatagcagctacaaggtccatatggaagctccgaaatgatgtgatctttcataatcaggctttccacatttctaagttggtggataacactaacttcctcacttggtcctggctgagggggtgggaaaaggacttcaatgtcccttttcatcaatggtcctcagccatgcctatggcctttatttagtttgtggtctgctgggttaagggttatgggggttgcttgtagggcatttgtgttctgtatttttgatttcatgttcctggagacataatctccttcttatcatgtagtacccctggtactattatttgatcaatatatatattatctttgcagttcaaaaaaaaaaaaccagtgacagttacttaaaactgtttttcacattttaacagtgttgttttcattgattatgaaaaattattttctaatttgttgttaataattgaatttccttggaatatgtttgatgaatattataacaatttgtttttcaaattctactttccctgcatatcaatatagtctaaattcttttttccccttaaattttcttttgttaagtggag

SEQ ID NO: 3339 - DNA, 4511 bp, Glycine max
  Intron number 2 from transcript Glyma19g36400.2 (locus Gly ma19g36400) derived from phytozome v7.0 (chr-ID Gm19; pos 43682513 to 43687023 reverse strand)
ttctggtgagatgcgcttccattggaaattctccttcattccctctctttcctactttgtttaaataataatttacacttcatagatcttttaaaaaaacgtttatttatatacgtacttatacctgtgggtttaaaatttaaatttgttattatcggcaaaaattgggttcgctttcgcatttgcattatgcaggttatggaagttggtgatttcttcttcatttggtctattccattacattgtctgaattgcagatgatgttgtaggtgctttccaatcttggattaatggagagaaaatagaactgatgagtgtcaactttgcatgttctgttttctcaggacttattagcatgatatgccacaattatggagtgttttgttagccaactttcatataggaagaaggtatattgtgccgaagaatctctgttaattggaagagttgtataggccttgttcagttgcattgtgtcctttagatcatggtcatccttcttttggaattggatggttgtttggcgtgagatggcttagcaattgttctgaggatactttggcaatagactggtcacatccaatgtttagtgatgcaagatgtcattgtgagctgttacaggaaatttagggagggtcatggaacttctcatataccattgttatagttctaattggtgctctgaggtgctaaaatatggatgttggtaaacctcagtactatcttcctgtaacttctaaattttcttgttgaatgcttgttctcttaaatatggaatctgccatggaagtggtgctgtttagtaggggctggtataatgagtgtaggagtacaatttccatagagcattcacaacacattaacatgcactatgcaaactgccattttgaaccattagggcatatgatagatggaggaggctgctgtagtgatatgcatcctctcttaaatgacataggctgctctctatgtcagttcatcttctggttcagcaaacagttggtttctccaataatgcaacaattcatggctgggattggtgtaacgctgatgattctttcttttgacgtgagcctatgagttcgttgacatggaagctgtttgataggcatgagttggttatatcatcttccttcatggttctaaatgaggaatgaaatgaaacttatgtcaaggtgttgatagcctaaccaaattgcaggcattcttccttttactttacctatttatgggggatggaaaatattttacttccatgttcgagcctgtacatcctattttttaattgtcatgccttactgggggcaatggatggtcttaacaagacaaacaattatgtttgattgtgaacaaaattgattagaattggatatggcaacatgtttcaattgtttgtattctggtaaatggaaaattttctatttggagatagccataaagcttttatacttatttgaaattttccattatttttaatgtaaagccaatataccccatgattatagctttgaagaacaacataaataagaatgtgtttggtagaaataaaatatcatgtaaaatatcatttaacagtgaaatctttatactttgaaagcttaatgactgattgtcttttttgatgtcttggatatcatttagtatttggattttagcaaaatctgaaaccaaagtttaatattaagtgaggcctgtctaaatatattgttttctgatgtttaatttcttcaataattaatagtttaatttacttctccattgagtttggatttatctcactttgtgttaacaaaattttataataaaaaattttcaagacagagcttttcactgaaaaactatttttttcataaaaaataagcataacgaatcatgtcagaacaatggcatataattataattataaatatgcgtggtgatactcagctgcccaagctctttttaaaacaactttatttgatttatcatgatttatttaaggtaacaaaatttctgaagccttctctgctttccacgtggaagccggaagctaggtttttattcttttaaattcctgcttataaaataattttatattttctatttaatataatataaattaatgctagagtacagttgtgccaatataatattctcttctatgatatttcttgttgtaaaaatactgtctagcagtaaacagtttttttcagactgtcttatatgctctcatgaatgctttcctctactttttctgctaaggtattagacatacacctttctctatgtctctctctccaccatctctaatagaaacaatatctaattttgttcttcaagcaaatttcattataaattgctttgtatttttccctatcaaaaagctgtggagtggaatatcctgtattttttagtggttcctaggatttacttaattttttttgtttctttggtcttgtcttgattattgattagagggcagataggagtattcccccccccccccccccaccatgtgctcaatgtgcatagttgattattattttcaagtgcaggaaaagattagaaaatgctaacaccttctaatacttgctaaaccttaccaggtaatatctgatacgttagtcatcctattctccaatccttcctgtttttattaagttaatcgtaactcttgctgccattcatgagaagctagagtgtggattcatcatctaatttatatctcagcaatgccattctttttcttgtgtttattttttttccatcctctttgttttcttgcctcagactagaaggtgctctttctgtatcagtggatagaggcatatgggtaaatggcatcaagtgagtggacttatttggggaagttggtaatttattactgttaaggagaccatgagtgccaagtatttagtgtttacaggatattttttaggttgatttccttccctcctgaaataattgttcatggtgtttctcctctttggtcaaatttgaatggtcgttatctatgattcagttttcatgcatgccttttgatggcatttcaactcaccaagcttataaccttcatctttcatgcatttttgggcagtgtcaatggattggtattgtagatatcaaataagcatatgtaaactagttatttgtttcctcaagaaaattaaattgtccagatggggatcattttgtgggcctagaaagtattgaatggaaaatggtgaaacctgatgaataatatatgagaaattgatggatttttttttaatgatgtggaagtggcaatggtggttgtattaatgtatattctggaagtaaaaaaagaaagtctggctagatgtaatagtgtagtacactttttctttttggaaggtcgaggggaagacgtattctgatcacacacatcttacatcaactctaggttttggtctcctgctgtgcctgtcaatagctactcttcccagtcaagtcgtccttgacatgctacttgcagtttatgataatgagaactactattaactttaacttaaaaaaagaaaagaacctgacagagttgtgacttctgagttctgaccctactctctttcacatatttgtatgcatatgtatctctaatgtcttctctcccttccccgtgcaaatatctccaaatgattaaaagcatgtttggtttcatgtagaaaccaccctaaaccttgcttgtgtatgaaaagaaacctcaaacacggtggaatcctgtttggcacagtttaaggcaaaattaagtttgttctcaaatgtagttttgactccttaaatgctgaagcaacatttttgttacttttgcattaggggaaaaatgttcatttatgattttgacaaaaatacctttacaatttagtattatatcaccccaataatattttattataatatttatatctttttttgtaattacaaattccaaagtgaatttgatttatatcatcctaacaacattcattttgtaaaaaaaaaaaaaacattttgagacaaaagtatctaatataaatcatgttactccaaacacaattctgaccaaaataaaattcacaaactttatccaagtgtatactgataaattaggttcattttcaactgtgcttgattcaacgtatctgctatttgttatggttttataatatatgggttgtcattgaaagtgtctgagttgaatttggcatctagtcaagtcttgagattttcctttacataattattttgaataggtttgtataagtgatatgtatggtacatattaatatgacaatgcaaggctgacaggctcaattgagcatttttaaccagtatttaataacaattatattttgttttaatgttattgcatacactgcagtcatgataaagctttagtcttgctagttgtggattggaagcagctttgcttgattgttaatttttatttttaattttgatattaagtttcttcagtttcagatgttattttccttgcaggttgtgaattatttgcaaatctgattcaactacag

SEQ ID NO: 3340 - DNA, 2978 bp, Glycine max
  Intron number 1 from transcript Glyma20g28430.1 (locus Gly ma20g28430) derived from phytozome v7.0 (chr-ID Gm20; pos 37347395 to 37350372)
cttcattgtcttgtttgcggcactggcactggcaggtttgctgcaattcagatgattaccattgtttcttccaagtttgtttgctttcagtttatttatcgataactttaaaagcaaggtaatagttgaatggttcgagggtgatgtgcggttttggtagcttcaggcaagatgcaccaaaaaattagatgaacaagaacaagaaggatagtaaaatatgaatatttcgcgatatttttccttataggttaactattcgagaatagcgtaacaatcatagtcaaaatgagtagcaaaatttaggtaactcagcttctcgctgctaacataccgaagaccgactgactactagtcatgttgtaacattttggaggcattaaaggtgtgccttgcctgagccaaagtgtctggactcttggccagctagacctcttgttagaaaatatcatttctcagtctggctggaattagtatgacagctgttcatttcttgtaatatagctagctgattgtaaatcagtgacagttgtaactgtcagattagattctagataggctctacatctcctgtcctgtactataaacatctgttgcaagcttaatctttgtacgttcattcattttctcattttcaatacacagtaggttttccaaattctttccattgtagcatatcacttctgttttgttaactacgcttgccgaccctcacaaaatctaacagtgatagcatgtgttcagttattcacaaacctagcaaacttggtacttgaaacaggctgtcaaattcagttctatgcttataattggctgcatataatctagtcatcaagcttctgtcatgcttgtgcatattaagagttatcactctagtccataaaactctcaactggtttgttggtcacctatgaaatttatactttacagtactggaaactagttttgtaaaaaagttttacgtttgcatgtgatttcatttggtctggtcaggaaatgccatagaaagattttctattgaggtataattggaagatagtgagtagtgatgtactaagcccttgaagtttctctaccggtagttatgttgtttatatgtatccatattgaactggctagtttatctgttgaacttgtatatttctgcagttgctctagtttgttagaaatagtgggaaatggtattggtggacccattgcagtaattatgaagtgagttgatgattctttaggatttgatggattgagaaacttaattctttcatcagatatacttatgatgccatggttgcttatctcacaatttctatgtagctgtgatgatctttctgttttgttgactggctagtggcttgttctcatcttgttgccatataacatggctagtgttttctaatatggcagtgccgcattgacaatacttctgctttattttggacttttggtttatatttgtaacaagtttatagccctttatgccttttaatatggaaaaacttgtgctttcatttttcttatattatagtgttacttgatttagacggtgggcctttgagcaaagataaggttgctacttttaccaagtctggatatgtgtcagttggggttggacgcacgtcctcttgatgtgccaagaactagcttctgcgttaattttaatatttgacgtgaatttgtgggtaaatgtgggatataaatgcagaagcgaacacacactttatgacctagggtttagaggtcacaggttcaaattgtgggtatggccactctgctttcctggggatgggggtgggggtggggtaaggctgtttatatctaccctccctagatccacttgatgggagcctcgtgttggtttccctttttttctaatgttgcttgatttatgaaatggatgacattgccatcaatttcttagtaattattctaatctgtgaaggcaatatgttggttatcaatttcctgttctgtagtcttttgaacatgaggtgcagtgattgttcaagtatggttatgttggttatcatttataacaaccaaggctattttgctgtttgttgcaaaagaaatttaggatcatggcattctctgagggtcatagagctgctcttgatggagtaggttgttctaattatcttaaatagataagcgagcttcatccatccctggccttttctagaaccttagaaccatgtttattccttatacactttttcccttgcttctctaaaatagattttatacttttttcttgtttgagttttagtgcttatctgtaccttttctactagaacttagctttatgagtcccaggttatgctctgtcagttccctatagtgcattgcttctgaagttgagttttggcatcatgtgtagcttgtaatctgatatctttgcaaataattgaaatcttttgtgaacggaaactttggtttggtgagaacaattttgtaccgataagttgtccttctgtatctctttagagagagctttatttgtttcaatggaggattagtatatggttgcctgtttaatacaagatatagttgttgatatatgttatgcccatgcaactcatgatttgggactgacagcatacatggaaaaattgttccatttgcagtcatgcaatttaaaggtacatgtgtactttggtcaatttgtctttgaaaattttggcatctgcaactgtttagtaccaaactatgtcacagtgctgattataacttttcagaggtggtgcttctccacgttttcaggttttcttaagtagttccttggtgctttgatgtaccttaggatgttggttctctttgtgacttggtttaaaagaacatctttggttttaaatgtaaatgaaaggaagtaaatatgtgcttttaattttccttttctgtgtacttacaggatgaaaacctaaaatatattcttcaatgtccttgatatgccaactttcaggtctgcaaaagattttccagat

SEQ ID NO: 3341 - DNA, 3096 bp, Glycine max
  Intron number 1 from transcript Glyma02g26620.1 (locus Gly ma02g26620) derived from phytozome v7.0 (chr-ID Gm02; pos 27538694 to 27541789)
acacccttagacggtcatttcctgcgctacaagtgagtcagtttctcacttcgcttcttttagtttcccccttttctttctattctcttcaattctttgggaattaaccgtgtttgactttcggccaatgaaagaggaacatttaggttagcaagatgattttgattatcagtatcggttttttcttgttcacgttattattagtttgctagttttttttttttttcgagttgaagagaagtgtgtgagttttgtttctttttatttagtttgaatttgaacttgtattattagtttgaagttcttgtatttggtgttagtcaaggttttgaaattcaggtttttgattgcagtcttgatttagtttgattcttgacattgcggaacatgtcagaaaatgtctaggttttaaactgcagtcgcgattttgttcaattctttgacattgtatgaaattgcagacaaatgcagccacaactgtggtaattgagagcccaaaaaccttgacattgcgattcttgacattgtggaaaattacatacaaatgagcttagagcccaaaacaaaaaccttgacatcatggattcgtggtcactaactgttttttaaagccttggttgcctatgttatttttttttgtggttgttataatgattgaaatttttgtagtatgtcatcttgtgtaaaggttaaagaagattttgagaataggatgaaacctcatgccacacatggtgttgccaattaattgaatgatatcctaggggctagggttgtcctgtgttggttgcattttcaggtgttggatgtgatagaatgtggacctggacctgtgcattgtattgttgcctcctctatttcactttttttttcttttttctaattaaaatgttgtcgtggcgtggacctagacctgtgatttcattgtatcttgaattttcatgatttctaattgaaaatgttatcgtgatgatatgagaaatactggattgcattgattaggtggtgatatgtggcctgtttatttaatctactccttctttatgtttccattacaatcatgaattgcatggtgttattaggttcagttgaaaatcaaattttcaggaatattaattaccgtgagatcccttttaataatttcctccaatggcctttgcacacgtccaaaccaccttaattacatgatgttattaggttcggttaaaaatcaaattttaaggaacattaattgctgagatcccttataataatttcctccagtggtctttgcatgtgtccaaaccactgtagctgctttttaatcatcttttccttcaccggtgtcaacactatttcctcatttatagtcatatttttttcctctaacgctcgatgatatgttttttttccaagtcaacaaaaaacatagtcgagtctcttttaatccaatttgattctttgcaatattagtctcatctcttagaatatatgcccggtcacctttacataatttcatagtgcctacataagttttccctatgtaatatacacaattctgaatatttctcttgtaaaaaatacattggaaccgaagtgctcatcctccactcatctaacatttttttttctagatcttaaaatctcattaaataattgtgagttccatgtttgtggttttgacaagttttacattggttgctgagtgcctaacaatccctcctcctttaccctggcttaggactggttatgagatcatagatggagttttctctatgttaacattagccttcaaaaagttatgtaatgttatcaataaatcacatttgctctctaagctttgaattttgaattatgggataactcatccactgatattttttaccagatgtggaattgagttcaaatgtatttaattaatagtgaaatatatatatatatatatatatatatatgactaaaatttatattatttctatagaattttacttaattatgtctgtacttctatttttgttgtggaggagaaatttggtagatcatcatcctcatcctcatactgttatgtgagattatccaattttcatgtttggtgcagcaatttaaagtaactaaaaatattcataaaataacaaagaatatagagacatcttggattcctatttccttggtatccaaaatgtcgttgatcttgcttgctgcatctcaactatgaatccaagatattgggggtatcttgtgtgcttgtgtatagaggcagacacagtggcacaccaacttcctcaaaataagcaaagctggaagcattcttgtatctagcttgcatatgtaatatctagtcttgttactattttcacggcaaattttatggggaatatgctttgcatttagttcatgatttaggataatctgtagggtagtttaagatatacattgtatctgcatttgccttcataagtgcataagtgttcaattagatatcaagtataatataatgtctgtacttgttgaggagaacatgttactagctgttaacattactggtagcgatacatggtttgacttgttgcaggactacaccagtatgaaaatagtttttgaaattcttttggttgctaggatatgctttttggttcaaaaaactgtataattgaaggctgctccatttttataagtgtgttatgtaaatagtttttttgtgtttcacatgctgtcacggttaatttgaatgcattgaaatggtcaagtggataaacttcagctttatgagtgcattatttgtaactgtcccatgcatgttgtgggtgaaaggttgtacttgtagtgcgtgtgtgtattcatggtcaaattctatatcttagcacctcctcctgttttggttttgggttagttcgtatgttctggattcataatttgtcactcatgaaccatgcacatctttgttagttcatggttgttatattgactatgaaatataaatttgatcccggtgtgctgcctttatacactttcaattaatctgatttagaaattggactttttacattgtttgactctatcctttggtcctcatttttggcaggtatcgtgtacagagtgataaaaaagttgctgtct

SEQ ID NO: 3342 - DNA, 2449 bp, Glycine max
  Intron number 3 from transcript Glyma04g10330.1 (locus Gly ma04g10330) derived from phytozome v7.0 (chr-ID Gm04; pos 8556668 to 8559116)
gttagatatagtgtacgtcaagaagttgcactcaggtctgaatctgatagtaagctttctatttgcagttggaatgttgaactttttttaatattaagttactttgcatttctttgtttctcaaaccaattccgtcttaagtgtttactaggtatattatattattgatcagtatggtaaagagccaagaataatacgtgctttgtaaaaagcatcatctcatcatgaatgtatagattttgtagttttactgtgtgaagaactcagatcactctacgatgtatattttgaaggattgggttgatgaggagtaatctctaaactgcactatactacagccagcacttttgtattgtggaagttgtaggactggttcctgatttatgtttcattttgttatgctatgcagcaataataatggtaactgatacctagcgaactttaaatcgacaaagaagatcgttaaatatttgatagatttaatgctgtccattatttttcactctaatttcatttgtttttgtataaatttaagcatgttgtggattcctgtaattcatttctgtcagaaacctggattatttatttatttatttattttatttaggtcatattgtttgtgttatttttaaagaaaaaagtggtttttgagtaaaagaaattttaaaaatataaaaattaggcaacctttatctcaaaaaaggtgttttaattctttggacataacttagaaataacagcacctctaaaaactgttctaaacagaaagctatatcataaaataatttttcttcaaagttgaaacaagtgtatcggttctgagttatatgccaaatcaattccattgtactttaaatgtgtggtttttacatgaaggtagttcaaaatcggaggattgaaagggttttgtttcaagctatgttgcatgtgtaccggtacaagtatccaataccaatacgacatgcaagtaaaataatttttttaaaaattaagatatgggtgtgacaggatctatcaaataaaatatataataatgtatacaattcgtctgcgtaacattgttgccatacaaatcccatgtgttctaattcttccctcctcatgtaataaggagaaactttacattatatgaataattttagttagatatgatttcaagagtggaaatatgattttgagagtggtaattagtgagaacagcagttgaatctgtatcttagattttttttataccaaaaccttgcaggtagtgaacacatttaaataaaaaaatagagatgtcagatatatgaatgctgttatattgataagtattggtattggatagtaaaactgtacagatacatcactaattttggagtatccatgcataataggtttccaaagtagttaatagtggctggtgtgactgtaattgcactaccagagtggagcctctcccaaatgctggtatcggagtgttttgctgttatggtgcagagtgccacaatagctcttggtagctgaaacacatggcactccttcctctgatttgcaccacactgtcttctgaactttttctttctgctttctaccttccaagtagacagcaaccgcaagggaaaagatgtgttatttacattactgttttttgtgtttggtaattgactacactgtcccttttttaggggataataagtgtatttccttttatttaattctgcttggtagactttcattattgtattttatgtttctttttataacttattcactaggataattgataagtgctttaaattttgagaattgaaactttgttcactgtttttttttcccggtttaaaggataaaattatttgcagctgctatgtttgctgtagcggccattctatagtcaacaattccaatacagcattttcgggggtagtcacttgactcactcccagccatcttccttcattaactactttatttgtttcttactttgttactattgtgtgacaaattttgaccttttaatacatttaagatgaaattgacattagtgcttttatgtttttgcttccccttcccatatgacaaattgtgtacaacaagatttcaaatataaggcatgcttcaacagcatcctctgccagcaagttggatatatatgctcaagtgaatggctaattttggacattgagatttttgttgctatagccatgggtatgcgtgtgtgtgtgtgtgtattggtatgtacatggttgcattgttttaacaaattgctttgtttttatcagcaagaacctttttgggcatttgttatttcatatgtaattaatgctatcaaatgaagaagttcatatcttcccacggactattgcacatcatctatgttccacattttattcttattgctcaccattttaggtgtttgatttaatttgcatcaatgtatatttcttatttgatttttaaatgtagg

SEQ ID NO: 3343 - DNA, 1812 bp, Glycine max
  Intron number 2 from transcript Glyma18g50140.1 (locus Gly ma18g50140) derived from phytozome v7.0 (chr-ID Gm18; pos 59349256 to 59351067)
gctgcagctgctgttgccgcgcaaaagttgaatcaagtgagtgtgagacttttaatctcttatggtgtttatcatgtttgctggtgctccttcttgcttaaaactgctatgtcatcattttattgttttggttttggggaaggggagtgtgtagttgttacatgaaattttatcctaggatttgtaatatgggaactgtagggagatctttgaaggtgcaataaacacaataaagggggacgaattgtgctccaccagcatttctttaatttgaaaaaccaaagccttggtccaatacgaagtaatattgcagcacagaagtttatagggaaaagttacaactatgcaaaaacaaggatctgtctgatgttgaattttccagtattaataagactatgggtgtgttatataagcaaacttttttggggggagggagttggagttggaatataagtaatacttattagttagttataacagtcagctattagagagaggacaaaaaaacccagcagaacagtggagtgctgggaatcttattttcctcctgggtcttaagatactcactgaagcaaatttgcataaacagaactaaaatgaagataagatgcaaagatgtaaagggaaacaaaatgataaacaagagcttgagcattcaattttatgttggttttgccgaaaatgagcctatatctagtctcctgttgaacaccggagattttactgaagctgagttgtatttcttctaccttactctttccaatttagaataagttatttaaaaaaaaatctcacattttttttctctgaataatgtattttattgtacagatgagagccactttgtttctattctgatgatacaatgtttttcccttccgagctctgataacatagtataatctaaatatatcgtgcagagagtacttctaagagaattctccacatttcttcaattcctgttatgcactattaggcgatcaaacttgcttataaagaattatgtaatccctttaagtgcagtacaacaccttttcactggaccttgtacacccttgtctatgcatgtgtgtaactgtgtcacagggactgtgtgctaatattatgaaattgatgagtagactatcagcttagctttactgagttacactcgaagtgatcttctctagacttaatcctcttggaacttgctccatgacgagttcttgatattgaaactttagaaattctgcaaaattgattttgcagtttgataataacatgatttggttgataataacatgatttaggctggttctatttaagatcaaattataagtttttagcttgtacccagtatattgcaatttgaaatttagcctgattcctttgtacttctgagagtcaccgctcataggttttcaaaatgggtgttgggatggggtgaaatcagtgactatatttttgtcctttgttatcatctatatactactgtctcagtgattatattgatttttatttttatttcattttatgtgatggtgcatgttttgagaaatgcgtgttctgttgtcacacgctcgcatgtattctttttcttctagtttccttagaataattgctcaagtgtagatggatgctgtataacctgtctaatttaataagtttttatctacctagatattttgcagtatgcttatgatgccttttttccccgacacttttacattattttttattatggattgcttttgtttatgttaaataatatttcaactttcaagttccatatcttaatggtgagatgaattttcttgtagcataagatccaag

SEQ ID NO: 3344 - DNA, 770 bp, Glycine max
  Intron number 8 from transcript Glyma05g03350.3 (locus Gly ma05g03350) derived from phytozome v7.0 (chr-ID Gm05; pos 2570647 to 2571416)
tgttgagctggttggtccggataccagaagttcaggtattatcttaatttatattctgaaagtttaaatttgtaaatcataagctcggagaatttatcctttcctattataagtgaataaagtgctgagtgtttttctatggggttgttttattactagacaattcaagaggtaaaaaatgttggcacttaaatttgcaaggcttcaatttttatggacttgggcagcttggataagttttttttaacaagtgtttatagtagatgaaaataaaataaattaaaaagataaaatgaatataatttctctcattttaaaattatgaatctcaactttttcagaagttaaatgaaaagttgaagtacctatgttgattttaacttgtaaaagaatgattcactctatttgcataattcaagcttaatcaaactgggccaaagatgcatttgttggtttcctagtttgttggagcacaggggaaattcttctcttggctgtgggaggttttctttctcatccggctccttcttggaaatgttttgacacaaaagttgctttctctgttcctcctttactgcgaaaacaaaaatttctatccccttataacattttggttcctctaaagtaatggtaaattgctattgacaatattaattaggaaactgggaaatcatatagattttctatctgaagggttcaagatctgttttatttccgtagctcattttcaattaatatttatattaacctttttccaaaatctacttcag

SEQ ID NO: 3345 - DNA, 1331 bp, Glycine max
  Intron number 8 from transcript Glyma20g31440.1 (locus Gly ma20g31440) derived from phytozome v7.0 (chr-ID Gm20; pos 40052723 to 40054053)
ggtgtgaaaggtatagtttgtagataggttcaaaaaaatgtttctttgtaggttgaaagtgcatagtgattgcaaattcatttattaataacaatctcatttgcatcttttgtacaaagtatgaattagctatatattattgccactttgccagaaaaccaaaaagcacctaatggacaaacaacaatgatagatatttgtaatgaatttcatatttgaaaattgaaacagtatacctttttagatgcatgcaagtgtatatataagagttgaatggttgttgaattcttccattcccaaatgttaacctcttttatattttaaggtttcaatagccacaatctccttatataaacagtctgaaatgcaatgatcatagattgaaatcttttgttgagatcccatattggctgcatgtatggataaagtaaaccttataaaggcttgggtaatcctcactacatgagctagcttttgtagttgagctagacttggcctaaattcaagatggtatcaaagcctatcatagacctcaattgtgcaaaaaaaaaaaaaaactacttggctccacgaccttcccaatgcaataaataaattcagtcttacaatccttgcactctagatgtccaatcctgggtgtgagggtgtgtgctgagatctcacattgactatagatatatctaaaatagagcttatgaagatttgggcaatcctcacttttatgagttagtttttggggttgagttggccgaatgcaaattcaagatctttcacctgtgctgttagaatataaaatgttttaatttaatgatgccatgtcatgaatcttgttaggttagaaatcttattgagcttggctagtactagcagtactacactaatagttaacaaaagtatttctatgaagtatgtgtggcattaggtttattatgtattatattaatagagttcggcagggagagaacagaatgagagagatttatgaaagagaattattattatttatattctgagaagttgcacatagagagatctatttataatattgtgaggcttgacatgcaagctactgaatcctaactaactgcttactcggcatctaactaactaacagaaagctgtacaaacagaactatgacaatttacaatactctattatatggataccgcatatcaatctggtattattgagagccttttagtcatgcttagttccctattttgtttttgactattctcttgcatggagaaatggatattttgtctgtcatatgctaatcaggtattttttaaactttttccaggctttgcgtttcttacttggatactgc

SEQ ID NO: 3346 - DNA, 7608 bp, Glycine max
  Intron number 12 from transcript Glyma20g14390.1 (locus Gl yma20g14390) derived from phytozome v7.0 (chr-ID Gm20; pos 19689568 to 19697175)
tccagtcattgagaggaatattgtaaataataaaggtttgcatcttctgaccattgggttttaatttagtaaagcttgttgtgtagaactgagtttcttatgtacaatgaaagatcctagatattagacatctgattctggtaaaatttaaaaagtagtaaccacctgattatggactatttagaactaatatatcatactgttaggagccaagaatcagaatgggaaagaaaagatagattttatggaatagtaagaaaagaacaaaacattggagagaaaactctccttcaaggtgtccccttcacaaaggacttctcctttcacaaaaagttaatactcaatttacaaaatgataaagatctccctctctcctatccttcttcccctattttttaataaacccctctaactaactaattaatagtctaattatcttaactaactctcccttctccttatatcctaacaaacacccctcctaaaaatcaaccttgtcctcaaggttggaatttgaaatctggaattgcacactgaaacctcctcaagttttctccaattgctagaagacatttgtaccccttgtatcttcactgggaacgacccactgcccctgcatgcggggttgagttcggtggctccggtggaggttgggatggaagcaaattcttaataaactgtacctccacatatgatgctgtaatctctttccacctctgctcttttaacatgtcatcagctacatggacatccaattttagcagcataaactgatagaactggaccagaacagaggaaaaatcgtttttattagagttgaatgctatcagcacaatggttacacacactgatgaattcgaggtctcatcatcctcctactatctccagttttctctctaacctctaactaatccctcccaattctatttatagcttcttaactactaacaattgattataactaactaactgttagttatcctagctgtcctaacaaactgacagctctctaactcttccaaggatattttctaacatacaccttttcccatctatttccccctctatcaatacccccccttcaagatggaccttgtcctcaaggtcaaatcgaggaaaaacaatctgcatttcatcagcaagttcctagctagcttcatggtggggtaagtcttgccatttgatgagaacctcctttctgccattttctgaaattctgctctgcatgatcttctctggttggacctgcagttcccaattcttattcagggttgttggtaatggttgaggggaactcgtgggcttaaccactttcttgagcagggatatatggaatactggatgtatcttgctatcctctggaagttccagtttataagcaacctccccaattcgctgtatcaccttgtagggtccataaaatcgtggacttagcttctcatttgactttcttgctagagacttcattctataaggttgcagtttcaaaaagacccaatctccttcctgcaggactagctcccttctatgcttgttcacaaatcttttcatttgatcctgagccttgagcagattgttcctcagttcctgcaataattcttccatgtccttactcaattgatttacctcttccaatctggaaggaatgtcagctcctttaactaaaagagggggttcctgtccatacaaagctttaaaaggagacatcttggtagagatattgaaccagaattcagcccaggccaagtggttaggccactgttttggtttggttccagttaaacacctcaaataagcttctaagcatcggttagctacttcagtttgcccatctgtttgaggatgatagacagtgctcatcttcaattgggtgcctggtctcctgaacaattccttccaaaagagactcatgaaaagtctgtctttgtcagatactattaaggcagggaaaccatgcagtctcaccacttctttaatgaataactcagctacttccttagcttagctgtataagggtgacttaatgcaaaaaatgagcatacttagtcagcatatacactaacactaatatagtgtccttcccttgagcttctaataaacctccaatgaaatccatggagatatcagtccacaccttagttggaataggcaggggttgcagcaaccctacaggggctaatgtactggccttatttctctgccagatttcacatgtagcaacatagtcccttatagttttcttcattccttgccaaaacaccacattagtcactctcttgaaggttctataaatccctaaatgtcctcccgaaggggagtcatgcaattctttcaaaagtagagggattctagtggaattttttgacagaactagtctatccttgaagtatagtttacctcctccatgaatggcatatccaagttatgcttttgttttagtcagaatcccttgataaattccatataattgaggatcaacttgtatttcttcctcccaatcagcccattcctcctcttgcaccaatgaaattgctgaaaatgaaaactgcctagatagggcatcagcctctatattctcctttattggtctatactgaatatcaaaatcataaccaatcagtttagtagcctacttgaattgttcttcactcataagcctctgctcatttaagaacttcaaactcctttgatcagttctaattgaaaatttcttacctagcaaataatgctccatttcttcactgctaacaccactgccatcaattccctctcatacactgacttgagttgatccttgtctgagagtgccttgctccaaaaacctaaaggtttctcttcgtgcaataatactgctgccagtccagttcttgatgcatcggtttccaagataaaactcttagaaaaatctggtattgccagaataggaattttcttcattgctgccttaagttcttcaaaggcatgagtggcttcttccctctaatagaatgcatccttcttgagcagtgcattcaagggctatgcaattttcccataatccttcacaaatctcctataataccctgttaaccctaggaatcctcttaatcctttagcatctttaggcctaggccactcagccattgctgtcaatttactaggttcagcttccacccccatttcctgagatgatatgccccaaatattccaatgaactctaaccaaagttgcattttttcttgttcaccttcaattcatgttgctgcaaaacttgtaagactgctttcaaatgcatgtggtggtcctcaaggctactactatatactagtatatcataaaaaaatactaattcaaactgccttaagaagggtcgaagcatctcattcataagtcctgaaaggtggatggtgcattagtcaacccaaaaggcatgaccaagaattcataatgatcctcatgagttctgaaagttgttttctggatatcctcttacttcatttgaatctgatgatacccgaacgcaaatctagcttggaaaaccgttgagtccccccaatttcatccaataattcctcaacaattggtgtagggaacttttttgacacaataattttgttgagtgctctatagtctacacaaaatctccaactcccatcctttttcttaactaaaataactgaactaacatatgaactagtactagttctaataattccaatagttagcatatctcttaccatcatttcaatttcgtccttctgctaatgtgggtatttgtagggccttaagttgggaatcttggtcccctcctggatagtggtagcatgatctctttcccgatgtggtggtagcccttgaggttcctgaaaaacttgttcaaactatgtcagcaactgtaccacttggtcaggaactgcttccacacacttctctccctccaccctttttaattccaccataaaccctagttcagactccaacatggtccccttgatgattttcatgcgaatggcagcttttatcaactctggttcagcccttaatgtgacttttctgttctgcactggcactgttaatgtcaatttctcaaaattggcctcaatctcccccaatccagccaaccattccatccctaacaccaaatccacaccacccaatttaatcaagtaacaattctgtgtgaactataaatcttgcaattcaataggcaaggatctacacactcttgacacctaaccttgtgtccatctcctacttctacaaaatatgggcttgtaggggttacctctaaccttagttccttaactaacttcactgatatgaagttctgagtggctccacagtcaattagcacaatcacctttttatttctaattttttcccacaatttaagagatttccgggtggtaatgccttcaataccatgcagggataattcatgaaactcccacatctcttattccctatcctcccattgctggctctaaggatctccttcctcctcttcttccataatcatcaatctaaactgtttatttttgcacacatgtgtaggattatacttctcacatgtgaaacactctcccttcctcatcttttcatttacctcagcaggagacaaattgttgaacgctcttctaccgttccaaccacttgtccctgtttttgtagtattatgaaggtcagtcactttattgtttgcttgctgctaatcccttacccatttctgtcccaaatgaacttttttttgaaaattactccctttactgtaacttccctaaaattttgttcttatcctccactcttcgagccttaaccatggcttccatcaacttctttggttcatgatgtcttaccttagtgttaatctcttcctttaaccccttgaggaacacttccaccagaaatggctcctccaaccccatcaccattccaatgcagttctcaaattggactatgaatccctgcactgtctcttcttgttccagtgccagcaacgcttgaaaaggattttccagactcgaagcctgaaacctttgggtgatagcaatcttgaacccatcccaagaatggtttgtattctaagattcccaccattggaaccaatccagagctttccctccaatttgtcctcttcccttacagcttgcaaccaaaaatatcactcaatctttgtcaaccagcccataggatccttcccgtcgaatttgggcatttttgaattcctccaccgattgccgtcatgcgtcgctgtacccttatctccttcgctcacgtcaactgtgtgcacattcatcataggagattttttctcccatgctgccgccacctttgtatcatcccttcgatcgagctcaactgcgattctactgctttgtgattctcctctatcgctttctccatagcttccatgcgtgtctccattcttgcgttctccttcgacaccattaacgattctatgctccaagatcagagctatggtaccagttgatagaattggaccagaacaaaggaaaaatcatttttatttgagttgaatgctatcagtacaatggttacacattgatgaattcgaggtctcatcaccctcctactatctccagttttcaatctaacctctaactaacccctcccaattctatttttagctacttaactactaacaattggttataactaacagttagttatcctagctgtcctaacaaactgacagctctctaactcttccaatgatattttctaacatacacctttccccatctttttcccccctctatcaaaatccttccacccagtttgaactccaagtttctcctcctttatgaatcccatttctacagtccatttgggctgacccacgatgtaaaatattggacctcctttgcagaattccaaaacaccccctttttctcatccttcagaactgaatcatttacactaacagggtaggcctccttggtgtccctccatgggggatcaactctgaacccattggccacttcatacaaacttaggtccaacagtttcggtggtggtggggagagagtggactccgtataacttgaatcatcatgactgcctctatacatcccttctgccttggctccattgttgagctttcatgcatagacataacaaagtcaaatgctaaaggctcacccagcaagttgaaattccaagattccaatgccattgatgctccaacccgcttcatgatgaaatctggattcaacaataatttgtttcattgtaacaatatttttatggcaatctgaattttgaaaatgaggcttggttgcatctccaccttcaacttccttcttgatcagatctgttattggtttatcaagaaaatcatcttcgtagcccacattcgtcactctattttccttgtgtttctcctttattgatggatcaacttcttcctccatcaaagccttttcaatctttgtctcgcttgctaatttttctgtcattttttgtttcttctccaccacaaagggtgtgattcttgataattgaaccttctttacttatgttttctgatttcaagaactgcaatgggtcattgtcacactaaaaactgttatcctttaaatcagttctcccttctatgcttctatcaaaggtgggtagttccacctttcttgtccaaagaactagcctatgcttcattgcattctgaccactttcttccatgtatttttgtcttgctgagtggcatgggaatcaacttcttcattcaatatcttgcgcatatgttttgactctgaaatgtcgggcttctccttcaataactctatgggagtctcccttttttgatataggtttccatctcaattttctcttcttgcttcaagatactcaaaatctttcaaagaagtggttaccgtctccgaattttttttatcaaagccgtgaaaaatgattcctgatctgaatctgagttcttttggctctaaatgtagaatcaatgcattgcaacacctgccatgctcatgaatgcatattacagcttatggaataaaagagtttcttgtacctcagaatttttagccttagtaatccaaccaattgggtcttccccacaaatgttggcagctcccccttaacctgcgcttcctccatctctaaaattgcctctccctcgaagatccagcaagttggaccaattgttaggagccaagaatcagaatggaaagaaaagatagattttgttgaatactaagaaaagagcaaaacacggtctccttcaagggtttttccttcactaaggatttctcctttcacttaaagctaatgctcaatgtacaaaatgagagatccccctgtctcttatccttcttcccctatatatatatatatatatatataaaataaaactctctaactaactaactcattaatagtttaactatcttatctaactctcatttctccttgtatcctaactcatacaatatatttctatagataacaatgtataagcaattattacaatttcttaaaataacgttttcaagcagctgatgctaatattttatatgctcaaatttgggtgtcattatctttttcatgtttactgctacagctgccttggaaattctatttttggttggcttcagc

SEQ ID NO: 3347 - DNA, 1352 bp, Glycine max
  Intron number 1 from transcript Glyma09g39170.1 (locus Gly ma09g39170) derived from phytozome v7.0 (chr-ID Gm09; pos 44317487 to 44318838)
ccctaattcaacttttccgatctgatcacttcgaggtgctttctttcactctttgatcatctcgctttccccttttcctcaaccaaagttttcgatctttcatttatttatttattctctgaaaatctatcgaaatagaattgcctacccccaatttttgtcctttagtggaaaatctgagaattgctcaagtttttcgctttgattgattttccagctactcgatctattgtatttggtgaggttcagacgatttatgtatatttgttttattttgttttgttggattttttttttaaaaaaagattgttttccctttgaaaagtatttatatgactattaggtgtggtgagggagtgataggtagatattgtttagaatttttacctttcctgaggtgggaaggggggagggaggatttttaattatatgcaaaaattgtaggaaagtagaaggaggaagaattttgattggtcttagcctcttaggttttggtgattgccctattttgtgtttttgtttttttaatttgcttttgtagggaagtttaactagttggctattaatttctgattcccttatgtttttctgagagaataaaaaaaaggaaattaaagtgaaatatttttatcttggaattttttaaatttttttggtacttctgactttgtattagctcattatcattacataaaaaaaagcttattatcattaagttatttaggattagttgatcagaacttatctcataccttgttactgcttgaatttgaaaaccaactaaatgcttatcatgctaatggaattattagatgggaaggagggggggtggggtttgtgtttggagtggctaatggagggtagttatttgatattgaccttgcaagtattatcagaattttgtgtatgcctttttccattttccattttaataacattgctttggaacatactactatttgggctcaacccaatggatgtagtttagttggcaacacacgctaagtttgtgggaaaaaacctgggtttgatccgtgcagaatacactcttggggaggggtaaagaactttaagtgtgactaaatcttgactaaggattagtctcatagctggtccaaaggatcgaagcttgaggggataccttggagtaccactgggggagcctaaaggccctaattatggtggtaccaaataaacaaaaatactattttggctctgtaattatgaacttagtgcataaataacttgtagtgaactgcttcttgtgtgactgataattgattttgtatggtttttattcaacaacactgtctcttactttctaatcctgcatgtttcagtaaaaattccaa

SEQ ID NO: 3348 - DNA, 1826 bp, Glycine max
  Intron number 4 from transcript Glyma02g46510.1 (locus Gly ma02g46510) derived from phytozome v7.0 (chr-ID Gm02; pos 50442740 to 50444565 reverse strand)
tggagatattgtaccgatatatttgactacttaaggtttgctaatatctgataaatcacctgattttatacataagtttctgttggtggcataaagcagatcgagatattaatataaacattacttgatttgagtcttgcattgggagctacttctcctcaaaagtttcttgatttgctacaaaaattctgaaatggtctctcactggaaattgtgttttccatgccatgcaattgctaattcctctcttgttacttgtagtgtctgtttgttttatgggcaccaggactgcctgttttgtttttcattggaattatcgctttagaaagaaaaattctggactatttttctttattattctttcaagtgtctaattcattcttgaaattactagcggaatgtaaacattccctttctattttaagagggaaaggggtttgggtggacttgagctgggttagaataagaaggatgctttagtcgcttgtcttcgtttattttggaagggaaataagtttgagtgggtgcttttaaaatccattgattggttattttgacagccttgtctaatatgtgtgtagacagaaaatgctagcaaatatttaatactttctcatcactctttccatcattaagtaaattccatgtattatataatgggattcaattcaataataaagagagcagtgttgtcaatcttacctgtaggatcgtatgatctagttttgtggctattctgtgttcttgtttagatgtagaattgtacgagagtgggattacgatgctcatgagcttgcggaatgatctatcctcaacgagttgcagagtgagctgtgaaattgtgggttaggttttatgaactggttactggtggggaaaagattatatatttgccctaatctctcctcctttcttcatgtggcactccatattaagccatttccctctatttgaacttgtctctgccatcttttctctattttaagctcgttttggcttggcttaccagaaattgagaattttccctgttttctctgcttgtgtatgaccttggtaaccatacttgtcttcagtctctgttcttgtttgaaacctattttgacctgggttggagtgtttctctgttctgatctttgtagtggctagtgattcagtgttgagtgcttctgttctccgcttctcgattgagcatttctgattcgatctgatcttcttccctgtccttaattttttggcttataaaagttgtgaattatgcttgatttgggccttcatttaatgtacgtctttttaatctttggactggtttctaagtccagtacactttctgctcccctcccccaaaatcattatcaaatgtaaaacgagatgcattattattaataaaacaagaactacaaaataaatgtctgaattgttaccaagtcttgtggtattattacgtgtctaaattaattacatcatcatacttttatgttaaaatatactttttatatttttggtaggattttttgatccgtgtacaatcacatggcttatgatctttcattgcttcttgatccatttttggttattttgacaacattcagacttcagagtgtcgaaaaaagtgttaaaatgcaagcgtttcttgtgcatagaaataaccaaaaattaagagataagaggtataaatggaaacatttttgtgtcaagttgcttgtgagacaacctaactgcacttacagatttaattggtatagcttgcctcttccactaatagtttcctatttcgataacgacaaactgcagcttgtctgccctaattgaaaacaagattttcagtg

SEQ ID NO: 3349 - DNA, 7746 bp, Glycine max
  Intron number 3 from transcript Glyma06g47920.2 (locus Gly ma06g47920) derived from phytozome v7.0 (chr-ID Gm06; pos 50302155 to 50309900)
acagatttttattagtttgttttcttatttgtttttttttttttttgcacagcaaaaatcgatatagaattttatatataatgaagtactaggtgtactgcatacaggataaagagtacaaggcaaaattgcctaacccatctgaaaattacaagataacattagctgaagccaaaaagaatcaacccctaagacaactcctccctcaaactagtggaccattgattaaaatgaatatggaaatctttgtccatacattttaaccaggcccatgaatggaataaagcttcatccatgacttatttgttaagtgtacctgtgattcatgttagttgatatttgatgctgcagttacgagtaattgggtaggttactgcactaatactttagttgacttttgaggtggttgagatactagctatctattaatctgttctataaaatacaggcatagctgttctcttgaactatagaatttacatagccttttccctattattaataacaccaagacacacatatactgctagacacttctgtatatgggatctctcaaagatcctttcatctttctacattttatttggatatgggaatcaggtgatcaaccctaacagttagggtttggatgtgttctccaaccacccatgtttggttgtgtcctatagctcacacattttgagaccttttatcctttgaagtttgattgattccaacattcagattgtctttcctcgatcaattggcctactcaacctttctgtcatctaccttttcatatacttctaccacatagctgtcctgtcatcgatgttggtgtgtgacacaatcttttgtgacaatctgttcagagctcctcagcttcttttttggttctgtctataaagctgccacatggttgtattgcagctctcagattaaccatttgcacttgtttttgcggctgatttggttatgtgacttctgttcacctcacctgcatattttgctgcctggtttatacttcgtatcctgcctataaattgttacttcatctttacttttacttaaatgtaactaaagatgattgaatggaaatcctcaagtgtgttctccacactcaggctctattatattagaaaacttagcttactcagtaagctgaagaaaggtaagtacaaaatacagagctctgaacagagcaggtatacaaaagactaaaataaaatgtaagctactactctaggtacatcatgacctattttccaacattccccctcaagctggagcatataaatcatatgcaccaagcttggaaataaaattgaatcctaggcccccttaatgacttagtcaaaatatctgcgagttgatcattagagccaattttttctgtactaatttccttagccattagctcctctcgaacaaagtagtagtccacttctatgtgcttggttctttcatggaatataggattagaggcaatatgaagtgcttcctgattatcacaatagagctgcatctgcagaacttcacaaaacttaagttcttgaagaagttgcttgatccacataagttcacaagtagttgaggccatttctctatactcagcttctgcactagatcgagcgacaacattatgttttttgctcttccaagaaatcagatttcctcttatgaacacacaatatctagtagtagagcgcctgtctataggagaacctgcccagtcagcatcacaatagccagtgacatgggtgtttcccttatcttcatacaacaacccttgtcctggagcctttttaatgtacctgagaatttgagtgacaacattccaatgatcagtgtaaggattctgcataaattgactcattactccaactgcaaagagatgtcaggtctggtgattgtgagataaatgagtttcccaactagtctcctatacctctcaggatttgagaggggttcaccctgttctgccatccacttttgatttggatccatgggactgtcaatggggcctacatccactcatgtcagtctcattcagaatatccaaagcgtacttcatttgagaaataacaatgccttcgtttgattgagctacctctataccaaggaagtattttagacatccaaggtctttggtttgataatggttgaatagatgttttttcagatgagaaattgcagcagcatcatttcttgtgataactatgtcatcaacatagacgatcaaataaatacactttcctagtgaggtgtgaccatagaagactgaatgatctgcttcactacgttttaatccaaatgcctatataatttgactaaatttcccaaaccaagcacgtgacgattgtttgaggccataaagagatcttcgcagtttacaaactaacccgcattctccttgagcaacaaatccaagaggttgctccatgtatatatctcttcttctaggtcactatgtagaaaaacatttttgatgtccaattgatggagagaccaatgacgaatgacaaccatagcaagaaataaacggatagtagtgagtttgttgactagagaaaaggtatcaccgtaatcaagaccatatatctaagtgtatccttttgccaccaatcgagccttaaggcgatcaacttcaccattaggcctaaccttaatagcatacacccatctacaattgactgtctgcttcccaggaggtaggggaactaactcccatgtaccactgctttcaagagcctgcatctcaacaaccgtggcttgtcgccacccagggtgatcaagtgcttcatgaatatatttaggaatggtgagaggtgatatggatgaaataaaggaaaaataaggagataaccggtgataactcaaaaaattaaaaataggatgagaatttttggtagatctaatacctttcctaagggcaattggccacccagagtcatctttaactggaaccgtggtatgagtcgttcaaggtgacagacatgaagcagaggactctccttgtgacataggactagatagctatctgtgactcatgctggtcaacactgggaggagatcgagtagggctgattggataggtggcttgacttgtgtccatgctagggatttcatggactggtgacactaatggagtaagagatggaacatgcaagacttgttggacagaattgaaatcctgcattgaagaagagaaaaagggagtttcttcaaacacttttgattgaagctgcatagtacaatcaaaatgacgacttctgctgcctccttttccagcaggacaagaggacttattttttccctatctaagagaagcaaatgcttggtacttgatagaacattatggcggaagttgatccatgtagccgaccccacctagtgggataaggcgttgttgttgttgtaagagaagcaaatgcttagggtaaatctatcctagatttttctgttgattatgattttatactagacaacacctgttttaggaagagggaggaccatcttatctcccacaaaagtggggtggtatgctcgcaaattgatttcttatttatgaggaaatcaggcagaaaactttgcatggatttcaaagtgatacatggggagagattgactacccaacacagagttaggtcatggatgtaagagttgagaagagagtaaggaaaagccaagataggatttcaaggatcaagtggtcacaaggcaaaaaattaggaagtttcaatgaaaagttcttgaggaagggtgtgggaagtgaaaatatgttggacaaatggatgaagggattaggaaggtagcaaaacagattgttgatgacttaagaggttggggacctaagggtaaataatcttgttggagaaatggaagtttgcaaaagaaagttaaggttcaaaaagaatgttataaagtgtgggtttgtgtaagaatattgaaaaatgggaaaaatatgtggtcactatgaaagatgtcaagaaggtggtggatgaggagagagctacaacttttgatgggcactaaagatggagaaagaactatttacgagcttgctataagtagggaaatatagtcatgatactttgataaagtaaaatgcattgagaatgaaggtaaagtcttggttacaaaatgatatatataattgaaggatggaaaattactttcacaagctagttaatgaagaaagaatcttttgcattcaaataggctaaacacaagggatgaggaccaaatttataacttttttcttagaatttgagagcttgaggttaaagaagcattgtagaggatgacaaataacaaagcagttggagcggatcattgaggtatagaagggtctaggagcgaaaagtattagttggcttgcaaaattgtttaacaagattacgaggtcttagaaaattctgtacaaggggataaagccgatgaatcatactatgaagttataggtaagggaaattgagcaaagattaagatgtctcttctgttactaaaattcaatttgattttttgccaaggagagaggttggggtttgattcccgagaaaacctagttgggagggtctaaccttttgccttttgtaccccggaagagattaggccttacaccagtagagaacattccttgtgaaagcaacaacaacaaaaaaagctttataagttcttattaggaactatcttttgtaatgtgggaattgagttttttccaatacatcctcctcacacccaacactattgggcttggtgcatgaataataataatataatatggtaggtggtccaataatagatctaggataaactttaataccatcttagactttgggtctaactcattcctacgaaaccgttttgtaaggtgaggggtacctaagctttataaactcttatcaggtattatctctagtcaaagtgggacttggtttggcttttcccaatattgggattatagtattttttatatttatcaatgattattcttgttgcacaaggttatcatatatgaaaatatatcactgctttctatatttgaatccttttgtactttcacaattaattttgtacctctagatatcttctattttttttatatggcccaggagtaattttctggtttgcttacaactttatggcctcatagggcatacttcatcaatcttcatgcaattcatgcaatcacaaccctcggaaaaatggcatcgtaacgcgtaaagaccattagttaaaagaatgcttatattttggttcttcacaataatgtccttttgaggttttatggtgatgcagttctcatattttacttaattgcttaccccctttggttttactaaaccagattaccccttcttttcccctttgtgggcttagcttcaccttgcatgtgctttgttcttgatcttgatctaggacaagacaaactttgtgccaattctcacaaaggatattgatgtttttctccaggaacaaactgttaccttaccatatcaaattttaccttctttgagagttctactgagcattcctttgtgtatgaggttcttcatgttcctttgactggttcttctgcagagtttaggtttattgttgttgctcgcatcctaatcctcttgccagacctctggaagcacctgctgactctctttctccaattcccttaccttgcacaatcccatctataataaccagtctttctgtttccttttgaaaagttatttgctccaatcccagtctgcattgcatgtatgaatttgagtcactgattctattttaacccaattatacttttggcacatcttttcatcctgcctatattccaaagattactgataaggtttcatgccattgtgggttgcaaaaacaatggtgcatttgatgaaatgattaccttacattctagtggcacttggtggctggttcttttatcttttacatttggttgtttctgtgcatacacagttaaagttggtcaagtggccagattgattggctcaatgcaaagtttgttgttaattgctagacaaagatgcatgagctgggttatagtgataccttttgacctatggagttataaatgtctttcttcgcagagagcttgctagagaggtttatatggagaaaacactataaggtgtttggattagtgtgctgcctgcataatgctccttgtattttgaggcaacctttgctgtcatggtttgggagatttaacatagttatttaacagtttgagatgattcatggtgacgaagatccctctattttctattatcattcctcactattccacgtgcatacagttggttgtctatgcgggtgatgttgtcataatgtcataactgattgtgataaggaaaatatctgccaactgcaaagcacattttttacccatgattctgggtattgaagtgtttcaatattactggtgttgcaatctcgtctcatgtagaaaatatggactaggtgtactggaggatactgaaatgacaaactgctgacctgtttttgcacttgtggatccaaatgtcaagttgaactagctcactatcatgtgatcagatatttcctttgttgtgagcttggtcagtttttttcaacagactccatgtgacagcaattggaaagatgtgattctcattaaagctaccaagagaagaatttatacatgacaatatttggacatgcctgagaatgggtttcacatatgcagatattgccagatctccttcaaatagatatttgactttagggtactttggaggcaatcttgtatcttgaaaaagtatgaatcggggtattattgccttgtcaaatgcagaagcaatggcaacatgtcaactcttttgtctaaaactattgatatttgacaaactgataatcaagtagccttacatgcttgttccaatttaaactattttctgtgaggaccaaccaaacaaaaaggaggtaggttttccttttcatgaaagaaattttgtcactgtatttttacttttttgtcacttaaatgactaataagatatcttatcagtcttttcgtgatccttggattatctacatttataacaagttttttgcatatgatttttatgctcctacttgagggaaatgttgagatgataatcaatctaaaaaatcatcgtttccctaaagatttatatatatattaactgagtcgtttgtgtggcaaagctatgatggccatgtattgaagctttgcctgtttagttgttggcacttcgttatgatctcgaaagggagagaaacaaaaggaggaaaagggggaggatgtatggtcaatgaagcctgcattttttaagggttactttctttcatgtatgtatatttgtaacaaagctttagtttactgaggattcttttttttttctttccctatcttagccctatcctataacttcaacatttatattgggaaggatgttttagactgaatttagcaagtggatcatataaacatctctgctgcatgttctttgtgagggaggtagggcgtagtatggatacattaaaagttaaaacatagcttgcgttgacccatgcctgaatatatgattcacggtttgttgcttaaagcatgataagaatccagaattgaaatataattgattattgcaacttttatgagatgtaaatattaatttgtagattttataaaacaatgataaaatatttgtgtgcagatttcacatttcctatgtatctaaactgattgctctgtgtaggctttttgcggcc

SEQ ID NO: 3350 - DNA, 2005 bp, Glycine max
  Intron number 1 from transcript Glyma18g49770.1 (locus Gly ma18g49770) derived from phytozome v7.0 (chr-ID Gm18; pos 59114845 to 59116849 reverse strand)
cactcccaagctccgttcactccaacaacactccggtgagctttctcccttctccattctcaatccccaatccgcttttcgtgcaaagattgttattctttttttattacttttggaaatgaaagcaagtgctttcgatcggaaggatgtcaatttcccagatttgagattctggatagctttgcgtgtggataaggaatggctacgatcgtgaagattatttttttgttgaattgttctaagaagtttctcattattattttaattttatgttgctttttcccccttatttaaatgaattcatatgttgtttgctttctttatgttatactattattattattacgtccatcgattttcaacttatggtttctgtgattattattatttttacgtgtaccaccactgatgtcagagtagtagatgccttttatattcctaagaatcagtggaacattagctggtgatggttaatggacgatgacaacatttgaaaaatctgttgttgttcataagcttgtagtagcttattcatagttggaaagattgaaagaaacagtatagtcaaaggtgcacctgaggtgaggcagcagagtgggtcactgaggcacacagggtgccttttatcctgttgtgtgcttgatgcttcttttggtaattgtagaacaccctaggaggcgttggtataacttgctaactgtgattctaaaacagggtaaaaaagtaagaatggtaaaaaaaatgttggtatattccctaaaattaaggatatttaataaccattattacaggtattgtatgattcacaaaacgattccaattccatcaatatgattcaattcaaggccttggtattggaaaaaattcaattcccacatcagttagggatagtgtcaagataagagtatataagtgggggacaaccctcaccctatgagctaggttttggggttaagttggacccaaactcatattttaagatgatatcagagcatatcctagatccattaaagggtcacataccatgttatctatgcaccaaaccctaaaatactgggtgcgagggggtgtattgggaaaaattcaagtctcacatcagctagagataatgttaagatagagtatataagtgagggataatcctcatcttataggctagttttggggttgcgttaagtccaaacttacattctaagacttggtgaaatgaattgtgtgtcaaattgtttttttgtttgaattgtagatgatttgctctaatcccacatgaatctcatcctgcttacgaattgtgcgatcctggcacagccaggtcgcactgctaaaaatgtttttttaggtaaaacaagagtaagaggccaatttttaccctccaatctgacctagggtgggcccctatctcttttcatgttttcgctccttttctttgtagtggcagctactgtttttttgaccaggtggctgttatgattttgatttttgtttgttttgaagcttatatgtcactttgttagctatttgacctcaaaatgctaatgtatatgtgtatatatatatgttgatttttgattttatgtgtttgttagttttatatgctatgttttattattgatcatgaatcttatgatttacaatacagttcaatttgtgatttggaaaatatgccttccggttcatgatttgaatcccaactgttctaccatcttaataactatattaatccttgttgtgcaacaccttagatgccagctatttttaatggtggcagtgaccagttgtctgcctttgaactcctaccagtgaaagtattttaccggttttggaaattaaacacttagtatttcctttttcgtttgcactacaaatgtgttgcttgaatagttaatttgagtgcaatttaatgcaaattgcaaagtagtaaaagcttttattgttctcttctttttctaatgttaatgcttgtctttaaggttgaaattggagcttgagaccctcactagctggg

SEQ ID NO: 3351 - DNA, 1479 bp, Glycine max
  Intron number 2 from transcript Glyma20g33970.1 (locus Gly ma20g33970) derived from phytozome v7.0 (chr-ID Gm20; pos 42407191 to 42408669)
tgataatccagaatctgaaagtaaggtgagaatcttctcatgaagttgctggttatggttcaggacaactcattatataattgacatgaggttcttgtattgaatgatagcatgcagaatctgatagtggaaacgtcaacaaacctatgggtgatagagcaactgctgaaacagaggctgaagtttatggtttacaggtgaacctctgcagtttggtatagtatatagatgaataatactatttccatcttcgatattatgatgaatgtttggatttcatttaacattaccttgttggtaaaaagaaaaattctttctcttggctctgtttttggtgaaacggtttgctgactaatttttcaacacgagggcagtgtcctacactctaaattgtattgtcaaagttgaatttcataaatatgatgtttactagtaaagagtgatatttgagtcttgagaccaatggtctactgtgtttcaggatagattgttttttcaaagctattgttttgtttcttctaggaattctgatgctaacattgtcattgaactgagcaagacccatttgcctgataaaaccgttagagtggagctgcatttgcttacattaaaataataaattggcctagcttaaaaagtttgttgtcccttttgagactagtggccaaactcaataagaggataatacgaaacccagaaactgtcagaccctatcaatatcattatattgcatgtgtttttgtgtgtgaacaaattatattttcatgaactattacaaaatagaatcatcagataacatagttataaattatattgctgttaatcacttgaggactaatggcagtatttgcaaatgagaaaatccagataggcctaattcctcctgtaatgcaatctttcctccagttgttgtcttctttttttttttcttttttctttttaaatttactctccttgaagctgtttttataggattagaagaaggcagattaaaacccacctgtatctgtgtttaatctggtgcttcatttgtaaaaacgcagaatattgagaatgctgatcttgaagaattgcaagagttaggatctggaacatttggaactgtttatcatggaaagtggaggggaacagatgttgcaattaagagaataaaaagtagttgtttctctggtagattgtcagagcaagagcggttggtaggtccccataaattataagctagttgaatttgctagtatcatttatttagcttacctatcgaatttatgttgatgcaattgcctgtataaagttatacatggaaaagtaattccatggtaaatgaggaatttaatttcattgatttggaaaatctcatttttctggccattaacgtgtattgccataaaatcctcttgtttgacaatgtttctcagctgtatgctttctgcatctgtttctgcagactaaagatttttggagagaggcacagattctgtc

SEQ ID NO: 3352 - DNA, 1968 bp, Glycine max
  Intron number 14 from transcript Glyma09g38310.1 (locus Gl yma09g38310) derived from phytozome v7.0 (chr-ID Gm09; pos 43713099 to 43715066)
gtgcagtaaggtaacccatgggctcctaaggttcagaaaaatagtgatgctagttatagcctgtatttttgtattttttaacattgcaacaattctgcccaccacttttatcattaaggcagtagtggtgagtgtctcatcttgctcgaaaagccctccattctaccagcaagttccctaacttctagcactttgccacttctcattgacattgccttaaactgcacctttgacgttattcttgatttatacatataaactttttttttattgtgcttgttcatgttctctttctactgaagtggtttaaatatctgttattgtggttctgcattgcaatgactgtatgctaagtatttatgaaatttgattttgaagcaaaatgtgatgcgttacttgcctttggctaggtagttttaattaagatgatgtttatgtgatatttctttactattttattctcttgcctaattgagttctatggctacatggtgcaggaaaatgacatgattgctaatgacacaggtttgcttctaaatgctcttcattgtttattttatgaaagtgccttaatatttatagccatatggaattgatctatcaaagactaaccacttgagcattaccacagttaaaaggctctccatttccttttcttggaatcgtagaaaagctgtatttattgtaggaggagagtatatatagttgtctatcaagtagccttcttccatctaattaattggagaaggacttttcattgcattttaatcagtggtcgagtaacttacgacaaggttttttgcagtagtagggtttacagtttatattaaaacacatgtattttttccataatttggttccaaatcagacttttgctgtctgctttcaggaaccatttatatggagcccaacttcgtaatagtacctctggtacttcttttaatatatatatatatatatatatatatatatatatatatatatatatatatatatatatatatatatatcgatctttgccgatcaaaaaaaaaaaaaagtctccattttagatgtcgacttcctttcctcaacacttccttcatgaatcttataacagaagttattctgtgtagtttattgttagtggacactggttccagccttttcaattagttgggaatatgcaaataaatattaatgtctgacaagtttaggccttggtgaaacaggagattgaagcttttcttactgctatttcttatgtttctttgatttgcattaatttattctctatgtatactcccagtgtttttgaatgttggtgatgatgagataattgatgatgatgattatcaatcatgtgctgaaggaactaaccttgaaaatagtggatggtcttccaggaccaggtttgtttgtgcaaaactctagtaactaacctttctctgcatagaaagtaattgaactattttttccttattgttgttttgtaatcattaattttgctgtgccgatgggtgggtggtacatgagttctctcgtacacttagtacagttcaaatactttcctttctttgcatagaaagtaattgaactattttttcctcattgttgttttgtaatcattaattttgctgtgcctatgggtgggtggtacatgagttctctcgtacacttattacagttcaaatactttcctttcttttaaaatcccccccagccatttccttagatgggacggaatccctagaagatatggacaaatcactgcatctgcaattaaaaggtctctttcacttgaaagaagcccagaatttgtggttgtgtgcagatgatcctgtgtatatcaattttgtttaaattcatttgagtttggtaaaatttttatgcagtgattcatggtttcatgcatattatatttcaatagctaaccaatggcatttatccacagggctgttgccaagtatctgcagactgtgtttgata

SEQ ID NO: 3353 - DNA, 847 bp, Glycine max
  Intron number 6 from transcript Glyma11g09780.1 (locus Gly ma11g09780) derived from phytozome v7.0 (chr-ID Gm11; pos 6987237 to 6988083)
cagaagataaaagagcttaaacaatcattgaacaggtaatggttatagcccattttctatatatcttttcatgcttgccatttcatttttctttctttcacgttgggtttctgaaagattttgatttttaattactggtttcacagtaacagatttgtaaggttgccttttaaaaaactttggctgtgatataatttttggtccaattctgtaaaattttagtgattcaaagactggaaagagattataactgcttttagcagtggctaggtaggacaattgatgataactggtaggtgaaaaaatagattgtggctagtatattgctttagttgttaattagtaattagtaactgcaatatcatctggaagattagattagattgggttgatggacataaattgctgtattttattggtaataatttgtctatttgcaaaccaaaatgattttttgaaaactacaaaaagggagttcttgatacaaacattttctgtttcaagaataatttactgcacaactggtaaataaccacatgttggaaaatttacttatttgtttctaaactggaaatattcttaccagaagttcctttgttgtaaatttaacatattgctccccccctttttgagataacataccttagagtgctttggttactatttaaactggcttgacatatgtacatgttactttgatatttgtgtttgcttcccctcaccatacatgctttagctagtcatgtattaagtgattggatgtgatttttctacatttacttatattaagtatctatttatcgttaaggtttatacttggttgtttgcagtgagtttcaactcatac

SEQ ID NO: 3354 - DNA, 4564 bp, Glycine max
  Intron number 5 from transcript Glyma01g29330.2 (locus Gly ma01g29330) derived from phytozome v7.0 (chr-ID Gm01; pos 39405323 to 39409886)
agattggagaaggtgggtttggtcttgtttacaaggtatatcctcttaaatcaaccactttttcctgaacataattgttactcatttatgttggagttatttagaataaaaaggttttagtatgtatatgggcttgacccaattccttgtatatgctgaacctagtattataaatatgagggtagctacacattgtagaatatgcctctctctatctttctctctctcttccttatctctttctacatagtatcatacaggtagggtttagcacctccttctacagtatctttctctctttgtggtgttttgggggcgttctgaggtgttttttgggtaaaaaaagaaagtgtggttcgttgctgcgtaaggatgtctaacagcgacggaggtgccaaggggcctactgcggaaatcattaccacttcctgcaaactcaccaatatcaagcttgatggcgacagtgagaattatgtggaatggaagaatttggttgaatttagtcttggtgggatgactaaggaagattatctaacagaaacatgtccagatggatctaaggcagtgatgtgcaatactaatcttagcctttctcgtcaattccattgataaacagactcaatctgttatcacccattgtaatgcagtgaaggagttgtgggattttttaaaaaaatcatctatgaaaaattcaataatttgaattggacttatactcttctgcaagaaattttccaccctaaacagaataagcggaaatcgacggacttcttcttagagttctagaagtacactgaagaattgacttttctccttgcttgcaaatttgtagagatggtgacccaacagaagaagcttatagctctaaggttactttttggtcttgattcaaagtttgtggtggtttgctctcagatattatctagttggcaggtggatacttttgagggctctcgctccactcctgagggtgattcccttgatcgctctgctctagcggttcaatctggaggtcatggccatggtcgtggtggacaagtgacgtgctatggttgtgagtaagtgagtcactatagacaccagtgtgctcattcctctcagaatcagcagtactcacaaccacaggctcatgcagtgccgcggcctgacattgccactcaatcagaggaaaaacctaggtggttatgactgatgacgagtcatctacaccttcttctacttcttcttcttcaaccacatttgtcctacaccttcatctacttcttgacgttggatcattgattctagtgccataaatcatataacaggggattcaggtatatgttcttctttcaatccttctagcatccattcttttgttacacttgttcatgggtctagtgttcatgtttaaggggactaggtgtactaccccaattcctactttttaattgtcttctattttgtacttgcccgaattctcgtgtaacctcctttccattagtcagttaacgcgatcgttaaattgttctataaccttttttccccaattcttatgtattttaggatctgcagacccagaggctattggtagaagaagagtatctaatggactgtacttattggatgaaggagtttcacatgcttttgcagcttctactatccccatgtttcagcctcattgtcagctagtcatccatctttaggagttcttagaaaattatgtccaccattagagtctgtggagtctattttgtgagtctcgtcaattggctaaacatcatcagtgtttatttgccttgtttaaataaaagagctcatgctctctttgatattgttcattctgatgtatggggttcatgcccagttacttcaaagtttggttataaatattttgttatatttgatgaaatctatatctgaattgttcaccatattttgtcattattgttctaaaattcatactcaatttggttgtcttgtgcgtgttctttgtagcgataatgctaaagaatacttttctgaaccatttctcattttcatgaatgaaaatggcatgttgcatcaatcttctttcatcctcactccacaacaaaacggggtggctgagcatacaaatcttcaccttatgaaggtttcgtgagccttattatttgcaatgaaggtttcaaaattatttttggcaaatgcaatccttactgctgcatatttaattaatcgcatgccatcttctatattgaatggtgtaattccttactctattctcttcccctctcattctttgttacccttacccctaaaaatatttggttgtacatgttttgtgtatgatgtttatcctcaagaaaccaagttggatccaaagtcattgaagtgtgctcgtgggttattctaggacccaaaaggggtatcgctgtttctctccagatcttggtcagtaccttgattttgcaaatgtgtcttttgttgaagatcgttcgttttttgttgagtattagtcctctttgtatgtgtatgagtcagatgatttgttcttaaatctcactattatcgactctgctcctccaactcatctcgatacaggtttccagttttttaaacaaacatatccttgccatcctaaataggtgtcacttgaagctgaagccacatgtgaagctccaccagaggatctaccaatacctcttccaacatctgcagatcctccttcataccttgatttccctattgcacttcgtaaaggtaaacacacctgtacacatacttatcctatttcctcacatatgtctattgctcatttgtcatccacctcaaagtcctttgttgctacctagattttgtttctatccctaaatctcttttagatgcccttagtcatggtggctagagacaagcaatgaaggaggaaatgatagctcttgagaaaaattgaaacttgggatttgatttctctccctgcaaggaagagggatattggttgcaagtgggtttatactatcaaaatggattctaatgggtctgtggctcatttaaaggctcgcatcattgccaaggggtatgctcaaacttatggagttgattttactaatactttttcccatgttgctaagcttaactctattcgcattcttatctctcttgctgctacatatcgttaacctttatttcaattggatgtgaagaatgctttcttgcttggtgacttacattaagcggtgtatatagagcaatcacctgggtttgttgcttagggggagtttggcaaggtgtgccgcttaaggaagttgttaaatggcttgatgcaatcacctagatcttggtttgggagatttagtggtgtggtccttgcatttggactgaagctgagtcaaagtgatcatactgtattttataaaaatactaaccttggcagcatcttacttgtggtgtatgttgatgatattgtgattacaagaagtgataataaaggtactgacaacttgaagagttttcttcaaactcagtttcagactaaagacttgggggtcttgaagtacttcttaggtattgaggttatgtactcgaagaaggggatccatatggacccagggtttaagctgactgttgatggagttccattctctgatccactgagatgcaaacgaaaggtggagaagcttaattatctttgaatcactaggccggatatttccttcccagtaagttttgttagtcaattcatgaggttcctgactaatactcattgggaagcatttatccacataaagtacttgaagaaagctttaggaaaggggattgcgtatcaagatcatgggcacatataggaggaagcattctctgatgcggatcagatttggtctcatatggaccgcaaatctaccatatgagctactgtgtatttttgggaggtaatttaatctcttggaaaagtaagaagcaagatgtgatgaccaaatctagtgtagtggcagaatacagggctatggcccaaatgacttgtgagttgatatgggtgaaacaaattttggagaagataggatttgctaatacctatcctatgacattgtagtgtgacaatgaagctgccacacatatcgaatcaaatccaatctatcatgaaagaatgaagcatattgaggtagattgtcacttaatcctagagaaggttcaacaaaaccttatatgtacctcttatgtcaagacaggagatcaactagcaaatgtgcttacaaaagctttgaatggggtgcgtagtgattttatttgtaacaagttgggcatgattaacatctatgctccagcttaagggggagagttagagtcatttatgttagagctgtttagaataaaagggttttagtatgtatatgggcttggcccaagtgcttgtatatgcttaacctagtattatatatatgagggtagctacacattgtagagcacacaatcatagtttactcatatgctctatctctttctctcttccttatctctttctacaataatgaatgaaatattgtacttgtgttaatgtttaatgtaatactatttttcacctgtataaaattttagggtgtactatcgg

SEQ ID NO: 3355 - DNA, 1314 bp, Glycine max
  Intron number 15 from transcript Glyma19g02680.1 (locus Gl yma19g02680) derived from phytozome v7.0 (chr-ID Gm19; pos 2550375 to 2551688)
ggtgatttaggtgctattggtgaggttttccaattgcaatttttatggcttcatgaagttcttttccttccaagttacaccacttgaatgctgcaaaaaatgttggaaaatgttgttttggattgtcatgattgtatctaatatattaaaattaaaatttacgttcacacttaacattacaaaaatcatattcgaaaacaaatatatcctattctatataatagaataggttttgtaggcttggatcaaggctcaatccatattattgtggaacttttgaactactggctatttggttcttgtttggactttggagtctcacttgaaaacttaaatacctacctcaaaaatcatattaaataagcatattctaatatccagacatattaatagaataattgataatatatctgtaatcaatattcggcaatccaaatgcaaatcctagaatcaatatcaaacccattatgtattgttttcagcaggattctttctagtcttgggaataagattatatttcttgatggtcttgatcatagccatcaagcaagaactataattaacagcaaacatgatacttagtgtgcattagacatttatacttcatggaaaaaggggtctgtgatttcttgattttattattaatagttaacacagttccaattttcttagtacaatacagtagtcatttatacttcatggaaaaatggatctgtgatttcttgagtttattattaatagttaacacaatccatattttcttagtacaattgttttgctcttttagaatgatattacattagactaatactaggctaaattacaattttggtcctcctttttattcttgatccgtgattttggtccccttatttatttttgtagtaattttcgtcccacattttagaaaattcacaattttagtccaattttcaattcttcaaatgttttatttcttttattttggtccaattgaaccctagatctcacatatttatttaaggtactgtcaagaaataatttaattaattaaaatgtaaaagtaaaagaaataaacatatgcacaattgaggattagacaaaaattgcgaagtttctaaaatgtgggtactaaaattgcatgaaataatagggggacaaaaattgtggataaggaattaaagggggtccaaagttgcaatttagcctaaatactagtaattttatctttatcaatccaggaacctgggtaataatgatcttcatgccactctgctttgtatgtaatcaatgcacttcattaaattaacttcttacaaatctttgcagcaaaat

SEQ ID NO: 3356 - DNA, 1105 bp, Glycine max
  Intron number 1 from transcript Glyma08g18330.1 (locus Gly ma08g18330) derived from phytozome v7.0 (chr-ID Gm08; pos 13775209 to 13776313 reverse strand)
cattcggtaaaaaagccgaagacagctttttctcggtatagtataatattattctttgcaatttcctttcttttatgttggttaatttaatgtacttgcacaacagctaacccatagagttggcgaagtagtgtaaggctccactgagcgcagaagaactcgtgtttgattctcaccgtgtgcaaaatttccttaggctagtggcacgcattgtgagcagaattagtttctgacccaatgagttaggggacattcatagatcgtgttgggagttgggaggagagtatccatctttttgtgcctttcggcaaggctattttacatcaatatcatgctaaaaaaaaaactttttgtatctatattaaaaaaagatcttctgggttcagtttaaattgtggggttcaaaggaggaaaaacttagatgcaagtattatcttcttttcaaatttggagtttttaccttggtaaattatgttgattacctagtaccaacctttaatgcaaaactttattatgggaataataggatgtaaaactttaattttgattggagaacatcaaatgtatctaaggaactgtagctaagttttgtcctcttagaaaagtgaggtactgacaatttagaagcatgcttttatagaatgttaacttgtgcaatttagaaaaccttgaggaatccccctttgtctgatatagttttcttttttggtaaactttatatatatatattaataattaatatttatctggtatgtgtagatacagaatgagacgacaggtttaaggttttttgcttaggtacatatccacagacaatgataaggtttataacttattacgaaaataattataaaggagtgtaagaggatgtaaaatacttacaacaattgagaatacaggattcagtgtcttttataggactgtttttcatattttatttgtgtgcagaacaaatttataattgtgacggttcatgcttgtatcaaatttcaattggctccccttctaagtaaatttagatacttctgtaaattctgtcaagtgaattgtgattgatgatcatcatttggggtgcttaagtaacataaattgtatactttgcagg

SEQ ID NO: 3357 - DNA, 856 bp, Glycine max
  Intron number 4 from transcript Glyma07g30670.1 (locus Gly ma07g30670) derived from phytozome v7.0 (chr-ID Gm07; pos 35611483 to 35612338)
attgaacagctggacggaaacagtgaaagagacaggtcagttgcatgagccttatccatggaattacagtgtgggagatgagccttatccatggtttcttctgcaagatttatttgctttaaggaataatagaatggtattttttcctattaaagtgtgggagatgagccttatccagtttcctctgtttctgtctatcttcctctctgtaccttatacatttaatttttcattttatcaaacagatttgaagaagaaaccatggaattacatttatgcgacctatatatcgaaacattatattataggtagcaatagttctgtgtgtgtgtttgcccatggaattttgtgtgcctgtgtttgtatccttggctctttttcaaatttagtaagtagtagatattataattttggagcaattctggaagattaggcttagccgcctagggcttgtttcatgcttggaattggaattgggcccttaaattcaaatttcatgtttataacaccttttggaattagtagtatcgataccacagaattaaaagactattaaacagtaccatcatcaattcttatgtttgcttttaattccaaaaattttatgtttgcttttattattgtcatataaggagtgctttatgtgtgctgtgtgaattgtcattatagatatgtttgtttaaaagcaaaatggatatgaagtaatgattaatgttgaactttgtaatgtcttaatttcatcttgtgtctatgctcaagctcaatgcataatagggctactttcagcaagtttatttggttaattatttgtggcttcatgtttaataatggaatgactgatgcaaatgtttcagga

SEQ ID NO: 3358 - DNA, 936 bp, Glycine max
  Intron number 1 from transcript Glyma03g26740.1 (locus Gly ma03g26740) derived from phytozome v7.0 (chr-ID Gm03; pos 34223606 to 34224541)
agttggaccacctcccccaccttctggcggattacgtatgtctctctctctctcccccctctccttctcctcttataattcaattcattctgaagaaattaagattttttgtttctgatttaattagaatgctctggaaatataattgtcttgtaatcagaaattgtcatctggataggaagtttgttgacttttataataattacgttttaacttacctaagacgatttctgattagttgagagtctaacaataaaaatctttacagaacttagaaacaattgtttatttaaaactgaactttttcaaatttgtatttaattttgatttgattattcatgtaaaatgaatagtttagattaactcctttttgcctcttatctcttacttgatgcacaccatctatgtgtgtgcaatgatcatcataacttgtcaagtggaaatcattgataagccatggatgttgcattgaatgatgaaccttgaaggatgaaaaatggaaattggggcagagaagttgaagtagatttggggttggttttagtaagtttcattaaagtaaacagggttagaagcaaagacaggaaatcaaacaaaaatcagaaatggggttctgtgacatagtagtgtattgtaccacagcacagcaaagttttgaacagaaaataggtcatgcatgttgcattaaatgatgacagaagaaaaatagaaatggggtagaaaagtttgagctagaattcagtttgattttggtagtagatttcatttatgatatagggttagaggcaaagacaatgaaaacaaaagaagaaaagaaagaattattgaaatggggttgttattagggacatgattagagaatggagtttgaagatattataattataaccatggtgggtgtgttatggaatatggcagctggaacattgaactcag

SEQ ID NO: 3359 - DNA, 3763 bp, Glycine max
  Intron number 1 from transcript Glyma08g07580.1 (locus Gly ma08g07580) derived from phytozome v7.0 (chr-ID Gm08; pos 5434505 to 5438267 reverse strand)
ctgtggaaaatctgcacttcttgataccttagcaggtatgcatatatcaaagtgatgaagcttctgaaactttattgcatgattttttttggaggttaattacctcacctgtgagaattaatgttttctcaataacttaaaaataaaacttcaatttttttttgagaactcaaaatgtttgatatttaatttcttgattgaatgacaagatgatcattataatatatatatcaccacgagtcaaggttatcagactcgcgattctacatagaatcatggagattccgtaaactcggctcataaaatcgaatcgtaaactcgtaagagtttattcaaataaaaaaaatattaccaatgatagttaaagtttttgactcaaatcataaactcgtaatgctcaagatcgagtgaaacaaatgttattttaaatgttaccaatgacagttaaagtctttgactctttgtagtttgcagtgttaccattccttcccttctcttcagtactccccctttctttcactctgttggtgttccttcttttctctctaatatttttttaattccaattccttatctctgtttcaaaattcagattctcccttctgtttgtgttcaggtacccttgcttttagttttattttcctctttcaattcagattctcttttcaaatttgtatcatacttttattttctcttattctttctttaatgttcttttggggaaaggtgggttggttaaaaattcatgcagatttgttgaaaattagaatcaagttattgatttgatgcacttgatttaatgtagatttgtttctcaactaagcaaacaaaactcaatactttcactcacccttgatgagttctattgcaagaatgtaaagagcttaggatctatgaacatggatgaattcctttctagcatttggaactctgatgataacaaccaagttaacccaccactacccacccttgatgaagctgcaaagggtaaaagtgtagtagcatcagaacccaccaacatttcccagccattatctgtccctcccccaatttgcaataaaactgtggatgaaatttggttttagatccacaaaagccaaccacactacaatgaagctaacaatagccttgccatgaatgagccactactcaaaaggcagcaaacacatggggaaatgactttcgaggatttcctagtaaaagctgtggtggtacatgaatcatcatcactattcaagtcttcattattatattagaatcagattggtaacattgcaagtaatggaacattgagtgcaagttataggttcagccgtttaagcatgtaatagggacaggatctagtgtgtcttgtaatgggcttgaaacacaaacatgttggcacataataacaaatgggaagggtaataggaagaggatcattgatggccctcgtgaagtggtagtagagagaagacaacgcagaatattgaagaatcgagaatcgacggcacgttatatagtgtttaaaggttggtcagaaagacaattatgacatataggattatgcttctcaacaaagaaaagagtgtacataagaaacaattatgctaaaattatgcaacaatggaagaatcattcaagaatttggaaaggaatattaattgtttttcaaaaaaaataattaagaagactctaacatgcataaaattcacttcattcaccaggttctagtgatatatagggttgtttgcaacatgctattcaattactcccttaataagcatggtttcaattaatagagaaactttgagaaagaaaataccttagcgtcgtggagcaaagcttggagctaggtcatgaaataagggctttcaacaagtgagggctgtcaagtttcaatcttttgcgatgacgaggaccagtagtccaacatggaaacacggccacacgacagcgatgacaaggatcaccacgatgcgagtagctcaccacccaaaccaaacttgaacaagacagagtgagtgagtagacagagttgcgagagtcatttttggggggttttcgtacgacgccgttttagatttttgtaaacctgcagatttggagcagactcgcgattctaaccaactcgtccgagactgtgctaaatcggatgagtttactccattttctattctactttcaatttaactcgtcgaaccttagtagaattgtaaaatcatatggttttacaatttaaatcgcgagtttaacaaccatgccacaagcaaccttgttgcttaaagtttagaataaatattatatttttaaacacaagggcttaacttttttggggtttgtaatatgtctgtgagtaataattaagaaaaaaaatagaaaaaaaaatatatttaaatatatttattacataaaacatacacaagtcttaatgttttgactttttggtaattaaagtatttaataagggtaacacacatgaaaaaatgatattttcttaatataataatcaaggaagatattatgtgcatagggttgccaattatttttttctgttaattagttagtatatactcttgattattggaaaaaattcatgttatacctattaaatgtgagtccactctgagtcatattctcaatttaatcgatttcatgtaaagagtgtaccaaaaagaatttgttattgtagcatttattctttgtttcttctacatagaaaggaaaatatagatttgtatagtaaaaaaaattggaaaagacattctacttgttgcttcgtctaactagtcttcagctgcgaatattatgcatcatgttcaaattatttttcacgcaaatgcttttaaacataaattaatactcaaacaattttttaaatgaaattaaattaaataaactagctctcgttccttaacaaattactttttttagaggaacaaattacttaagttctcctaaaaaagcaaattacttaaattacatcattctctctttgaatttcaaaatttaactttacaaactctaatttaaagatgtaattatctcttttgaccttacacttaaatgatttgagtgaatattgaagttttttaggggaggtagagtgtcaaatcagaaaaccaaaagtcaaaatcgcctccataactcatacagtaacatttgaatgatactactagctccgtatattttacgacattattttctctctccatactaattatcttatctactctatcttatctttccatccctcttttgctgaagaaatatttccctcatacatgcatcatactacgatgacggacgcgttttgctacaaatttccatttaccgttttttcctacaaatttccattttcggccaaacagattcattattacaaaggaatcatatgtgaactgaaggaaccaagccaaaatccgcgagggagaaacactcatatatataacaataccctcacttctttctaattagaatatgtctctaatataatagttccttcttaactcactttcggtagacatcatatatatttaacaattttaacaactttttactttattaattaaatttattacttcacatatttatattttgtactagaaaagtaatattttttaatgttcagaaataagaactgttgttttaccatatctggcaaatcagttctcttcaataatgctcccaactaagaactgaatcttacctacaaggtttcaactattatactctttcaactattctagggagactaggttccaacacaaggcaaacgggggag

SEQ ID NO: 3360 - DNA, 2151 bp, Glycine max
  Intron number 1 from transcript Glyma16g12370.1 (locus Gly ma16g12370) derived from phytozome v7.0 (chr-ID Gm16; pos 13244959 to 13247109)
atcgcacattagctcaaatagggttgtccaatcaggtgcctgaatgataggggtatgatgtgccattattttctcctatttcttaaccctttttgcaccattttaagtattgattagtcttaatagtcaaattaattaggcagttttattatttgggcccattcagctaatttgatgtttttaatctaaattcaggaattaattaagcattgggcttgaatctagaattgggcttgggcttcaatccagaattgggcttggacttgaagagggcagactattttattctacaaaattagatcttatcttatcaagatattatttagatttgatcgcatgtagatattatttcatctagatcttatcttatcttatctagatttgatttgattttacttatgggcttggatttaaaacagatttgtaagttttgtggctgaaaaactatataacagcaccaaggttctagtttagctctctctctctctcctctctctcttctctttctcctttattttggtttttacaattgcagctttgacttttcattttagaaataaaattttgttctctatttgattaatggaaggctaagtccccagcgttgttttctcttgaggatcaagcacagttctctttgaggttctattattattgttaaattctgttcagttctttttcctcttcactaattactctaaatttgttgctattaattcatgcatgcttagtgcttgattaattgtctctatgcttaattacgttcatgcttaatgatcatttatgagtatttggtgtatgtgattcttaatcacataataaatgttttatgttgaatttcgcttagtaatttaatttagggttggattaagtggttgaactgaataaggataaactctcgtaacctaggataagagacttgcttgtgaatcaaggggaagcaacatattttaattctgatattttctaatttaagtttactcgctgtttaatttacaaaagcaaacaacccccccccccccaatttgttactatttcctactatatgttatgaacatttggtttatcattgctcattgggaaacgacctaggatcacttcctagttattacattttaatatttatttgattcgggtacggcctcgatcaaattttgcgccgttgctggggagtagtgtccaaaggttcataatagctagtgtcgtgttagtgtttaattctttcgtgttttatgtttaattgttagtgttgtgttagtgtgtgtgtgttagtgttgtttagtgtcttggtattttgtttagtgtgtgttttgttttagtttttctgttaagcgcttcccctgtttcaattttgggtgttttgctatgaatagtgttttgcgacggatttagcgaccacttttgcttgcggcataacagagtagtagtggaaatcatgtagtgacggattttagcgaccacccatgttaaattatttgggattttttgttttagtagcaagagttgttagttttggctgaatttttttgtagtaacttcttttaatccatattttgtgagaaaaataactagagcctttagtttggtcagatttgaaagttccaaaaaaatagcaaatttgatttttgtcaaaacttcaaacggccataacttttgctccggttatcaaaatcgcaattattttatatgtatttggggtagaaaaaaatttcctacgccatagcaacctgccataggctggctgaagtctccatcgtccaaaaaaagtgattctgtcaaaatgtttttattttccaagttttattctcttatttttcttaacttaccaattttagattctatatttagactttgaatttttgtttgaaattttatgtgctatcttctcatcattttataaggttgctcacaaaatttctagtcatttggacaacatttaatggtagttgtagttcaaacctatactattacttgcataagaaggcaactaattgtgcatgctgaatttagtgtatgactagacgaaatccatccgacttacaatcctttgatcctgagatagataggacatttcatagattatttagacatcatttagtaccttttgagcattataattttgaacattctgattttgaatattctgagaac

SEQ ID NO: 3361 - DNA, 2526 bp, Glycine max
  Intron number 1 from transcript Glyma10g01380.1 (locus Gly ma10g01380) derived from phytozome v7.0 (chr-ID Gm10; pos 1006988 to 1009513 reverse strand)
accctactaagttcaggtactcactcattaattgtactactcttctactatttcaattcctttcttctctcaacaacttcaacacataacggattccatatttgcgttacatctttcatatcataattaataatacgtgatgaaaatagtaacacagtttaagcggcatgcgtgaaatgttgtaaataaatctctaagtaactaagttcgattcatacggataagaaaataacaccgtttttataagctttactattggaatatatataaattatataataattactgtatattggcatgtgtgtgagagagataggtagagagccggggggggggggggtccgtgaggatgtagggtagggaccaagcccttatctgtttgtgtttcttaagagccaagctggtaggtgcttgagtctctaactctgacgaaatggatataactttcattttcctttttttggtgatatatttccatattgagataacatttcacagggttggaatgaattaaaacgaacacaatttattctgggtggttgatataaacagtagaatttattatgacgagattttcccaaaatgaatgatgaaaaaaaaagtttatttaggaaacttgataatatcattggggctagcttgtgtccttgacagggacatcttgcctttatattgtaaattttatgtgcatgctacagaattttacaattccttcaatatttaacaagctcatcatttttattctaaaaaaaaaaaaactcaatttgcctcaccttaccattttcgaatcagtgcatttatgcagtttattgtggttgattcggctacttggtgtttggtaaagatttctacacattttttcgttagttggagaccactccgatcgattaggggagggatccatctaggcttctattcatattgatcatcatcttggtttcttttagttaattatacatataatttaataggctctgtctaccactttccgtgtataaccaataaagtaaaataacaacaattatgctagctttttttattaactttctatccattaaatatgaatatttgggttgaaaaggtataagcaacacgtgcacaaaaaatggctgtgccgaacaacccttgtaaattatttttcttgggagtacaaaccctgtttgatttgtagttgaattctctggttttaaactttaaattaataaattgtacacatttcaaaataccgtgataccagtatataagaattatcgtgtatttttatgtaactttttttataatggttcatcaagcagcatctttaacattaaaattaataatgattttttacacaaaaagtatattcatatacccgtataatatattcatctgtttctcttttgagcatatcacattttttaaaggttttttctgcttctctttttttttttttccacctccttaatttatctataaatgggcgtctatgtgtcatgtttcttctttaaaatgcatggcacattcggccgcagataaaactgttttggttttatggagcacctgtctacgagtggtgggcccaacacatagaaccatagtaataataacacgatattgggtttacggcaagtcattatgtggcagtgatttcacaaaaattgattttatttaaaattaattgtgacataaatttttttatgtttaaatgtttttatctttaaagtaactctgttgtaaaattttgtatttttatatttaatataaaaattacttaaaaaaattcaactaaattcctcatagtatagaactaatatcaacatttatctaagattataacctgattttgtactatccaaaatcattccaagcacacactagttacttgtatttgaaaatgggatctacttggtggcattttataggtagcaagtaccttttttttttacatagtatataggtagcaagtacttaaacttatcttctgtaagaaaatcacgcgctaactttggcttcaaatttcttatcttttagctaggcagaattgtgagtgacccgaaaaggctacaaatacaacatgtggttatagccttcggttagcacagcaaaaccatgttaacaacttctgttatttgtgctatgactagtattggtctttcttcatattgtggagccacgttgcctacttttcctagcatgtacgtactaagccagtgatcatgtatcttcatttcagtataagaaaatggaccaaatattgggctaacacagtcacatagaaaccaacaactcacaatcaaatcaagaatacagaaagaagaatactttttttcctacttaaaaacgaaaaataatgttgtgcatcatatgaccctccatgtgtctttgcctgctagtatttggtaacataggaaaagacgtttgtttcagtgtattaaaggtatcttctttgtaacctgggtgcgaaaaattacacgatacaaattaatataccgtgagtgatgaccctatattaattttctggccttcgattttgcagttgtgccgtga

SEQ ID NO: 3362 - DNA, 2581 bp, Glycine max
  Intron number 8 from transcript Glyma20g39280.1 (locus Gly ma20g39280) derived from phytozome v7.0 (chr-ID Gm20; pos 46648612 to 46651192)
ccatcagcaggaaagaagtatggcatcctatttatgatattctccgacttaattttcccatgttattgaaatggggtgactagttataccctttggagtttgacttatatgctgccgaaacgttaagtttcaggcacataaattgtttagtaggtgtagtgagcttaaacttgttccttttttttgtctatattaagtttttacttttcataagaatatttttataaaatacatagatgccagtaaatgctccaaagcatttgcataaaatggttctgatatgtctttttggttgcaacacatctatgttggagttggatagttaaaataacttgtgctgaatatataaaataaaaaggaatcctttaattttagacactctaagagtagaataaaaggccctggatggaaccaatgcaacagcagggttggtacagttcctaggcattgtggttttgttttcagtcagtattaaaaacttgcagatattcttcttaatttaaggttggggctttgggttttgggctttagttttaggggggttcatgtgtgagagggtcctggcatatattgtgattcaatattgtaatgatcagtttgtgacttgtatatcaaatataagtcagaagagatatatggtgatatgataggagttggtaataggagttgagagcagatttatgggaattctgcactggccaaggcattgaactcaggccgaggggagcctaaccaatttgcaacccactaccatgaccctgtccctacatagagcacattcctactgtaaaacatgggtcaaactccatcacaacaactgtgaccagtagtgtagagagtagtaaattgtgtggtccaaactggtgttcggaacgacacttgagtcatgtatatcggaaggaaaagaagcagatgacaaggagaatgcagagggtgaaggagcagaaaaacagaaggaggatataaaaccggagttagtggtgatgcaatatgacctcttgaataggctttactcagccaaatactctgaaattgcgagtagtggcaaattggatcgtagtagtgatggttgacagctgagccagtcatagcttcatccgaattatttagcagtggcactgaagttaccagtcgaggagactcctgagtttacagttagattgggggttggacattagaagtcaagtgggctttgtaggcaactgggtttgtaactggatgggattacagtgtcaaagattttttcacctatttcctttggtcggtgtggacatcatattgggaattttgtggctggagaagttgggatatatgaaggtaaattggaaggctctcataagtcacaatgacctttgatcagcatggtaggcatgtgcggcttatatgggatccttgttaagacaggaacaaggtatctcccaatgccttactaagggaacaacaacaagaaagttttatcctaccagttgaggtcggctacatggatctccctacgacattcggcacggttaaaaaccaaaggtataaatagaaaaatttgacatctaatatcaattaattctaacccataatttgcttgtgctatatcccaaattttatggtgtgcattcactatctgagaagttagatcagcctatttccccactattatgacagaaatcagttgcccatctcacaaaagaatgaaatttaaaagctggtagacgagatgctgcaagcagggataataaggcctaccagacacagacgtgcagcagagaatatcccatcagaaaagtcactcactagaaaataaaggggcacaactgctggagaacactgttcttgggttttaagtggacatagatacgtttttacaaattggcttaaaggcccaaactacccatatacattagcaaataagatgatagaatctcatgttaggtagtttagacatgtgtggaaaagaactatagaagtcctagtaaggagagtagatcctatagaggataatgaaataattagacttagatgtagaaaaaactatcagccaaaccattaagaaagattcaggttcaaatgatttgttgtttattcaatgggcatgatttatgacaagacatttatgacactatttgatccacataaccaatcttacctagtagggaaaggcttttgttgtctttttctttttcttaaaacattaggggactaatttattgggatacttctatacaattggcatgcattggtctcttttctatattttacttagttttcccaatcaaagaggtgaaattcattaatgtgaaccacatattacagtggaagcagactctgtttctcaatcattttaaggatgaacatgtgttactgcttgaaatcattacttcattgaataaaacagctcatatttttgtaccattgtttatttctattgcatggggattatgatgttgagcaactatgattaagaggtctaaaccagggcaagtagttaatattggattaaaattataagtagtgttttttttaacacaattcattttaagtcagtttttttttttttttaattttgtatttcaatttcagattggaggat

SEQ ID NO: 3363 - DNA, 3345 bp, Glycine max
  Intron number 6 from transcript Glyma0024s00260.1 (locus G lyma0024s00260) derived from phytozome v7.0 (chr-ID scaffo ld_24; pos 208037 to 211381)
gatcgactaatacggccattggtaatcacttttcgaaactgtcatctttcatggttatctgcatatatgagaccaaagtaaaaattcatgcaacggatgaaaattagatttttggtcaaatctgatgtaaagtgtccaaacgtatttttgaacttgcatgataatatgtgtagacattttgcagaattgtggaacctaaaagtttggtccttctccttgtgtcatttgattaaataaagtaatgttatgaaaggttgaagaagaaattggtgcaacagtaatacagtatagatttatttatttattactttggggcagaagacatgagtctaaatgttagtccaagacaacgatgaaaggtgaggagtgctggcaaaggcattccatcgcctaagttagtgtgaactttatagggctcagttgtcggtgagtcacaaccaaggttaacagtgttttactgtaatgttgtgtgtcaaggatgaccacactaatcctttatttataatgagcaaataggatctacattaattacatagaatcaatctaatctgaatgataatgaatatacccctaattgttctctgatcataaatacaatatcaagatgtaatctcacactccccctcaagctcgagcatatgaattgaacttgttacaaatgtggtcaactcgatagaaactaaaggcggttcgagtcgcgtggttgcaccggatattcatggtgactagtgtgacgcttgccggagatgtatcacgtatcgtgtgtatgaacttcatgcgccagaaaaggaccctgtgcggggtcgtgtttgacggtgttttgagttgactgcgcacgtggatggtgtggcggtcttcagcgatgggcgtcagtggtcgaagatgagcttcgacgaaaaggcatcgggaagtctggcaaccatgggcagaacaggcatgaggtattgttcaccgcaaagagtgttagccaagtggcctcagatatcttaagaaggggggggggggagggttgaattaagatattccaaactacttccccaagtaaaaacctatttcactttttatttaagttataaatttccttaacaatgaatataaagcaataataaataaaggagtttaagggaagagaaagtgcaaactcagatttatactggttcggccacactcttgtgcctacgtccagtccccaagcaacccgcttgagagttccactatcttgtaaattccttttacaagttctaaacacacaaggacaatccttcctttgtgtttagaattcttttacaacaagagaccctcggtctcttaatcccttagagaattagaaggagaagaagaatgaatctctcttgaaagagatagattttacagattgagcactcaaataattccttaatgaattgcaattgaattggccaaggaattcttaagaggataaaatgattttactcttttagagaataaacacttgttgttctgaaaaactctgagcaaattcgtgttataaatcacatatatatagaccattggtggtcatgaaaaagccttttgagaagttgtgactcttaattatttttctgaaagtcttgtctagtaatcgattataggatttgtgtaatcgattacagcttttaaaatttgaatttaaaacgtttattaactgctggtaatcgattaccaaaattgtgttatcgattacacagtctaaaatttgaattcaaatttttagtagctgttgtaaagcatatttggccactgataatcgattacatcctctggtaatcgattaccaaagagtaaatcctttgaaaaacactttttaatttaaattacttggccaaaccttttgctaattcaattaggaattcccttcctaatatactagtgatcatcttgatgttgtgacttgtattcttgaagtactgtcttgaagttaaacttgaaaagcccatttgcatcaattgcatcatatcatcatgatcatcatcaaaacaccaaaggcatttgcatctacaaagaggggtggcataaaaaggaaaaacaaagggcagaaaaaagaagtaaagggtcatccgtaagaaaaatgctctaattgacgcgaaattgcaagggtggggtcatgtgggagggcgaccacaacactgcaaaacgcagtcagaaaaggcggctggtgctgtttgatgcagcaatgaaagagttcgtgaagcttctcctatggaagcgactgccagatctgcgtagatcagccccatgacgagtccaatggtggtggtgttggccggaaagctcgctggatatgcagcggtggcgattagaagaagtcaccggaaaactgaaaacaagttgctggaaagaggcacaaggagaaagggtccaccaggacaatggggtgccacaaaagtgtcatcgactgggaaaggacaaagggttgttggaaagcggaagcaggtcgccagaataagtgcaacaaccataaagatccactggaatgtggaaacagagtgaaagaagtatgctggaaaaggtgtggcgaatataaaggtccggtccttggtggagaatgatttttgttattcctctgttaagattagaataacttgtgctctgataccatataacagtgttttactacaatgttgtgtgtcaaggatgaccacactaatcctttatttataatgaacaaatcggatctacgttaattacgtagaatcaatataatctgagtgataatgaatatacccctaattgttctctgatcataaatacaatatcaagatgtaatctaacagtaacctagcatggtcatgaggtaatttcagttacataggttcctctaacagaagagtattctggaacctctggtgtgtctggcccaatgttggtgctggtctttttgggccttggtcccccaacgcatggtgaattggatccttgttacttggtctagaacaggatattgtagaattttattatgagtttaatatttatgcattgtatgtgtaaatttcttaaatcacaaaaggtataactcttaaggcaattaatgtaaatatcaataaacttatcatacatgacaatttatcattggatgacactgtaaaagatctttactatgttagtgcatgtgttatttactcatttattattgcataatattgatgacatatagtgcctatttgtttacctgttcattcacttacgtatagagatcaaatggactcattatttctcgcttaagttcttatgttgcaattcaactttcattttcttttattcctaagaactcagcgctacttattatgtgcagggatttattatcattagggacgaggaagatattac

SEQ ID NO: 3364 - DNA, 1205 bp, Glycine max
  Intron number 4 from transcript Glyma06g08200.1 (locus Gly ma06g08200) derived from phytozome v7.0 (chr-ID Gm06; pos 6026527 to 6027731)
ctcttgctggctgcaagctcataagaaaagaaaaggtttgattcagtattcaactatatgttctttgttgatgatcattaatgctgttactattattattactttgttcataaatggcctcttttaacaggccttgtcttaaaactaaaacaattctgttattttttcttactgatgagtattttttttttaaaatctggtttgcattagaatttagattttagagctactttactctgaatttctcagggaactcttttaggagtctttgatcaatctacaaaagtgatatgttttcaaggagttctgagttgatatgcaccatattctgagaaggtgcatatcagtacaaaatttgtttgaatgatatggcggcctttactaacagagaattagagttttcatcgtctcccttctttagaatcctcttgctgtgaggaatggggtggtaataccatcttggtgacgccttaaattttgacatcttgcctatcataatttcttaccaatcttggaagagtaaatgacttctctaacttgtaattgtttatggtgaaagctgagagcttttgtgtgagagagtaaatgcatcagctaagatagattgctatagatcctgcctgtgtgtttttttgtcaatagatgccagtcagttctgctgtggggggtgcacagtgaaatttctctgattgtggcttttatgtagtttttggtccaacttattttgggttactcttctctttaaaaggagaagctaggccaaacagttttttttttctaaaggagtttttcaaaagtatcttatttaatagagaaaacacacaatttttttatttattttaaaaacactagttttaggagcttttgtcttctatttctacttttccttctttatttcaaatcccaagatccaataacatactaccgagcaaatttgaactaaagtaatttaagcttaaaagatagaattaccaaacaatttaacttcaactttaaatttaaagctcatatttataactttaattctaaagtaacttttgagtaaaaaattaaatgctaccttagtttagcatctgcatactatattcttttcccagtccttattatgtctagttgcctactgtctgtgctatctactataaacttgatttctgcttatttttttgccccttttcttactgcaaaattactgttacagtcctcgt

SEQ ID NO: 3365 - DNA, 2042 bp, Glycine max
  Intron number 7 from transcript Glyma17g24130.1 (locus Gly ma17g24130) derived from phytozome v7.0 (chr-ID Gm17; pos 24389050 to 24391091 reverse strand)
ataaggtatgattaacttttaactagtcagatttgacacttgattcatcatttttttcaccctttgtcttctttttgcactattggattttaaatgtgtttggtttcctaaaatatactggagctaattaatgagtaacctagttttgcgtgattgtttagcatactaggaatctatagaatctggtaatccttggtttgattgtttgccagttccctttgtatttgggtggtgtttacttgcaactgacctgatagtataacaatgataaccttatcctattaggtgaggtcgacttcatggatacaatgccattaggcgcagttaaaagccggattttcagggttatcatttaccattaggattgcttttatgaattcctgcaatgttcatcttgttctttctctattccttttcatagggttaaaaaaccatgctatctacccatatgggtgcctttacacatgtgcaaatcactttaacccattttctgtcatctttaccttgataggtatcttactaatatctctttgtacacaatcatttcttatcctatcctttgttgtgtattacacatttatatcaacatactcatttttgctactcccttatttcttgttttgttaaagcgtaacaatcactactagagtatagctagctgtatagtaatacaaaaaaacttttctttgagcttggtaggtactttatagtctcaactagctcctccaaatgtcctccattttaactgcccagcttgtatcttctctgtgacattttcattattttgtagatgttgatcctagatatttaaaattggaaactttttgtatgacatcttttctaatttttacctccttagtcattttcttgtttcttgctaaaattgcaatgcatattctcttattcctactcaagcaaaatcttatgcttcaagtgtctgtctctaaagttcaagtttagagtaaaccccttccttgattccacaataaaagtatttttatgggtaatcttttgtatgtccttggtaagcacaccgaagactattttaaacaaggactcaaggctgagcctaacgtgaacttatttctacaagaaaatctttagtctcacctctaggagttcttacatcgactgttaccccaccattcatttctagtatatagtccagatacaagtcactcaaacacggaattgtaacatttgtatttgtatgcatagttaatagcatgctatagcgtgcagcaatagcattttagctttgtgtcatgattcatgtcatggcctggccacagtggaagtggagttttgtcatttttttgtagttgtgtttgtatttgtatgcataattaatagcatgctatagcgtgcagcaatagcattgtagctctgtgtcatgactgccatttttttttgaagtggtgatagtgacctgaattgcaaaatgaaaacacagaggcactatagtttacagatcattgaaattgaatccttgctttgcttcctttttatttgattgccccttaagtttttgatgttaagttttccctgttaaattaaaaatatgcttcaacatgcatcatcattcttcagaaaatgacacactaggttgctactctgggccttcacagctacaataattcttgatcattgtcaagagtattattagaatcagaaggcttttcactatttactttgagtctcacccgttgtttaccagcttgtaatttatgttgttcagttcttctctcttgttttccatccgatctttgttcttctctcctcaatctttatctctttattcttctccctttcgtctgcagaatactaccagcagtataaatgtattctaaggaaattaaaattttcacaagcattgctgatttattctattacgacaaaccttgggtttatttcccctcccaaaaaaagaaattagtttacttgtttatcttggttttagcttgatgattactggcacactgtcatgggcaatctaattagtaattattacaatctaattaactgtttttgtgatgacagat

SEQ ID NO: 3366 - DNA, 909 bp, Glycine max
  Intron number 3 from transcript Glyma02g42760.1 (locus Gly ma02g42760) derived from phytozome v7.0 (chr-ID Gm02; pos 47742364 to 47743272 reverse strand)
acagttcctcgtacgaaggtattaatttactgttgtgttcctgagtttctgtggttttattaggaaactcaaacccctctgactctagggatattgaattagttattcaacaagaacttgatcttttatgaaactgtccttgttaaaaatattgcaacgagcattttctgaggattgtttatttattgtttaagatgagtattcctgcttttttagtgagtatgtcaatctctgtggcatgactccacatgagtaatcacaagtccatcatctatacatcaaacaattttatgccaacctcccttgatgtttaatgaaactacataaacaattttagaatgtctatgaaacttgcatctaaaatataatgggtatttcacacttttgtaggattttaatttgtgtgaagggtgaatcttgatgcaatgttaagattgccacccggtgatctgcccacagattatatagcctcagatacaacctatccacccattgggatatagtgggaccctttttcactgaaccaccatttttgtgtcatttggaatagttttatagtggttacaatggaagttgatcaattttcaatctctgatagttattgtgactcccaactatttagatttcctttgtcattacacgttactcattgccctaataaaatctttgaaatagttgttgggtggaagtagaatatataattttctggtactttctagcttcatacacttctgttttctcctgcacatgacattttcttttggcagggggcttgcttacaggccatagattctgcatacttcttgtttctcagtttcatgttcaatcatgtcaaaataaatattttgctagtgtctgatgcatattttctgaattttcagaaacagtgtgctttgtcatctgaaaaag

SEQ ID NO: 3367 - DNA, 704 bp, Glycine max
  Intron number 5 from transcript Glyma01g02560.1 (locus Gly ma01g02560) derived from phytozome v7.0 (chr-ID Gm01; pos 2093570 to 2094273)
caaattaggattgttttcaaactcgacgaagccaggtaagtgaaaaaatgttaattacttttagaaaagttaaaagaaaaaaaaacactttcctttgattttgaaaaaaagttagtactttttcattgactcctgaatgaaaattttcataatttgatagaataaaaaatgaaaatatgaaatggcttaaagaaaagtttcctaaattattattccttccgtctcccaagataatcatggtcttaaatatcgaaaaacaagtaataaatagttaaaagacatgaaaggaatcagaaactttacaaaattaatcttacattattattataaaaaactcgtacccgcccagaggctcttcgctatgcgaaggtatgggggagggatgttgtacgcagccttatccttgcatatgcaaagagactatttccgaattcgaacccatgaccaacaagtcaccaaggcacaactttactgctacaccagggctcgccctctatcttacgttattattatgattaatttatttttagattttgtagtttaatgttaatatataaaaatataagtgaaaaaaaaataatataatattggaaatatatattcttttaaaatacaatttagtttgtggttatcattttaaaagtagaagaataacaaaaacctatgcttaactaataaacaaccaatgatccaggttccactac

SEQ ID NO: 3368 - DNA, 950 bp, Glycine max
  Intron number 3 from transcript Glyma08g43320.1 (locus Gly ma08g43320) derived from phytozome v7.0 (chr-ID Gm08; pos 43157224 to 43158173)
tcgatttggtagtaactgtcgcctatcacgtaagatgctgagcaaattgaacaaaatttaatagaggtgaaatcacatagacctctttgtaattgactttgtcactaaaccttagtgccacttgcacttttaacttttaagtgcaaatattcaatgagcatttggaccctagtgtcttggataacctgttgggtcaagtctttgttaagatttggggagtaaactctgagggtccaagtttaaattattagagtgttcacataacttcagcaatcagcatattaagggttttttttaataaattgtgacatttttgttatgatgcttttccattatgagatatcaattttgtataatattttaaaaatatgtaggtggctggtgtattttcacctagataaggctggtataatcattgcaagtttgcaaccttcatctaaatttcatttagatttattgtgtgttttatgtttggcatttttactttttttggataaaaaatagcaatccttttcttccttgatgtttatggcatgttgggtgaaattattcaaaggttcactcattgaatcatttccagatattttacaaagtttcttaaaacatactttcagacaataacattgcgggatcaggcaaagaaagtaaaaggaaaaaaatgacaaacttagtgctgttaatccaatcgattcatctcttaacatttgaagaattagaagccctgtaatttattgtttggatccaggacaccctttaaaacctgatttttaatggtagtttgtatggtttcagcctttgtatacccacaagcttattttccaatatatgtgatggctgatttacacaatctgcttcttggttttgttttgttttgtttttctttttctttctgttcatatattatgttttgtatatcatgacttatgttctgtttgcgtctacaggacttg

SEQ ID NO: 3369 - DNA, 2322 bp, Glycine max
  Intron number 1 from transcript Glyma20g36020.1 (locus Gly ma20g36020) derived from phytozome v7.0 (chr-ID Gm20; pos 44241628 to 44243949)
aaagaaggcaacttatattacgttatttctaacaggtctgaatcttatttcttttatttttgttgttttaattttaacgaatctatgctatgctatgttgtgcgtcatggtttcggatataattatcgtgttaaaatctatgatgattggcgcctgcgccccttggtcttttggactttttatgtagtcaattaatttgtgtctctatcatggagtgaatggatcatcgtgtgttgtgcttgtgcctagacatgtatatgattgtatgtttgctccgatgtatctattcttttggattcaccctccttaaaaaaatctgctagggttgctcttttgaaaatcttattagggagttgctatggggtttgtaagggtagcgttatgacacctgagagctgagatgagttgtcaaatatttgttgattattgctggtatcattagtagtcaatctcaaatagtggcacacagtggtagtcccagaaaaacgttatagcaggatggctgctattttgagccctaaatcctcattaatgatcaaggcggtatattgagcagagattgtaacagctgctggacattgttgtttcaagtctggagattggccagagattgtaacagatgcgggatgccgaagattggctagaaaagaggtgtgcagaagtcagaacagagctacggctcggaggtattcagatgcgtctaacccagtcgctcccatgacgcctgcaaaatggcatgatcttggccgtgaattgcgctgctctagttgtgatggccaggggtgatgcaacagagaagagagtggtgtgaccctgcaatgtgatgtgatggtgcaatagtgtctctatcacatggtattaactactctggcgggtattatcataaatgtttgaagtttgattgaatatgaccaacaagcaataaatgtttgacaaatcacaatggtgccaaatcctttgagaaaaaagaatgggtacaagagtaatcaccatcttattattattgttgtgtattggatcctttgtagaatagttaatagcaggttatagcgatgtgtcaattgtcatatggcctggctgtggcaaaaggggcattgtgttacaattgtggagcagaggcagcggcctgaattaaaggctaatagtggacaaattgcagccactatggtcaacaaatcttactcaatccttgttttgtcccctctttgtttgcaagttctcagatttttaagatggtatttgacatttatgcccctgcccccaccctcaaaatgaatcagggttcattccaaatccttcattcttcaaagaatggcatgttaggttgctactctgtatggcaggtgatgcatttcctggctaagttcttgcttttccagcagccccaacatgttttctggctgccccgtaacctcggatgagtctgcttttttttccagactctgctcatagttcatacttgcaggtctgctccttgttttgctgcaacttcttccatgattccgtccttagtactgtctctttttgccattaattattaattccgacccctttggtggagtgatggcatcgtctcagtcacaaccagcccaacacagctcctcagcttcagccttatcttgttattgacttgttaattatgacttagtttgatgctgattgtgtatctgcattttaattattaatgatggtaaatatataatttttggcaattttttaatatttgagcatttatagttatcctgctgtctgggattgactactaccatccttcataaatcacatgatgtttttccttatacataatatgtttacggattgttatgttaaagtattaatgcatatctgtgcatttttgtattgcatcctgatcttgccataaatttgaacaacaaactttcaactgtggttttatgagctcatttatttgttttttttcttcttaattttttaattaagaatgtctaaaaaaaataaaagataattagttttattattttgaaaaaagaagctaaaaactataaaaaaacagttttattgcatgtttgattcaacttatttttgccagtttagagaacttttgaaaaataagtgattatatctccccaaaaaatctcaaccagacatgttcttagttcttttctcataagctagaatgagtagattctgaaaaaagtaatgaaaaaaaaactatatgatagtagtgctttttgccacaagcttatctaaatgcaccctatagtgtattacttttctcatgtatctatttttaatcatgtttttttgctaccccatgcaggtggttttcaaggtggcagagtt

SEQ ID NO: 3370 - DNA, 6384 bp, Glycine max
  Intron number 6 from transcript Glyma13g28390.3 (locus Gly ma13g28390) derived from phytozome v7.0 (chr-ID Gm13; pos 31423427 to 31429810)
caagtgaaacaagagtactgcatagtcaagaataagcttgaaacaatgttcagggtaattagataaaaaaaaaaaaagttgaataacattctattacattctggatttgaaatttatgtttcttttatggatactttgttgcagcttgagcaacagattgtggcagctggtggatcaatccctacggaactgagtttcattgggtgactgagagggtttgtagagatgcttgtattatgatcctctttgttaaagattatcctttatcttattaagtccatggtgaatgtatgggtttttataaaatagaagttttccatccaatgtacctttttcttcaccaaaaagctcttcataatttgtaatctcttgcatgctttaatgaaggatgatagcaccattaattgaactttcctcttttatctctcttccaaacaaggaagaaaattagtggtgacaacacaatacaatcctttcaacaccaaatagtctaaatgaacatctgaattatgaataccttagttggataaacacttatttggcactttctatttctctccatctttctcattttgttccatcatactataacctattacactatcaaattctttctttttcaaggtataaactagtatcattggatgtacacaaaactttactcttagcaaatatgtttggccatggggaatgatacatgattcttcattagacttccctgaggtgatatggggtggactagtgatggtgatgcatcaaatggcaatgtcctataaatggctttattttggctgaaagaatatagtggtataagcttgttggcatcccttggttgaaaaatataggggtataaactaatggagttgtaaagccactttattttggaataagaaactggtaaggacggcaaataattatttttaaattggtgtggaagataagagaatcttgggaagatatgattctttagaagtcaaatcatgatgtagtggcgttgtcccttaacggagtaaataaaaggaaatgaatgcccaacatggccatggcaatagcagcaaaacatgatcatctttgaatttgatgttgatattcttaggatgcctatccgcaagataagacatgccaaccccacaatgctgtcaactcaccaatggcacgctcacgcacatgcgcagaagatttatggtcgtttacgccattttattttgatttaaatattttttcttcttgtaatttagttttttttaatccttataaaatatatttattttaatttttattcataaagtattttagacaacattttgaataggaaaaaaaaaatattgaacagtttaaaaaatattatttaaaatattttaaagacaaaaaataaaataaaaatattttataaagattaaaatgatttttttgatagggacagaaaactaaaaaaatattaaattatagagataaaaatatatttaagtcttatatttttatatgagaaagtttatgagttaagtaggaagatttttttaagttaaaactaaccttaagattcaataaatatttataaaaatacttataaattatttactaattaaatatttatatataaaaaaatgaaactcaaattcttgtgaaacgtgctttcttttccactgaattaatttgttaaggtcgttttcttttatacagtgaaacgtgatttttttctttttcttttttgggtagagagccgtaactgcttattgatgatagagtctttaaactttgaatattatatttagaagtgtatgctcgttttttcacgtttgagatataaaatttgtaagatttataatgtattgtagcacattgtttcatccaaggttagtaaaattttcatgttggaatataaatggtaattacaaaatgagagccaaaatcagtataggttaatctgttgtattttgctcttaagtatttattataccctaagttacttttatttgttcttttcctatattaacttgaaagtctgcattaaagcttgaagaatatcaaccacacaacaaaaaaactatagcgtacataaaatcagaaaaaagatttgctacttttaacagggaaccatgaacaagtgctctctagcttttataataaagaatgtggatgactccatttccttatttgatcttcaaagcttcctaccttagccgattggttccagtcaccgagcctctttgaatacttttcatgataagccttggcattcacatggcttaaaattctcaccaatttcccatgttcctcatccaccaccatttctccatcgatggactcgtctccttcggccaacactttaatgcccttgatctcaaatttttcttttagagatgaagggccgtcagctaggacaatggcacctagaatttcccctaagaatgtgtcctacaacattataaacacaagccgtaagtaacaaaaacaatgtagaaaaccaaaatgttagtaacgtagtatcatatgatgtataaaaattaaattcaatctatggagtaaatagtgtatatattggtaatgtaaattttttatactgtttttcagttacaaattgacatgtgtgataagtgtgttcatatttataatttacaataactatattaagagtcataattactaccatttgtgtttatcatgttgcatttataatttacaagttgtatttatcatatgtattgtggtacttctggtacctgtttctaatatattttttttgccgatttaaaaaaatgatttgtttgatagtatttttttttaccctgcgttgcatagaaattaatcacaaattaaaccgttgagtaaatatatacacagtgaaaagaatttttaaactatcattcaactacaaattgttaagtatgaaaatattttatttttttataattattttaaaagttatatctaccataatttctaattagttgtctgtataactttttttttacattcaccatacataaaaataaaactccaaacctctatgcttttggtgatattttgttcaaataattctagagtcggtccaattcccttttgtttcaggctcaaaaactaaagttatagcattgaagttataccatatggtgatatctgtggtggatttgcttcagacgttgtagccttaatagcacacgcttggaaaacacagtttcaggtgtttgttctatcctacgcaaccagcataacatatgtgaaaatgaacttgctttctgttggacactgagtggaatgagtgtgatgttaacttctgattgaaacactgtcttggctgctaaaggatccaggaacatattaaattctgcatattggttggaaggaacagaaaatatatttcctttgtcacagacattcctgctgatgtgtccccccattacataaacctcctgaaacattttggaactattgtgtcatgtcattactgcaaattataatcatcttagctacaaatcttccctgacatggttaaaacattcaagttcaggttttacttttgtctaatatctaactttcatcaaattgacatggaacaaatttactttttagggactattcttacatcaacttttgaaattaaaactttagtaataaatttcattcaaaggttagaaattaaaacttcccctgttcaaaccccaatatcacattgtataaaataaaatcctccaaccttttatcaaattttcactatattttctacttctaaaattttaaaactattccacatctcaaatccatcacaagttcaaaaaagttggataaaaaaatgagaatttggtagttttaaaaagaagaaaaatgataaagaaatcatatttttttaattttatcaatataaaggtttaattaactaaaatatattaagagactaaaatcacacaatttaaattagaaggtctgaattactattattctaaaatgttgtacaaaagttgtataatataacttacctcaattcttgagcttatgtttttcattgatacaacctttgccaaagtagttaagggtccattggttaatactgtaattttagattctggttccagtgtttgcattatagactcccaaatttccatagccagtggttgtctgagttcaaggtgatcagtattctgagaagtctcaaacttcatggaattttcaagtgtatacctaatcagtcacaacacaccaaattgttagtgtatatcacgggtaacaatttttattttcactcttattatacatgtgcttgtattttaacaaattttaagctcttaacatttccatcaaagcaaacctactccaagatggtaaattttagtggtttcttccaatatcaaattctcatattattatttaggtgaaaaaaccttttttttttaattctttcttcagtatagtttttaattttacacaaattccatcattttagtggcaatagtagcttcatttctccacataaccatcatggttccaataattccttatgcatcataatgttgatgagcacttttaaggcagaaaagtaacttgaaaagaaccttctgggactacgtggcaaatcgcgagcaagtccataaagagtatcagagtccaaaaacccaccatttccatggggaatggctttaacatacttgcagtttccagcggttgggaatattggatctgattgattcattggaaaaaaatcacctagaccaactgggatatcgtcacgacccatcatgtgcaataagtcatagataacatctattgttgcggcatttgcccacccagttgggcttacgatgattgcctaaaccaaaagtcactatatgagtccatgtctctatatatataaaaaaagaataagtataattcaactcaataaatcttggattttaagtgtcacataacaaagaaacataagtgcacaaattacaactaaagtagttatgccttgaatttagatttgacaaccttccctctctaaaatttgtgttataaaaataaaaatatcctgattaagataaaagatcattaagtgttttttatttgggcacatttttgtgtgtcaatctttaagttaatacggaatacccaaataaataaaaaacaaaacttagtataccttaagatttatcacttcaacatcaactttaaggagataaaatagagcaagaaaatctcctacgctcatgtccatgtcaaacacaactggtttacccagtgttttgttttgaaaatctggcatgtaagtaacttcttcgtagtaaggaaattgtgtagtgaagttgaacctcccggcatgttgtggttgctttagcacctgtgaaccaccacaattaaagaaaaaaatccagttactcatatcactttatatggtttggctactctaaactggagtgacagatgcactattaatttagaacattaatgattgaaaattgtgatattatcaaatatagatacttcaaaatgtaatttaattacgatctcaaccattgattttctaattaatgattattattgcactttatcctctagggtgcgtatgagccaaatttattttacagacccaataacagttagagcacaaattatttagtgatgtgattcctttaattattgttttttttttttacctaaatattgtgtaaagcaaaattggaaatgcttgagcaaaataaaagtgaactcacattcaagaagcttttgaaatattctttgtcaagcttactcctaacgtccctgttaggctttgctttagtggcgacaagtaccttcaccgagtcaggaccatccacctcagctgtataaccgtcctatgtagcacattttgtataaataagcataaaaattttgttatatgttcgattatttgtgcaatcttaaagttttaaggaaaaatagaaaagcaagtacctgacatctccctttcccattcttcacaaaacaaaatttatctctaagcccttgttgaacatgaccactatgcaccccgcctttctttagattgaatttaggaactttgaggccatcaaaaaatgggttggagccatcagatatcccataaggtttgttcgaagtaattacagttatgttcatgtactccatatgagcaaattcgttttcccttttattttttttattggagtttctcatgcttgagaccgctacaccagatgcgaaagagtcccacataaaataactctgataacaataagtctttatcaatataaattcctttttactccatcacacaaaagatatgttaacaagtgaaattataggcatgtatgatatatgcaaacgttattaagagattaccgtatagaattggttgtcaagcttatcacgagccattttagccattttcaaggacttgaaacaatattg

SEQ ID NO: 3371 - DNA, 4140 bp, Glycine max
  Intron number 15 from transcript Glyma12g22240.1 (locus Gl yma12g22240) derived from phytozome v7.0 (chr-ID Gm12; pos 24022600 to 24026739)
gtggtatgtaagaagttctctgttcgagtgatatcttgtagtttcaaataaagaaaagcagataatttgttacatagaaatcagatgtacaaaaattgtgtcaaaactgaactaaattctgtgttattgtgctcacatgtgtcacttctgtttttatatgtttaaggtccctctgctatatcattggtgaaatttgatttgaagagattgaatttatggctcactatgatgtaatatcacttcccattgctgatgattcacataatctcagtccactaaattagttttttaatgctcttttttaatctgtcttaaaccgaacctgttcatttcttatgactagtattaatatagaagaatatagttggtctgtcattttgtctcaaacagaaattttatcttaaataaatacacgtgatgaatctgatcatacaaccttagttaatgttgaatgtttttgtatttttatctacatttggtagcttagttggtaagcttgtttagaagggcagcagtgagttgtcactatcattgcccttctctctctctctcttgtattctaatatatatgtaaccttttgaatttaataaagctaagaggaaaaggagggtgtttttactccttcagtttcaagttggcattagagcgggtttgtccgccgtcgccgccggccgccgccatctccggtcagttttctccggcgagaccagggttaggattgcctcaaaaagcgcgacccacccctggaagtcgcgcctccaaaggagccgccacccgccgccattctcacgtgcgttctcgggcgcgtgaagcccatgcgccgccaccagtctgctcgtcggcctcttttgagtccgttctagccctcaatttcgagttttgttgcctggaacatatcaccccactcttctctcctttttacccctttagggtttcatcttgtgggtcaaaatggctgcctctggacctattttctccttctccgggactccgaccatcactactgctaagctgaactggaagaattatccctcgtggtctgcttccgtggaactttggtttctcggtcaaggacatcatgaccacttggagaaagcttccgattccgttccaaatgacaagagacctgaatgggagaagcttgactatcagctctgcgctatattatggcaatcagttgagccggatattttggaaattcttagatcctttaaaacgtgtcgttctttttggaagagaaggcccaggaaatttttgtcaatgatatccaaagcttgtttgacgcaaccatgaaggttatagccctcaagcaaactagtcatggcatgatcgctcatgtgggtaaggctcgggctgccgtggaagagttgagaaagttccttgtagctgattcattggaagaagtgaacaggaaacttgacaagttctacatggtccttattctgaggagcttacattcagactttgatcatgttcgtgatcaagtacttgctggggaccaagttccatctatggattcccttatcactagacttctccgcgtgcctcatttattgaaggatgagaatcctgccgatggtgtggagacgtcagccatggctgcgtctcgaggaagaggaggtagccgcaacaacagaggaggttgcagtggaaggggtggacgtcctcattgcacttattgcaagaggatgggtcacacccaagagaattgttactcgttgcatgggtttcccgacaaggtcgcacaggtctctagatcagagaaggcagagtagtttagattttctgatgaggagtatcaggagtatttgaagcttaaatccgagaaacccaacaaccaagctcaatcctcatttgaaccatgtttttcaacagcttgtatctctcaatccattgaaggttctagtccttggatactcaactcaggtgtctctgatcatatttctggtaataagtcctccttttcatccttttcttttccaaaaattcctcaccttgttactgtagccaatggttccaaggttgcgtctcaaggaagtggtcaagtttctttatctccttctctgaaattgaattctgcgttattcattcctcagtgtccctataatctaatttcattaagtcagttaactcgttcgttaaattgttcagtaacctttattgttaattcgtttgttattcaagaacatgggacggggcgactgattggagaaggacatgaatcacgaggactttactatttggaatccagtccacctggggcttgttttgcaatctcaaagcccaaacttttgcatgatcgtctaggtcacccaagtttaccaaaattgaagatgatggttcctagtctcaagaatcttcgagtcttagattgtgagtcttgtcaattaggaaaacatgtcaggtcgtcatttcctcaaactgtacaaagatgtaactcgactttctctaccattcattctgatatttggggaccaagtcgtgttacatcttttgattttcgatattttgtaaccttcattaatgaattctccaaatgtacttggatttatttaatgaaagacagatctgaacttttgcctatattcgtgtcattctacaatgagattgagaatcaatttggaaaaacaattaaaattttcaggagtgacaatgctaaagaatatttctctcatgacctttcttcttttttgtcttccaaaggtattctacatcagtccacatgtcctcacacaccacaacaaaatggcatagtagaaaggaagaatcgtcatcttcttgaaactgcacgttccctaatgctaaattcaaatgttcctacacatcattggggagatgcagtgcttactgcttgtttcctaatcaataggatgccctcttcttctcttgaaaaccaaatccctcactcaattgtctttcctcatgatcaactatttcatgtctctcctaaagtgtttggttgtacctgttttgtccatgatttgtctcttggtttagacaaactctctgctaggtcagtcaaatgtgtgttcttgggttattctcgtcttcaaaaaggttacaaatgttattctccaaccatgagacgatactacatgtctacagatgtaaccttctttgaagacacacccttcttctcaccctccgtagaccattctttgtctctccaggaagttcttcatattccttctccttgtcctctagatgactcagaccaaaatgtcagtgttgttccatcttcttcaccaaattcacctgaaattgtatcttcacctttgattacagatcaatcgaggacaacacaaattggatttccagtacctgaagcttctcctcgtgattctcgttcttcttcaaccagtcctccactcatggatccttccacttcttcttctcattttgactcacattggcccattgtcatcaggaaaggtactcgctctactcgtaatcctcatcctatttataatttcttaagttacctccgtttgtctccttcatacagttcctttgttttctcattgtcctcccttactattccttccactgtccgtgaggtacttgatcatcctggttggggacaggctatgattgatgagatgcaggctcttgaaaataatggtacttgggagcttgttcctcttcctcctggtaagaccactgtgggttgtagatgggtctacactgttaaagttgggcccaacagtaagcttgatcggcttaaggctcgcttggtggctaagggctacacacaggtatatggcattgattactgtgatactttctctcctgtagccaaactcaccactgttcgtttgtttcttgctatggctgctatccgtcattgacccctctatcagcttgatattaagaatgtcttcctccacggtgatcttgaggaggatatttatatggagcaacctcctgggaaaggagggtgtttttactccttcagtttcaagtgttaacttgcaaattttgctccttatcaatttttcaactcagttataaaaagttgtgccttttcattttaataacaattattttaactgaactaaatctgaaaattatcaaatcttgacattaattatttgtgatttacagttcctgaagaggaagattcaaacaaaatttcggcc

SEQ ID NO: 3372 - DNA, 2231 bp, Glycine max
  Intron number 1 from transcript Glyma14g11400.2 (locus Gly ma14g11400) derived from phytozome v7.0 (chr-ID Gm14; pos 9922230 to 9924460)
tcgcagagctgctttgattaaagccctcaccaccggttcttacttctacttcttctttctttcttcttacccttttttccattttaaattttcttttttcttttttccttaactttcaaaaaaataaaaaaaaatctttttttgacaccctaatgtttgattatttggttctttttttccctctcattcttgcatgtctaattgaattggtttctgtgtggttccttcagatgttgaagagttctaccagcagtgcgatcccggtaacgttttttttcgtagaaaagaaaaagattgtatttttattatttgttttggtctgttcatattttgttttttcccccctgtctggaacattgaattgaactgatttctgaagtggagagtggaaattgtgtttttgtttgtttcaatttgaagaggaatttgaatttagttgagtgttgaggccgtggggttttcgaacttaatttttcgaaagtgtactttcatggttttgtaaatggctactggaagtttacacacacacacacacacacatatacaataagcgaaactgtaaattttttttgttcaatatggtcattttgtggaattttgtttctttttattattagttgttttaatgtaccctgaacggaaacccagaaactcaattgcaatgttttttgtaagcggagtttatattttgtttgtttcaatatgaaaaggaatttgaatttagctgagtattgaggctgtgtgggattttcagacttaaattttgaaagtatggaaaaacgctgtatacctaatttgctcggtttctcaatttcgtaaatggctactacttgaagtttttgtttttcttatctaataaacggtactatattttgttttcaatgtggtcatttgtgaatatctatttttgattttttagttgttatagctttaatgtagcatggactgaagcagtcatatgctaccacaaatgggaagaaactctagtgcaaaattttcagttagtagctttgaattttggcttgcatcattatgtttaattgtacatgggcccgtaaactttgtttgaaatatggagaattaggtttttgttaaatgggttcactctgctgtttcttattaacttgccacccttcctttcatatgaattacatttggtgggtcacaataaaatgctaaattttatttgcattgtagattctttctggaccatttgtcctaatccttaaccctcctgggaagtatgaatatgacatgatgtggaatgagtatatgcacctcttttgtgtctaatcatttgtttaatgttaatggacttgagattcactttcagttaggtatgattattcaagggatgtgcagataaccattgggttggtctttatggaatgcgatcaagccatattatgcagatcatatagttacatatgggagttggaaatggtggtatttgaaacaaaatgatgagaaagggaagggaaggaagtttatgagtttgtttggatgtttaaaattgtccaaattgggggagtattaaaaggttaatacaaatttatggaagactttggatgtgtggattatgtgaggccatcttatgttcctcctctcgtgcaaaaaaaaaaaattcaaatccaaaatttttacccaaaatctggcatatgatatgcaagttttcatgtgcaaaatgtgagctaaaacataatatgcaagttttgttgattttatactctggtactttttagccctactgcataatagtgagaaaatctgaatagaaggggaatgtgtaggttacttgaaatttatagatacttttgatttcagaagatagatgggttaggtgagggatttattttgactggaataaggtcattaattaaatatgaagaatacctgtagggacattttaactcatgatactgggtttagtctttgaggtgacctattttctcggaaacaaatttcagacatctgtttaattttgtttttctgtgtatccaatatagtacctaatatgaatcttttctttttgggtattttatctactaagtgatggataaaagttgtttcaccatgctaccatattggcatagtccaattgctgattatagtattgctatagcatttaatgttttttgtattgttgaaatttttgttgagactttagatattttattcaacttatgtgagctttgtgaactgtgatgcagagaaggaaaatctttgccttt

SEQ ID NO: 3373 - DNA, 1747 bp, Glycine max
  Intron number 2 from transcript Glyma10g39920.1 (locus Gly ma10g39920) derived from phytozome v7.0 (chr-ID Gm10; pos 47488412 to 47490158)
tggagcgagaagaccaagacacaaacctatccaaagtaagtcaacatttgtccttttctcattcattaattagtccagctttttttcttacttttttcttttccaccgcttcttttttactttaaagttatttttaatttaaagttaagaattacactttttaaaattatttttatctttaatatttatctaaatcattgagattaactttttttattgataataataaatttataacttttttaaaaattatttttgtctttaatatttatcttttctaatgatttgttaatatattttttaatgaggagtatttttagcttaagaataataggtcaagttagttttttttttattttttaaggtttaatttaatattttaatttttaaaagtcatttaatttaaattttataaaaataaatacacatcactttaaatttggattttactaagaagaaacaactgcggcaatatttattcttttcacttaaaatctttttaaattaaaaattacttaataaaaataaatttgtgtaatctatgatgggtgtccgacactaaagtacttttaccaaagaattgagatacttgtttttaattatatttttttatttgtgagttttgcattaaaatgtacagtaaaacaattttaatcgcaaattaacatacactgaaataacaaaaatatatattgtaaaacgtaaaagtttgacatcagatttgaattgaaatgtgaagaataagcaagcgaaaagcttcggataaactactaaaatgagcgaaaagcttctatatttggtgtatcataaatgagctctttttttattttaatattttgtataaaaaaagtgtttgattcaacttttcttaaaagaagaaaaaaactgcattgaatactagtctatatatatgtgtgttaaaatatatctttcatttatataaaatattcgaagtacgcttttcatccatacacaaaatttgtatatttttctgtcctataatatcaaaatctgtaattttttttgtttggagtgagacttagtcttaaccaaacctatgtcacagtgagttgtataacaacttttttttataaaaaaaattactctaattttaacacttatttttacttaaaagtaaattatactcaaagtttcatcaaatttctcttgatatctctgatttctctactcctaccgtaactctttttgattgttttttttaatattgttttttttaatattgacatgtttcaattgtttgaaaaacattttattgtatactaaataaaagtatatattattcttaaagtttcttctacttattttacaagaaaaaaaaaaaatatatatatatatatatatatatatatatattcttataaaaaaataatataatttatttcatatttaagtatcaatcataatttaaatcttatattatttaaattttgtattatctaatgagacacaaatgattaattacttattataatcattaaatcttaaaaaaaatgaatgatgtaaataaaaaataattctaaaagaattatatttagaataagtaatctcctcccatatatatatatatggactcaacatagaatcataataaaatgtttctatttttaatttttgaaatggctaaaaattcttttcataaaaattcttttcatatattataccaggttaggttaatatgccgtatgagattaacacatttgtgaaactcatgccataggtgaaggtg

SEQ ID NO: 3374 - DNA, 4813 bp, Glycine max
  Intron number 6 from transcript Glyma01g29380.1 (locus Gly ma01g29380) derived from phytozome v7.0 (chr-ID Gm01; pos 39509202 to 39514014)
agattggagaaggagggtttggtcttgtttacaaggtatatcctcttaaatcaaccactttttcttgaacatatttgttactcatttatattggagttatttagaataaaaaggtttagtatgtatatgggcttgatccaattccttgtatatgctgaaccaagtattataaatatgagggtagctacacattgtagaatatgcctctctctatctttctctctctcccttatctctttctacatagtatcatacaactttcaaaatgacgtcgttttggagggacaacaccgggacagcacgagaaaggacagcagagaagccaggtccgtattttgggtaaaaaaaaagtgtggttcattgctgcgtaaggatgtctaacagcgacgaaggtgccaaggggcctactgcggagatcgttaccacttcctacaaactcaccgatatcaagcttgatggcgacagtgagaattatatggaatggaagcatttggttgaatttagtcttggtgggatgactaaggaagattatctaacagaaacatgtccagatggatctaagacaatgatgtggaatattaatcttagcctttctcgtcaattccattgataaacagactcaatctgttatcacccattgtaatacagtgaaggagttgtgggatttttttaaaaaatcatctatggaaaattcaataatttgaattggacttatgctcttctgcaagaaattttccaccctaaacagaataagcggaaattgatggactacttcttagagttctagaagtacactgaagaattgacttttctccttgcttgcaaatttgtggaggagatggtgacccaacagaagaagcttatagctctaaggttactttttggtcttgattcatagtttgtggtggtttgctctcaaatattatctagttggcaggtggatacttttactgatgttttctttcgggttgtgcagtcctcttttgagggctctcgctccactcctgagggtgattcccttgatcgctctgctctagtggttcaatctggaggtcatggccatggtcgaggtggaggtcgtggtggacaagtgacgtgctatggttgtgagtaagtgagtcactatagacaccaatgtgctcattcctctcagaatcagcagtactcacaatcacaggctcatgcagtgccgcagcctgacattgccactcaatcagaggaaaaacctaggtggttatgactgatgacgagtcatctacaccttcttctactacttcttcttcaaccacatttgtcctacaccttcatctacttcttgacgtttggtcattgattctagtgccataaatcatataacaggggattcaggtatatgttcttctttcaacccttccagtatccattcttttgttacacttgttcatggatctagtgttcatgtttaaggggactaggtgtactaccccaattcctactttttcattgtcttctattttgtacttgcccgaattctcgtgtaacctcctttccattagtcagttaacgcgattgttaaattgttctataacctttttttccccaattcttatgtattttaggatctgtagacccagaggctattggtagaggaagagtatctaatggactgtacttattggatgaaggagtttcacatgcttttgcagcttgtacaatccccatgtttcagcctcattgtcagctagtcattcatctttaggagttcttagaaaattatgtccaccattagagtctgtggagtctattttgtgagtctcgtcaattgtctaaacaccatcagagtgtttatttgccttgtttaaataaaagagctcatgctctctttgatattgttcattctgatgtatggggttcctgcccagttacttcaaagtttggttataaatattttgttatatttgatgaaatctagatctgaattgttcaccatattttgtcatttttgttctaaaattcatactcaatttggttgttttgtgagtgttctttgtagcgataatgctaaagaatacttttctgaaccatttctcattttcatgaatgaaaatggcatgttgcatcaatcttcttgcatcctcactccacaacaaaacggggtggctgagcataaaaatcttcaccttatgaaggtttcctgagccttattatttgcaatgaaggtttcaaaattatttttggcaaatgcaatccttacgagggcgagccctggtgcagcggtaaagttgtgccttggtgacttgttggtcatgggttcgaatccggaaacagcctctttgcatatgcaagggtaaggctgcgtacaacatccctcccccataccttcgcatagcgaagagcctctgagcaatggggtacgaataaaaacaatgcaatccttactgctgcatatttaattaatcgcatgccatcttctatattgaatggtgtaattcctcactctgttctcttcccctctcattctttgttacccttacccctaaaaatatttggttgtacttgttttgtgtatgatgtttatcctcaagaaaccaagttggatccaaagtcattgaaatgtgctcgtgggttattctaggacccaaaaggggtatcgctgtttctctccagatcttggtcagtaccttgattttgcaaatgtgtcttttgttgaagatcgttcgttttttgttgagtattagtcctctttgtatgtgtatgagtcagatgatttgttcttaaatcacactattatccactctgctcctccgactcatctcgatacaggtttccagttttttaaacaaacatatccttgccaccctaaataggtgtcacttgaagctgaagccacatgtgaagctccaccagaggatactcaacctctaccaatacctcttccaacatctgcagatcctccttcataccttgatttccctattgcacttcataaaggtaaacacacctgtacacatacttatcctatttcctcacatgtgtctattgctcatttgtcatccacctcaaagtcctttgttgctatctagattttgtttctatccctaaatctcttttagatgcccttagtcatggtggctagagacaagcaatgaaggaggaaatgatagctcttgagaaaaattgaaacatgggatttgatttctctccctgcagggaagagggatattggttgcaagtgggtttatagtatcaaaatggattctaatgggtctgtggctcatttaaaggctcgcatcattgccaaggggtatgctcaaacttatggagttgattttactaatactttttcccatgttgctaagcttaactctattcgcattcttatctctcttgctgctacacatcattaacctttatttcaattggatgtaaagaatgctttcttgcatggtgacttacatgaagaggtgtatatagagcaatcacctgggtttgttgcttagggggtgtttggcaaggtgtgccgcttaagggagttgttaaatggcttgatgcaatcacctagatcttggtttgggagatttagtggtgtggtccttgcatttggactgaagctgagtcaaagtgatcatactgtattttataaaaatactaaccttggcagcatcttacttgtggtgtatgttgatgatattgtgattacaagaagtgataataaaggtactgacaacttgaagagttttcttcaaactcagtttcagactaaagacatgggggccttgaagtacttcttaggtattgaggttatgtactcgaagaaggggatccctatggacccaggggttaagctgactgtagatggagttccattctctgatccacagagatgcaaacgaaaggtggagaagcttaattatctttgtatcactaggtcggatatttccttcccagtaagttttgttagtcaattcatgaggttcctgactaatactcaatgggaagcatttatccacattaagtacttgaagaaagctttaggaaaggggattgcgtatcaagatcatgggcacatataggaggaaacattctctgatgcagatcacatttggtctcgtatggaccgcaaatctaccatatgagctactgtgtatttttgggaggtaatttgatctcttggaaaagtaagaagcaagatgtgatgagcaaatctagtgtagaggcagaatacagggctatggcccaaatgacttgtgagttgatatgggtgaaacaaattttggagaagataggatttgctaatacctatcctatgacattgtagtgtgacaatgaagctgccacacatatcgaatcaaatccaatctatcatgaaagaatgaagcatattgaggtagattgtcacttaatcctagagaaggttcaacaaaaccttatatgtacctctaatgtcaagacaggagatcaactagcagatgtgcttacaaaagctttgaatggggtgagtagtgattttatttgtaacaagttgggcatcattaacatctatgctccaacttaagggggagagttagagtcatttatattagagttgtttagaataaaagggttttagtatgtatatgggcttggcccaagtgcttgtatatgcttaacctagtattatatatatgagggtagttacacattgtagagcacacaatcatagtttactcctatgctctatctctttctctcttccttatctctttctacaataatgaatgaaatattgtacttgtgttaatgtttaatgtaatactatttttcacctatataaaattttagggtgtactatcgg

SEQ ID NO: 3375 - DNA, 1078 bp, Glycine max
  Intron number 4 from transcript Glyma16g24270.1 (locus Gly ma16g24270) derived from phytozome v7.0 (chr-ID Gm16; pos 28106022 to 28107099)
tctttgatttggctgtttttcgtcagtattatcaggcaagtttgaaatttttagaatactaaagaaacataggtaatacaaggcattggcattgttcacatataagatgcttggaaccaaaatttcaaaaagctgtaaatgtttactgaaagggatttgtgtaatttgtgaatgacattcagatgtagattaatgtcatcaatgatcagtggtatttcctcattgtgtcacccagcctatttcataaggttgggtgacatctgacctagttatatataattcaccaaatgcattatatagatcatacacaattgacctcatgtaatcccctgttcacccatgatactccacaatctaggagttactacccacaactactcatgggcatctgatatatatgaggcctccattgcttggagggtcagatttcaatatttcctaatatgacttatcgaggtccatcttcgacttaggctgaatcaccgaggatcagtgtaaaactagtcgcattgagataattgtcatatgatgttttctgttactcaatttagtgaatttacctaattatgttgattaaaacaagttgaattgcatttgcatgcagtataagaaagatatgttggagaatcccaattggctcttgagacttcaaaattattatcaacgaagaaacaaaattaattggaatcataagaacaggagatcatattgatcctcagcaattattgcttgtgttctcagccggggcttggaatatgtgatgattctgactggtttgtggataaaagtaaaatatgtgcatgcattactttccagttctacagtttcctgcatgcttgtttgattatatctaatgcatatatggtaaaccatcaagcaatgtctttgtgtttcttcaatactttatagctgttggtttatcatatttccatcttctgtttgttttttcacttcagttctagtttttttatggtataagtcaatttttttaaacaattcattgttgtatatggtgtttgttagattgctactcattttatttgatttcttgctgtcattttcatgtaggattccttaa

SEQ ID NO: 3376 - DNA, 6614 bp, Glycine max
  Intron number 4 from transcript Glyma18g45780.1 (locus Gly ma18g45780) derived from phytozome v7.0 (chr-ID Gm18; pos 55478750 to 55485363 reverse strand)
caggttatttacctctttccccttttgttgttttgcagttatagtttggcatttctattcattatctagtatttagatgctgctagaatatctaaatataaacattatattacaagatacctctagatattctcactaaggctttgtaaaatggtctcacacaggttaatatagacttctcccttcctcataatgattttttgtttaccaaacttttttggggagaataaaaaatgcatgtgcttctattgtcgtatgaaataattttaaccaaatggatagactaaccttgctccaatacaattctaaaataatgatcaagcgacttataatctgtttggaaaaaaattcaaaaacaccgatcaagagtttctctctttatgtctagcatgaatatacacagaaagtttgagaaagttacttcacttttttggcgtccgtgcgaatttgttggaggacgtggatctaaacacccacttagtactgaaaattaagggggatcttcttctcaataaatgagttcccaagctaccttaataagcatttgatgtaggcaaataaaaaagtggaagaagatatgatttacgtgaaaaataaagattgaaagctgtaaagaaaaatattaaagaaagggataaaaataatgcaagataaaatatagatgattttgatcgagtgtcttcttgtgaaattcagtagaaaaccttatttagtaaattctatgctaatccaggtgattggtagttggcaagttcagtaagttgtggtgggtccatctttctgataatggctgataattaactccttgataattaggcatgacctgcattctccaaccacttttcaatttacctttttgagcttcaaactgttagaataatcgcttcttattttagtgcaaatccgtccatttgtctccctacatgtgagataatgggccgtttaattttttacattttatttattaaatgtttttgagaattattttgaatgaaaaagcttatccagaaaatcttgttttaaaggtgacggattttgatttggcctgattacgaaaactatggaatttttggctttgaatttattttagcattgggtcattaaaagtttttaataactgtatcaattattataattaagattttattagccttaatttcaaactatcacaaagtgttagcattgttgatcctatcaagctttttgaaaaacgtgtgagtaaaaacaaagcacgttaaaaagttttgatagtcattgattctaggtgtgaagtgtcaaagtatgaagtgttataatgtgtgagccatcaaggagtcgataatcaggatgttacatttgacaccccgagaaaaatctcgcctctcttctttgggtttgagttttcacccttactagttatgtagcctcaacatatctgagaggttcctattgtatcctagagaacttgaatgagataccatgtataagtctttaaggacaatatcaaaacatgacttaggaagcaattgttcatgatctccaatactatttccaacaatttaaggttaaaaaaacaaaataattcaaaacaaacaaaagttgaaagtgcacctttcgttctatttatgtctcctaattaacttttgaatttgtaggtaaaattttcatcttccttcttttgtttcttcttctgagaagaaccttcaatatctattgctttgttcttatccttattttgagaggtcaaggtcaaatgaacactttttttcttatcccattactatcattcccgctcttgcatagtgagatataagctcgttctagaatcatttatcctttcaagtgttataactctttcaattattgaaaatttgttggtcaagatcaaaattaagtgcacaagcatgccttcaaacaactctaactttagtgccttgatttttaatgcgacattagacaagttcataatgtactctttatgtttcctttgtccttatactttaatgagatgagttttgccagaaggttgtttgtctttgtcctttcattcttagcaaaatattgctccacttcttgtcactcttactcttagtaatagaacctggaattgatttcggaatggctgttttcattatcatcaagtacatttggtttgagggatcccacctctcaattttaagtacatctatgtatttcagaataggaatgactcgttccatcctaagtgcagtattaaatccataagattaaagatgatctccatagcatctttctagactttgaaatttgtctcattcagcattgagacactattaacttgagaaaaattattctcaacactagctacataaattgcacaaaggaaaaaaaatagaaaaatattcacataaacaagatgtcaaataagacaaaagaagtaaataaatgatccaaatgggcactccattacaagatatttagcacactattgatttctaatctttggataaataaattaatttgtaagtggtattttcactgcaaagatcaaacgctgacaattgatcaggtttgtcaaacaactcattggattgactattgtttatatgaaaagaaaactttatgattgtcacttgtttattatattagacatgtctatttgaaagtggtaccaaagatgatggtgtggctaagttatgtggcaccttctaccccatacatatatgtactaataatataaggaataataaattataattaatttaaagtttttaaaacacatttaaataaaagcctttcaaaagggtaaaaggctcacattcacttttgtaacatcataaaatgacttgtccaataaatactaaaatcatctcggcttaaaacaaggtcgttcaagactttaatatagaaatttatgcccaatgtcacatcttatcagagtattgtgtctcgacgtcctttatcgtaaggttccttaaagcaattcacctagtcatctgtttttcgaacacaaggttcgagatcatcataggattcaaacacaaataacacacgaagagtgagtcatcatattcttaactaatagagaaacaagacaactagatatacatatcatataaatgaaatacaacttacttaaacataattcatgtaattccaccactgtcatttaaaattcactttttaatcatcaatcacattacacatgaatcacacactttgatcaagatataataacactcatcaatttcataataaacaattagcaagcattatgcaacagttatgctaagacccaacctatatgcaatgtggtatcatgtcagtgaaaagttatcctgggacgcttaggaatacataactaaacataccacacaatgagtgtgttaggttattctcactaagtaaaatcataaggtgaccagtcagggtcactccgttttacgaaaatgctccaaccatatgtgatcaatataggcttaaaggagcactcaaaccgagtgtctttacccccaagccttagactctgaagaatccgttagggtctcatcttcctgattcaggttcaatccctaaaataattttagcaagcagatactgctaatgaattttacaatactcatgacctcacactcatgtttcaaacacgtttaatacattgcgctacaatttaacattggttcttaactaggaacctacactttctctttaacactacgcataaatatttttcttaatataaacattgatcggattattgtataattcacagttcacaacataattattgtcatatcaagtgttaaatacacacacttattcacaatcaaatatcatacccacaatttaacatctcataatgtcacaatccaccatcaaagatttacatgtatttcataaattatcacatgttcaactttgtacttatactcaattttaacaacaatattataagcaaacattgctcgtgaattatataatattcacgatctcacactcatgtttcaaacatgtttaacacattgagctataatttaacactagttcctaactaggaaacctacatttttttctttaacactgtgcataaacacttttctcaaggtaaacactagtcggattattgtataattcacaattcacaacacaaatattttcacattaagtgttaaccactcatttattcacagctgaatctcatgttcacaatttcacatttcataaagtcacaatccaccatcacatatttacgtgtatctcacaaatcaacacatgttcaactttgcacttatatttaatctcaataacaatattataattgcaaagcaacatgttatctcacaactcatcacttatttaatttatcacttatacacaatttcaatcacaattttacaattccaatataattatttatcatgctaaatcttatccaaaacacaaacaaatcatacaaaaatatttttcaaaacactaggagtaaaatccctcaaacagttcacataatcatacaaaaagaattataatacaataaacatcccaaaataaatctcaatttgattctctaaggattcttacacattttcattctaactccaattgcgataaattcatcctttacctctaagcgagctcatgtgtgtattctgacagtgatagcgatatctctaatagtttcctgagatttctcaagtttttcctctgactgctctgatagggttcccaaacgttagagagaagggaaagggattgaagcgttcattcaactgtgtatgtgcgatgaatatttttcccttcacaaatattttcttgtaaattccaacgatgaagatgtgcggaaatgcattgcgaaccacatatcaaaatttcacgacaatccaatggttaacgagtcagggatcgtagttttactgagatggttttgaatttctgcaagaaaagaaaaagctgcgatacaaagggtatttttctcaactccgacatcttttcgtaatttccaatggtgagaatgtttggaaatgagttctgaacttggcactcaaatttcatgatgatccaacggtgaatgagtccgagatttttgtttttatgagacagatttggtggtatgcaagaaaaagagagaattttggccggagaagagaaaacgaaattgagaggagatgaggtatagagagaatatggtcatttgaaaattaatctaagatatttctatttatagctagggtacttacaatctattatttactctattttttgtttattattttataaataaatattctattttattttcgatcaaatgaataaaccaaatatctttttttcttcctataaaccattattttaattaataacatcattttttcttatttatttaattataaaaatctcatcattttctaaacctctatttttttactaattttttttaatttatttatgaaaaaatgggatgttacaagtcagatgagtaatgagacatgaaaaaacttgtgatggatctatatacgtggattcctttattgaaagttttcatggcaatgtggaggttattgtcaacaatagttaagctctagaatcatcattagatacttgtggacggaaaggattccgattgagggtgatttcatatcatgtgaaaagatattcacacttagattattggggtgcaagtttgacagtaaaaaatccaacattggatagaaatgagcatattgatcaaaacctaagtgacaatgattcacaaatctaatatcttaatattttgaattgtatttggtgtcaaattcacttgtatgattgtctcgtgatccattgctagaaatcttctcaatattttattccctcatattcttaacaatgctaattaaatatgatgaccgactcttagttgaaaaaactttactcttaaactttagtcaagattttagatgctaacatccaataacaaaactgtgaaaacctaggatgtacctcttgccatattatcaaaatatttataaaatttatataaatagctggatcaattacaattgatcgccagctattgtgaaatctctataacaatcaatcacatacaaaaaggaatggtatgtggtctctctcaaccaaattgccttagttccttaataagactgccatctctcttcctgatgggaagaagaaaaaatgttgttattgggtatatcatggaccacgacaaattggtttcttctatatgattaattagggttaatttttataattccctaataggtcaatattgccatcaactcattacattcacaccaattttagaaaggtataggttcaccaaagtacaccacataaaatgaagcccattgaattaaatagctaatataattaaacatgacagccacatttagaccagggaacgtgaaattcttaacataactatcctgaaaaaccataaattctagaaaccctccactcatgtcttgaacattcccactgtatatgcatgtcggatatgaacatgagaataaagcgtattggttaattggcatttcttttatttctatttttatttactgttttctttatcatagacaatcattcaactttggaatactgaggactgaatgaacttgtgtaatatgtggcagcatttgaagcaagaaacagcaaacttg

SEQ ID NO: 3377 - DNA, 568 bp, Glycine max
  Intron number 4 from transcript Glyma14g21470.1 (locus Gly ma14g21470) derived from phytozome v7.0 (chr-ID Gm14; pos 25006135 to 25006702 reverse strand)
caaaggtacttttgttttgataagtgtccatttcagagcatttagctatcttctagttctgtattggtggacctcctgcccatccacccaccaacatatcctttgtgaaaaaacaagaccacaaatagcttaacataatagtttaaaagattgcttcatgtggttaaactttaaagtttcaatccaatttttgtaggctttgtatgatggcctttttggctatgattttacataatccattattgggtgtgggggtaggtgggggatggggagacattgttcacagttttagatgcatattgtagagttggttatgcagaaggaaataactttctttatctctaaagcaaagacaaatgtaaactttacatgttcagttttagaaagtttcattttgagcattaaaatgaggattgtcccatacaggtgattttgatatactccatagccatgctcaaatagtaatgttcattcaggcaatgtattattctttgtttggtatcctttttggagtgataaaccccaccaccactgcctacttttgcagtgatcggtgtcttttgagaag

SEQ ID NO: 3378 - DNA, 2706 bp, Glycine max
  Intron number 1 from transcript Glyma15g40510.1 (locus Gly ma15g40510) derived from phytozome v7.0 (chr-ID Gm15; pos 47505079 to 47507784 reverse strand)
ggatattcctggtgagcaatatagtgcctactctttcccctcatatcatgcattctctaatataaatttaattattgttttatacatacatgacatgtttctcaatttctctatatatgaccattagagttcactatctttggaaattaatctcacacaatttatactttaaattttcttctcataaataaataaaattaatttggggggtaattgatcagccagaaatttcctgtagttttttcatcatctcacactcaaagccaaaggcaccccacatgagactaataatggacatgcagcatgcttgatccaatatttcagtttcctattacggtttgcaaagtagaaaatgagttgttactttcgtttgtgttgaattcttgttctgtttgaaagcatgatgaggggtaaattgattatgtgggggtgaggtgatgataacaactgcaatggctagtataaatcccaatctatacgtgcacttgtgagtgctttgatggggaattatgatacctgtcatctctgtgactaatgagacattatagaagctttcattgttgcaaatcaattcatcagaaaattaattgaaactttgatagttatattgaattccatttttggtaggccataccttaatcctaatgtcttagaattatatgtcatgtagatgagtccatgaagctttgattctttgaacttgaacccggccaataattattagctatgatatgatattttgattccgctgctttatatatacatgccaattaatgaaagagcaagatcaaaaccgttattctttaatctctttttctttcttttctgggatcaataattccatctatgatgtatgatctatattaattgaatattttcttccttgtaattgaataattgagaacacatatcactattttcagtctgcattttcatgtgggtcatgactttaattccaaccccagccacattcacacagataggtacaggtggctgcactcctgtactttataataataaaaattatatatattggaaatcattattattttttgttttaataaaaaataatttttcatccgtacttaataataattattaattaatgctatgaaatgtgaatatggataacatgtacacaaatatgcatacccatgaaagggatctacacagttaggttggcaactctgaatgggaagttctaaaaatcatgtatatgcatgtacatgtggctatatgcgataatattgtaatactatctaacggttaatggaagatatatatcaccttcatagcttctttttttttttcagtttggaataaattgacttattgaatcttgtcctattataaagagtttgacagtgatttccaccacaataattcaaatattgattttcattgcaacaacacactgcacatgaacatctcatccccttacacatgtcgtgttaaagtgatggaactctcaagccttatcactattctagctggatctcaccatgtttattgtactttcatgtcaaaaacaaatatactgtgagattttactcatcataaacaaagacaattaaatttacacctctttaactatcttgtccttattgataattgttttttcccccttcgttggataataatttgaaacgactattactttactgaataagaagaggatttatttcattcttaatttttaaattttaaacatttttcccttttaatatttaacaaacaaaaaatactcaaaatatctgcataattattgagatgcttattaaaaaatttatatcaacaagggcaaaaaagatttctaggcctgatatattgggtcaacattgctttggtgtgctaggccatgggttcatagtttacattattttggaaataatatcaactgtttgattatgaaatcaccataattagttttgtattttatataagcatgtcatatatgaaaagaaactgataaggataggcaaatcagaagaaacaagaacagttaatggaagaattcagctagttataaataggggcctatccgaatagtaaccagaataatttgcactcaaataatagtaattgcctcccatcaagaactatttgttttttgtatttttctttaaactgtactctgattcttcttattatatatgtgtatttctaaaataatctcaaagtctatataatacaattggtagaatataacttctttattctttctttccctgtttccataatcaaaatgttcaattcttataataagacaaagtaaagaaagccatgaacattttttaggattaaattaaacaaaagataaattgttaatgtgaacagttatttttaactagtcatagttgacttcaacacaagacacgccttattgacctaactgcacatgtgcctcatcttactgaaatcaagagatcatatatcaccaaaaaaaaagttaatcagacccttcttttgcatatatatgatactggtatacttgaatcacttattttcttcaacttatatagtaacgtaatattgttaatatgaacaattgcttttaactagtcataattgactagaacacaaaacataccacattattttagcaatgatatatgtaattgaagcacgagattcttaatcataacaatattgtattgtaatggttgtgcagaaacagcttgtgtgggagggaaggagtggtatttc

SEQ ID NO: 3379 - DNA, 1772 bp, Glycine max
  Intron number 9 from transcript Glyma09g13590.1 (locus Gly ma09g13590) derived from phytozome v7.0 (chr-ID Gm09; pos 15241818 to 15243589)
ccaaaatcccgacttaccataaaccttgacccagggtgagaatatcaatccttgccctcggaagaaaacacaaaaagaaggaaaatccccaatcaaagaaagggagaaggcaaaaaaggaaagaaaattcccaattaaaagagggagagaaagcagaaaaaaaaagaaaggaaagaaaattcccgatcaaggattgaaagaaaacagaagaaatatgcagaaaggtcttttggaccaaacaacatctgaacaaatacaaagttactaccaagtaaacaagaaaaaagaaaaaaaagaaaggaaaccacgacctaaagtggccctctccctttgattaccaaccaaaatcctgtgcgtcggtgacttgttcgcctcgcgctaaacaaaaacagaaaacgaaaaggcccaaacactcagagccaaatttcccaccaaatgaacccattcccaagaaaaagtcctattgatccatgatcacgcatgtagtctttgatttgataggaaataatttgcaaaatcaagtcatggcatatctatggttcggaattaggatgaaacacttacctgtgtgagattgatacactttgagtgattttctactatttttgttgaaaccagtgtttcctctaaatggtcatttagaagcgaaatcctaaacatccaaaatctcatttgtggttatgagaagatttcatcagcatactccccttccccgatagacccattgtttttcatctgaaaaacatatgttgctctgattagttggaagttttctctctttactaaagcatgtttgcattttagtaaagaaaacactgatactatttttagtctcccaagttgtccagaactacgtaggtctgaattcctcattgaggatacgtaggagcaagagcctcgctttagtcagtcgcccccacaatttctgtcatacagacactggagtcacatgacatgcggagatacccgagtggttatctgtttaaactttcttgtgctatctctaagactcaaagcatgatagcatgcagagactaacgtcgtcttctgcaccctttgtcaatcgcggccaacaagctcgttgacatgcggaggtttacgtcatcttccgcgtagataatttctgtcatactgacactggagtcacttgacatgcggagatacccgagtggttatccgtttaaactttcttttgctatctctaagactcaaagcatgatagcacgcagagactgacgtcgtcttctgcaccctttgtcaatcacggccaacaagcccattgacacgcggagatttacgtcatcttccgcgtagacaatttctgtcatactgacactagagtcacttgacatgcagagatacccgagtggttatccatttaaactttcttttgctatctctaagactcaaagcatgatagcacacagagactaacgtcgtcttctgcaccctttgtcaatcacggccaacaagcctgttgacacgcggagatttacgtcgtcttccgcgcagacaatttctgtcatactgacactggagtcacttgacatgcggagatacccgagtggttatctgtttaaaactttcctttgctatctataagactcaaagcatgatagcaagctgagtgggtaaacacgtagagacagattctgcgccctttatcattcaggaacaacaagctgagtgggtaaatgcacagagatagattctgcgccctttatcattcaggtagaacaagctgagtgggtaaatgtgcagagacagattct

SEQ ID NO: 3380 - DNA, 1127 bp, Glycine max
  Intron number 1 from transcript Glyma08g01130.1 (locus Gly ma08g01130) derived from phytozome v7.0 (chr-ID Gm08; pos 657530 to 658656)
ctttttgttccccgtgcgtgtgcgtacgttgttcggtaagattacgccttcttcgttgattccagttactgttttctctctctttcaattatttttcttgctctggtggtgtatgcttctcgtgatttcactttattctcttgatttcttgttgcttctattgttttctttttttattttattttttcaaattatacctccctcttttccaaaacaaaggggaaagctcacgttgtaatacttgagaagttcactactcatgttagcgaggttttacgttgtgtttgcggtttcatcgtgattcttgatattctttaaaattctgaacaaatacagctgatgcgattgcaattacagttgcaacgcggtttccaagactcctaagaccgtgacgttgtggccgaaattgcaattgcgatcatggccgcatacccttttttaaaaccttttacgagtcgttgaaacgactgaaaccaccgagtaaataaaatctagattgctgagaatagttggaaagaaaagattaaaagaattctctggctacctagaaaggcttgcaatgttgtaaacccttgccatgtgtgcttacacctttcattattcacaatgaacacaaactgtgcaatcacagtaatacaccacgacaaattcaacaacaacaatgcatctaaactgaccacatacactgccacctggattaacaaaaggtggatattgactggctgctgatatgtgtaatgacacagcatacaggttaaatgtggacccaatttgagctattaggacaaaagatagtaatatgtcataatatatacttcttgttaggttaatccattagtcccatataaatcaattctcatattttagataatatatcattctttctcaatttgagctcgtagttcattgtttgtgtccattttcaataacagtttcccctacagtgcacaacaccacactgttcattatttggtattaatgcacgaggtggactgtcgtgatgactggcattggctaactgcttttttgtagttatgaaatatgttttctttccaatttttaagcagtttcaatatgagatattctatcttcatgcaatttgtgtagtgaacaatatataaagacaa

SEQ ID NO: 3381 - DNA, 5830 bp, Glycine max
  Intron number 2 from transcript Glyma06g14190.1 (locus Gly ma06g14190) derived from phytozome v7.0 (chr-ID Gm06; pos 11190395 to 11196224)
gccttctaatccaccctctttcaagtaagtcttctctctcagccatacacctcttagtggacaattgctgcttgctgacttggtcttcttacaagcttcttacatgttttataagcatgtgacacttttggatttattaaaactttatttctgatgcaatatatatcacgcctcttttactttatgatgccatcagtgttccccctttttttataattacttttataccaaagagatcaaaacctttttatatggtaacatttttaagatttgttttgctataaagaaaaccatcaaaaaatatgcatatataattacataaatattcttaataaaaacacaatacaaaataaggatactttagtcttctcgttccatccacttttggacggattaaaaaatactcttttgtaaattttcacgttgtcttgtcttcttttctgagatcatattaaaagtcgaataaaacacttctattctttgtcatgtgttttctctctcccaattctcttgtttcaaaaataattaatatcaactactttatattttcaatcaaatcaataaaaaataattcttcaaataataattaagtatttattataaagttgataaatttattatatataatgatatataattattttctaataatataaaaatagacactcactcacatgtatatattttcttcttctttagttatataaaaatagagtttagtatctatatattaataatataaaatatttttatactattgttcgtaaattatcatttgaattattttaaaataattattttaaaaaataataaatttatcataaatagagagttataattaaataattatataattcttttacgctaaatcactttttctcaaaaaatatatctctattaaaaaatgtttaccataaacaagagtactgttagcttttcaatataaaaactacctctatcttcttgttctttctacttttaggtgaattacaaaaattagtgagtttttcgttgtcttccctcttgtaccatactaaaagataagtgaaatacttttatcacttttttgagtttttctgttgttctacgttcttgtcctccctatttctctgctaaacaggagtattaatgtaaaagcatttacattattaataaactaaacaaattatttttaaggtaattattataaaattttatcacatatgactatatttagttagatttcagtataaaaatatatctttatattttaataaatttatttttatattctctcatcattattattattttataattaatatcatctttgtttcattattattttcttagagaattatttttttcaaaattatccttctatcattagtttattttttatttctgtaaccaatatcattaatattataagtataaaaaatcaattaatattacatttaaaaactaaaataataattattttaagtcaaattttttcttattacacgacgcttgttgtgagaaagagaaaattacacaaatttatacatccttcatttcaaaatgagtgtctcatcagaaaaaatcgcaaaataagaattatgctagcttgtaatattaattattttttcttctaatatccttaataagttttactttaatttttaattataatacttatactacttcttttacattattcaataacattaatttttttgtctatttaataaaaaaatttaatttgtgtaaaataaattaggataaaactcattttagaaccggaagagtatataaaaaatatttttagaaagtacaaacagaaactttttagttgtgcacgtgtctgtttcagctttcattacttatcatctttccttttgggaaattaattggcgcaaatttcatgataaagtacagtggtcctgttttctaggcatgttctgtagttccgttggggatcataatcgtattcaataaataaataaagagtgcatttgaataaaagaaaagaaaatagttttattaaaaaatataagagaacatgtttaaaaattataaaataatatatttttacacattttaataaaacactgttgttttgactcccttgataccagttaatatttatctaaaataaataaaaatatttgttaactaatatccttagaatacttattaaaaactgaaagattttttttattaaaaatcatttgtgtttgcttaaaaattataacgagtatatttatacatatttcaatagaaaaattatatttttactttcttaacaagtgctttaaaaatatatatacatataaaatttatatatatacacgttcattaaaaaaataagctttttttttctatcactttatttttcttttaatctattttttacggacgtagtttcttataaatgttttttctccgttatcaattatttgcttttcctgtaacgtaactaaaaactgcattcccttaaaaaaaaaaaaaaactaaaaccttacatattcattattgtcaacccgtggtgttttgtttctttgggacatatcaatatattttcataaacctacataatttatatttttaatttattatttcgttggcagaagaaataaattttatatttcataaataagtaatattttttagaaataaaatattaataaaaaaatgactaagttgtgattaaatatgatttcaagttttaaattttattttgagtaaattaaaaaaatatcaatttcagttgaacttaatcatttccaatttgcaatacaaatataattttttttatcttgattcatcactttatccgtaattaatctttatcaaaaaatttaattaatcatttttaatgagatttttttctttcgatcatatttttttatccataatatttaaaaatcttgcttaaaacaactaaatttaatagcatttcgatcaataacttgtttgtaatataaatagaatatgattattggttgatagaattgtgtttatgtgttaattattttaccaagtgaatgttcataacagtactaatcacttataataattaatataaaaacatcacaatagtcgttaaatttaaaacgttaccttcttgacttttgagtcataattttcaaatttttaaaggaaggattaggtggaggaggaggaagacaaaacaggaaagcaagtgaaatggataaaaaataatgtgttcaaattaaattttaatgtaaataaaaagtattttaaaagaactctaagatttaaataacttataaaattatcttaatttttttattttatcatttctattttctccctaaactaaagatacctaagcatatgtttgtttaggctgagaataagaaaaacaattttgaatggaaagaaaacatcagactttttaattccattgtttgtttggtaatgttaagcaggagagaaaagaatatgcttgatgtgaatactaaataaaaaataatttattttcaaatttttaaaaaataggagtaaaacactcttgtaaaactaagagaaacatagtaatcacataaattaataaatttagttgggttgattgagtaaaatatgaattattataaattttttaatatatattatttacgtataaaaaatgcaatatagttaagtagaatgaattaagcaaattttccctttaaataaataacataaaaataatttaacttctaacttctttttttcactttttttcctatatcaaatatatccaaagtaaaaataatcacctttatataaagaataaggatatgcactcatcttcacatgttattcattatatcaatacatattattttttcacatcactttttattatatcttatcacttagtttatttatattattttcttactccaaaggtcaattacgacccatgtgtttatagagtattgtgcttatatatatatatatattgatagaagagtatttttcttatataaatataacatattggtaaatgataaagcattagtttggcggtgacgtaagtagatacttccgtgttgacgtaacctctttactgattgatcctcagatctgctgcttgtccctacccctgtaccacaataacgtctatcccttttttttatatagtcgaaatatttcgttatatgctgattctaatcaattatatctcgaaataaaaaataatgtctaacaattttataataatttatgtatcatatctaacagatgagtaagattttctcgacactctcatcttattataattataatcgtaagttattttatatattataataaataataaactaataaaaaaataatcttataaaatcaattttataaacattaattattatattttcttcaaacagaacgaatattataaaataaagagagtatcaattattgcggggaaaagttagatccgcagtctgtctagaatgcgagcatgttgaattattgattctcatgttcaaacaagtacaaattatgtcgaattattgaattattgatcagttctttgatacatatgttaaagatataaaagtaaaaaaagtttttattttaaaaaatatatattactacttcaaaaaaaataaaaaatacaaccatatattccattacaatataaagtcgttatttttattttttaatatgtatatcctaaatatacagactgatttcagtaaaatcttttattatataatatgtatttataaatttgaattatatttaaataaatgtatttaaatatttaaagaatgatttaactaaaaattagagcttctttattttaattttttaacacattattttgaaacaaaaccacgatttgatattccttcaattacaatttgattgaccttttagttataaataaataaattttaaattaaattataattttagttccgttaattttttaaatccataatttttaattataatatttgatttgactgattttataaattgacaatttttgatcttcttataaattattaactaataactgtgatggataaaattattaaattaattataaataaaaaattattaataactttaataaaaaattaataatctttaatcacaagtattaaagtttattaaagtatttaataattcatagattttgttaatttttaataattaatattttaaactaatttataattaaactttataactcaattaattacaactatcagttaataatctatgaggtgaactaaaatttttaaattataaaattagagagattaaatgttacaattaaaaattaaaaggactaaaatcataaatttaaaaaattagaggataaaaaattaatttagcctaaattttatattgattaacgcttataactttttaatggaatattaaaaaagttatattaattttgcaccgtaattcgacttatttgtgttattgagcatcagcatcattccaattatagaaaacgcaaacgcatgtgatggatggtatttacacttttagtctcatattttttttgaggttgattggcattaattatttgtgttattagcatcatcatcatcgttggaatgttgattttcttattttttttttctccccaatttaatctttttattttaaaaagtttataatcttgatcaaattcctaatatttcatatgttttatttcttttattttacccgattaatctctaaatctaacatatttacttaatatatcatcaaaattatgtttgaaccgaaaaccaaattggcggatgaaggaagcaaaattacaaaattttgtctctttgatttggcattggcagggaaactgttacagaatactgcacaataattaggg

SEQ ID NO: 3382 - DNA, 1102 bp, Glycine max
  Intron number 2 from transcript Glyma01g41940.1 (locus Gly ma01g41940) derived from phytozome v7.0 (chr-ID Gm01; pos 53311370 to 53312471 reverse strand)
gatctaatttgctcgatacaataaggcagttagaggtaatttcttgtgcttttttctggaatgcttgtcactatcttgccctgtattgggttcattttaatacttaaaggactgcgggatatttattagtttactattcccacaacatctttaccattttaaatttggtgaaagataacataatattctgtaaattattaattgtgcaataatttaacgatccatgtcatttgatttctaaagtttttctcccttttttttttattaatctatgaccgggtctgcttgggtggacgaatactgagttaaccttttttattttttgtaattaatgattactgagttagctttttttttttttttttttaatagagaatactgagttagcttgattgataaaatattcgctgaaatatatctaaaggtttcttttcagtctcctttaacatcaattattttttagaagataatcttatatgtaaggagactgttgtcttgtcacgcgtattacttttttattctaaataaatgtttgagcgtgaagtttcaatattttatatatgtagttttaaattttgctgtctatatattttattccatcattattatgcttctttgttcttggttctgtcaagcacatggatacatgtttaagataatgtggctataggatcattatgtgaaattatctgaccacttgtgttggtataattcaaactgaagtgctattgttatcatacaatcaagaacgaagtcaatttgtttttttttttttttgctagaccacatggcatgtttggttcatgtggtcatgcattcttgacatttttttttggattttctctaatgtcttttacaagagtcacgccactgctgacattggttgacgccatcatcaatcgttttttccctctttcccgcaccaaaaaatgtaattgtaattcacgggtttatgtcaattcaattatcatttcagtatgccgttttctgtatatgtttatcttctcaatgtgaaagctcttattcgtatgtgactgaactgatttgctattgacgataataagcaggcagctaatactgagcctgaggcctctgctataca

SEQ ID NO: 3383 - DNA, 2573 bp, Glycine max
  Intron number 1 from transcript Glyma10g01030.1 (locus Gly ma10g01030) derived from phytozome v7.0 (chr-ID Gm10; pos 739393 to 741965 reverse strand)
cgtgtatcccgctagagctcaatctggtatagttttcttcttttgccaattactactttttttttcttttttttattaatgtttacttttagatatgattaattcacttttatctgtgtattttactagcaagctcacctcagatatgaaggccttttaactaaaagggaatcatttatttttttgaatttatcaaatgtgggtagattttggattaattcccaaatggaaataaatcgtatgaattcgtccgactttaaggccgaaagtcataaaccttttttgtgtagtttctactttttatttatttttaacaaagttgtaaaaaatattagaactttaaagtttctaattttctatgattttaaagtcgtaaaatctcatatcatttttcaagttatgatatactcattttcatgtgttgtgcaattcatgtggtctctgtctatatacttcacaaaaaatgacaaaaattgtaatatttcttatgacttcaataaaaacaaatgtttacaaaatatatataatgtcataataaaaaaatttaaatacgttaaactctataaatttcaatcttcttcctttacacattttcatattttgtaataaaattagcattaatttttttatttcttattttgttgctttcatttttgaaaaaaatatcttattaggataattcttttatagaacatatccaaataataataaaaatcttgcggtctggtgcgtttgttgaaagcaaaacttagacgaagcactgcacgttaccattggcttgaaagcaaaagttataccaagcaccagagattaattatgagcttagaatgattcctgaacactccacatttttgtagcataaatcattcaagtcttacgtaaacatcttcacatatataaagagaaccacaactacaaaaaagaacacatatcgagtacagaaaaacctgctgcatgtggatcgaggaacgaagcactaaattgtacagatgtgttccaaaaagaaactgggggacgatatttaacgggaagctttcgtttagtctttttcaaaataaaaaatatatataaaatttgtcaatttattagacattaaaaaaatatcaaaactaaaaaagaaaattattatttcattagaaattgaatgtgaagaaaatttttatcaaataacaaacacaaaatttaatgatttattacatacctaaaatattttattttagccagacttattttaagtgttaataactaaagcaataacaacatttgttacaaaggcaactaccccataaatattgtaaaatgtgctatatgtagtagcggttgtagcagagcatggtgatcgtcccattagcaagtgcaaaataacactaaaactatagtagcttttccttttagttatatatatagcacaacgaagagaagaaaactatgtggagagagacagagaaagagagaagggcatggacttaattataaaatgaaggtcaggtgcataaatgagattaacggtagtccatgtgtgtagagttgtggactattatatcataacaagagtacacttcattaccaactgaattctctatggtatagtccatcttttctacttggcttatatattatattttatgctataatacattaataaaaaaaattagagatataaagttagtcggataattaaaaatttgaaaaaccataatcacaaaaaaatgaaaaaataaactttaaaggttggaaacatgaaaagtaaagaaacatttacatgaaataaatcaaaagttaattaaaaaattatatgaaatatttaaattaaaagaattaaatgtttttttttctatttataaaatagtatacaaaacttggaaagtgacgtcttttactcttcttaccatctctattaaactttcttaatattcgttgttttctctcctttaaaggtacatttgatacactatttttgcaaatagttaaaaaaaaattatctaaactttttcatactaccttctaatatgtctatctctaatttttttaaaataaattattaataattaaaaataaccttacaccatgcacagtctaaattgttcattgttgatttaaaatataatttatatatttgtatatatatttatttatcttggatttaattataatataatttatatattaaaagtatttattaatcatgaattttaatttataaaatatatatttatcctgtataataaataaactaaaatgcaagttctaaaaaaataccatgttataattttagtagaattactaaaataaaagttaaaaaacccatagataatggtgtgatcaccacaacacaacccatgaaaagcaagtgtgatgtgattgttgatcaccataaattttatatgatgccaaaagcttgtgcattatcgagatcacgggtacatgacttgtcgtcaacaacaaaatcaacatagttattgattaatggtcctgtgtttgttgttttgtgtgtccaagtctatcaaaatcattctttggttttgttttctattgtagattgtaggtactgcttcaatacatctttcaatcac

SEQ ID NO: 3384 - DNA, 4608 bp, Glycine max
  Intron number 3 from transcript Glyma15g36910.1 (locus Gly ma15g36910) derived from phytozome v7.0 (chr-ID Gm15; pos 42402112 to 42406719 reverse strand)
tctgcaaggatctgactggtatccagcaaattcaggtgtgtgaaggcaaatcttacacttatgagaatgaaacaataacaaaaatagctggacaaaccattgtatgcacttttttttgtgatttttaactcatcattttttttcttattattgaactagcaattacattactgtgtgcattgtcttgatgtctataatgtttgtatatggtaactcccttggcacaatatatccagctcatactcctcttgttgaccagtaatgtctgcttgagagtggttgtagaacagaaagattttcgtggtgtagaatttaattgatgattttgttgaattagaaaaatgtttaaggttaaattacttctaaatatctaatcaatctacacgggcaactatgtatacaaggtacaatactaaaaaatgtgttacatgaggaatcatttcctagactatagctaaccaacaataattgctcaagagtaatgacagctaaactaacactactcatgatacatatgcttaaatctaacatttaattctaacactatacctctaagttggagcatatatgtgacaacctttctacaaataaagtcaacctgagcccctctaagcctaagagatttagtaaatatgtaagttattgttggagttgaccgaaccaatagtgatctcaggtgcaagaacctttttttttccctgaaaaaatggtagtcaatatcaatgtccaaggcagctcggagtaaaaaatggtagtcaatatcaatatcaatgtccaatgctgaaggctgaagcaattccttaagttggttattactgcctaagctactcgacctttgcaatagcaatatgttctgtttaggacttctcaatgagattatgtaaccttcaatgaaaacacaataccttgaagttgatcttgtagttgatgataaacctgctcaaccagtatcaaaatagccaataatttgaacatttcctttgtttccataaagcaaccctttatctagtgctctcttgatgtatctaagaatgcaaaccacagcttctcatcgattttcacaaggagcattcaaaaattggcttaccacactcaaagcagaagtaatgccccatagttaatgttaggtaaagtagttgagtttactggcaagacatctatatccagtagggtatgtgagtggctccccctaacctggtaggagtttgacaatgggatccgtcggaatatcagtcagtctaaaatccagcatgtttgttcccgcaagtatgtttaatagcatactttcgtcttgagtgatggcagcacctccattagatttaacaacatgatatggaatttttttttgttggtaaaattgttggaaagctgccttactttggttacctgtagcccgcaagatagaaaggggtacctatgtagtggctggccagaaaagctaagtgaaacatcatagtgtggagtcactaggatactggctcctagtgagttgagagcctacatcaactagagatatgaccaatctagtccatataaagcttgggcaatcctcaccttagaagccagttttattgagctaggtcctaaagcccaaattctaagagaaatgatgtttaagtaaatgcaatggctagatgaagaatggtcgaacaatacagaaaggtcagcctcatgttgttatgccaacttgctagatgatagaattaaactttactgggtaagcatacagagggagcagtgtagttggcatactagagtcatgtgccctgacactgtaaaactctggttattgcatatatatctctttgtataacttactaagtaacaagacatccttaatgcctaacatgatacagttgccattaatgaatattgattagcagccatggctggaggtgaagtaaagcaattttgggccataggagaataggtatctctagaattgtgcgagaatatctatgtatatccttttcccactagataggatttaaggcaattaacttttcctacctagacagtagagtatagaaccggcaacaaccggcaactgttttgccaagagataaggggatcagttttcaattaccgattctattgacatgaagaccaaaggggacacagacataacaggaagaagataattgaattgacaagcataagaggattagagtttagagctgatgtgatacctttgtgttatgctatgggaagttccaatgaaggaggcaaagttggagaatttgatggagtaggagatgaaaataatggaccagaagggtcttggtgcagtgtgtttattttgtgtgtgtggttatttttagaaaaatagagagggttgaaacagcgggtgggggtgtttggaaagtagcacacacacacatagtacctggacaacacaggcaaggaaaaaaagggaggcttggatggagatgggtagactggggtcgagccagttggggtactctgttgttgatctaaggttgacaacagtgattgcagcaattggaaggtggtggcagctagaggttggcacccctgagagtggcggaagaagtgccataggttagggctcagtgccttgagggagggagggctcaagacgtggtggcaaattttatcaatggagaatggtgaatttttggatggtggtgggtcatggccataagccagaatctaaaatattaatatataaatgttgagaaaagctattaacatgctgtaggagatgaaaacatattctaggaaataaaatttaccaaaagtatcgcaaactcaagggataatatcataaattttgtaacgccactgactgagaacaaacaaaaaagtgagaagcaatgaacagagcatcaaaacagtaaggaataggtagatacaccaaatgcagagaggaataaaaccaagaataatagaaaggagggaaatagagaaagagactcagcacagatacgaacagagagaacagcaaaggaaatggtgaggaaacagtagagagactcagaggaacataggttagcataaaaaatcacatggatcatgtgctggagatggtagaggttttcagttttgcaaatgttgaggagttccggtgtcagttttatagtcttggtttctggtgcttaattaaaacgcatcagatggtatctgaacagtcagaactctttgtttttcatttaaagaaaatacttaactgccaccttttctggcacaagaacatgcaaaaatgcccatcataggtaggctataatgccaaacctggaatgctattgacataatatggcattttgctgaaaatcgactataccttagcaccctggtaccaccctgaccactatttgacaacactgcacactgggtgactcctaatatatagaatgagaatctttgaggtgaaattgtgtctctaatcagttcttgcagataactaattaaattatgtgcagtattaattcaataagcatcattatttagattagagctaataatttctgattagtaattactcaagagttagggacaacttatattactcattattcatgagcttaatttaattctaaaagtagttattctatgtgctgttgtattagctacaagtggagtcatttcccatattagaactaaccagcgccaattacccaagtgttaatgttagaaaatgctactcattaaacctaacatttaatattaacaaattgaattcctctatggtagggttgatatatgctatgcagcacaaaactgaagtatgttagacagaagtccatatttaatgggtccataattggagaaatgctgaatatctttagttgacgctcttgatcccctccgttttattcactaggttttgtttgtgagtatggacatatggtgcggttattgcttctaatgcaattttgcatcccttcatcttcagcgtcaactgtgtgcatgggtgtgttaggcaagaaagtcaaccacaatctgagccaagggtcttacgagtctactatagtagggaagaaaaggcccattaaatgtatttaaaacatttagaagggttagtgggctgtgagagaaaagcttataaatagaccattagtgggtaataggggattcatgggtacatggagttttgttagtttgacagggccatttccttgtgagaaaggagagtgctcctttgtatagtgctgtatgattcttatgcagtaaagaacccagagccatattctgttttttttcctgtctctttcctccttcatcctagctatagtctcttcacttccaatcaaacagattcctaacagtgtgtatctctgattggatgattaataatatccatttcgaggtatacccattaaattcatgttggtaaatgaagaagctctatttaggacgggctcaatagattttatatcctcaaattacctttttcaacttatcagttgtgtcccaaactgacctcgaatggtataaatactccaaggctttataaagtttatatactacttttttactgacctgtctgttgctcctcaacttttacattcactcacctattgtttgttggatttcttactgtatggttcaggtggacagaggtgttacattgagtgaggctctact

SEQ ID NO: 3385 - DNA, 1326 bp, Glycine max
  Intron number 1 from transcript Glyma13g20650.1 (locus Gly ma13g20650) derived from phytozome v7.0 (chr-ID Gm13; pos 24121864 to 24123189 reverse strand)
tggcagctctctaatcagttcaagtaccactctcttcccctcttttcaattaaatcaaacttgccatatctttttgctagggtttactcataggatataggtttttaaagaattcaatcatattttatagtgatatatttgtactcttgtatatttttatgtgtctgtgatagcattatatttgtagcataaattttatgtattgtgtttaatttctgcggttgagaaaatgctttttgaagtagtatctgttagcttgttatggaacatttttggtactaaaatgaggaacggataaatgctgctactttgatggtgggatttggtttttttccaagttgtaatttagccccagtaagtatatagggtgcgtgcattgtttagttttttttttaaacggtaaatgctagtttgttagaaatctcactgagagggatttgaacttgacacctcttcctcctcccttttcccttcacccttaggtgtatgcaacagtaatcattaaggagctttatactgctgcggagtacatagttgctttgtaatgtatgtattgcttacatttaatacgcaagaatctgcagtgatattttgggtttgtttggataaatttctccaaaggcacttataggagaagaaaataagaagaaaaattgagagtttctcttcaagctaaaattagcttatgaataagctaatttgtacaagttctcttatattcatttctcaaaaaattgacttttaacttatgcataagctaattttagcgtgtagagaatttcttttctttttttccttctcctataagtgcttatggaatggtttatccaaataggcccttggttccaatgccagtatgccactttcctgtcgcattattttcttcaatataaacaatgcaaacttaaactatgtaggagggaaaaagcccccagtccaatatgtttcaatatagctacaaagaaagaatttcatattcatatcttttacatataatgatgagttaaaaggtgaaaatgggtagctggaatgtaatgtatgctactagatttcaacagaaagctgaagaagaaaaaagggtctcatcgctttattacacatgtgtcttttgtggaagatagaagtatagctattgtttgctttaaggtcaatttggttctttcttcatttgttttcctatttcctgcttatgatatttgagttgatttgaaactctgcttgcaccatttctctcttctttagttatgatttagccttttgaagctttcttttgcatcaacggatttttacatttcatattctaagatcctttaatgtgcagttggc

SEQ ID NO: 3386 - DNA, 4454 bp, Glycine max
  Intron number 3 from transcript Glyma09g05640.1 (locus Gly ma09g05640) derived from phytozome v7.0 (chr-ID Gm09; pos 4424406 to 4428859 reverse strand)
atagtcttccgtaaggttaaccaaccccaggctagtgctttcctttgtatttgatcaaggtttaaaatttgtgacttcttcatgaaaaattatcaacaccagaatagaataacttgacactgaatggatgtgcagacattcttggttcttgcagctgtgatgtgaaaagtttagggttcttaagtaggaagcatggatacaatacaggacataggtatgaagctatgataaaagtataagagtccgatacaaacacagggacacaacagattcctaaaagtataagacacaacgacatggctgaggcatgctatataagaaaccatcaaaataacatatggttatacaatgtcatatcctaaaaaagaaatccttagcattaaatttggcatcgcaatggaaagtattattgcttgtacattaatttcttttgaaaatatagttgtttagaaggaaaaagaggtgctaaattctatttaaaaagaaaaaaaattatgttgtaaaataagcgtaactcacaaaattaagggagatgaatgcatacttttttattgaattatcatcatttgtttaaatacagatttattgtaacagaaagaagcaatgataactgacttcctaaataatgacaaaccactaacataacattaacaaaccactaacataacaattactaagtaacaaaaaataaaaaaactaatcttaaaaacttggtcaaacaattaatagaaaataacaaactaacatgcaactattgatacacgttcaacactcctccttgtatcagtggttgataagtccaagtttctctctttgttgcttaagatttaatgtagtcgtatccatgtctatctaaatgctctctttttcaacacacagtgactttgctttagtagctattcgtgtagtctccttgaaatttcttgtagcagtagcaactttcttttccgcttttagttctgagactcttttatctatgaaaataatcctttgcttgaagggtgatataccttgctggatgcttgattgcatctctttaaatccagagacaactttatttatcttattttctacagcttctaaatttaatttgagtcattgtctgctattttcatttttttctgtttaactaaagcaagaagttgttccaattcacccattaacacatcctttcttttacaaaaaatctctttttcttttttgtcattctggatttaatgctcactggtattattcaattcttaacgagtttcattcataaattgtgattcaatctccaactccatctttttaacctccaagacttcagaggatgatagtcattggtctatttcttttgaatacactgacgatgctctcttcatggcagaatctgcattatttaaagcattcgtgcataatggtcgagtgagattgtgcattgttcctcaacagctgcatgatgaaaatgacctaatcttttgtgccagacttttgtattgtttacagtgactgggataggctgcttgctcctccttcaatggatcaaatgagaaacttttgtctctcattttgatatggaaaatttcattgtcattgacatttttaatcaaagagtgcttattttcaaagatgactttaaaccccttctctattaattgtttcacacttagcaagttttgatgaatctgaggtatacaaaacatcataaattaatggttaaattatttttttagttcatatagttttacgattcttacctttttggtccctatagtttgaaagtgatttttttagtccctatagtttacattttaattctcttttagtccctatagttttgaaagtaacttttttagtccttataatttgtattttaattctcttttagtccttataatttgaaagtgatcttcttagtccctatattttatatcttaatttcattttagtccttaccatcaaaatataagtaatattatcaattacaattaactacaaaaatattaacaagtaattcgtaactaatttattgtaagataatttgtaataaaaaaaataattgatagtttataattaatttgtagttaattatttttatatatttttttgtagtaaagactaaaaggtaattaaaatacaaattatagaaactaaaaatatcacttttaaactatagggactaaaagagaattataatacaaactataaggaccaacaggaacacttttaaattacagggactaaaaaagaattaaaatgtaaagtataaggactaaaaataccactttcaaactataagaactcaaaaagtaagaattatgaaactatagggaccaaatgagtaatttaacctaaattaattttgtacctgcacaattttcaatggctacagttccctttccttcaaggatgataagatcaccattgtcaattctaacttttgatacatatgatttgtccaattctctgaaaacctcttgatcgtgggtcatgtggttggtacaaccactatccattagccaacatccccttgagctgctgcttgtaaaatatgttgctacaaacaattgctcttcttcttgttgatctgcaaccacctttgcctcctctgatttagacttgcatattcgttctacatgtcacatattgccacaatttttgcacttgacatctggcctccaccaacattttctttgaggatggtttgtctttttgcaatgcagacaaggaggaaatgtctcaccttgtagcttgttggagccttctggttttttgttcctccatttgttatttttcttgtctttgtcacctcttgaattttgtgtttttgtatgaaaagtaccttgtaccacctccttttgtctcatcattcttcttttctcttgggcttgtaaagcatttacaagttttgccaaggtaaattttgatagatctttagtattttccaaggatgtaatagtagcctcaaatctttcagggatactcacccgtattttctcaactattcttgagtcgaaaaaattagaaccaagcaatcttactttgttagcaatgctaagtagcttgttagcatactctttaattgtttcagaatccttcattttttgcatctcaatttttctaaccagatttagggcttgcattcctttaatcctttcatctccttcgtatttattttgaaggaaactccagattttatatgctgatttgatggtcatgattctagtgaaaatttcttttgagacagcaacaaacaaagtaactcttgcctttgactttcttgctttcctttctttttgattttttatctaagccattgttggattagttggtaagggaagaactttgttgtcttcctcaactgcttcccaaagattatttacctccagatgtgcctccattcttgctgcccaaatttgataattgtcaccatcaaacataagtggtgctagtgctgtgtatgattttccagaatccatttatcagatgagttgaagcaagatgtttaggtttttttgtgatgagtttcactcagttcactcacaattccttcttaagaagaaggctctagatactaatctgttgtaaaacaagcgtaactcacaaaaattaagggagatgaatgcacatttttttattgaatgattatcactaacataacagctactaagtaacaaaaaataaaactaatcctaaaaacttggtcaaacaattaatagaaaataacaaactgataggcaactgctgatacatgttcaacaagtttatataaaataggaaaaaatgggtaatatgggatggaattgattgcctatggttgcaaaggaggaagagagaggttttgtacattatttttattttttatgaaggtataaatatattgtatatgtatctgtatgcatgcaactcttcgatcatgaactccctgtatgtcacaattcagcattctgaattcacctaatggaatgtcaaatttgaattcccagtcccttgcattattgagtaacgactacaaggttctaaaattatgataaatcttgccccttgtaattcatgtgtagctaaaaaagcattactgtagtcaactttaaacaaaaaaattatataatttaggtaatgtaatgataataatttcatctctgttcaaagaaaataatatatgaagttagaatatacgatacccaagttctgggatggaggtagctgtataatatatgtattggcatccagtatgggtacattacaaatacgttgccgattttgaagtatctgcgtgctaagagttttcattattacactatcattgttgttgttattattttcatttggttgttctgtgatgcttctattctatccgtgtgatacttgtctccttgcattataactcttacgtaaattctgactgatacctttttctccaagttcttatatgttctcatatatgttattacttcctttctattaccatagtt

SEQ ID NO: 3387 - DNA, 6475 bp, Glycine max
  Intron number 3 from transcript Glyma18g40600.1 (locus Gly ma18g40600) derived from phytozome v7.0 (chr-ID Gm18; pos 49259188 to 49265662)
tgctgctggttgggctcactgcgcttcggtcactggtaatgcttcttgttcttttttgattcggtggttaagttgttcatttggctcattctctgtatagtttttttttttttggcaaggggttaaacaagaagaattttaataaatagtaaaatcaatagcatacacttaatattaaagttattaagactttgagagaaaccagaatgaaaaatatattatttgaaattcttaagttccttgtccgtttctctaccccgcccctcttccttcgcttcaatgtctagtttctccttattcatttctatatatgaagaatggcttactagtaaccactaactatgggggccgaacacatttggtagcctgaggcctcttattaaacttcatctaattttttatttgaaattttgtttattcatttgtgaaacaaaattataaatcaaacctcctgaataatcaaaataacttgattattcaaattgattgtttatatagtataatgctactttgtttaagtgcttcaattgattgaaattacttttaaagaaattgagttgtgtattaacaatagttaacagttaataagaagatacaagagcaatgtagataagagagttattcagaatgaaggaaaagtagataaaaataaataaaaagtgagtgaatgcttaagtttaaaacaatcttattggagttttaacttttgataactattgggaattgagcatagtgaaagagaatttgtaggcaaagataaactaggaataaaaagtaaagctacttcatgatagttattaagcagttgtttacttgtttaataggaagtaaagataagagatagaaaaggagtgtaatataaggtatttgttgaatatttctttattttttgtatcttgcttctatatggagagacaacagggttaggttattttgtatgtgagttgtctctctcttcttatgtactctatatatatcttgtacgctgtcgtccgccgtcgcgttgccgtcgttcgctgccatttttctttggtgacagtagggtttggtgcgtcttgagaagctcgacctaaccccacaagtcgcgtggccatccggccacccacgcgccgccgccagccgctgcttcttctcgcgcgtgagcgccatgccctgacttcctgacatcggaatcttgccagaccggcgccgattgtctcgtcagcctcccaggagtccattccagccatcatttttcagttttgacacgtggaacgtgttggccttgctcttctttcctttttccacttttagggtttgtgttcttgagtagaaatggctttgtctggacttgttctctccttttccggaactccaacaatcacaacagcaaaactcaactggaagaattatttatcttggtcagcttcagtggagctgtggtttctcggccaaggccaccacgaccacttggagaaaggtgttgatgttgttccaaatgataaaaggtctgagtgggaaaagttggattataaactttgtgctgttctatggaaatctgttgagccagacgttttgaagatccttagatcgttcaaaacatgttccttctggaagaaagtctgagaaatctttgccaatgatattaaaagcctgtttgatgcaaccatgaaggttgtagcccttaagcaaactagccatgacatgattgcacatataggtaaagcttgggctgcagtagaagagctgaagaggttccttgtgggtgattcactggaggaagtgaataggaagctggataaattctacatggttcttatcttgaggagtctacattcagactttgatcatgtgcgtgatcaagtgcttgttggagaccaagttctatcgatggactctctcatcactagactgcttcgtgtgtctcatgtgttgaaagatgaaaatctagctgatggggtggaaacatcagccatggttgcatctcgtgggagagggggagatcgtaacagtagaggagaccacagtggaagaggtggacgtcctcaatgcacatattgcaagaggatgggccacactcaagaaaactgttattccttgcatggctttcctgacaaagtagcccaggtagctaagttagaaaaatcagagtctaggttttctgatgaggagtaccaagagtatctgaagctgaaatttgagaaatccagagccaagcttcatcttcctcggtaccatgtttttcaacagcatgtatttcacaatcagttgaaggctctagtccttggatacttgattcaggtgcctctgatcatatctctgataataaatcttctttttcatccatttcttttcccaaaattcctcaccttgtcacagtggctaatggttccaaagttgcgtctcaaggaagtggtcaagtctcattacctccttcgttaaagttaaattctgtcttgtttattcctcaatgtccctataatttaatttcattgagtcagttaactcgttcaatgaattgctcaataacctttattgctaattcttttgtgattcaggaatatggcacgggtcgattgattggagaaggacgtgaatcacgaggcctttactacttagaacccaactttcctatgtcctgttttgcaacttcaagacccaaatttttgcatgatcgcctaggtcatccaagtctgccaaagctgaaaatgatggttcctaatcttaagaatcttcaattcttaaaatgtgagtcctgtcaactgtgagtcctgtcaactagaaaaacatgttagatcatcatttcctctagctgtacaaagatgtaactcagctttttctaccattcattctgatatttgggggccaagtcgtgttacctcttttgattttcgatattttgtaacttttattgatgaattttcaagatgtacttgggtctatttaatgaaaaacagatctgaacttttacctatctccatgtcgttctttaaagagattgaaaatcaatttggaaaaactatcaagatttttagaagtgataatgctaaagaatatttctctcatgatttgtcctcctttttgtcttcaaaaggtattctacatcagtccacatgtcttcatacaccacaacaaaatgatatagcagaaaggaagaatcgtcatcttcttgaaattgcttgttccctaatgctaaattccaatgttcccatacaccattggggagatgcagtgcttactgcttgcttcttaatcaacaaaatgccttcatctttccttgaaaaccaaattcctaactcaattatttttcctcatgatccattgtttcatgtctctcttaaagtgtttggttgtacgtgttttgtccatgatctatttcctagtttagacaaactttcccctaaggccatcaagtgtgtctttttgggttattttcgttttcagaagggttacaaatgttactctccaacaacaagaaaatactatatgtctgcagatgtaaccttatttaaagacacacccttcttctcacctttcatggatcactcttcttctctccagcaagtccttccaattccttctcctagtccactagataactctgaccaaaatgttagtgaagtcccatattctccaccaaatctgcctgaagttgctcctccacctcttattacctatcaacacaggacatgacaagttgattctacaatgcctgagccttctcgtgattctcatccttctccaaccaatcctcaaaccatggatccttcttcctctcatcactctgattcagattgacccattgccatcaagaaaggtactcggtctactcgtaaccctcatcccatttataacttcttaagttatcatcgtatgtctccttcatactcttcatttgttttctcgttatcttctcttaatgttccttctaatgttcatgaggcacttaatcaccctggatggagacaggctatgattgatgaaatgcaggctcttgagaataatggtacttgggaacttgttccttttcctcctggcaagaagactgtgggttgtagatgggtacatgcagtcaaagttggacctaatggtgaggttgatcggcttaaggctcgattagtggccaaagactatactcagatatatgatcttgattattgtgatactttttctcctatagccaaaattactacggtccgtttgtttcttgctatggctgtcatgcgtcactggcttctccatcagctcgacatcaaaaaatgccttcctccatggtgatcttgaggaggagatttatatggagtaacctccagggtttgttgctcagagggagtatggtcttgtgtgtaagcttcatcgatctctctatggtttgaagtaatctcctcgagcatggtttggtgaattcagtcatattgttcaactttttgggctgaaacgaagtgaagctgatcattctattttttattgtcatacatcccctgggaagtgagtatatctaattgtctatgttgatgatatagtgattatagggaatgatactactaagattgtctagctaaaagaacacttgttcagccattttcaaaccaaagatctgggaaatttgaagtacttccttggtattgaggtggctcattcaggagatggtgttgtgatctcacaaaggaagtatgcacttgatattttggaggagacaaacatgcaggattgtagacctgttgatagtcctatggatccaaatctgaagctcatggcagatcaaagtgaagtttttcctgaccctgagagatacaagagacttgtgggaaaacttatttatctcactattacaagacctgatatctcctttgctgttggagtggttagtcagtttatgcagaatcctcatgtagattattggaatgctgtcatgcgtattctcagatatgttaaaagagctcctggacaaggattgttatatgaagacaagggtaatacacaactatcgggatattgtgatgcagattgggctgattgtcctatggatatgagatctacatcaggttattgtgtcttcattggagggaatattatctcttggaagagcaagaagcaaactgttgttgctcggtctagtgtagaagctaaatattggtccatggctatggttacatgtgagctaatgtggattaaacagtttctccaagaattgaaattttgtgaagttgtgcaaatgaagttattctgtgataatcaggctgctcttcacattgcctcaaatccagtctttcatgagagtactaagcacatagagattgattgtcatttcattcgggagaagctattgtccaaggagattgccactgagtttattaattctaatgattaaccagcagatattttgacgaagtccttaagaggacctagaattcagtacatttgttccaaaagcttggtgcatatgatttatatgctccagcttgagggggagtgttgaatatttctttatttcttgtatcttgcttctatatggagagacaacagggttaggttatttgtatgtgagctgtctctctcttcttatgtactctatatatatgtcattcaaaaagcaataaagctaaagctaaaagtgagacaactttttactcactaaaatatcaaaagcttcaactgtattaaatcaggaaagtgagaatataatatatgtggcatcttttaattattttaactaatagaggtaattttgtaaatatattatcactaaacaatttttatatattttataactatctaattagtataattacccaacaatgctaattaaaataggatgaaaggatttttcttcccttcaatgagatctgaaactgatatgtatatatgaaaattacagaagcagatgtgtggtatgagaacaaagttttaacagtttgtaaaacatgtatatggagacacttatctcaaatgatgtatatggaatattgctagaaagttcaacgtgtcattaaatggaatatggttgaaaactttagcgtgtcgatagatttttgtacattggttaccatttaaaattgttaattaaagaaagtcttttctaagttagctgcaaaaattgtgttttaggcaataacgaaagtgggccatgcttgaccaataatgtaagagactaaacttatttaaccatattttgcatgctttttggtccttctaaatatcacaagttgtaaaatggaagactaatagatggattatatggggaaggaaaacaacctacaaggactagattccaacttttttaaaaatgtgaaacagaatgggaagcttatgatatttagagggatcatgaacatatttaaacttaatcattatgactcagtcaacttggcatttataatattttaaagaacaactagagtcacctcatagattacctgtgaagcaacggccaatatatgatactaatgctttgctaaggaatatactgcttcgtctacagaagaaggtgaggtgt

SEQ ID NO: 3388 - DNA, 5014 bp, Glycine max
  Intron number 29 from transcript Glyma02g48070.1 (locus Gl yma02g48070) derived from phytozome v7.0 (chr-ID Gm02; pos 51508446 to 51513459)
gggacttttcggcaataatttcttcgtctttaaaggtttgggcgtcaatggaattatgcatttttacctgagttgttttggcattctggatcaaaaaaatgtttggaatatggcgtactcgttttttctccttgtaattttttttatttgaactgcatttatgagccttttcctaggattgactctactattactgctattattgttattgttgttgtttgttattattgttcttgtgttattatagaaaaagatgagagaggcagagagaaacaatcaactatgctgggaatgggcacgctcaacatgatgcgaccacaatggcaccatgacgagggaagggaaggagcaaaaactggagggatgcatccaatatatattatttctacttcacacgttttttggaagatttgggggaaaaagacttgtggttcgagttcaagaagtggggcgatgtcagggagatcttcattgcaaggaacagaaacagaagcagtcggagatacggtttcgtgagattcaaaggggtcgatgatgtcaggaaactcgagagataacttgatcctcggaggattgaaactacatgcgaatcttccaaagcatggaaaggaatggaaggcgacagagagagtcaacaaggatgatcagcataagaaggagtcggtcaaggagaagccaattgagaaagacgaagataaaggcaaggtgctagaatagtacacgacactggatagaggattacagaagcagaatccacaacgagagatagaatttggttggtacgcgaaagtgatcgcaataggtagcaagatatggtgaaaagatggatattgaggtatgtgcaagcaatgaggatgtgccttgtgtggggcaaaaatttacctggtagagaccaaatgggacagccaaaagcaaattagacaggatccttgtctccgcagaatggttttccaagtggcaaggatgcactcattttatcatggaccgcaacttcttagatcattgtccaattatgttgagatccattaatgctgattagggcccgaagccgtttcgggttcttgattgttgttggtttgaggataaatcttttaggaaggtagttcgtgaatgttggatggacaactttgtaaatggttcggggaggggggggggggttcgttctaaaagaaaagttcaagagattaaagcagaggttaaaagaatggaataaagcatagtttggtgatatctagtagaaaatgaaaagagtgaagatgaatcttaacaagctggaaaaagaaggagatgacagacaactgaatgacgaagagataaaattgagaaagtaattgtaggaggagctttgggtggcagcactctcaaatcaatccattatgaggcaaaaggcaataactaaatggattgaggaaggggattgtaactctcggtattttcatttgattgtaaattggaaatgccaatacaacatgcttagaggagtgtttgctggtaaatgctggttagaagaaccaagcagggtcaaagatgaaactagacaattcttcaaaaggagatttaaggaggtggagcgggagaggcctaggttgaatcgggtcagatttaagactatctgtcagcaagataatgatcttttggtggcgcgctttgaaaagaaagaagtgagggctacaatgtgggatcgtgggaatgcgaagagccccggaccggatggactaaatttcaagttcatcaaggaattttgggatattctcaaaacagatctgcttcgctttctggatgaattttatgctaatggagtattcctgaaaagaagcaatgcattcttcctagctctaatccctaaggtccatgatccttagagcctcaatgaatacaaacctatctcattaataggttgtatttataaaattgtggcaaagttgttatctggaagacataagaaggtgctgccaaccataatagatgaacgtcaaactgttttcatggagggtaggcatacgctgcacaacgtggttatagccaatgaaatcatggaagaagcaagaaggtataataaaagcttcctagtattcaaagttgattatgaaaaggcatatgattcaatgtgctgggattttcttctatatatgatgagacgaatgggcttttgtagcaaatgggttagatggattgaaggatgcttgaaattaacctcaatatctatactggttaatgggagccccacagatgagtccacccctcaaagagagaactcaagtaaggggactcattagccccattcttgttcaatattgtagcagagagtttaactgaattgatgagagaagcccaagagaagaatttgtttgaaggtttcttggtaggaagaaacaatgtggacatcagtctattacaatatgttgatgatacgattttctttgggaaaacatcgatggcaaatgtaaaaacaatcaaggtgatgttgaagcgctttgagttggtgtcggatttgaagataaactttgacaaaagcaaattttgggcgattggaatgtctaagcaatggaagcataatgctgccagctatctaaattatagattgttgtcagtacccatttcttattcgggtatccctattggggaaaacccaagttgtagtgaaacatgagatccaattgtcaagagatgtgagagaaaattgttaaaatggaaacaaagatatctttcttttgggggaagggtgactttgttaaagtcaatcctgaactcaattcctatcttttttcaggtttgtaaagaaggttttttttttttttggaaagcaaagctatattatattaattaaaacagtaccagaggtactacaagatacatgaatagagtcctataaatcatgagaaaaaccgccctacacaaacagcaccctactagggatcacactagctaaaagctatagacattcctgaagaccagcagtggaaaggagtcttgaagtctttttcccaacccctcagccaagtccataaaaggaataagatgctatctgtcaacttagagatgtcaaaggattgattatggaaaatcatatcattcctgagtctccaaattgagtttgtagctgctacccaccacattttccatcttttgttagaagcctttgtaaagaaggtggtggataggctggtgaggttgcaacgctggtttttgcggggggagggggggggaacgggtaaattgggagacaatttgtctcccaaaggagaaaggtggcttgggcgtccgggacttggtaaaattcaactatgttctacttggaaaatggcactggaacttatttcatcaccatggagaattgtgggtgcaagttttggactccaaatttggaagttagaggaatttggatgagacaagaaggaacaatagagagcctctttggtggcgagatttaagcattatttgcaactcgactgaggagggggggctagtttaaaagtgggacaaatggaaaattggatgtggatcaaaggtgaagtttttggaaaatggggtttcattgttggagaagtacccaagaatgtaccgcatttctcaacagcaacaacaatatatccagtagctaggagtggcaacaaacggagattgggaatggcagttccagtggaggagattatttttggagggtgagatagacatagctgcaaaatttatggaggatatagagggcgagccctggtgcagcggtaaagttgtgccttggtgacttgttggtcatgggttcgaatccggaaacagcctctttgcatatgcaagggtaaggctgcgtacaacatccctccctcatactttcgcatagcgaagagcctctgggcaatgaggtacgtagtttttatagagggtctaacagtacaagttcagcaacaagacatttggatttgggagggggacccaagtgggagctacacagtggggaatgcttacatgttgctcaatcgatatatgatagatgaaaatcatggcggagcatttactgctctatggaagctaaaaatcccaagtaaagcatcacactttgcttggaggttgattcaggatagattgccaacaaaagttaacttgaggagaaggaacatggaactgaacgatgtctgctgccaattttgcagaatttgcaatgaggatgcatctcaccttttctttagttgtgtcaaaatcatgtcactatggtgggaaacattgtcttggctaaacacagtggacgtcttcccggaagtactgagagagcacttccttcaacactcctattgcaatctcaatggtatcagactacaaagatgacaaacttggtggatttctctgacctagtgtatgtggtaccataggaacaggatagtcttctcaaacaaaagtttcaacaatcaaaaattgatggatgatgtgttatttttctgctggacatggcttaaaaatatggaaaaaggatttgacattccttccattcctggtctagcaacatcagggttgggttttgtgttctgggggattggattatagattttttgtggttgggatcctagtttagatacagatctatggttgcctaatacctgcactaaagcttgtattaggacaccatagctccgcacataatgactctaggatgtatatacaacttttccacttgtactgattttattattatatataatatatacatattttttgccgataaaaaaagaattgttcgtgttatttctgtctttcaccaatctaatatttcatttgggagtccttgatttcacttgacctttgagtctcaatctctgttggtattgttagctcatcactttttatttgaatgtctctttgttgatattaagtttataacaaaatagtagatgatatcattatggatctactttctattttctcatccttatgaagcattttgtaatggctaaaatcgtacagtgtcccacattgttgattcttttgtggatcaccacttcttgttgactaagtttctcttgtgcag

SEQ ID NO: 3389 - DNA, 4697 bp, Glycine max
  Intron number 1 from transcript Glyma11g16040.1 (locus Gly ma11g16040) derived from phytozome v7.0 (chr-ID Gm11; pos 11703708 to 11708404)
aaggaggagccccaatcacctcctcttcgttccaagtaattccatttccctttgctttttcacaaagttgttctaattgctttgtgctttcagtgtttaatttcttgggttattatttttttagtgattttggtttcttgctgtgagatatagcgataatttttctgtattctttcgcaattttaattttgagatacactggcttgtgttgtagttggcatttttagctttatagattcttgtcttttgtttgcactttatgcattgggaactgacacaaagaatgatgtgtattcttagaatgtgagttttatctaactcaaccccaaaagttagctcatacgcaacctaggagaagaaattgtttggtttcttagacctgctaacttatctgaaataaaagttcaatgttggagctttgcatatatagccgattgcatatggttagctttttggtttaatgcaatttttagctgaagagacaggtggggttgggagtgggggatgatccctgctgaaaattccccattagaaacacaattaggaagtaggtggggttgaaaacacatgacatgtcatttctattaaaacttttaaatggcatattcatagcttgcagtttggtagtatacacaaactcattgttctggcattagaattctgcatgcgtttgcctataatttcttcaaggctctgtctttgatggatatttaaagagatttgttttattttgtgttgtttgcattttttgcaattctttcttggggagaaagtatataaccatcacaatgtagcaacagtttgttacagaatatttaggatatctttcttgatttgtttcattacctaattaactggttaggcttgtactagttctactagtacttttacctaattaattaatagtataaataggagtattaggttaaggtattgtaatatattatatccatcaattatattttcagtatttttgtgccatttttctctctttcccttttttcccaatcctaaacctaaatattcaacaccattgaaactgtttactggtaagaacagtattgcggcatagcctgatgtgaacctgagtaggagcggatcgcttgatactggctatggaggtttggatgacgctacttctggtgaaggaagataagtcagggtagacgccacttccggtgaaggaagataagtcagggtagacgccacttccagtgaaggaagataagtcagggtagacgctacaatgattaccttgataagtctgataattggttcaacaaggaacccagagagaaactctcacccaattttatcaaatgccaaaagtttttttcattcaaaacaaaaatcaatatttatagtgtgtctgaacaaaaagataaaaataggcatggaccttctaaacagtttgggctaaaattacaacaacaacaacaacaacgccttatcccactaggtggggtcggctacatggatcaacttccgccataatgttctatcaagtaccatacttctatccaaatcattaagttcgagatccttcttgataacctctcttatagtctttttgggtcttcctctgcctcgaattgtttgccttctctccatctggtctattctcctcactacagagtctaccggtcttctctctacatgcccaaaccacctaagtctattttccaccatcttctctacaataggcgttactccaaccctctctctaatagctccgtttctaattttatcctgtcgagtcttaccacacatccaccgcaacatcctcatctccgctacacctactttagtctcatgttggctcttgaccgcccaacattctgttccgtacaaaatcgccggtcttaccgcagtccaattgggccaaaattacaataaaaataaattataactaaaaacatatttaacttgggccttcaaattagtttgggccttcagcaacaattaattgtcttgatagtgtctctgcctctgggccttcatccttctccacttgggccttcatccttctccactcgggggctttgtccttctccacttgggcttcgtccttctccacttggacctttagcctgtatttggccagtttcatgattctcatcattagcctaaaagataatgttttgtttctaagaactgcaacaaagactgaaagtaaatgcaggaaatataaagattattggtcatgctaacttattcaactacaatccaaattttagccaagttagggtgggggtgccgatccttgttaaggtttcctattacaaaggcaatgtgtagattttgcttttgaattgtactgtagctcatattcatgacagattctatggcagaccagcatcataggttgtgcaccatgcaccacaattcacaacttttagattcatctacggtgcaaagtcgtatcatagacccttcctaccaaatcatctcctacttcccttccttccttcatggctgctgctgctgccaccctccttctatgctcctgctgctgccaaacgccttacatcgttggtcaactgcttccttcggagatcttgtatgacctatgccttcttgtcttaatttcctctgcatgtgagttttgcggtcctaaggcaaagactaatttcgctctcccttccaaccatcgagtcctccagctgcaaccatgatgtcgccgctcaacctgaatctcaccccctctgcccaacctgaaccacacccccactgccgtccccttccggaaccagttaccatttttttttcggtgcagcgctagtggcctaccaggttttatatttcgacattgtcctacacgccagcatggccgatccatgtggctttgggtttggttacaatcatcaccccattgccgcaattgagttccaccacgtgatgacaagtgattcggacttgtcctccatgatcgatttgaaccataataaaggtgatgttaacgggaccagttctagaatcttctatctcgaccttaaccatcctccttcacaagagatcacttgatctgaaatggattatgaaatttctcttaagttttttttagaagtagataaatctctattttttagcgagagaggaaccactgttttatgctaatgtttcttaaatcaggaaacgattcttcggtttttattttgttttgattgtgtaagtgtgtaatgtttatggtttgcagccataatttggtttaatgaaattaacacgaaatgtttgcattattatgattgtgatctctgattggtttggtggcaactggagtgcagcagtggtggacgtgttggaagggaggaaagttggaagggaaggatataatttggtagggagagtctatgataagtgttgggaataaggaatttaatgtataatgatgtgataggatacaatatctgatttaaaggaaactgaatatcctctaattatgtgtaatcaatactaactatctgtataaacaagcatccgctgtgtactttgacacacggtttcagtctattatccctctatattttatctaattttacaataagactttgcaccagatgaatctaacgggcgtgaattgtggtgcatggtggcacctatgatggtggtccaccctagacactgtccatattcatcatagaactttatggtgttgtttgatccgtgaagccaacccacctcgtgggaaaagacttggttgttgcatttgctgcttataatgctttggacatcttttgagagtcataatttatccctgaatatttttggagtgtttcttgctgaatcattgtgcaactttaatgcccttgaaaagattgtgcaattttcatagaaggaagagggagaagattgcattgtctcagtgtgatttataaagaagcctttggtgtttacctgatttgagtttagtgttaaaattcactggttcactgtggtttatatatttttagcttatctgtgaaagaattttcatgcaagctctcttatgttgtacttctatggtttcttcaggggtctgtctttgatggaaattcagagagagcagagagcccttttctgctcatataatttaatttttacattcctttttctccccatgcttttgtgctgatgttgcacaatgatttcttttgggaaattacaaaataggaaatttcggtaaacggaatttctaatctaggaacatataaccattcaagcactcaagcagtaatgaagtaaataagtaattgctcattaacctcttctaaaaatctttgaccaatggagtggttacttgatcctgagtcacatcgtaactgcatcagtgacccatgtatctcttctaattaaaatttcattgtcatgtaaagaaaatggaacgtaactcttttcatgatttttgtgtaagatacatcatacatgttaaccttaaagagtctcatcataactacatcagtgagctagatcccataaaaattctgctttcctgaaaagtacaaaagaaaggacctggagataaaggcatgttttatacatgtgtgcatcagtgtgtgacacgtctgtttttgtcgtcttatgcaaagtgttaacaaacataaactatagtaacaatgtatcgtttcacctttcttgaccaacattgttctctattctcaatattaatgcattttcaatgtgtaggactaaatctggatcttcatctaaccagcagctag

SEQ ID NO: 3390 - DNA, 1432 bp, Glycine max
  Intron number 4 from transcript Glyma01g35230.1 (locus Gly ma01g35230) derived from phytozome v7.0 (chr-ID Gm01; pos 47778667 to 47780098)
tctactcttgagaagagtagacagtattctaccatgtaagtactctactattttcataacctaccaaaaatttgattgtgtacttgactatttgctataagatcatacgttatattactaaattaaaatgggactgtagaattaaaactcttaatcttacatttgtaggcttaacattttcaagacttaacactctgtatctctgttcaacttttagttagttctttgatagatgccaaagaaataatataatgtgtataccgtaatgcaaatcctaggcctgtatcaaggtgataacgggttctgaatgctaaagaaaatgaaagaacaaagtggtctaggtaggcaatttgagagtgcccactatttcccgaaagtcaactaattgccaccttcctctcaccatcccactgttgtgttgtatagcctccataacagaattctcaaactccccatcttacttggtggcagctcagtagttagttacgtcggaattgatattgcattctctctctctattagctatgatttcctacggtaaccccccttttacccttttgtacatacacccaagttactctctgggtcctaccattgttttttaatgtaaacacttaaagtgacaaacaaaaaagacccacaccgttgatgtagttctttgtggccacttgaaagtgtgaccaggtttgtttatttgaagatggaaaataaacttgggcataggttggtggggatttagatcaaaaactcaaattcataggttcaaccaatcaattcatgataacaactccttgatatacccaaaaaaaaaacagcgatgaatcttttttcccccaatcaatcttttggtccatgtataaaattggtagttggcatttttgttcaaaaggtttatgaacaaagaattagatctttctagataggaagtggtgagatagagtcatttctcatggtaagcgtatctttttgaagaaaaatatgataagcccttctgatccttacaagtcagtgatgttgattttgtattcaatgaaaggtattgaaagctatttctatcaacgttaatatgtgctattgaaagctgggcaatatgctatttgttttctgagtcattatatcctatccattaaacaaaccttgtgggaaacaagtctcgaatgagtggtgaatttgatttgagatagtcctaggtggtcatagctccccaatcttgtcatcctgaaagagccagtgcccagtgctgtcattgcttccatgacagtaaagtattgccgacctaaatttataaattgttcatagtgattttttctattgacatatttattatatctgagtagcatatcatataaaatataaatgtgtagtttaattataaatactgtatttttatcaaacaattatttatatcatgtattgatatcctatcagggcc

SEQ ID NO: 3391 - DNA, 742 bp, Glycine max
  Intron number 11 from transcript Glyma18g04400.1 (locus Gl yma18g04400) derived from phytozome v7.0 (chr-ID Gm18; pos 3141019 to 3141760 reverse strand)
aaggggtggcacatctaagagtttaacattgtcggtgagatttttattcttggatatttactatgagtagtttagtacttgttgacatacccaaacacatatattttctatgggaagggcatcatggtgatctacttgcaacctccactctttttgaagagaggggggctgaaggaaacctaactgtataaaatggtaaataagtcaagagcatcatcaaacttttactttgtatatccttctaatttcatcaaaacttagcctgtgaagatctgaaaatacatttaataatagaccagaattatactggtttaacaattttgtttgaaagcaatacagtggccagatagtaattttctgaagattttgtgattctttaatcctttgtaatcaaatgcatgataattataaatttgggttcgaccgacttgtggcctgaccacccatcaaaagaggtttattaaatatggacacaagatgaaccaaacttagcactctgcatcgtgccagccatgaaatagggaaatatttacccatgaagtaatattgaacagaaagaatctgatgaaagcataaaagtaggtccttagttgctaacatgaagcttgctcaagagttatactggctgcttgaataatgattattgaaaatccaattattgcttaccattttgctaacttttttttttaataaaattttgtatcaggtgcaagatttgcactcaataacgcctgattatttc

SEQ ID NO: 3392 - DNA, 5830 bp, Glycine max
  Intron number 1 from transcript Glyma05g28520.2 (locus Gly ma05g28520) derived from phytozome v7.0 (chr-ID Gm05; pos 34340788 to 34346617)
aagtggacttattaaaaaaggttaatatacttttcctacactcacattgtacatataatttgacatagatttaattgtgatgcaaaatggagttctttgtgaattgcataacgttaaatgtatattgatagacttcattttctgaatggaacatataaagtgctgaattcattcatgttcgaattaattttgtactccttaatttttcatctgtttcttaataatataaattcaatttgtttggagttcattgtaaaattcttgcttgaaacattttaattggcctcttttgtactatcacaaattatgaaagtatcagatattcttctgtatgggtgcaaatgaagatgattggaggcttacatagttacattacagtatctgttttggcctacagttattagtaggggttgtgcactttgttgatggaagttggttcacgtgatttactggagtttatctgtcttatatgtttataagatgttaggtttccagtgctgtgtccaaaattttgatttttggactgttatggtatgtactcctgaatatataagtttcaagaggatttagtggagaaattatgtcattactggtgatcagtgttatcaatggcagatggtggaaggccaaaattctgccatataaacacgccattgcgccttatggcgctgccatggagggcgtcccttcacaaattgaatatggcggttggtaagaaatctgccacgccattccgccatggccgctatttaacaacactgctggtgatgaggaagggatattatgatgattaaaagtgtatgtgttctgcttgttctatgcctgttgttggcaattttatatattttttttgacagcaggtcataggattttagtttttgaagtgaatttgatttgtactttcatgttaaaacttagaagtggaggtatcatttacatatctatattattttggcatgcctgtcaaagtaaatacatagttacattccagtgcaatccgtttctcataatatatgattttgttatggattgttttgcttgttttgtaggagtatgggctcttccaaacattagcctgtgattaatattgtataagtaatcattggtaatcaagttaggagtccttttgttgtaaaatgatgaactttgtgcttgatggtgtgccttggcaccttaggtattgaagcaaaaatttagtattagtagagattgtccatttatatttgggttttggagattcttctaatattctttgtaataattgctgatttttttttttttttgaaagcaacatctttgaatatccttgatattgtcagtcatagaacaaagcatttcacttcatctaaaatggatttagggtaaggtcatagaattataatcatttttggggttcaaattgacttaagcaagttgtgggaaattgcttgttctatgtctttgttgaaataatagctgtgaagaataaggacagtccatggttagatatattatgcttgtatactcaatgggaggctaatcagatgcatactctaagttaattacactggtgaaaattggttctagatattcttgggcccaacccaaccaattgattttacacaggtgggactgactcgactgagaagatgaagatcaagaattcacattaatttgattgtaaatagttgggtgtgtgattttgtataaataattctgactatttttagtttcttgtttttggcttttctacctgaacatactttgttgtgattaccaaggaaaatttaagtaaaaccattacaaaataccttgatctaaaaatagccttggcaaaagctgggtttttgacgtagtacaatggcatggtttgattcttgtagcagattccaactattgggaaaaggcttttgttgttgtattcttagatgatcctataggaaattctgagggtttgatatatgtaaaatatacgaactgtttaatctctggttagttggctaccatgacttcttgaatcaaacatgactttttttcccctttttttgagctccattatactaattttattcaaatctcttgatttaagctatctatctgcacaattcaggagacttctcattctttctgttcaaagaagaaagagaaaaaggaaaaaaatatcattctattactcagcgtagtttttttttttgccttttcttctcctgtgattttaatggattttaatcaatcatgaaccatttattgaatggtagaagattttctgctataagtcatatcagtgaaattgtgctagtttattttctccaaacatttaaaagtgttcaagtttattttgtggtgaaactagaggttgctacaatgtggtgatcaaggtgggaaattttgtataatgttcttgtataaatttttctggttacatcaatttatgtgccccttgagtttgtgttatgtttacattgattagattaataagttatatattttcagggccaactatgatttactaatgaaatcatcatttaagttagggatggcaatcaattacttcaggttgattttatattagaaagaaatgaactgattaatattttgtgaagtatctgcattaaattctcaatttgactgacaatgatgctagtcaactcttccccttatcattcttcttgttaggtgacattcaaaattgttagtgtagcttttctttttggttgatatggtgtacgtttttaccctatcataacattattgattatcctgatacttttgctgataaaaaaaaaaattattgattatcctgtgttgtcaattcaggatcttagttatttataatgagccagctatggtgctctcaagatacttcttctccactattgtattgcaagtttcatgaagtgctactatataaaaacgcaatgggtgccctaaaatttctgattgtgtattgatgcgagccccccttctcccctggtccccccctttttttttgtctgtgatgcttctctgagttcagcagtgacctctgggcctcttcatgggtagtgactctgtctctttgatccatgctttatctcctgttcccccacaatgcctctcttttccttgctggactggacttccaccaacccattgatatttgactatctggagagactggctagtggccatgtctctttttctgataatttttttatttgtttctttctattagaccatttctttgtttcaacttttaattggattctgttagcagtagcatctcttataggtagctgagctttcctataagaaggaatttagaatttgaaaattttgaggagaaagagaaaataataaagcagcatctgttttgttggataaggatgtttgagtatagaggttgaagttatgtagatcagctagatttattgcattggatgattcattaaagggagtacattatgcagtacatttacttttgtggagcaggctgttagcttatatttttagttgatgggagttttaagtatgattaagcctttaaggtgataggaactaacttgaactacataatatgaattgcatgataataattactgcgtgataataattactttagcattttggtttgataattttttccagagtagagtccttcaattggtcctctatttttctaatttttgtaatttcttccttctgttattgaagcctcaaccaaccaccattgtatatagtgggcagttttcaagtttgtgaaaaaaagtgaggaaaatccagggaagataatgtgggcagttttcatgttggtatgtgtacattgcagggacattcgtatgcatttggaaatagaatggattatggaggttaaagtgtttcactttgtacaaatattttcctaatcaggttctaatatttggagaattgctagtttctcctcatttacaaagaccaaacctgctatgctttgttcccattttgtttagatcctgtttcaatatcgatttaatgcttatataagaagttttggtgataaaattggttgtttaatggatacaaaaagtgaatttaatgaagttttaaacattctgcatgtgggagatcatgactgcattcagttgcaacccattccttatttaaatgattacatttcaatagttttatttagtctttcctattacttttttgtaagtctctccttttactaagcattataatataattatttttgaacattagcagtttgttgctaacattaaattcatcaaatccaccatgtaggagttggcctgtagagcatattcttgaatcaggtcgatgtctttaaaatcaaattggaggttgagccagtgagacctggtgtagattaataagcctagagtactctgtgtagaatgatgagccggggttttactcctttaaaatgagaaagttagtgtgtatccactcttgatttgaattatccatttcaaatcaagggtggatacactcttactttctctctttagaggagagtcatgaaagtacttctaagttttcaccaaaaaaaaaaaagatacttgtccttactagaatttcttatgttctaatgacaggaagtatctatattacaatgctgcataaggtcaaaataacgtaagtcaactaaaaggcacttataaccaaagaataaaaatcttagatgaattataatttctaagaatataaactttaagtataaaatcttagtaataaggtcttgaaagtgtttgaattagagacatagctggttcatggtcagaccagttcaagtgatcaatctagtctgtttattcaaacatttcatcacactgcattgtaatgggtgttcaaaaactaaatggggataatttcacacaagaggaagatcctagagtctcatctgttttgcttaggatgctcctatacaaggagtatcctaatgaagctcagtattgttatgactttggtcctgtttggtatgctattgtattgactatggtgtattggattacttcttgttacttagaagatgaagagcagtggctttgttgtttgttctttgccttcatttttttcaggaataaaatgatcaaggtttgttctatttgcattcattttgattcaaccatcggaacatagaagggtattttccttggtatcattgaggtttcctggtcgttcatctatgggttataactggacatgcatattttattttctggagttttatttctagtccttaacaaaacatgtcagttgcacttctctgatctttttatttcaatgtgaggtgtagaatacagaacttccgttgaaagtgtcatagcatatcttatttgtaatatgtgccaaaagccttaaaagaaagaaaatagggatcagaatggttggcagtataagaatgaaattgtttctgttgggtttaaagaatctaataattgggaatgtttaataaggcatcaaattgaattgctatacttttatttttgacttcaatggaattgtgttttccctcttagtatggttatagttgtctgaaatgttctctcctagaatctagaatactttgtcagtagacagtgtggattgatggactttgatcctgttgttattgttgcggcttcttccttggatatatatgattgccaaggagacaggtgcctttttttctttttttgcatgttttactattgatactctgggcaatggggtacaaagtttttattctttttttttctttggttgctgttgggtgaagaggttgtgaagccattttggttgattccttatttgattattgttcttaaaatctcttctcaccatatgacttgcaggaaaagcagaaagaaaaaaaacataagaaagataa

SEQ ID NO: 3393 - DNA, 3670 bp, Glycine max
  Intron number 12 from transcript Glyma13g38370.2 (locus Gl yma13g38370) derived from phytozome v7.0 (chr-ID Gm13; pos 39142015 to 39145684 reverse strand)
ctcaaggagaaattttagacaacattgaaagtcaggtttgttcactctcactcacacacccttggttttctgtttgtatgcatgtgtatgtagaatgcagagcacatttagtttgatttgcgttaatgagaggcttgttcaggtcaacaatgcagtcgatcatgtccagagagggacatctgcacttcaaaatgctaagaaactccagaagaactctcgaaaatggatgtgcattgccatcattatactgttgataatagtagctatcatagttgtgggtgttctcaaaccttggaagagtagctagggtgcttgagtgtggcccctttaccttttgtccataatcataagagttgacttggttgcgaaagcatatgcaatttatgcatgtgtgtcaacgggacatcttagagaaggatttttttttaagcttttattttgtatgattgagatgcttgttttgtgtggtgttactgatttctgactgtacattggcgtgcctcacgataaaaattcatattctttgtagccttcaaaagtttatcagggtttcatatttccttgtactattctataatattctatgaaactgttttttatgttatttgcttgttgcaaatcttgcattgatgttcttggaaagaaagtaccttcttctcaagttctcttccatttttcttaatttactgttttaggcccaggttgtggtgggctttgggctcacacatcctcagagaacatccattctcaccttctagttctcattttctcattcctgatttaatctattggtcggcagtttaccaaaaaaaaaaaaggttgtccaaacaatcttattagcatacataacctttgtataaacgtgagtagtgatgaacaattccaatttaccatggatcgtgtaatatcgttggttaggccctagaatttagatgcatataaatctgttcatccctatggaaatatttgtggtgatcttttggtacacataatgtcagtccttctataggtatttgaaacataaaggttcactttctaatatcttcggtccttcaattcaccaacttttatttttcctttttttagaaatttttactttttattcttttaacttctataattccaaacattcacacgcagtcatcttattcctcaccccaattccttgtagaatgccatgtttatgttcatcatcatcatcttatcattattataatattataattatcagaataaattacaacaacactctatgaggttacatgtaattacagatagtcccactctttttaagtttcctacactaaccttcctttaagtttgaaatcattacaccgacatcttatatgtttgaaaatattatactgacatccctttaaatcttatactaacaaatcttaggagatattactgtaatttgctcttattgttgtgaaaacaataatattattagtattatttaggcattgacgtgcttatcaatgtactttatttatttcaatttcaaaagaaaatgcatctatttataatgcatttattcagagagttattaattttagaaggtgttaacatgattattttactattttgtccccttttttagatgcttttgagtaaaatatattgaggttttgagaataattaaaatctttatttatataaggataagatagaccttttttttatcctgcttagagaaggagaaagaaccaaagcataatatgaaagaagacatgggttgaacagttgtctatagtcataagtagaaggtgaaatggggaacagttgtctatactcacaagtagaaggtgaaatggggtattttcccacggtatcctgctttctgtctttaagttatacatatatttatatttggattaaattttacaaaaatttaagacatacttttaaagggtaactaaacataattttaagtcttgcttctccaaaacttgagttttaagataaaattttagggtaacaataattttaaattaattttactctcaactatacttttggacgctccactacaaatctaaacatatcatcatgtttcgactagggtaggaagagaggtttgtggaaggatggggaagggagggaagagtgggagggccttacttggttaaaaacttccctacagtgtgagggaatataatgaggaacccttgtttttattttatttttaattatattttatatagtataaaaaattataaacttttaatttgaaaaacattttgaggaaccgcttttttttacgtcagaccttcactcttatctacttatcaaaacaagaaaaacctttttttcacttcattttgtcttaaattttattaagagtaaattatattaacttcttaagttctcaattttctcttgatctcctttcttcatccttccactaatttcttaattgtttaaaaaatattacattgacatcatttatacattatactaatattctttaattgtttgaaaacattgcactgtatattcctatatgagaaattgttgcatgggcttgtgtgaaatctcaataaattttacaatttagtataatttactcatatttattaaaaaaaacacattttgaccatatttttgctctatttttcactcatgttttttccctctattttttatttatttcatttcatgcctctatttttttattatttcatttcatgtcttatcgagtgttagttacatttaagcattaaaaggttataaatcattacatatttagaaaataaaaaagctcaaattattaacaatttttactttagatatattctttttttctctgcaaagactaaacaagcctaaattttacattggtacctcaagattttaccatgggtatacaaaactcattaaatataaccttgcaattcattatatttgtcatacattttcgagattatactcttgtcctctactgtttcatctcaagtaggataagatttctattatctgaacatcaattccaaacatttgtatttgatactgtatgtatatgccatttattaatgttatattttttcaaatacatgcatcttaaaaatatttcataaaaatcaacgcaatagcatacttcctaaaattatcgtacggaaaactttgctttaggataatgtagtactaggtcatgtatgtttagtatgaataatttaaataaatagcagaaaaatctaaaatttattcagttgcttaaaagaattatgactatttgtttaagtgagtactgactgtcttaactacttatgacaattattcatgtttttatctttgtatatgggttggtgcctggtggtacccttgtacctcaattaatatatctattttttttccagatttttttaagaaaatattatctataaatcatgcataaaagtgttaagcattttattttaaatgtttttttaacagatttacttaagaacttcaaaaacattattttgcaagtatatttgtgtaaataatgtgtcctagtatcatctgtatgtttgttcaagttgtttgggcaaaatcatgtaataattgcgtcaattgccgaaagaattgctcgattaccgtgcaaatatttactacttcggacgactaatctcatcttgtctttttaaaatgggattctgtaatggacaggtgacaaacgcaactgatc

SEQ ID NO: 3394 - DNA, 2352 bp, Glycine max
  Intron number 2 from transcript Glyma18g08850.1 (locus Gly ma18g08850) derived from phytozome v7.0 (chr-ID Gm18; pos 7604680 to 7607031)
actatcgaagcaaaatctgcagggagatagaagtggtaagttgatacttcttcattctaacttgttgcagtaatttataatgtctataattattgtatgttgaacataatgtgcaaaataacataggaagctacggctttgtgagctacaaagtgatgtagagtaatgaacaatgatatgtgtgtttgtgtaagggaatcatatggatgaagttcaatcaatactttgtgccattatctgttacacgagtgcatgatacatatgtatatgcaaatggttcttttcaaaaaaacttgttttccttaatatctgcgttgctgtcccatcatgattcacaatgagtctttatgatatatgcatttaggattggagactaatatacacggacaattttctttaatgttgtcttattctttcttatttttgttctataggagtataatttttctacctctgttctagtattttctgttctttctaataaaattccttcttttatccttccaatagaaaaacagatgttttcgaataaaaaaaataatagtggattcgttaaaatttgattatcataggtaatcatagaggtttggtgaagatttggtgctttcagattcagcacctaggtcctgttggggctgaaaacaaggatttgtcaggatgccaagcatctaggtgctaactggtgagagccttttcaaaacacacaataccaccatacttcaacagcaaaaagtactaaatcaccatttttcaattttcacttacaagcaagctaagaatcaaacttttccatgaatgtgtttgagaacctaaaaacactattcatcatccctatcgttgacagtaacaaactgattgacgaggcatcctttctattgtggacatggctatggaatttggagaaggatttttcaataccttttaatcagtggtctagtaatattagagaagggttttggtattaggaaagtcaagtcatataaattagtagcagctttatggtagtttggcagggtagcctgtttggttccattctagactctatttagtctgattaggaaccatttgaatggccatccaattatatatgtatttcagtacctctggtactttgttccatttatataaatatttatctttgctgaacaaaaaaaaaaaaaaaaatcatccctatcattgacaaattcattttcctaactagtatctttcaagaacagccaagctagaccagtataaactcattttgatgacgaatacctcccaaacacatcaatcatgcaatccctatatgtgattcttcaactagaaagagaaatagatgaaaaagcaaaaaggatgggttttagatgcttcatttactttaaaatccaaatatttgaagctttctctttctttcatctgcctcccgccctccctttcatctcttttcttcagctgaaaacacactttctgagacacactagctagccattaatgtagggataaggattaggattatattaattaataattatagtagaataaataaaacatgcaccgacagtgtaaagatattttacactcatttaatcacaaatctccttgtatgttaagtttgtattcttttataataattaccttaaaattcatataaatgataattttttattggttgactgtgtaaaaacttttatactgatagtgcatgcctattaaactctattatagtatgctagttatttttgtaacttgtgactttattcttcatacttttaactacaattttctattaatatgtataattaatataggttaaataaactttaagttctgcccctgattccatgcaaagcagtgctaacaatggaattaagggtaaagaaagtgtaagtttataatacaggaaagttgagggactaacctgcaattagcattttatctctaatgcagtaaattctgggaaaataactttaagctcctctgatcaccctttatccatttctgccttccaaataattttggaaatatttagcttagaaaattgggggtgttacaggaagtaagtccatctatgctcttcttaacctttttatctccttttttttttttaaatcacagtatcatctggtcataacttggtaccagctcatgagaccacaaatgacactgtcaacgaaattactggtctgtctgttcaaataacagatgacaaggtatatccctttttgtccctgcccttccttccactttctctattttcctttatattgtttctagtgaatgtttttaacatccacatgctcctctttctcaggactttcctatgagtaactccaaattatccaattcagacattgtttggtcaggagttgc

SEQ ID NO: 3395 - DNA, 5417 bp, Glycine max
  Intron number 11 from transcript Glyma01g42430.1 (locus Gl yma01g42430) derived from phytozome v7.0 (chr-ID Gm01; pos 53683083 to 53688499)
ctggacgaattactcagcaaattctcttttggcaggtaggcttcctttaactcttaaaatggtgccacgtaagacaagtcataaaaacctttattggctggatgaccaacatgatggattaggaagatttggtattcgaacattagtctcaagccagaagaaacagctgattattattttgtgcttaaatcatgttatcaaatgatctttattgtaaaaaagcacaaatatatatatatatatatatatatatatatatatatatatatatatatatatatatttgacgttgctgaaaacgatcattatttgctgcctggatctcatggcagttgtttgacgtttatcattacaaagtaagttagttttttaaaataagaaagattgcatatacccttaaatttaaagaataaacaatacatatgcatgataatgtaaaggtcttttgtattatcatttaatcataaatagtcctaaagaataagtttgttgaaatttataataagtaatttaaaagtcatattaaaataatttttttattggttaaccatgtaaataaatcttgtatagtgacaattgttgacaagaggatcaaggtgaacaaaggaaaactcattcttattgaatgtgaaaagagaaaactctattttattacagataggattaggccttatatattaatctatacaaggtgagaaatcttctaacctcctaacagaattgtaactaactaattacaaaactaactaatttagatatatacaaatctaatggtaataaagctgatagctcccctcaagttggatggtgtatgctgcacaatcccaacttggacatcatggaggaaaaagagggagagtgaagaggtttagtaaacacatcagccagttgtgactgcgaaggaactgggaggaggtggatcagttttgactgcagtttttctcgaatgatgtggcagtccagttcaatatgcttgctgcgttcatggaatgttggattgtgggcaagatatatggcagatttgttgtcacaataaactgaagctgattggggaaaggtaatgttaagatcttggaacaagtattgtaaccactgtaactcacatgttaatgaggccaacgcacgatactctgcctcagtagatgaacgagaaacagtgttttgtttcttagatttccaggaaatgagagagctaccaagtaaaacacagtagccggtgatggatcgcctagtattaggacagcaagcccaatcggagtcagcaaaaccatggagttgaagtgggctgtgactagagaatagaattcccttggcaggacaagattttaggtaccttagaattcttgtagcagcttgataatgaggcactaagggatttgaaacatattgactaaggtgttgaacagagaaagagatgtctggccttgtgtgagtcaaataaagaagcctgccaatgagtcttctatagccagaaggatcatcaaagggaacaccatcagtggcagataatttggtgtgaggatcaagaggtactgaagccggtttggaacccaaaaatccaatatcttcaagtagctcaagagtgtactttctttgatttaggaaaataccagaagatgaccttgcaatttccaggccaagaaagaatcgaagttgaccaaggtctttgatcttaaattgttgatcaaggaatagtttgacagactttatctcttccatggaagtgcctgctaacacaatgtcatcaacatagactaatagagctgtaaaggaagtgccatcagacctgacataaagggaatgatctgcttgagagacttgatagcccaaagaagtaagagcagtagagagtttggaataccattgacggctagcttgcttcaacccatataaggacttgttcaatttgcataccttggaaggggaagaagcatcataaccaggaggaagagacatataaacctcctcattcaagtcaccatgcaagaaagcattgttgacatccagttgttcaagatgccaacccctaacagcagcaacagctagtaaaacacgtactgtagtcatcttggctactggggaaaaagtgtcaaagtagtcaacacccttcatctgagtgtaacctttggccacaagcctggccttgtacctttctattgtgccattggcatgatacttgattttatatacccatttgcaacctactggaacctttccacaaggaagatccacaacagtccaagttttatttacctcaagagctgtaatctcagcatccatggccttcttccaacagtcaaatttggaagcttggttataggttttgggctcaatggtggaagaaatagagcaacaaaatattttgtaatcaggagaacaattattataagataaaacagaagaaatggggtaagcaacattacttgaaaactgattggtacagctagatatgacattgcagtgatagtcctgtaaataaccaggaggttgttttggacgagttgacactctggtagataagggtaagggtggctctaaagtaacaggaacattagtaatgtgggatgatgtttgatctattgaattttgatcaagatcagaagtaggatgagtaggatgagctgtagcagcaggggtaggtaaggaactagagtccaaagtgtgatctatgggtggaatggatgcagggctggtgcttgtactgtctatcaaaccggtggataaaggagaggagtccacacaaggatgaggtgagatgtccaaaggatcatcataaagtggaaaattagatggagtatttgagggagtgggtccaggaacagttttgaaaggcaaacaatgctcatagaaaataacattgcgtgagaggaaaatattgtgtgagtgaaggtcataaagtatgtagcctttagtaccatctttgtaaccaatgaaaacacattttctggctctagagtcaaatttggtacgatgtgcttgtatagtagtggcataggacaaacaaccaaagactttaaggtggagaagggtaggtggtaatttgaataacagttcataaggggatttagacttaagtaagggactaggaattctgtttataacatggacaacatgttgaacacaaaaattccacatagtgagaggaacattggaatgaaaaaagaagaacctagccacattcaaaatatgctggtgtttacgttcaactacaccattctgttgaggggtctcaacacatggtttttgatggataatccctttagatagaaagaaatcatttaaggcaaattcagtcccattgtcagatctaagacattttaaggatgtgttgaattgattttctagataagcaacaaagttaataatgtggtttttagtttcacttttatttttgagaaaaatgacccaggtaaatctggaataatcatctactaaggtgagaaaatatttatgtcctagaagggaaatggtggaatatggaccccaaacatcagcatgcaatagttcaaaaggagataaagaagtagtaatgctattaggaaaaggaagcctcttttgtttagaaaaatgacagctgtcacaaggtgacatgttgttcttacaaggtatgaaaggaaattgtttagaaatagcttgcataccagaatttgatacatgtcctaatctggaatgccaaagctcaaaagaatgagaagaaattgaattacaagaacgaatcatatcagcagtatctatcacatacaatcctctttgaagcttagctgtaccaatcgtttccagagaatgattctgcaaaatcttgcacaaatcagtagtgaaacttaaatggcaattatttgtactagctaattttgtgacagacatcaaattgacatgaaagcaaggaatgtaaagaacatgatggatagtaattaaaggtgagataactacactaccagagatggaagctagaacctgtgatccattgggtaaagaaacagggacagggacaatgttttgataagtggtaagagaggaaagatcaaaagtaatatgatcagtagcaccggtatctagtatccaaagagaaggattcttaccattcggattggaggaaggggaatgcaaagcaaagggagatgtggttactgaattggcctttggttgagaaccaacttttgactgttgaagagcttcaagaatgccttggtacatctcttgtgtaaactgaaaactggactgtgcagaggaaccttgttgggttgattccagagcagaagcatttgaggtattgttggcctgagatgatgatgatgaattcttggacttattggtcttgtatccgggagaggattcatcatcatgatttgtgatttagagtgcgaaaaccggtcattcaagcctttaaggaagcgaataacgtaatcttgttcgcgataaaccctaacagaatcaattccaccacaagaacagggaattgagcacttacagtgagggattggacgataattctccaattcgtcccagtagatcttcaattgagtgaagtaatcagatacatcaagcgttccttggcggaaacgatacagatcctcttgtagatcggaaatgcggaagatatcactctgagaaaacctaatacgtagattcttccaaacaccagcagcggtatcgatccaaagtaccgattttgcgatggaatcagaaattgatcggtgaatccaagcgagaaccatagtgttgcagcggatccacggtgcatataacggatcgaaaacgggaggtttgggaagagatccatcgatgaacttgtctttgttcttcgaaattaacgcgatgtgcatcgaacgggaccaagtgtggtagttcttggccgttaaagaaggagaaacaagaactagagctggattctcattcggatgcagatagtatggattcgcagagtttgtagaaaaatcaacgaagttctggagtgccattgatgaaacttcaaaagaaagaatgaatcaaaagatagaaggagatcaaagattcaacagaaaagggaagaataacaattttggaagaagtgcaacaatggctaccagaactcatgtgagctctgataccatgttgacaagaggatcaaggtgaacaaaggaaaactcattcttattgaatgtgaaaagggaaaactctattttattacagataggattaggccttatatattaatctatacaaggtgagaaatcttctaacctcctaacagaattgtaactaactaattacaaaactaactaatttagatatatacaaatctaatggtaataaagctgataacaatacatgatttaaaacaatacgataaaaaaaaccatatagataacataatgtttatggattctgttgtctgtgtgtctcaccagctcctgttgatttttttgcagttcaataca

SEQ ID NO: 3396 - DNA, 3834 bp, Glycine max
  Intron number 1 from transcript Glyma13g36530.1 (locus Gly ma13g36530) derived from phytozome v7.0 (chr-ID Gm13; pos 37777880 to 37781713)
aaggctcagatttgggacaccgctggccaggaaaggttcttctttttttcttttccttttcctcactttttagttaattgctctctctctctctctctctctctctggaaacttcgatctttgcttgttattgtgattggtttttctgttgtgaaggattgagaaaattttatgactttgtgatatcggatactgcttagattgacaaggacatgagtttgcttgattaactgttttaattgctttattgattgcattgtatggtgttatgttcaaggattgaagttttgttgctctggtacggcgttatgttcaaggattgaagttttgttgctctggtacggcgtttgtggatttgtatgctgagaatttacatatggtctagaaattagaggtattttttttgtgagagtgtgatcaaaatgtatagacgtcgtgattcgtgaatcattgatgactggtgtaaaattcatgcaaaagcacggcctaactattcgacgttttgaggaaatacttggttggggaatttacttctttgaaatgtatttcatgttattgcaaggaaagttctggttgtttcttatagctctggttgatttgatactatgaagtatgataagttcttccgagtttttattttttattttttaatattaagtcatctgtggaattattgtaagtttggtgtatctgataatgcttcaatcgataaaaagagcatgagattggttgtgtaacgggttattttgcaattgaccatttaaactgcttgattacatttttttttttaaagagccatgtcaaattttattaaaaactgcttgattacattatataatgtttgaaggttgttgttcctctagtacccctatatagatttgtaaacttcaaatttttgtgtatacttgagagtgttgggtgtctgagtatagatgtatatattgtagttcttaatccaagtagcagtttggagtggttgaccccaaaatgctatgcatgatagtgggatgactgctattttgaagttttaagatacacatagcataaatcatgtaagaataaaaatctaaaattaatgacattcataattaatggtcaaacatcagaatttgataactaaacacacattttctaaaatagcaaggctgaaatggtaatgggctggcctgaacagtgatgagcatgctggaaagtggttgacaaaagatgtgtaccaacagaaactggtcagaaattatgtgtgctgccagaaatcttgccaaagagagctgggtcttagttgaggatggtgaggctagggtttcagacttgggggtgcacgaatgatgatagtgggactagacatgacaatggggcggggcggggacggatattgtctccccaatccccgatcccgactccccaacatatccccatacctgtacccgatatctgacgggttaaaatttattatcccatccccgtacccgctgggtatcaggtatccccgaccctgtcccgtaattcaaattagaaaaataattttttcttgtaaagaaaatattaaaaatttgattttagaaaaaataaattgattgttaaacatttatttttaactacttatatatcaataaatttatcatagcgcatgtgtctacaaaaatcgttaagaaaagaatattaaattatgtaaaaattctaaaataaaatgaactagtaataaaaattctaggccttttgattaaattatgcaaaaattctagaattttaagtggcgggacggatccgggttcaaggtcgaagcggatgtagtaatcccatacccgacttttggttatcggggaaaacctgtacccatacccggttaactcaggtattacccgtcaaagtcgggacggattcggacgggtacccacaggtatgggttttcttgccatgtctaggtgggacctggttaaatgagcaggtggtgatggggagggaaaagggtttctgacatgatttctgccacaactactcactgatagtctttgaaggaacattacttcaagttttgattataaccaaacagaccagatcaattggttctgcctaaaaattggtgaactgtttagatgtctagtttatttagcccacaaaactggatgaacaaataaccagaagaactggataaaccagttgaaataggtgaattggtgaacgccagtttatgtttaaactttttgccatttaactaaactatttttggagtctaatgaatgcctgtgtaagaaacaatggtttgctcccatcttagctttcgtatatgttgtaagcgtggatgctccattcaatatcttatgtgaaaacttgcaagtatacctcctcttagctttaatgattagtttgattttgaagaagcatactctgatgttgataattagagtacacaagtttatttttaagttcatataagtgttttttttgcttaaaaatgattttaatatctaaatattgttagcaagtaacaagttgcacaatgtacactgtcacttctgtgaggtattactctttgcattgctgagactgaaccttaaggagcttctaatttcatattattttgaaggttagtttcttaacaacatacaaggttatataatatattaataatataggataacatgaagatgctattatcttttatcttatagcttccctgtgaattttttcataattcattgttttaggaacataatcaacatgtacatgcaagcattgaaaatctgaacatttggccaaggaatatatgtcatttttccttaaattcccttatttggacagcagtccaatttggctctgaatgtacatttgtatcttgcaagccccatccatactaattatgagcccccgatggacttatcttacctaggtgtgattaaatttttatgtggctaggataatagggtggagctgattacatctttcacgtgttgtaagttatcctagaaatatctatatataattataatacactaaggggcatttggaacagcttatttgcgcttatagaagattagaaatggcttatgacctttctataagctttttaaaaaaaaacttattttaataagtttcacggagaagcttttagctttactcaaataagcttcaattttagatgccctctaaatagatatatggagaatagaaccaagtatgtagctgctgaatctagttgcattgactcccattaatcaaacaggaggttcctatttcctagttaatatgaattcctgctcccctaaaatcagttatttaccacttataaaaatggaatgaacttaaatgaagttagtgttccatatggatctgatgatattctgtcaaatctactctttaaagataacatttttccaagcaaactattttctgcagaggttgttctaattttgaaaaggataaaatttaagtgttattcttcaattaaacttggtttttcctgggtcatgctgagctgtaattccaaccattaataagcagattaatatagtaaaactccattttttattgagaaaaacagtaccactagtacttaagatactacacttaagttttgtctttttaaaaaagcatcctctcttttctctcatgcctgtcattaagacttaaaaagtacaaaggattttctgatgtctatgagaagctgaactagacctaaatttctgttgcaatgcagtaatagagggtgtttaatcataccagattaaatgggcggagaagtttctctattgctgtgcctgttattacatctactcacttgaattgtgtgtttctgtattaggtaccgtgccattactagtgcttactaccgaggag

SEQ ID NO: 3397 - DNA, 616 bp, Glycine max
  Intron number 1 from transcript Glyma17g06010.1 (locus Gly ma17g06010) derived from phytozome v7.0 (chr-ID Gm17; pos 4240147 to 4240762 reverse strand)
aatctgaccaaccagtaggactccttcaaaggccagtttctctttaattttctcaatttctctgtcgattctttaattctccgtttcttttttctaaatgggtattccagttttccttcggatgcagataaagtttctctattttttggttttcatttccttgatccaagtttttctttttcttgatgatgatttgggtagattcagatatttccctttctttgattgttgcccatcaccctttttggcatgttctatacatgaattgtctgcatgaattaaaattccaatgtgttgattcgaatgcttaggtctcatacatgcttctactgggaaccaagaacaaagtagaatttcccaatttcgcagaattactgaaaactgaagagattatgtatctttttttttttgtgtggaaaacatcaaatatttctcagaatatgggaggccttgtttccctgttctgatttgtgagtggcaagtttgttgaaatattcttttgatttatctgtttgtaagtggaaagaggctagtctcacaagtcattttttttatctaacatgatggatttctccaaacagggattttgagtattgtttgaattgctggagacctg

SEQ ID NO: 3398 - DNA, 1819 bp, Glycine max
  Intron number 2 from transcript Glyma12g35600.1 (locus Gly ma12g35600) derived from phytozome v7.0 (chr-ID Gm12; pos 38732435 to 38734253)
ctctaaaccgacagacaatttcagataacttctctgtatgtctcatctcctgtccttctatatctgtatttattcttttttgttgcacaacatgttatttggaattataaaaggccgtttcttttattaatataaccaaataaaaaggtcagaatttgaacactatatgacatttatattgtatatttgaagttatttttttcttgtcttaaaatcttgtgattggatacaaattatgattcaagattcaaaaaatgagcttttccattcatgatttgaatcttgatttgatatcattagtaggtcggatagctaggaattggaatcttgttacttaatcttcttaactgtgatgatggtaaaattataatagaagtgtgtttcatctcttaatattttttttctggttagtaggcttaattattctgaacaatttttccttgggtggcttatcattcttctttagttacaattttaaaattgagactccaaaacacttgttgcaaaaagagagaaaagaaaacatttcagttgaagaaacaaagagtagctttggtaacatgaatctaactgtccaaggaatatgatgtactttgattggtgtcatttccttcaagcagaagtcttcaaacatgtggggttgtgtttctttcaccaattaagaacacttcaaatttcttcccaggatatatttgattgaaatgattatcgtaaaactgctaatgttttactatagtattttggttgaaaaatatgtgcatgttaagtcattgctgcctggtgtagtgacacagtttgattgaagtttgcaacattgtttatacttacatggatatttaatgttgattcgtgttacttcatggttattctgtataattgatgaacctattgaatataccttaagtcatagctgcccatatattgacagtttgatggtagttttcaacattgctttcacttacatggctatttaatgtttttaatgtcgatctgtataagttcatggttattctgtatcactgacgaacctatattgaatactgaactgtgatgatcagaatattcaattgtactgaagtttaatcattggagattagtaaggcaatccattcccaggttgaaactagagattgtgctatatatgtatgaatctagttagtcttggaactggataattccgtgtttcccatccaacagttacctgatactgaaatacagactattaattcagctgtgtttttattttcataaattacacaagtaagcactgagagtggatattaaatgggaaaaatagataaaactaagattctacactttcattttaatccattcctggatcgtctagaaaattcaatctttaatgctctggagtatgagagtatccagcataagaatttttttttacaattatatgatttgttggaagtgaaattatcatcttttacaagtacacctattgttatcatcataagttggctacatctcttgactaacttgtgcattgcagagtacaggatcaattttagctgctatagcctataattgtggttatgaattgtattattaagtacagtagtccaattttttgttattctgacaaagcaattgcaatatttctgtgtacacgataagcataacccttttcctagtgtcatatgtcattcatagaattgattttgtcacaatgatagaatgatacaaaagcatttaaattagttgagaaaaatgacaatagaacagatgttccagttttttatgctttaaaattgtatgcttttcaggtccgccagataaccatcaccattaggtagcttca

SEQ ID NO: 3399 - DNA, 4248 bp, Glycine max
  Intron number 2 from transcript Glyma06g17500.1 (locus Gly ma06g17500) derived from phytozome v7.0 (chr-ID Gm06; pos 13847334 to 13851581 reverse strand)
caatattgatcgtagttattctccacacggtgtttgtaagtccttctattctgaaaccgtgatttgtttaatatatatgctcactcagtaattgttcttgttccctaatagcagtaggtagagttgttccatggcctagcttttccattttaagttgtgcagaatcactatgtttctggttttacatgtgaagcgctattgctatatttatcttgcttcgagatacaaattgttgaagggaaaaaaattgcacaatttctcgtaactgttcgttagacttagacctcataggcctaaactttaacctacaaaatcaagaagcagagctttaaaatactttcacttgcttctctcttgaaaatcctactaagaatcttggatgacttgacattcagaaataggtttgaaaccactcagaatgactcattctgccaccttcatccattagtactatgtttacattactattatcacactgtatattttacattcctgcttcgggttattgtagtgcttgtcatcatgagaattttccctctaaccttgtcgacttacttttcatcatattcacgggacattgtcatttacagctatttcaaatattttataaaagtgaatggctgaagaggccttattaactaatcatggtttaattttatattcgaattgttgtcacttacagttctgacactgacagcttgcatattctctctatataaaataacatttataggcattatatctggatgatgctaagagtcctgaatgtttttaataaactttgtgaatttcttatgttaaaaactatacttctggcctgtcacacaaataccaatggttgacagaagttggtatttatttgtggggtagacggaaggagggtgggaatgggaggaccagaggagggagcaagggagtatcaatatggtgaagtgaagcaaaacgtgttaggttctgatataatcatagttgaataaagttataccaaatttaaagtgtagtagaaaaatcaagtggctggacccaagtggtgatgggttggaattccttaattaagcaagtagtggtgagtttaaatcttaattgggagagaataatctataatttagtgtctttacatcttctaaaagaaattagtctcaataatatttagcatattattttactccggttgattcaaataatatgtaacataatattttattcaaatcccttaaataagtatttaggattttgaattttgacttttaaataagaagaaaattttattaggatggagtagttcaccttttaagtgtcttcacatttttttgaaagaaattagtcttaataatatttaacataatattttattccttccaatcacactaaaaaaaagataatagaaaacaatcaagtgcaacataagaagatttcctaaatcctatgacttataacttataagagcattactggtaatcctaaccaaggtaggatatctttatacatccccttatgtcctagattgaacattgggtgctttctaggaatagccaacaaaggaaagaatcgattgtattttttatatgattttatctcctctcatgaatagattaattttctttctaagatttgatatatatatatatatatatatatatatatatatatataatttggattggtcaattaattgaaagattggtctaacttattcttaaaaactagttcaaggaagaagaaaagtccaagtctttagagaagtattttgaccatatttttaactaatgtgggaaatcttaacaaagggattgtatagcttattttttcaggtaggcaaccatttaatacgtggtcgacctggcatttcaattaagcaataatagcttgtaacttgtataagaaatcgttgcatgtcataaaagatggcccaaaattgtaaagtcattactcttcggaacaagattgtggaactactctaatgagacttgcagaagttccatcgttacgtaaatattaacgttcctttttcttttttcgaaaaacaaagtccacattcatgctttttgcatttcgatctgcttttattaaaacatgtaatgtaatccggttttgatttatttattagtatgaatagtgaaaatattattttttatgtagtttgtcatatattatgaaggacttatggatcaaaactaaaataaaataaaataaaaagagagaattacaaataagagtttttttccttactcattataatattggtacgaagtagttaaaataaaataatgatcaattttcattggagaccatgagcgtagacaagtagatatttttttctaacataattcagaatttgaatcctaaatcatttggttaagaaatagaagttgttgtcactagtctcaatagttgtaggtaataagagatagtttgtggggtctatttagtgaattttatggaattggcttttagaggaaaaaaaattgattaagcagtagcaccaatatagttccttgtctgcaactcttaatggtttcacaaattattctaatcttgtacaatggttctgattttgatgtagattacattttcaatacaattattctaatgcttctcattcacccctctactcctaaagtcttacaacgtattcccaggttctgatcacccttgtactgacctcaggaagagaccctggcatagtgccccgtaattctaatcctccaattctggttgaatatgaagggaatgccaatatcaacaatgaacaaaccccacagccacatttgccacgagcaaaggaaataatagtcaatggagtatctgtgaagataaaatattgtgatacctgcatgctctatagacctcctcgttgttctcattgttcagtatgcgataattgcgtggagcgatttgatcatcactgcccttgggttggtcagtgcattggattggtaagggactaatgtttacatatatatcccaatttcatagtgatgtgatggtattcaaaagtcaccatctcaaagtcttttcctatcattatattatgatctagtcctagaagaacaattgttgtgtttttcttttaatgttcaattttatctataatgttcattttttggtttgtgttttgtttttcattgcgactattgcataaaaatagatatgaatagattcaaattactgttgaaaaggggtatgcaatcaattgaatatactacttgtagatatctttggtacttggaggcagaaagcctagaatatagcagtgaattgatggaaagcattgagtagttcttaaaataacacgtgtgatttacaaaccacagaaattgctatagaactaggtaaaggaacagctcaaagattgtagaatcatcatcgcttgaactccccataagttttgtgtttctattcaaattcttaataagctaataggtttgtatcatattcttgaatacatttttcttctaggttataaaaaattagcaaaagctggtatgttattgtctgatttgatacatatagttaataataatacacaattatatttgtagtagatatgatcatgaagtagctaattcagaattattttttgcttctttgcttttatgtatggcggcagcgaaattacaggttctactacatgtttgttttctctgcaacccttctttgtttatatgttcatggcttttgctgggtctacattaagaggatcatggactcagaggagatatcaatttggaaagcaatgatcaaaactcctgcttccattgcactaataatatactccttcatttctgtctggtttgttggtggcctcactgttttccacacatatctaatcagcaaaaaccaggtttgaacaccatttaactcacaagcccctgaacttaaatgtggctatctgggagtttctgaattctgatcaccctctccattccatatttggaaaccttaatataatgaggagtgctagtaacacttgatcacacttcttctaacacaatctttattgttgattaaaatttattgaaaactataaaatcataagtgaaattcattaaataagatgtgagactcacaaaattttatgatttccaataaatttcaaccaataacaaagtttcgtaatgtccaataaatttcagctaataacaaagaatgcttacatactttatctatgaaagagtaatgtgcatttctagtatggttttcttacacatgttaacgaccatattttgatttatgtgcagtcaacat

SEQ ID NO: 3400 - DNA, 2710 bp, Glycine max
  Intron number 1 from transcript Glyma02g04700.1 (locus Gly ma02g04700) derived from phytozome v7.0 (chr-ID Gm02; pos 3837908 to 3840617 reverse strand)
cttccaaagttgaagggttaagagaaaaggttaaggtaatgcgttttcatttccacgtgtatctcgttcttcttcttcttcgaattcgctagctgaaacagaattttcggttttgagctatctcgaggagagtacttctagttgtttctgcttccgcatcgattctacgtgcttgttgtattttcggattttttttgtgtgtagaggatttcagtgactgttagtggcgaggatttgactgtgaattagattttggaatctgaagagaatttaacttgcagttgaggaaattgtttgccatgttagacacgttgagcaattttttgttccttccatgtttcagaaagttaaaacaaaacaaaaataaatgctgtgttcatgaaagaaagaagagttacctgcataataatgtttcgttttccaaaaaatttctcatcgtgtttaatgcctttggaagaagagatgccagctgtactttttttattgttgccttaacggttttttcttccagctgaaagctgttagtgttgtgttgggcaccaagataggggaatgtgagttaagaagggattcactgtccttgtagaaactggtgaatcagagtgtttagaacatagtcctaggtggtagtttctcacagcggttgcttgaatactatatcaattaggtttaatcagcattaactaagattcctgatttcaaaatgtcaattgcttaattaagattctggctttgaagattccaggttccgtcagcattaattaagatagagtatacagtgaggaatgtgaggaaagaagggattcactgtccttattgaaatggcgtatcagtgtgtttagaacatagtcataggtggtaatttctcacagcagtttgttgaatatatcaattaggttcaatcagcattaattgaaattccagatttggaaatgacaattgctttcattttgtgctaggtttattgcatggttttgaactaaggcgcacacttggcttctatgtgccgtatgtcttaaaaaatctgcaatgaatttcttagagtcaggaggttaaaatatcttctcaatctgtggcgaacagagacccttgaaaatatatttaagtttttattcaaaacaattacttgtctaatataaatgtaagtgatagacagtgtaaaaaaaataagttcataaaattagtttcaagctagtttgtgcatttttaagcaaagacaaaagcaaactttttctccttaaaatttgtaccaaaccaaatgcaatacaatacataaaaacaatttagagtattttcaaatagtaaaaaagaatgttatttatccaaaagtatatatacataactttttgctacttatatccagtagtgcccaaattcccctgcatttttgtaaaacttgaatcaaacttacctgcttctagtttaaattattttttaacggttcacatccttgcatgttttgttgggatttcttctggaaaaataattggtattttttaatacactctcataggaaattgttaaataaatgtttattttctaaacatgcatatatatattagtaacatttttcctaagaacaatgctataaacactctttatttgaattatgcacaatttgtttatttgttactatgcacataagacaaaaccaaatggttagattaatgtttttttttgttcccttaacaattgtagaaaaatgagtaattatttctctcactagctagcaatagcatgtaatcatagtctatggattatttttctaacttttagccatacaatttgctgactaataagtggcaatcggagcaattcagaatacctagtcgagcagtcacgatgatcagtttgattgattgaagttttggcatttctcctttctgaaaacaccattgtatgtgggcataaattttctatgattctcgagtgaactttacttaactgggatgttgcaacttttcatgattttggtgaattagtgcttggtggttcttttatgaagaaggaagaaatgagtgtggtctttcagtttcaatattatgaatttagatggtaggcatgttgggagaggctgtttgactgactaatagcaagaactctggaaggtaagatataggatcaaactcacagctaattttggggatttgaagattttatgtgcaaacagagaaaaagaattattgttatgtaaaacagggtatacgttatcctcttctgaaaaagtttcatttagaaaagtctagttttggattacatatttaagagaattttttttccacagatatggtgtcaagcaaatataagtgatgattcttgcacaatctatgattgtagtatataaaatatggttggagagggtaaattatttacattttttaaatacttttagtaggatttgattgatggggagtttgatccacttgtggtagcctgttaggtattagattcagaactccatgctgccatgtaccaaagaaaaggatgattagaagatgtgcttttctggagtatcttttatactatttaaagctattttatattcttacaagtacaagctagttaagttggttggaatttatgtttttgtggtgtggtgtcctagctaatttttatggatcatgcaaattttgttttagacatgttttaacaattacatcaggtattttgcacagcttgctagaattgactacctgcagttaagacaaga

SEQ ID NO: 3401 - DNA, 1075 bp, Glycine max
  Intron number 12 from transcript Glyma13g24090.2 (locus Gl yma13g24090) derived from phytozome v7.0 (chr-ID Gm13; pos 27420279 to 27421353 reverse strand)
attttactgagaggtatcatattttcttttgatagattttttgtagtaaattattcacctattctctggtttttattcacctattctttggtttgtatttttaatataaatataatttattttttgaaaaatgtttcttaaaaaaatattttctaaaatagaaacaaacatatttcaaccatattttctgttttctttgaaaatgaaaacagataatgctgaaattaaatgccccctaatagttttgccttgtttatcaagttttggggtgattagactgcgcagttatgtttgtgagtattccgagttttatagtgatatactgatatgggattgtggtttacaaataattccagtatgcaatttctagtaatgagcattcttggatatgtagttattccaatgatacagttccattgagttagatctccttatttcattatatcctcttaaaactttgtatttatgcctgttagtttctttgttcattatatcagctgggagcagagcagattaacttgacttgatttatgaaaattcatgctattttcctttacgttgtcaacacaaatgctgctcacttcctcaatatttccaccattctccggatatatgtgcataatcctgcaattctcttattgagttcatttttagggtgtcaattgggtccaaaattaaagaaatatctgtcatgtgttaaagacacgagaattgtatgaggcatgcaatgagcaacaaggtccgattcagattttataattaagcggctatttgcagagtatcagtataaactataaacaaacttcttatgtgcaagattgtagcaaaatctggtttggtctagaaatgctcactcctgttcatgactgtccttttgtcattgtagtgtggatcttcttgttgatcttgtaagtttataatagtttgggaagggcaaacgtagttgatttgactggttgctacttttccattgtttagtaaactttttgttgttttacctctctttagtgtttaagtcattttttattgttttgtggtcacatttttggtttattttcttttattagattgaata

SEQ ID NO: 3402 - DNA, 8538 bp, Glycine max
  Intron number 3 from transcript Glyma20g18290.1 (locus Gly ma20g18290) derived from phytozome v7.0 (chr-ID Gm20; pos 25630731 to 25639268 reverse strand)
aagctgctaaccattaccttgactgggaggtatgtgctgatttacttgttttagtttctgggatattgctggcagaacttaagtgttgagatttatttaacctgtggtcacattttgtatggtgttaatttgtgtcttacaaaatttactatctaatgttgattaaaaattggaaagagatggcaaagctataaatagggaattagtatcagtcagatgagattactaaagttgagcagtgttgttaaatagccactatagaggtgctacagaagctgaatttctcggaaccatgattgtaactctgtctgctattgcagccactatcattgttgtgattgtggcatgtgtgctgcatcctcttgtcatctctggcaagtctccagccaattgaacttttgagttaatattatactgatttttatgtattttgtttttatttgcatacaacttaaaacatatataatagatatatatatcatatgtttcaacttttatgtgtcgattattggcttcccgtcattttctgcaatctgcaattgataatactgaagttgcaagtatatatctggacctattttgagatgaataagccattcagatgagatcttaaggtattccccccccccccccggtattggtgggtggtactggtttgggtattactgttaatatgtattcaacttctaacatttaggaatcaagtaatgagaatcgataggaaactggtattttattgtactgccactcttaggtagatcaataacaaggagttgataatggaatagaaaaataatggaaatactgtacaagcagcacttcaagggactggaacctccattcgaaatcaatacctctgctccctttttcttagctttcccctttagattaattaactcaccaaactccctaactgatgaggagatagaactcaacaatttggagaaatagggagatgaaagacctctgaccgttgaggagatcatattaagaaagaagctgcaagaggacttgtgggtggtctcacatttgcaagagtccatcatgaggcaaaaggcaagatctagatggctaaaggatggagattgcaattcttggtacttccatatgattgttaattggaagcgtcaataaaatatgctaagaggtgtgtttgctggtgggtgttggttggaggaaccaatcgaagtcaaagaggaagttaaacaattctttttgaggagatttaaggaggtgggggaggagaggctgcggctggatggcgttgaatttaaatttattaatcaacaagacaatgatgccctagtggcttgctttgaagaagaggaagttagggcagcggtgtgggaatgcgatagtacaaagagcccaggtcctgatggattgaattttaagttcattaaggagttctaggacgttctcaagactgatgtccctctcttagatgatttctttgctaatggagtgttccccaaaggaagcaatgcatcattcatagtcttgatctcaatgttgttaatggcggatggcggttcatggcggaaagtcaaaaatccgccataaaaatatggcggatggcgtagcagaaaatggcggacaaaaaaaaacatatatataaactcattgaaattgaaaaaaacaaaggattgcattcaaataaactaaaaaagtttcatgagttcatacaataatcaagtaccaacaccaaataaactcattaaagagttcaaaataagaaaatgataaaaacataatgcaaagtgcaaagtgaaggttgaggctctaatcatcttctccaatcccaacataatcatcttcgttgttatcatatggtaatggagcatctccctctccctcttccccatcaaacgcctcaaaattgaccatgatttcttcttctttagattcaacatcaatattctcctcaacatctagatcctcatcattttcttggactactttttgcttccttgaagaagatccaacaaccattgcctgttttttagaagtttgggcagcagcaacacttgttttttgctttttccgcctagtgtacatcctacactctccaacccccgaagcctgatacacagttgcccaatttagagcatcatcatcttcaaataccaaatcatttccagcatcattatcatcatcttgatccatctctcccacgagccattcattgcatacatcaatatcattaagagaaattggatcaatttcatctcttgcattatatctttgctttaattgttggttgtatttgacaaacaccaaatcatgcaacctcttgtgctcaagcctatttctttttttggaatgaatctacaacataacaaataatgttgatttcaatctcaaatatactccaaataaaacttgatcataaaaattaaataaaattaaaaagtatagttagagttttgtcacaattacttgcttaaacacactccaatttctttcacatcctgaagcactgcaagtgaaactcaaaatcttaatagctagcttctgcaaatttggagtttgtgatgcaaacattcgccaccaatatgctgcaataccaattaccaaccaagagcataacttagaattctgaattataacactaatacataaaaaaaatagtatgataaaagtttcttactaggagaatgggttttcctttgagccattgcaaagtcggaaccaaagtggtcagcaccaatcttgtaaagatgcaactcggttagaattttttgttgcacatcaaattgtggaatcaacttcttaatgcactcaaacaaaccattggtgacctcaaaatcaaactccaggtcagtgttgtcataaaagaactctggatttaagaagtgggcagctgcatgcaatggcctatgaagctgacaatttcatcttttatcaatgattgcaaacacatctttgtacttgctttcattgctgttgaaagacttgataattgtttcttttgccttgtccattgcttcataaatatagcctatggctggtttcctttcaccatccacaagacgaagcactttcacaagtggagccatgactttaagagtgtaaaccacactattccaaaaagaaagcatgagcactacctttgcagcttcttttcccttaggctccttagatagcttgttcaaggtccattcatcagaagtaaacatttttctaatattggctttctctttgtgaagcctttccaaggttagataagaagtggcaaatctagtaatagcatgtctcacgaattccctcttgtttgtaaaatttctcaacaaacttaaggtactagaatgggcatagataaacccaactagattaattgcccttctaattgtcttccttatcaagggaagcttcccaatatcttcaagcatcaaatcaatacaatgagctgcacaaggagtccaataaatatgtttccttttctcctccaacaacttacccgctaaaacatagttgctcccattatcggttacaacttgaacaacattctcttctccaacttcctccacaatggcatcaagcaactcaaaaagcttttcatatgtctttacaaaatcagagccatcaacagacttcaaaaacatggtaccaacttgagagttaataaaaaaattaatgatgcatctttgtttccaatcagtccatgcatcggacataatagtacaaccatacttgacccattgctccctatggcctttcatcaatttttcagtatattcaacttccttcttcaagagtggaactctaatgtcatgatagttaggaatgggcaaatgtggcccatattgaccaatggctacaaccatgttctcaaagcttttcaatttaatgaggttgaatgacaaacctgcttggtaccaaaagcgagcaatatgttgatgcaccttcaatacttcattcttatccattgactcttttatgttcatttgcctcagcatctccatttttctccgattgattgcattttctggattcttacaaaatttgtccattggtccttttttagtcccacactttgtctttgcacttgcagcaacattacaagagtctgcaaactcatcttcttcacttccatcacatccaattggttcaccaaattcaaaatctcttatatttgtcatattaccactgccagaagtactgtaagtggtcccacttttttttgtagccatatattccttcaactcttcgactacatttgggggagttttcttgcaagctgcaacgttgcccgacttcccaatcaggtgttgtttggctcgggttattcctccctttgtgatttttccacagaaattacaaacaatggtgtttgtatcttcttccacaagtgaatggcaatatttccagcctgggtctgtcttatttttcctcgttgcacttgtagtagcagcatcggatgatggttcagccatttaaaagaggactgaacagaaaaaaaaaatcgtagtgtcaaatagaaaaaaaatgggactgttaaaagtaaaaaggggtgtcaaatagcaaaagaaaaaaaaaaaaagctgtagacagaaaaaagggatgtcaaacagcaaaaagccaaaaacaaaattaaaaaaaagatcaggctgacccgttcttgcgagaccttcgtcttcttcgcgagacagaaaaaaggccgttcgtgccggtgcgtcgctgccggggttcgtcgcaatgtagaccttcgtcttcgtgtaaggggtgtcgcaggctcgcggctgcgtgcgcgtgcggactgcaggtgtcgcggctgcggctgggtgcgggagggacgcaggggaggttcgattttagttggaaggctgttctgaatcacagctgcgtgggagggtcgcttttagttgaatgaataaccgggtagggttgggtcgggtcaacccaactcctactgcggacaaaaagcaaaaaaaattccgccaccccgccataaccgccacgaccgccatggctatggcggccgctatggcgctgccatcccaaacccgccacgccaccgctattcggtggcgttttttcgaaaatccgccacgaaaatccgccatggcgccgccatttaacaacactacttgatccccaaggttcaagacccacagggccttaaggaatacagaactatctctttaataggctgtatttataagattgtggctaagattttatccagaaggttgaagaaagtgctgtcaaaagtcatagatgaacgccagaccgcatttatggaggggagacatatgttgcatagtgtggtgattgctaatgaggttgtggatgaggcaataaggtgtaaaaagagctgtctagtgttcaaagttgactatgaaaaggcatatgattctgtttgttgggacttcctgttgtacatgatgtgacgaatgggcttctgcgacaaatgggtgaaatggattgagggatgtttgaaatcatcctcgatctgagtgttggttaatggcagcccaatagacaagttcttccctcaaagaggacttagacaaaggggtcctttagaatttttgcgttctgttaagaatttgttattatttcctggtcaggttgccttgtgtaaccaaatattggatgctgtaattgttgcgaatcagttatgatgctagattgctaggtgtaaaagatgtggatgtatgggttttaaagggaagatggagtttgctattctaaatgcagtttttaaggaagaagggttctgttttcactcatggaggatataggttgttaattactttctgctttcaatgccattggtggcttcaatgtttcttttggaagctttttgctttttaagtctttctcataaggtgattaaaagtaagcatggtccttgtccataataaattgggaaaaattctgccatatctcacatgccactttgtgagagaccctagaaatttatttctatattttgttcttcgtttaagttaggcatatgtttttgatggcttccatatttatttgtgagagtaatggtgtgttaattatttgtgagagtaatggagtattaatatctagggctggcctctttgtagattctcgcttatctttctgaacactctttgatggagtaatattctgtctttgtgaataccacgaagaatgctcattcttcaagtacaacagcaacaaccgaagtcttttcttgcatggtggggttgattacatgaatcaaccatgctgttgtgatctatccaaaaccaaattcaaagttgtttacttcttgatcctttttaatcttttcctagtgcttttcttggtctatttctacctcttattcttggccccattagatcaactattctaactggttttatcggccttcttctcacttgttcaaaccatcttaggcgtgattataatacaattgattcaatcaatgccattccgactttctcgacaatacaaccacccttgatccttttttttttcttgtatgatcactgactcatccaacaatgctcattctccttctataaaagtaaaaaataaaaaccctgtttgttgaccaccatgattgtttcaaaaaatttaattacatttgaaatttgaatgcttaataggttgattttatttggttcttggcctagaatttattcataaggaaaaaaatgggggtaagaacaaatagtagttcacatgatagttaaactagttttgaaatttttctttgtatgcaatttatcgttgaatttataaattatcatgtgataacgttctaattcatcttcagtttgttgagaatcaattctgaatattctgtatttatggtataatggaaacaaaatctgatttatagaaacaaaatctcctatagtcaattgtatttattatttttgagactttataataaagtaaccattgtgtatcacaggcacagtttcagcacaatgcctctggtttccttcccttttaagacagtgatttggtcttgtaaggagaagaccattagagactaaaagacaaaagcggattaaatataaaatagtttgcttaattcgtatagatgaagattgaagcataattttggaaaaacctttaaaaaatgaccttgctttaaatggatttttggaaaatttggtggagcctagtggtgttgtgtaagaaagggagccttggtgcaccagttggaactgtagtcaggtgaaccagaggttacagattcgagttgtgaaatcagcctcttttagatgctagatatggctgcctaacgcagacccaagcagtgggtcttagccttccctatgagcagaaggaactctatagcaccaagctgccctaatagagtcatgcgatggccttttgcatgcaatggagttctgtttttaatgatttgagaggagttgctgttggagaaaagaaaatagaatataataatattttcagtatgtttaagaaagttttgtcacttatgctaattgctaagaacgtttcttttcgtgtcctgtcatttcttataaattggttgtttgcaaaatgttttaggacaatctgtgagggaaaacagtatgtgtgagaaagggaaggaaagtgagagagaaagagcaagaacatatatagagataatttgggagctttctattgctgagaaagtaacggattagattgacatactttacaatgaaaactagaaatacatttatattagtagttaggaattaactgctttaattaccacatgagtggttactctaatattcctgtcacactcaaggagaatgtattaatgaaaattggttggataccctaagtttgtcatgcaactcaaaacttttctgctgaaagagccttagtgagatctccagttagcttatttgagctgttaagtgagacagtgggattcatgttgataaccatctcttggacataaaacaagtgtagttccatgtgtacctttaagaatacaatttaccactttccagctctcctcagggtctgtgaaagaattgatagaccttgttcatgcctgtaaggttgtaactaatctcaggtcttgtgagtggcatatcacaaggaacctactatggattgatagaagcagatatgcctttatcatcttccgtgtttgccttgtagattaggtgacaaatatgcttgccttaagcaacactgcaccattgggaaggtgcttgacctcgatacataagtagtctggcaacactgccctaatgtaaactcattctgaactttaacatggtagaggttatttttacaattctgttgaagaaaagtagtgcagtaattccgttaatatttagattgaatatatttatttgctgggattttactgctgatgatacactgttaaagttctatcaatatgatgtggaactaaatcagttgttttgttgatttttttaattgttgatgttagtctttcatactcggataatactgacttgcaggatattgtaaaatgttaagtgatataaaatattagctctaggacactattgtatttatactattgcatttttagattccgagtttctttcttgcagatagaaaagc

SEQ ID NO: 3403 - DNA, 522 bp, Glycine max
  Intron number 3 from transcript Glyma06g13470.1 (locus Gly ma06g13470) derived from phytozome v7.0 (chr-ID Gm06; pos 10609708 to 10610229)
gggagagagctcttgcttacgctttcaactgccaggtattcttttttgtccaaccttcattcaaacccacatgcaccaaaaattatcataagtttttgataaatcactatttttctttttcttcaatggataaagtcataactatttaatttaccaaagaacgaaagttttgatttagttaggtgttaacttattatttaatgataaattaattattgaactttttaatttattgacaaaattaaataatcatgtacatttaagcacatagtatttttttttttataaatttaagattaaatcatgtacattattatcactatttcacactattaaggagaaaaatgttcatttacttttatgtttttcaataacttatgagagaaaaattagtagttgagagcatgataatagttcctctacatgcaaaatgcattggaatgataattgcatattatttcattgtcctatatacattttaattgttgatcattttgtgtgcagcggcagctgaagcaatac

SEQ ID NO: 3404 - DNA, 1385 bp, Glycine max
  Intron number 1 from transcript Glyma13g18310.1 (locus Gly ma13g18310) derived from phytozome v7.0 (chr-ID Gm13; pos 21962789 to 21964173)
ggaaggtatggatggtttttgttggtttgactttgtatcttgatattgtttctcttgatttgttgattctgagaacaatttgttttgggtacacttattgtaatgtgatgtactacattctatgtaattttagtggtctaaaaatgcaatacttttgaacatgacccattagtgtgccattcaaattccattggaactactgttttttggcttgtgagattcctggatgagtgaattcccatgcattcccctttaataatttattacagagaaagtatgatggtttatatgtctgtgcattttctcattatgtttattgacaacttcgtaatataatgacgcaatactcctagtctttttaatttgtgtgtctgcctctgacctagttcttattattcactaaactaagttttatactttattgcctcctaaaaattagttaatatataaaccactatcctctcttttgtacttagcataagatttctgatttggtggtcacactcgcattgcataaagttctattgttcagatattagataaaatgtaattgcgttgaaagattttccttgaggttggatcttgagtgcaagggataatgtcctgaggaaatgctgcatatctaaacacccgtataagccttgcgtctgttttgaacttttatccaatcatatttcagggatgagtatgttcattttgagttccattgcctatgttattttatttacagtctacagaattttatttttgaagttgttatatagtaatcctatcctgggaatgtgtgttagaattttaccttatatggtgcagttgttgctgtttgatgagcacatatgagatatgggtagatatctaagttcatgtaggagaattccctcttatgtttgccaccatctgcatgtgttattttgttcgatatttctgcaagtaaatacaaagatgtcatgttagtaaaatattgatcagttaatttcttgagtaagctgccttttctgtttagacttttgagtttcttagggcaattcagttggattttgctgtttattaaatttaaagccaaattgttcattcattcctatattgaactacagtaaagtttaggaattgggagaaatgtgtttatatttgaacattggttgttcttagttctgagcttctcttaatataggaattaaatgtaacaatacactcttattgggtgaatggaatgcacaagcatgtttctgtccctaatttttctctgctgtctctgtggggagtatctgcaactatctctacctgttttaatttatttgtagtgccatggacaactgatatgtctgtctgaccaaagggatataagttgatgcttttctaaacagttgtatcttggaattgcagct

SEQ ID NO: 3405 - DNA, 3312 bp, Glycine max
  Intron number 1 from transcript Glyma06g07110.2 (locus Gly ma06g07110) derived from phytozome v7.0 (chr-ID Gm06; pos 5141400 to 5144711 reverse strand)
agatcgcagcccttagccaggagattgttaataaggttcttcccactgcttaatatgtctgtgtaattttcatttcaatcccctcaccaaaggattcatagtttctacttttgaatgggtctattctgtaatcgcaatacttttcaatgtaaaatccgagattcaggttatgaattgggctcccattgttttttgttttttttaagtatatagaaaacgtaggaaaaatccccaccccagctatgtgcatctcttctctcgttatatgctagttttttttagggcaaggcaacatgaacaggttctgaggagatagatactgagttatacattttgtgttgatgcatttgctatgtgacgtgtgtttctgaaaggctgctggagattctgcagaacctatgattcttgtataattttttaagtggctcgttaggaagtacttatgtaagtccgttttgttaatttcattgtttccaaacaaagcatcactaatatgaagattcaatgtgacctaagagattccttaatccatgagaggcaaagtcaaaagcatgttagagtagaggggaaaaagagacaagagaagttaaatataattaatgcaccttaaaaccaatcagtatagagtattcaaatcccatgcagtatactgagtatagtatgaaatctttaaatattagcctgtcattgccagaaaaaggtaacatattaaaaatttcctcacctgatatccgaaagaactggttaggcttctatcctatcctatggtacttgatcttgccataagacttcaggaaattgaatatatatatctttttattttgtgacagaaatgagaaaaattgtgtttatcccttgagaaatcattgcatacattatgagagaagtcagaaaattattttttttttccttttttaaaatttagacaaaatgtctaataggctctattttaacagaaaatataaaactttagtgggatcgctcctagttcgccggttgaactcattgagcacaagtccaataaaatgttttagcttaatttggatatagcaaccatagtttaatttccaagccctattaacgtacatgaaaggctccaagtttagtagttgtagactcttcaaaaaaaaattttgttgattaaaaactgtggaaggagaacttcccaagagttagagcaacataagtaaattttctctctaaaaagatactttttataaaattcgagcaaaaatcctccttgtaaaacatccttacagactcttcaacttaccaatctatttttatatgttttctatatttgttcaacttaataatttatgatcattggttaaatttttattttaaatttggtagagtatatttggaaatataatgatattataaaacacacaacatgcaaaaaattgaaaactaataaatgtaattaaaatgattcatctttaaataaaaattataagcatatgtttggtactgaagaaatgttgtgaaaaggaaacagctaataaagaatagcggagcggggagtatgaatgtatgatgactttcgggccaagggaaaaacacattgttacataaatttaccaaagttacccttgtggtactcttgagaggcatgtgccttgcttgttgtacagttgtgattggtttcaaaatttctaaatatggatattatgctttagagatttttaattcaaaaaattaaagtcataaatcaaatgcaatttgttttctaaaatttctaggttttaaaacgttttttttttgtgtgtgtgtgtgtgatggatttcatacaagacatacacctgccctagagtacaaccacgaagcatcgtaaaatactaattttgagaactacttttttcaaccttcgttcaatttcttgtagttttcgaccttaattttcatccatttgtttgattccctttccctgttttattttatcaataaccgcgacttggaagccacgttaaatcgtaggtgttatctatcatatggcgttaaactcgggaggaagaataaatcatattatacgtacataattattcatatcaaatagtttcatttctgtcttttttttatgaaaatttcttttccatctatataaattttaaaaactcacactgctaaataattaaaaataataataaatataatttttaaattaataattatcaaaatcaacaaatttattaaaaagaattacggtgtcatttcatatttactctatcaaatatcaatatacgacgacgacaacaaaaaacaattaatcacatctcgtcttcaccatttgaaatgccattcctgccctttgctagtattattatttattttcatctaaataaataaacaagtccacgaccttggttttaggtagttcaggtttctgttcttctcaatttgtttgaatttgttttaacccatcacttttctctgctaaccaagccgttgatttctgagtgctcacgctacaagaccattctttcttcttctgagtacgtgcacagtgaatttggtcatctttattgcttatgattatcatgtttttaattcttcttgttttttttttttattggtactctttattttgaattatttatgttaccaaaaaagaattatatgtttacatgttttttgtttactgttctttagttctgagaaagcgaaaaccagttgcatgtgttagcatgctttggtgtgtttcagtgactgaaccgttaagtttctattctgtgttaaaagttaagttttggaggctgagttttgagggattgactcgggcattagttactgcaagattgaaactttgagattcagtaaagggaaatgatccaaaagaataccaagttatattattttgagtaatgactcagtttgattcctgaaaaattagaggaaaatatattcgtccttaaaactataatttattttttattttaatccctagaatcacaaatgcgtgtcatctttgttttcttcttctgaaaaaggaaaggacgcgtatgacctgtgtttgtgatttttagggattaatataatttttttatttatatattttatgtttttcatggattgacctgtttcaccccttttaatatttttaaggattagccctctcaacctaaaattatcgtggatgaatttgagtatgtggtactttttagtcaactttttactttttgctctggtgataataaaaaaataacttgggttcttggcgatgatttattggatttttcttcttttattttgtgttgtgctttctgcattttgctgaattattttataaatgttacaacatcagattgaaga

SEQ ID NO: 3406 - DNA, 4494 bp, Glycine max
  Intron number 9 from transcript Glyma03g01410.1 (locus Gly ma03g01410) derived from phytozome v7.0 (chr-ID Gm03; pos 1137433 to 1141926 reverse strand)
acggtggagacttgtatctggaggagaagaaataggtctgtacatatagatttttggacccaaaaacacattgagacgggtttgataaaaaaaaaaaaaagaaaaggaaaaaagtaatctttgtgatggatgatattcattgaagacaatgggagggcatctttttgtctatatatacagatctcctagttgtcaattatactttgaaatgaaagaatttgctattggacaaacatacatgatgatttgatcgaactcatgcattttctaatttctaagttcatcgttcatttagaatgtgataaaatagtgaaaattaaaattggccggatcttttcaacttttttatttagagtgtacaataagatagtgacaatgcttcaatctataaggactgaattagaaattagaaattagagtgtgataaactgggtgaatctttttatcttctttttttttatttcttaaatttattcagttgatgctgaggggttgaaagaagagatttatcgcatcttcttgtccttagtctaatcgcgcttttcacccattctgctaacaatgaacataaagtcattgtgagctacaatgcagatacatgatggccacaaagatgaattgaaaacaagttgggtagtttaacaacgcaaagtctaattatccagcaaaattttgtgcttttaaataaaaaaagacaagaaacaaaatttttggggagctaattcagttcttatagattgaagcattactaatttgaaccacattgacagaaaagtcatagtcatgggaacataatcatgtgattcggtgaaaactattttacctacctttgttccggttcccaaactattttatctatcttatgtcttctccattttttttgtgtcggctaaatatctcaattttaggtggtgttcatttgaagagaaagatcatggaaaaaaaagctaaataaatactaaaatatgtaaaactcaagctttaacattaagcaagaagttaacagtaagaagttaacagtaagccaataacaatcccgctgactctgcacatttttccatattcaaatttacaatttagttgaacatgtttagagagatgaaagtatttttttttcgtacatagagatatgaagtattgttgaattgcaaactggagcaagggcatgaaggaggtggagtgtgtgagaggagaatggactaatgaaagcactgctgataagtgaaggaatttattttactttactcctatcattttacaattaaaagagataaaaaataacatttgattccattgatagagggataaaatatgtttataataaacacattcaaatagaaatataacaaactccttttaaaacctaccttaatgagatattctctatatttatttatcgttattaaaagacaaataaagtacatcaacactaacgatgagcctaaaagttcacaataatattaattctcgttccagatatataacatttaagattttgagacagatattagaaaatataattaatttattgaaagaaaaaaaaatgtatactttgaaagaaattaaaaaaatactccctaaaaaaaactactaacttttaaggttgatacacacaacttgtatgaaatatttaatatctttcccaaactacaataaaataaatattattcacaaataacatattttgtttaaaatgttcttatttaatatctatgatgaaagaaaattatgaaataaatcataattagtaagtcatattaaatggctatctatggaagaaaataatttgagacttgacatttgtagaatatcaataactttgattcagatggagtatgaatttagtcttgaatttgtaaaacatatatagatggcaattattgtcacaaaatactacttcactttcaaaagtagatgcattcagtggaagaaagattagtagaatacgtgaatttcattcattgatgattactaaatcatagttacggcctcatcaaatacaaattcctgacttaggacgcattgggattgcgaggagagagggaatgcatatatttaaaagtaccactcaatttttaaagacattgattttatagaaacatctttaaaaacctccaacatcataacatgtatgttgaggtgtacaatcaacaagatttagcaaagttataattggtatataggagtttttttaacatgtcattagggattcaactccttattatttatatagaaaaaagcttattgagagataaatacagatcctttaatgaacattcatgcataactttagtatcttggatttcttttgttataatattatttattttgtaaagtctgtgatattttttttacaaatattataaattatttactgtctctattaacagaattttctggatccagtcattggttgaggtacacaactcatacaagttgaaacataaatgtagaacatggttagtctatctatgattataaattataagacattgaaaaagcatgaaaagaaagggatggagaattccacggagaagagacgctcctcatcgttttttacaattccacgatcctctccctcatattattttacatcctaattatataaatatacaataatctattttcaatatggaaatacgtttttgtattgggcttaaaccactcctttttcgccatagcccaaactattcgtttctagataactaactaattgaaaagtttaaacaagcttaatttcttttaataatgatgatttaataattagttatatattatataaaagataatttctaaatgagaccgtcaaaacacatgtgtatccccttcgtgatagctttgcttagtgccttagtactcaaccgttgcagtatacacacaaccagctagagtacctagattatatgtggaattcaagattatttttttattgaggatcccaagaatacttgttccaacattagaagacattggtggtggacatttgcccaactcataaagatatacaatcctcctcccatcttttaggatgagtttgatggtgtgaaagagaaaagaatgtaagagaattaaaaaatatatttaaattaaagtaaaaaacaaaagtgagatatgcattatttaaattaagatgaatttaaagttgtttggattaatcaaataatgaaagaatgaataaaatattttttgacttgtttggttagattgaaatgcggaagaaaataaataagaaaactttatgaaaaagataaatttatcctccataatataaaatatagagaaatgtgatccacacaaaatcgataagaattataaaacatgaaagtttttctcataaatataaacaataaattttgtaacataaaaaattgatattaaaaatattttaaaaaaataagttttgtttataagttataactaatacaatatttgcagcatagaaaataagtttcacagagatgcggatctaactaaaataaatttttcatgaagaaaatttgactttacatgatctatacgataggagcaacgaaacatctaacttgattttattataaaaaaaacaaaaagaaaactaagtggagatgacatagatctacttctcctcttgcgttcgtacaccaaaattcttacaatttccatagtaatttaagttacctctatttttccatttcaattcaagagaaatatttttttatgaatgagaaaatatatagaaatactataattaggtgccactcacaaaaatttaatcatttatattatcatttgagtctcatctaaacaactaaaataaatgcatcctaatagagcacaaaagtttcagaattcaaaatgaaattggtatcaatggttgtatatgactaagctatgcatatagataatgatcaatcatgtgcttatttttatgattaggcattaattcttacgtgtgtggcctcatgagcacatttcatacaactcgagaaaaattgtgaatatttttggtatcttcttcgtcttgtttgttcttgtcgtattaaatacttatatattaagatgtttatcaagcaatttctgtctcatattttaatctctatctctatctctatcttatatacaaacaaggccctgactgcctgttgtctgtcctgttgacacctgtccaataaaaaaatgataaaccctccaatacttatttgctcacttcaatccacgcgtcctgcccgtttttgcttttttccttttccccttcccattattgaagcccctccctccacgtgtcctgtccgggttttttccatttcttcttttcccattctcactccgttcactctttctctcctttgggcttgctttctcaactttctgtttgtcttgcatttgcttttatttttgtggttgcacgttcattctttgttttcctttttcggtttgggtttttgttgatgggtttttgttttgcttcctgctcgctcagctttttgttttgtattttgcttccttttcattctc

SEQ ID NO: 3407 - DNA, 1163 bp, Glycine max
  Intron number 2 from transcript Glyma18g09450.1 (locus Gly ma18g09450) derived from phytozome v7.0 (chr-ID Gm18; pos 8350258 to 8351420 reverse strand)
gtacgtaaaatgctttgctgaatagtatgtatttgtatgtgttttcaggggattcttgattcatgattaaaagttatttaaatttaaatcttagcccagtttagtttgagaatagcgatttctaatatgctgatagtataaaatgaaagtgaaaagaaattaaattcttgagataatatctttttttttatgttttctattttcacaaataattacaaaattgtcagttttcacattataaccaatagggtcggcctagaggtggggagttggagtagatgcatccgtcctaagttcaatcttcatttccccaattgcacacacaaaaaagtcagttttcgctttgttcttttttttaaaaaaaaaaattgtaaaccaaatgatgtttttaccattttttttcacgaactttgaaatcaggaaacaaaggaaataatgcatcatttttataattatttgtgaaaacaaaaaatgaagacaaaacatttccttagccttaacagatccctgttttcatggctttatctatgttatcacttggtctaaaactaatatcaacaacattccagtcatcaatagttatcaaggaagaaaagtagtctgaggcaacaataattttaatgatttggtgtcagtaagttgtattgattggtgacattaacaacagttccagttagtgatgcatcggaagatattattagtcattccactgaaaaacttgttaaaaaatcagtacatagttctcttgcagagaaactacaatatttgtgtgatatcattagaatatggctagtgcataatcttatagaccgaaaggagtaatgatctcttgttaaagaatttcccatgtatatagaatttacttgaactactcaagtgtagggccattcttctagtctttgatttgattatttgtagtttcaggctttcagcactgcaattttatatgtctagtgcactaaaaagcccgaataatgtactacaagattagcaaactattcaaacatttatacacgcactctgcttaatgcttctttagaataattatcaattatgctactttaatatccaagaatataaaacacattattttcatgtttgtacccttttctttatattcttttgtattaacttttttggctctcccatgtgcagatatcact

SEQ ID NO: 3408 - DNA, 8137 bp, Glycine max
  Intron number 1 from transcript Glyma07g18170.1 (locus Gly ma07g18170) derived from phytozome v7.0 (chr-ID Gm07; pos 17924093 to 17932229)
cccgcaaggtacatttttttttcttcttctcattctgcgaacaagttaaaaatctcattctgctaacaagttaaaaatcttggcgcgtgttaatgtattttggttagtttctttgtatgaaagagaatatgatatgatatattcatcatgtgtttgttaatcctaaaagttaactttagggatgaggaaaagaacatttttctctcccctttcgttaaacatcattaacttatatgaaagattacaagtttaaagataaattaagaataatgataaaatatcttatcttatattttgataatatattctattaaatataaactgattagttaaattaaaaatactgataaaatattttattatatattatatcattaacttgtaattcagggatgaggaaaaaaatatttttttctcctctttcattaaacatcattagcttatataaaagattacaagtttaaagataaattaagaataatgataaaatatcttatcttatattttgataatatattctattaaatacaaactgattagttaaattaaaaatactgatagaatattctattatatattatatcattaacttgtaattcatgaaagcactttgctatttgttataactcttttgtaaagagtgtttcaagtcattgttttgttttgtgtgtcatgttttggcatgccaacctctgtcttatctataataatataaacttttttttttagtgaaaaagaaatcattttacattatgaacctctcctctgtagctgatccattacactttaggacttatcaaaggaatatgtattcgtaagacatttcgttcaaacttcaaagtgctgtattctgccatttttttgcttgatttttttcttcagagaaatgtgtttcttttaatttttgttgatcgatcaaacgactatattagacttattccattttgcatttcatttggaagagcatgtgaatcctcggtttctgtatttgatcattaggaatatgtaaaaagagtttacctaatatggtatttccctagtttaggaaagggggtgggggagtctaaagtttcattttccaacaatttggatgatgaaaaaaaaaagttccaagagataatgtaatttttattttattttaataaaacgtgaagataagagaggggaggttgtaatgaaagatattatagaattaaaaagaaacaacatataaaaaaaaatggggcccaaaccaaattcatgacagggattaggacattgctacgtactatcaatgaatttattggtacacttagtaatttcacattttttacattttgttcttccgtaaaagaatatagatcagtcaatccgtaagtctcatagcttattaacacaatgttttaaccaactgaattaatagttcaattatgttacaaaataaatagtattgttatatataacactaaaaaattttaatgtatatttaatgcgcatgtaaatttaaataataaatttgtgacaattaattttgatataactcatacgaattatttaatatgtatatctttttataaataaaaaaatatttactcatacgaattacgtgatctgtatgaatcatacggattaactcatacggattacgtcatacgtaagcattttttaattttttaataaattaatttttttaatagtaaatatttttttatttataaaaaatatacaaattaaataattcatatgagttatatcaaaattaattgtcacaaaatttattatttaaatttacatgcacattaaatatacattagaattttttagtgttatatataacaacattatttattttataacataattatactattagttcaacttattaaagtatcgtattaataacttgaaattcatatattcaacttctacttcgatcattaattttaaattaactcgtcacactttccccaagattaacaaataaaaagtccctcaatgaaacctatatgaagcaatacaagagctctttctgaaaagatcatctaagataaaaaaaaaaaaaaaagtgcgggggtgggggggacaattgtgacaccctctacccctcacatatatacaaacaaggaataaaaattcaaatattaattaaaagtatttttttaaaacatttttaaatacaagcctttcaaagggataaaaggttcacaatcattttcttctatatcatattcaaacttgtccaaataaataataaagtcatcggctcaaacaaggccgtctaagactttatacaattaatacaaaatcatatacctcaatgtcacatcctattagagtgttgtgtctcgacgtccttcagcacaaggttccttaaagaaattcacctagtcatctgctcccccgaacacaaagttcaagatcatcacaggatccaaacacaaacaacacacagagagtgagttatcacattcctaactaatagagaagcaagacaactacatatacatatcatataaataaaataaaacttacttaaatataactcacatgattctaccactttgtcattcgaaattcaccttttaatcatcaatcacacttttcaatcatcaatcatattatacaagaatcacacactccgatcaagacataataacacatcaatttcataataaacaattagcaagcgtatgcaacagttatgctaagactcaaacctatatgtaatgtggtaccatatcagtgaaaaaccaccctggggcgcttaggagtacataacaagacacaccacacaatgggtttgtcaggtcactctcattaagtaagatcatagggagaccagtcaaggtcacgatgttttgcgagaatgcttcaaccataggagataagcataggcttaaaggagcactcaaacccgatgacccccaaggcttacactcctaagagtccgtcatggcttctccctcctgattcaggtccaacccctaaaataattttcgcatgcagacactgctcatgaattatacaatacccacgacctcacactcatgttttaaacacgtttaacacattgcgctacaatttaagactggttcctaactaggaacctacactttctctttaacactgcgcataaacactagtcgggttattgtataattcatagctcacaatataattaatgtaacatcaagtgttaaacacatccacttattcacaatcgaatatcatgttcacactttaacatctcataacatcacatcaatcatctcataacattcctaatgatattcataaggtacaacatacacatgttcatcaaatttaaccataatattctcaaactccaacacttaataatttttggaatcatattataacactctccgttattatttacataaattattaatataaataactacctctctatatataaattagcatacatcatattgaatcaaaaattacaaagtaagctttcaatgcacaaattctaaataattatatggacactttggtcaatttcaattatgatattaattttttaaattatatataaaaacctaaaaatcaagaaaaagagaaaatacaaaatcaatatctctctaaatttctcattactttatttcatcaattcatattaattagaaaaaaatactcgatttatagggttcacactcaacacaataacatattaattttacaacaattggtctggcaaacatatataattcactgtaataattataaggataaaatgaaaattgcaaaaacaccccaaaactcgttccaattgatatctctaaggatccctgtatatattttcactaattcccaaataactcatcccttacctctgagcggactcatgtgtctttagctagcgatagcagcatctctagcggttccttgagattccttcagttattcctccgactgctccgatagaatttccaaatgtcagagagacggagaagagattgaaacttccacttgtactatcttcatatgattcctttttctctctccacgaatattatctcgcaaatcccaacggtgaaagtgtgagcaattaaatttcaaaaaccatatccaattttcatgaaaatccaacggttaatgaaactaggatcgtagttttaccgagacagttttgggtttctgcgggaaaataaaaggctacaatgtgaagggtttttctctaagctcagatatggttttaaaattcccaacggtgagaatgtttggaattgggttgtgaacgcgctactaagatttcacggtgatccaacggtgaatgcgtccgagatcatcatttttttgagacaggttttgtgagctgcgtgaaaaagaaaagattttgagaggagaaggggagaaacgaaacgtgatgaggacataaccaagggcaaggaccatgaagtacttgaaggtcccatgaccagaggcagacttaaacaagcccaacacgtcatagagacaaggctggtcatttgtatagttgccattgatgatgattgaaggctcaagtggagaaagatgaaggcccagaggcagaagcactaccaagactactaattgttgctgaaggcccaaactaacttgaagacccaacttaaataagtttttagttataatttatttttattgtaattttggcccaaactgtttagaaggcccatgtctatttttatctttttgttcagatacactataagtatttatttttgttttcaataaagaaacttttggcattttataaaatttggtgacagtttctcttcgggttccttgttgaaccaattatcagacttatcaaggtaatccttgtggcgtctaccctgacttatcttccttcactggaagtggcgtcatccaaaacctccgtagcctgtatcaaacgatccgctcctactcaggttcgtatcatctggtattagagcttcggctcttgatacaggttctatcctatcctatcctatcctatcctatcctattttttttcttcgtaatttgtctaggttcgtgtttttgtccttgttctgttatttgcgttcttgttcttgtcacgttcttgttcttgtttcttgtgtctttcaaactttgtgtcaaaaaaaattgtttgagttcttgtttcttgttcttgtgcctatcatattgtattctgtcttttgttcataacttttgtttcagcctattcgaattctgtttggggtaaaaattgcctaattgccgaattgctaaactgtcaaatttgcctaatgatgattgcctattgaatgaattctaatagctggacgtctgaaaaaaaaaacaaaaaaaatagagaaaaaaaagagacgaaaaaaaaaagaaagaaaaaaaaagagaaggaaacagttgcaaaaagaaaagttgcaaaaattttgaaaaaaaaaagtgggtgtttgatctttgaacacgaaattgaggcatttagaggtgtttttttgaaagaaaatcgtggaacaaatccccttatctagactgtcctctgaattctgagcgttttgatatatagtgggcctcaaaaggacaactgtagcaaaagttatgagcatttgaagtttacttgtcctatctgttgtcctatctaatatcttatctgttatcctatctaatatcttatctgttatcctacctaatatcttatctgttatcatatctgttacccaaattaaagctcatctgttatccaaatccaatctaatatattattatccaaatcaagtccaagttgttatcccaaatcaaatctgtttgtgatcattatattgtcttttcttttattttatattaccttgtgtgtctaatttggtccatccaggaacttaagaggaaacacgagtggtaaaaggcaagagggaatacattacacaaaagcctattgagagcattaaacacgagtgtactaccatctaagagttaaacacatgagtagagtgttgtgaggtcctgaaaccttaataatttttattgcacatttttttttcctgttgaattatggctggagcaggtggtggtggtgatgagtatcatcagttggacggagctcaacgtctgttactggatgcgatgaatgcacagatgcaacgtttgctggaccgtaccaatgaggaggtctatggacgactagaagctttggagaaccaagccaatcagaatgctagacgaaatatagatgggaatagaggtaacaatggcggtaatgacggaccgagacagaacctggttgagggagtaaagctcaatgttcctcccttcaaaggtagaagtgatccagatgcctacctggactgggaaatgaagactgagcacgtatttgcctgcaatgactacactgatgcgcagaaagtcaagctagcagcagctgaattctccgactatgcccttgtttggtggcataaataccaaagagaaatgttgagagaggaacggcgagaggtagatacatggactgagatgaaaaaggtgatgagaaaaaggtatgtgcttactagctataacagaaccatgcgacaaaaactccaagggctgtcccaagggaatttaaccgtggaagaatattataaagagatgaaaatggcgttagtgagggccaacatcgaagaggactctgaagacacaatggctcgtttcctgaatggtctaaaccctgaaatcagagatgttgttgaattacaggagtatgtggtgttggatgacttgttacatagagcgcttcgggttgaacagcaagttaaaagaaaaagtgcaacaaggaggaactcacccaatacttacaaccaaaactgggccaacagatccaagaaggagggaggtaattcgttccgacctgcagccacatccccacatggaaagtcagcaacgcccagtgtaggtggaagcaaacataacacctccacttcctcatccaatactggaaccagaaacataaaatgtttcaagtgcttaggcagaggacatattgcttctgaatgtccaaccaggaggaccatgatcatgaaggctgatggagaaatcactagtgagtctgaaatcagtgaagaagaagtggaagaagaagagtatgaggaggaagttatgcagggtgatatgttgatggtgagaaggctgttgggaaatcaaatgcagccactggatgacaatcaaagagaaaatattttccacaccagatgtgtaaaagacacctgactacctagggtagtaaacttattatttgctctatatttatttatttaattatactaaattttttttttcaatttatttacgaaaaattaggatgttacaacaatctcaccagatttgaaagcaatagagaggcaatgttgtttgttttcaccacgtgggagaaatcttaaaatggaaaagtggatctaaattactaataaaggaaggagtcaattttggtgtcattgccataattaagaaagacaaatactactaaccaaccagtgtctttagtgcatctggttaagaaatttaaagtattttttttattaaaatacataaaattatgttgtttataattttatttatgctatttgatttttacaaaatatttttttttcattttaattcttcaaccaatatatctaagagtactaattaataagattcgttaaaaaaatgagcaatgctataccgtacaaaaaacataaacacaaaatgcacgaatcagttcatttattataatttgtagccacgtatattcgtgtggattcgtacaatggaatttttgtaacatttagcattttccttaaaaaattaataaatagaatatgttttattaaaaatcacattgaagtgcatttgtaataataaatattatgccttaaataaaaaaattattttgattctataactagctaaaacaatggttaacaaaattagtaaggattaaggaatatataatactttatgaggaaagggtgggaacaccttcgattaattagtcttttttcttcagtacaacgggcttattaaactaatatttattaatatgaactatgaagtgcctaactttttaaaacttagtagaatgttggaatgttttacatttataaatgtctttttgggattaataaagcaatgctcaatgatacgatacaggttgatattgatttgcgaggat

SEQ ID NO: 3409 - DNA, 1074 bp, Glycine max
  Intron number 2 from transcript Glyma06g16260.1 (locus Gly ma06g16260) derived from phytozome v7.0 (chr-ID Gm06; pos 12774836 to 12775909 reverse strand)
atcagtacagagtgtggcatccctgactacagaaggttctgactcttttgtatactactttctgagatcatgaggttacataaaatgtttattgggctcttttgctcagaatggctgcttgctatattgtttttatgatattgaaaattctttctgctatttattaatatatttgttggaccttgtaaagtttgtggatgtagcattcataactgatggcaacataaaaggattaaatggtttaattgcttagttgctttcttctttggtcatgttatagatgttgtgcttggattgataattattgctatatttcatcacattttgattgatcctaccatttcatttagattatttggagcttattttccatttattgcaaagtcaaagtgtgatgaaatatgtgtatggcctacattttttttaaagattttccaaaatttttgtttgctttgtagatgatctgaggttttttggtcattgatgttacatgtttcctgtcaatcttaagaaaaaagaaatgcataggcctctttgggtttcaacttctacatttaataggctgagttggttagagattctcttgccaatctgattacaattcgaactagtagattaggggaaaacaaaataaaagataaaactgagatcacatgaatctcagtctatactaatctgatcttattctatcctatgtttctagaagaataatttaaatattgaaaagaaaaaaatcctaacaacttcgatagtaacaaataactatgctgcattaatatttaattattggaaaccagatgcatcaatgattcatcatcagttggaggggtctaccatccatgcactgactgtttatcagtgctaattctgatcaatatccactttcatttattggagtcaaagatatgtgccattcttgttgtgtataaagattatataggcttcacccttttttagtttcatatctagagaatatggaatgaatttctaaaatttattattcatgatgctgactgtatcttcctttctctgttcttcttcactgatagcaatttattatttattgcagcccca

SEQ ID NO: 3410 - DNA, 1855 bp, Glycine max
  Intron number 1 from transcript Glyma09g37750.2 (locus Gly ma09g37750) derived from phytozome v7.0 (chr-ID Gm09; pos 43250867 to 43252721 reverse strand)
aggttcccctggatcaaaaaggtttcgaaacgacggtacatatatgatctttatggtgcctaatactgcaagtagcttcttttcctttccccgtgtcttgttttattatctgggcttgcaacaatgttttttttttttttttgctgcatgaagaggaattagcactatgcttttgtattctggactgtgtgaattcaaatttatgaggtgaaatttgtttttggttaggcacaaaatgtggtgtaatcaaaggagagaatttgtgctttcatactcagtggtagtgtataagttgattttaacttagataaaagtttaattcattttatctttttattttaagtacttagtactcactgagaggttatattcttcttctatgaaacttgctgaaaagtttatacaaataggaccacagagtagtgtctcagaaaaaggtgtgctgcttatgatgtcattcatttagaagttgaacctggttttgtagtcaaggggaaaacctgagagggcctgttttattgattgggagaagctgttttatatttgaaagtgaattttgtttgccaagagaagttttcttgatgagagaggtcgagaaaaggggaaagaaaacattctcttccaaaataaatgtaaaggggaaaatatttgcacttaaagggcttgtaatttgataggaaatttgatttgacagtgattaaagagtgcgatgacaattacaattgtaaactactttgcttgattttcttttggttttaaccatgaaatccatgttcattttcattgctccatgtactaattaaattgttgctgccatggagcggagagtaagagagaccttctttttagcttatctgaaaagcattaatactgtcccttttgatgacccttattttctgtaggagatgacctcatgcatggacctagtgaaagtttacctatttacgttaattcaatgctcctggcatatgaatgttcaaatgtttataacacttagattgttctttttttattggaatcagcttcgcgtaaagatggagattggacctgtcctaattgtgggaacttaaacttttcttttagaactgtttgcaaccagggacactgtggtgccccaagaccatccctaactataactccagtaagtgcatgcttgttttggattgtcatttcatatcttggtgaatgaataattttatttgaaaaggtatgcaatggacaaactcctgaactggatgtgtacaaatagatgacctatcgttccaaaacaataaaaacttcgtaccccattgcccagaggctcttcgctatgcgaaggtatgggggagggatattgtacgcagccttacccttgcatatgcaaagaggctaaacaatagaagagaaaaaactttcaaggaaaccacagtggactctatttcatatcatgttttttgttttcttctcagttttggaattttgtttgtagaagcaaatatatttatctctttttctagtaactttattacttgaatagtgaaagatccaaatctcctgtaaatatttgatacttcatgttatagtttctgggtgaaaaatttgtggaatgggtatctataaatataaattaatttatcccagtatatgatgttaagcttgaataattaaaattaatttatcccagtatataaattaattatgaatatagatttttcttagcatataattcttggttaaaattagctctaagtgacaacaatgaattaaaaatttgtataattgttgttttatgcttggtaacttttaattttgacaagtgtttgattgattgggatctgcagccagcccccattataagcccatatagaaacagtca

SEQ ID NO: 3411 - DNA, 9517 bp, Glycine max
  Intron number 7 from transcript Glyma10g33120.1 (locus Gly ma10g33120) derived from phytozome v7.0 (chr-ID Gm10; pos 41486889 to 41496405 reverse strand)
tactttatccttggagagaaactttatttgggcaggtaataaccgattccttataattttgaattctcttttcaaaatgacaaagccatgaaatgcagataaattcagaacatgaacaataagcacgtgtacaagttgttagcacacaaggatttacatacagcttaatccatgaaatacagcacgtaacattgtttatttattttcttactgggccctaaattaaataaaatcatgcacaaacacatccagtattccttggaatgagaattataattctgaaatttgcttctcatgaaatcttcttcagcataataggagcatttacaatcatcattggtatgtacttgctactgtggggcaaaagtgagcaagaggtttcgcagtgcagtactgaagattcaggatgcagaatatagtcaaggagatttgtggtcatgtttttggccaaacattttactgcaaaaccaactctgctaaagacttgttgctttccaatcctccgaagtcatatgctaagttaactaagtagaattttcgtattcgatatgtttttcacataatgatacaagttatcacaaataccttatacaagcataaccttagaagaaatttccttttaaatttcaaaggaatcgctacaacaaattatagaagaatttatactagaaactatgaaggaagtggctaacagggaaatttgagatggacatcaataattttcatgccattgcgtatatcaaagaatacttctagcctattctaacacaaattacatgttagtgtaattgatctctttattatgttaaaataagagtgcacgcttgttttaatgtaataacgagatgttcggtttaggcaaaggttggaagttacatggaagttactaaaacttccatcaacggttggaagttacatggaagttactaaaacttccatcaacgacaatttttaaaaataaataacttccatcaaccgccaataaccacctgttctttgattataaataatcatcctggttcagaaagcataacatgtgaaaaactcacaagaccaaaacaaaactcttgaattataatcttctgattttatccgattgaacaattttggttgaaccccgaaatttgattcaatctgaaagtgtttatacacgacttcagatttatccaggattatctcgattttcaaaattaaccaacaaaagattgaatcaaatttttcgagatgacgaacgatagttcgaagatgacaagcaagtttgcaaagttggacaagtttgaagggcaggatttcagaagatggcagaagaagatgcactttctcttgacaacattgaatgtggtgtatgtgttgagtacaccgatgccggtgtatatggaaggcgaaactctggatcaaacaaggaagcgttcgaaatgggagaacgacgattacatttgtcgtggacacattctgaacggtatgtctgactctctctttgatatttatcaaaatgttgagtctgctaaggaattatgggactctcttgaatccaagtatatggcagaagatgcctcaagtaacaaattcttagttagtaatttctttaattacaaaatgattgattcgaggcctgttatggagcaatataatgaactgctgcggattttgggtcagtttactcaacatgatttgaaaatggatgaatccattgcagtttcatctataattgataaactaccttcttcttggaaagacttcaagcataccttgaaacatatgaaggaagagttgactctggttcaactcggcagtcatttcatgattgaggagtcgctgagggctcaggaaattgacaaagtcaataataaaaccgtagcaggttcctcttccgttaatatggtagaggaaagtggaacagttaagcaaaattacaatgctaaaggtaacaaacgaaaatttcaaggaaataagaacaaaggtccaaacaaacatacaaaattgtcatgttggaagtgtgggaaacctggtcatttaaagagggattgccaggtgttcaaaggaaagaacaaggctggtccaagtgggtctaatgatcctgaaaagcaacaaggtcagattgtagtgaataattttaattcgaatacgaattcaaattatgtatcactaatatttgatgcattctatgtgcaggatgacgacgttgcttggtggtttgattcgggagcaacaagccatgtgtgcaaagatcgtcgttggttcaaggaatttagaccaatcgatgatggctctattgtgaagatgggcaatgttgcaactgaaccaatcctaggattaggttgtgtgaatttagtttttacttccggaaaaagtttgtatttggataatgtcttatttgtacctggtattcgtaagaacttattgtctggtatggttttaaataattgtggtttcaagcaagtacttgaaagtgacaagtacatcttgtcaagacatggttcgtttgttggatttggttatcgttgtaatggaatgtttaaattaaacattgatgttccttttgttcatgaatctgtttgtatggcctcgtgtagttctataactaatatgacaaaatcagaaatttggcatgctagattaggacatgttcattacaaaagattaaaagatatgtcaaaaacaagtatgattcctccttttgatatgaacattgaaaaatgcaaaacttgcatgttgaccaagatcactaggaaaccttttaaggatgttaaaagtgagactaaagtcttagatcttattcatagtgatttgtgtgatttgcatgctactccatcattaggtcataaaaaatatcttgttacttttattgatgatgcatcaaggtattgttatgtatatttattaaatacaaaagatgaagctcttgataaatttaaaatttataagaaagaggtagaacttcatcaaaatgggctaatcaaaactcttcgtacggataggggaggtgagtattatgatccggtttattttcaatctactggaataatacatcaaactacagctccctatacaccacaacagaatggtgtagccgaaaggaagaatagaaccttgaaagaaatggtgaattccatgttatcctattcaggtttaagtgaaggattttggggtgaggctatgttgacagcctgttacttgttgaaccgaattcctaacaaaaggaataaggttaccccatatgaactttggcacaaaaagacaccaaatttgagttatctcaaaatttggggatgtagggttgtagtcaggcttacagaacctaaaaggaaaaccataggtgaaagaggtatagattgcatatttattggatatgctgaacattctaaagcatatagattctatgtgctagaatctaatgattatgttgctgtgaactcggttatagagtcacaagatgctatctttgatgaacaaaggtttacatctatacctaggccaaaggacatgaattccatgtcgaaagtctcagttaatattgaggatataccttcaactagtactgaaactagaaagagtacgagagtaagaaaggctaagtcatttggtgatgactttcaactctatttggttgaagggtcaaggaatgatattgaatttcaatatcaatattgccttaatgttgaggaagacccaaagacttttagtgaagcaatggcttcaagggatgctgtattctggaaagaagaaatgcaaagtgagatggattccatcatgcaaaataatacctggaaattggttgacttacctcctggatgtaagccattaggatgtaagatgatctttaggagaaagatgaaagtggatggtactgttgacaagtacaaagccagattggttatccaaggctttaggcaaaaggagggtattgattttttcgatacatatgctcctgttgctaggatatccactattagactgttgttagcacttgctgctatccacaatctgatgattcaccaaatggatgtgaaaactgcattcttaaatggtgaattggatgaagagatatacatgaaacaacctgaagggtttgttatgccaggaaatgaaaataaggtgtgtaaactgatgaaatctctttatggcttgaaacaagcgcctaagcaatggcatcaaaaatttgatgaggttgtgttgtctagtggttttgttataaaccaagcagataaatgtctatacagcaagtttgatactcatggcaaaggagttatcatttgtctgtatgtagacgacatgttgatctttggtaccgaccaagatcaagttgatgaaactaaggcatttttatcttctaagtttgatatgaaagatatgggggaggcggatgtgatcttaggaataaagatcaaacgtggaaacaatggtatttccatctctcaatcacattatattgagaagatattggagaaatttaattttaaagattgttctccggtaagtactcccattgatcctaacctgaagctattacctaataaaggtgtagcagtgtctcaacttgaatactcaagggcgataggatcactcatgtatgcaatgattagtactaggcctgatatagcttatgctgttgctaaactcagtaggtttacaagtaatcctagttctcatcattggcaagctatgaatagagtattcaaatacttaaagggaaccattgattatggtttgacatatactagatttccttcggttattgaaggttactctgatgcaagttggataaccaatatggaggattattcatccacaagtggttgggtattcctccttggaggaggtgctatctcttgggcatccaagaaacagacctgcattacaaattcaacaatggaatctgaatttgtagctttagcagcagctggtaaagaagctgagtggctaagaaatctgatctatgagattccattgtggcccaaacctatacctcccatgtctatcaggtgtgatagtcaggcaactttggctaaggcatatagtcaagtgtataatgggaagtctagacacttgggtgttagacacaacatggttcgggagttaatcatgcatggtgtgatatcagtggagtttgtgagaactcagcataatttggccgatcatttaaccaaagggttaagtagagatctcgtgaaaaggtcggctgtgggattaggattaaagtccatctgaaatctcttatgttaagatacccaattcccatctaatatgacattaggtgctgaattcaatgtggaaagcttaacatgtagagattggaacacatcatcgaaagtatcccaaaaggaatgtgttcggttctgtaagttaaggaggttgacgtataacttctcaatggttcttttgaaaaattgcatttacaggtgcaagaaagaaaaggactacctatataagcatgaagtttagccgcttcaagaagctgggacttggctttgatatgcttatgaaggatagggacacaggctagtaaaactagtgtcgagcaagagtaatgttataaactattgtgcagattatcttcatgtattcattatgaatagaaagggttcaatccttagtgacaccctgatattcgaatatttgaaatgtgtaatttgctaagatgaaattcaatcgtcacgatatttcatctatgcagtagtttgtggtatgttatgactttggtgatttgatcggtaattacactaaactgggggaggtttgttggacattttagtgtaattgatctctttattatgttaaaataagagtgcacgcttgttttaatgtaataacgagatgttcggtttaggcaaaggttggaagttacatggaagttactaaaacttccatcaacggttggaagttacatggaagttactaaaacttccatcaacgacaatttttaaaaataaataacttccatcaaccgccaataaccacctgttctttgattataaataatcatcctggttcagaaagcataacatgtgaaaaactcacaagaccaaaacaaaactcgtgaattataatcttctgattttatccgattgaacaattttggttgaaccccgaaatttgattcaatctgaaagtgtttatacacgacttcagatttatccaggattatctcgattttcaaaattaaccaacattacaagctaaagtaaataaaccggaaaattgtaagcagtagtgactagtggcaatatttttgcatatcaatgatttggagaaaaacaaatttcatactaaaacggtggatgtaagatcataaaatgaacagcaatatatgagtaaactatgcaggaggatgcctgagctcatgatcttgggaggtatatcgggtgtgcatataatttcatcggtggtgaaggttaagtggtttacatgcactatagtctatctagctgccatacttatagaatgttaaaacttaaaacttaattttaacatttttaattttaatataaaatttagaataagcttcattgtttaaaataattggaacttaattatatagctgccaaacgataacatgagatcgaacacgaactacatgaactagctgtacgtcaagaaagaagcttcattttttatccctttcttattataactatataattaagacccaattgcctcggatacattataaaattagacgactaactgcacaagagtgacaagagacatgacttcatagtaaaaataatttgaacaaatttttagttcagggattatcttaatgccttttcgagattaatcaaagaccaaaagtaagaagtttccaaatcaatgaataatcacttcttatcttattatatcagatgcattaattcattgaaaatagaaaacggttatcaatcaagaaaatttgaactaatttttgattcagggattatcttgatgcctttccgaaattaaccaaagataaaagataagaagttttcaaatcaatttttccctaccattaaaggacaaagatgattaaattaagttattcaattttggctccacgtgtgatgttactctatgtcaggacacaacatataaattactaaagaaaatatttacttatggttttggttaagtaaaatcttcaaccagcatttatcgaaaatgataatgcattttggtcaggattttgaatacattttgtgggaattttccttaacttgtagttatatattacattagtttgtgttgagcatcttaattgagagcttgtgaataagcacaggaaacaagagaatcactaaacttattatggaacagaaaagatgttcttttgtgactatatacagagatttcaagccatacctgctcatggtcttagtccaggttggcttaagcatcttatatctgatcactaaagcctccttcaatcacgggatgagcccttgtgtatgtaacttatcggcagatagtagctgtggttgtgatgctcccttttgcatactttctagagaggtacatatacttttctcttcaagagatggtctgcatttgcatgacttttctttgtgttatcaatctggtagcattttaatatctagcatttacatttctgataatctgatcaatttcaatttgtttgtttcaacaattgaatttgttataatcctaaaactttgtcatgtagctgacaattcatgttttcttgcagaaaagctagaccacacttgacattttctctttttgtacaaatttttgtgctttctttgctagggtaagtgcaaataaatatgcatgtttccacaccatacgagaactcaagtatgaaaacttgatttgtctaattttaaaaaattcaggagtagtttgactcttaatattcactttgcaagcctgaaatacacaaatcctaccttccttgttgcaatgctcaacaccatacctacccttaccttcattcttgcagtggctctcaggttcgcttaattctttatctacatgattttggagtttttaagacagaagccatcataatatttacattttatatttgatccctaagagttgaattaaatgcaggtttgaggttcttgatcttcaaaatccttgagggatagcaaaagttttagggaccgatctccctagctggtgctttgatcatgacgctatacaaaggactcgttatgagaaatttatggcctcctctaatccatattccaagaaaaagtgctgctatcaatgagagcttgaaaggctcacttcttacagttttaagctgtgttacatggtctatatggtacattatgcaggttttccccttaactcagtcataactatttataagttttacgtgcacattttatacatcatacatcaatacatcaagaaagagctggcttcatacaatatatatatatatatatatatatatatatatatatatatatatatatatatatatatatatatatatatatatatatatatatatatatatgtgtgtgtgtgtgtgtaaaaaaaagagttctaataaaccactaactgattccatatttcctaatacaacaacaaaaaccttatcccactatgcgagatcagctataactccatcttataatggaaaggaaattaccaattctgatatcttgtgattgtggaaatgcaggcagccactttgaaaagataccctgccccactatcactcaccacgtggatgtgcttccttggagcagcccaatcagctgttttaactgttatagttgaacgcaacccttcagcatggactatagggttcaatattgacttgtggtccacaatatatggtgttaagtataactaatcacctcataaagagtacaaagtttttgcaccaaaagcagaagaacgaaatctagagttctaacgatatcaatcattgatggcagggaattgtcgtagctggtttgataatctacgttatactatggtgcaatgagaaaaaatggccagtttttgtgacaatgttttaccctctttgtacggtattagtgaatattgtagcgtacttcgtccttggtgagaaactttattttggcaggtaataatccatgcctcacaatttttatttttcaacattacaaagcaatgaattgcagataaatctacaagaacgatatttctacatgtctgttagactgctctatctgtaattttgcattaatacaaatcctttttatgtctccaaagtcccaaatacaaacattatcttaaaatttagaacatgtagtaaatggaccattttcactttggaaactgtcattgtactttccaaaacaaataaaaaaaaaagaaagtagaacaagtagttatagctttatggctttatgcctttatccatgaattacagcatgtgacattatttatttattcttctactccaccctaaattgagtaaaatcatgcacattcggcataactttctttggaatgaggattatagttctgaaatttgtttctcatgaaatcttcttcagcatcataggagcatttgcagtcatcattggacttt

SEQ ID NO: 3412 - DNA, 4177 bp, Glycine max
  Intron number 2 from transcript Glyma17g33260.1 (locus Gly ma17g33260) derived from phytozome v7.0 (chr-ID Gm17; pos 36952017 to 36956193 reverse strand)
cagctttggttgacctaggttcaaggtgagccaacaggagatgtataaccttcagaggttaacaaagctggttcagggaaaagagaaggatagggaaaagctctttaattaaaggtaacatctttagagatgtataacctgccatcagcagcaaggcacttgtaacctttgtgtgaaggagaatagcccaagaatacacattcttgagatctgaactgtaacttatgtttgttataaggcctcagcaaagggaaacaggagcagccaaacaccttgagaaagaataatcagcttgcatgttgaacaatttctgatatggaatctcattgccaatagcaaaggagggcaatctgtttataagatacacactagagacaaaggcatgatcccagtaatgaagaggcagttctgcttgagacaaaagagtgagacccaactccacaacatatatgtgtttgcgttccactaccccattttggtgatgggtatgaggacatataagtctgtgctgaatgccatgatcagttaagaacttagtgaaaggtctgaactcccctccccaatcagactatacagctttaattcaggagttaaactgatttgaaaccatagttttaaatagtttaaagacctctaaagcatcagatttgttctcgagtaagtacaaccaagtgaacctggtgttagcatcaacaaaagaaatataatatctaaaaccagaggatgattgttagtgctgcgtatgggaaaactggtttcaagggtccaacacctcctgaagaagaagaagagaagaagataacacttggaattcgaggaccaagctacctcctaagaactgagagagagaaaaggaaattctgggattcttcttgcattctggaagtgtaaattacatacgtatatagcagttatagaggggacaaggaccccacaaccaaaaaggaaaagatatacgaaatcagaaaatatcctaacagcaaatattcctttattcctaagcatcttctagaagacacgatactagcatattggttgcgcttctccttacgtacggtgcatgcttgcatgagaccttgctacccaatctgcacgtagtccttcaagtgggtagggacagtgatttgtcttttgggccttgctttctgtagcacctgattgctattcgtaacattgcacaatgagcagggccccacagatcagtgtaaacaaggtcaaaaggtttatcataaacagtaagggaagaagaagcaggaagtcgatgttactttccaagacaacagtgattgcaaaaatctgttgagtttttattaatatttggaatattacaaagtccgagtacaattttcatagtgcagcattagggtgaccaagccgagagtgccagatggaaaaggaattggaattatgagtagctgtatttacaacaccatcaactacaacaaatttattagaggaaaaatgactgaaaatcagatttactagacatattaacaagaggactttgtacaacaccggtgaaagactcaaaatcatttgtaggaagcttgtactttggcacaaacaaaaggagttgagggagctgatagagaccatcactccccacaagcccttttagaagaacatgtttagaatcctgtgatttaacaagacaaaaagatgagtgaaactcaaagaagacattattatctttacaaaactgactaacactaatgagattcttagtaatggaaggaacaaacaatagattactaagaggagaagaaaaagaggaaactcctaaagaattaatgttgagaccttgaccatgaccaatagtgatctgatcaggaccctcaaaaggtgtcacttggtgtatattctacaacatatttgtcacatggtgagaagcaccaaattcaaggtaccaactctgcccctgagttagagtgtgagaggagctagctagataaatctgaggatgtttagaagctggttgagtgatctgaggtggttgaatgtacacatattgaggctgtacagtagcttgggaatgtgctggttgagcatatacatactgaacacaggctgagaatattgaacttgcacaggagcaggttgcacaataacagaagaagtatgtgtataagtaggagcaagataggttggtgatggaagggtaggaacataattttcctccaatctatgataacaatacaaagctccatgtccaaacttatagcaaatctgacattgcacatcagcaaagcgatcaccattgcagcctcacgattattccagccaaaaccccgactaccaagaccattgaaaaaatgatttccagcgtaatcattggtgagttattctccgatgcggactgggtggtcagattgacttgaccttgagaattagggttcacagattgcacagaattggaaacaacatcaccttcatgagacaaacttccagaacagccttgagaaggagtaatagagcctaagctttgagttaggttgatagaacctaaagcacatttgcgagaacaatcattatgcacctctcgcgcaggcaacaaagtttcaacttcatcaatagagaatggatcaaatctgctggtgatgagcaaaatcgacgattcatattcatcagggagtccatcaagaatcagattaagatgcttagaattggatactggttcaccaatggaactgtgcacattgactagagttcgcacatggagaagataataagaaatggagcgataatcaagagagattccaaagctcatcgtgaacttgatgactctttgcgtaagtgagagactgagaatgtgactgaatgcgatcccataactaccatggcgatcagaaaccaacaatgcgtggaataattttacaagaaatagtggattgcaaccacgcaagaagaagtggatcctgttcgtaccaaacaagatactcactgatgactttatctgaatttgaggattaatgatatagccttcaagatgatgactgcaaaacaggtttcacctgttgaatccaaagaagatagttttttgcacgcaactttttgagaaattaattgtgtgaatattttggaagagctcaccaatgacaatggcggcggtggggaggaaggaggagttgatgcggaagccatgaaaaaaaaacgcttggtttcaacctaagctttgcataccattttacaatttagagaaagtgagtgagagagagagagaagagaagagagagattgagaaacaaattattattcatcctcaatgaaaacagttacaggaagagtttatatagttgacagtgagaactgtcaactatcctaatatggcatcctaggaacacgttggttttctccaatgaagaattcgatggttagaaagtgctggaggaggcaattttcttttgttggttgtggctgaaaaacatggaaaaggattttgaaataccatttcaggtatgaaccatcaatattaaagctgcgcttttgtgtagcgggggataaggttcatttgtgggcgggatctaacatgctttacatcacagggatttgtcactctaatatatactgcatacagtatatattagactcccaaactggagtagtgatggtaatagcttggcagaatgtatagaaaacagtaccaaaaggtactgttaacaattattattcaatattaacactatatatacatattttagctgataaaaaaagactatcctaactgacaactgactacagctaacaaactaacaacacctaactatagtaagtaaaaatacttgaggtacattatacacttatattcactaattgttgacacaggaagtgagcttgggttactgattgctagaaaactgctgctgtggatttaatagttttaaatcattttatgaattgtggttgagatttccaggcagtagagattttttcctcattgccattatttcatcatcaagtttttccttttgtcttctacctcttatgttttgatgaatcataaattcagtgttcctcctctctgtaattctatcattgtatacttgttattgactcgtgagagaacactgacactgaactatgctgttccacctgagtgtttttaagaattatttatgcttctattctctgaaaatgttgacaaattcatggaatatgttgtttacatgatacaggggtc

SEQ ID NO: 3413 - DNA, 1267 bp, Glycine max
  Intron number 2 from transcript Glyma14g13480.1 (locus Gly ma14g13480) derived from phytozome v7.0 (chr-ID Gm14; pos 13039111 to 13040377)
tccacagaggacccaattccttctctagttcaagggtatgtactatatagtaataactaaacttcttgcttcagttttggatacggttttataagtgcttttggagattttatccaatcagaattagagttttactacaatttatgttggcatttaatgcaagtttctatttatgaggattaaacttcaattttgattgaacagcctatgtgtgagttcttgtaaattctctgctacctgagtttgattcctatggataaaaaaaaaaacccttcaattttgattgaagaacaacactaaaagcacttaaggaactatatctaaattttttcctcaatttgttttttattgctttggtttatccattatgctttcatattactttataatctatcaggtaggactattggcacactaagtgttatttattcatattctttgctaactagttttaatcgttctgttaaattaacctcactctagtaatttttgttagagttcaatgtatatactccattataaaacatctctacattggcatattcaataagatttgactactttaccatgtcatcctgttcactaatatgatgtggttgtggtgataaggtaaattcctactggatgtggatgtgtgtctgtgtaaagatgttttatactgagagtctatataattaaacttctttttaagatataaaaataaataaaacagtttggatcgtagttattatattgccatttttcatttcatatttgatggaaaaacagttgtaagcaaaagtaggtagtgaggattaaggaatgtatggacacaaaaactgttaggaatcttactctaacaaagatgattatcacacacacagaatcggtgtagtaggcaaatcagagtcaaacagaaagaagtgagaaaagattgagagaattatctagaatagggaagaacaaatgtacacaagtgtacccaaaggagcactctcctttcacactgggtaatcccagttgtatatccaagtttttacaaaagataatcccacctccgtatttagaggcctatttataatagagaaccctcacactaacagttagccaactaactcttctaactgctcctttttaaaactaatttccctttttattcttccttctataatacacttgtaattgtttgggaaattgattctcatgcctaacagaaactgtgtgtgtgtgtgcaagcgtgctaatataatttctatcaattttgtttcagtctagaggtcggatctct

SEQ ID NO: 3414 - DNA, 2517 bp, Glycine max
  Intron number 8 from transcript Glyma12g35350.1 (locus Gly ma12g35350) derived from phytozome v7.0 (chr-ID Gm12; pos 38467091 to 38469607)
atcaggttggaaatctccaacttatgtttgtcgtttctgtttatttgtaaattgttgattgtcacactacagttatgaacattgcaaaaacttgtgcatagatttagtgtctatgaatttgattagctttaaccacaccaattgcttggcttactccatgtttttcttcccctttgtttcaatgttgccaatatccagaaatgtactcttggtctttgttaacccaattggcaagtgaaccaaatcgtacaagtagtaaataaacggtaagactgagtatcatgttcacaggaactaagttcgccctaaacaatttgtgtaaaatcaagttctaagcaattggaataatttgtttaatggaataagtacagaatttaaagtctatgtactaagaagcaatgtaaaacaggacagattttcacacaagcaatttattgaatacgtagaatgcaaaggttgtaaacaacaattaaattgaatagttggggataatgaagctccaatgtcatctcaactcactataatcttctaaccttgatccctcaagtgatagaagctaaatcacttaaccccactcctaatcccttaggaagtgcagttaaatgatttgatgtgagcaagagtctttaagagactaatgaacatcactctatccctagaagagacacccattagttaccattctcaaaactcagtttttaaagcatttcccaatgaaaaagaaaactacaagataagcaaatggttgatcaatccacaaactaacattaagaacagagaaatagtaataacactgaatgttcattaaagagatagtgagaataattacatgagagttgctagtacaccaaatccccaactatgagaaaaattagcctctcattaacatgagagacaaaaaacgtgaagaaaatacaatggacaatgaagaaaaatggttgacaatcaagaacaaaggcacccaaagagcctgagccacaatgcacaatgccatagagttattcccctcaatcccaatgaaaaagatgcttaaataggtccaagaaggctacattgtcgtttcttcataatggcatgcgcgcttagcaaaagcagcattgaactaagtgactgtgtattaagcctgaggtgtgtgcttagcctaaatacttcgtaggagaaacaattcacgcacaccaagcttcagttctgcccaatcagccaccagatgcttgccacgtggccttccaaactaggcttcttgtgctaagtgcatgcaggcgcgctaagagggttgcttcaaacttcaagaatcttcaagtccattgttgatgcatcaaaactctacaaaacacaactaaaactatattatttacaaaatttcaagaaaactataaatctttagcaaaaaggctcaaactaagcaccaaatatggaaaattaagatgaagtgctgtgtaaaattaatgaaaaagtaatgattcacagcacttatcaatcttgcacataatactgctgagacttttgtggctattttggcatataacccaactgtatagtcaatatagttcagcattatacttgaaacaaatcatattaatcaaatgttaccgtaagggaattatggcaaatgaacatgttatatggtttgctcttggtgacaagaccttggtcagatatgattccccccactccccgcagtgccaactttgctaattaatgtctcttttgtctctccttctgtggaagctgtaaactaccaacaatttatataatagcagttcaagttagaagatactttgttttcttgttttgctttttcttttttactctaaagtatcataaatttattgctggcgtatcaactgtagacaagtgccaacaataaataattgtgcattagtgaaattcaaggcaccggatgtcagatacaagcccttgagatgcctaatatagaagtcttgcaacttataactgcaactgatatcgatcatatttgcataaacttctcgataagtacttataggaagaaaaagaaaagaaaaaaaatgaaataaggttctctcattagttgaaattaacttatgcataaattaaaattagcttttcgaaaagctaaaatgagagattttacgagttagcttatacataagttaattttagcttgtgggagaattttattttatttttcctttttatctttttcccttagaagtgcttataaaaaagtttgtccaaacagggctaattcaattaaattcattccattctttcttgactcaattgattactggatccatcattcttcttggtgctgtcctgcatgttttattttttttttatacgatgatgcttagatgttttgctctatatttataaaaatggactgaatttgtgttactgtacttcatattgtttatatttcagcaatgcaccttttcattgcaaaatctcattgcatatacactttggtatggaaaaaaataattgtttatattattatgataaccgtgttttatacatatcatgctcgtagca

SEQ ID NO: 3415 - DNA, 1039 bp, Glycine max
  Intron number 2 from transcript Glyma07g30920.1 (locus Gly ma07g30920) derived from phytozome v7.0 (chr-ID Gm07; pos 35901285 to 35902323 reverse strand)
gcattgtcgaacccgtccgcaatattttcaggaaggtgatcatcaaaacagaaatattcacttgctctttgtttcttactgttgcataatgagattgttgattaattttaaaagaatacttataaataattaaagaataaaaaaaaaccaccaaacacaaacactggattgttatctagtggcttttgaatttggtaggagagccactatcattgttctaccttacttaaattgaattagtcggtttttagttgtgatgccagcgatgcttggtaaacgcagcacctcttaaaacctttgctttttatgatttttttttttatcaatttttaagaagagaaatttttttttcaaaataatattacattgaaactacgaaaacaatgttttttaatcctgaaaaaaattatttttgatttattagcccatgcatttctaaacaagatgataaaattatttttcttatatatatttaggatattcagggatttttttaaaaaaaattcagagaggagggaagcaaattttatttaaccttttcaatatccgatttgttttccttttattattattattttctcttgcgaagtatttaaagagaaaaatttctccaaacagatcatattccatataaatttcaatttcaagccattcccccctatatcgttatttacagagattgatcactgttaacagttaaccataaagtgttggtttcccccaacttatcttacatgtacaacatgcatttatattttgtctggagaaaatacatgggcaggtgggtacatgcattttctctggagattttgtcacaccaatgtgttatattttccctgaaacaacagagcacacttttatgagattgtgccacgtgataaatgactatgttggttggtgaagaattgctagtagccactaggagatacatattctggtaaatagattgccagtatagaaatttgcttaatgctatgttctttactggtggatgcgatgcaactaaatgctttccttgttatccttcacacagaaaaag

SEQ ID NO: 3416 - DNA, 2861 bp, Glycine max
  Intron number 8 from transcript Glyma03g34050.1 (locus Gly ma03g34050) derived from phytozome v7.0 (chr-ID Gm03; pos 41543247 to 41546107)
gaggtcttgcttactacactggcattgtatttgaggttagaatttcctggttaaaactaaataaatgttatagtttacatgaatataaatagtttatgggttagattagtagcggaagccatgaaaatcctaggaattgaaacgagctctatgataccataatcaaatctgtaagaactataggaactaaacttgaggtgaaaaagatgattgtattcaacccaagaagaaactgattacacttcagcttatataacagttacagttgagtaactgtcagctaacctgagttagttagtgacagctgtcaaacagccgtcctaacagttaaactaactaactaactatagactaaccactaactgtagtttagtctttacagattagctaaagaaaagaaaagctacaccactgagtaagtatactcctataggttaggatcctcttggactaaaatcttgcttatggattacctgttatataattcaatacttttctcattggactgattcaatgacaagtgtgtaaaaggttcattcattggggcttgtgttttcaaattgatactctttatgcttaatggcactgaaccatagttgagattaatggcttgtgtagaaacatttgtgacaattgagtttggcaaataatggctgaagtgcatgatgaaaaccataatcttggtttaatgcagctttcataggcttgatgatattaaaataggctaaaatatgtttttcgtcttcataaatatcgaaatgttcagaatccgtccttgcaaaatttttggtctgtttttagtcctcgcaaaattgaaaagtgttacttttgggccaggatgtaggttcaggtaaatctgaacctatgtgccactgactgtacacataacttacacatgttatgttttgttttgctacaatgggggcgcacagtacttaggcaaccaccctttctccagccccttcaccttcacgaaccccaacaaccaccctccttccttagcctcttcgtcactttgttcccttgccgccaccgtcatcgcaacctcttcctcccctctctacccatttgatgtgtgtgtgtgtgtgagagagagagagaaagagagatagagcggatctgagcgagagagagcggatctgggttttccattgccatttggagcaatttgatttggcgaacccagatcctaacaacatagagaaagaaaatgcacacaaagacagacttagaggtaacaagcctcatcatgtcttcccccacgcgctcccctccatgccgtcctctctactacgtccagtctccctggcaagattcccttgacggcgagaaaaccagaatgaaaagtgttggttctcttttcattattctcacttatcctttggggggctagaagacccatgaagcccaagatcaacatggtacgtatttttctttttatcttcagttctatgtttttggttttgatccttggtttgagtttttcagggtggaaagtgtggtggggcttgatcaagtttgaattttcagggtgaattctaagatgggtcgtgtttaagttttcatttttagaatgaaatatgaaatgggtttttgtgtttttaggatgaagtgtaaactgggatcttgatcgatttttcgtttttagaatgaaatatgaagctggtcttgatcaatttccaatttttaggatgaattttgaactgtgttgtaacgttttagttttccaatgaaaagatgtgagctgggttttgatagttcttaattaatttcagattgaaatatgaattgagtcttagatccatttcgtgtttttgaaatgaaatctgaaattttgttgaatgtttttgtcacttttggacctattgatttgtcatttttggaatgaaatatgaactagttcttgattaatctcgtgtctttaagatgaaatttgaagtgggtctacatgatgagtgattttgattttttggggcattttgcagaacataaagtttgatcatgtaagggtccaagctggtttggatgcaacaggggtagccgctgatatgatcactttgaaattcacataccgcaatacaggcacattgagttgctgttgatgggtctttgattccaggtttgagaaatggctgttgatgttctctggcagcggcattggaaatgaaggaattgttgcatcatgaataataaagttttctacattggctataataataactgatgtaaaaagttgacacataagctcagaagtaggttcagattatctgaacctacgttcgggctaaaaagtaacacatttcaattttgcgaggacgaaaaacagaccaaaaattttgcaagaacgaattccgaacatttccatatgtatgaggacgaaaaacatattttaacctattaaaataatgctttgtagttcttcataagatactgtgaagtctttacatacctatgtaacatggaggcaaagagtgtgatgcattcaaattcattgcgctggaggttgtgaatatgtcagaccctcgatgataaatgatctgcaagaggataaaatgcatacatggaatcctatcttcccactctattttttgctcttaatgaatccttttatacaaaaaaaagaaggaagagtatatactatacatggaacaaaactatcatgttgccaatgcttaatagagaaagaatataccagtcttttactggctatgttttactgcaaccaagttacattctttgtgatgctttccattgctgttaatatgttgcaattgtatatgttggctgttgtatttctttccttcaaatgattaaattcttcagtagggttttgaccgagaaggaaagctgcgagctatctg

SEQ ID NO: 3417 - DNA, 926 bp, Glycine max
  Intron number 1 from transcript Glyma17g00610.1 (locus Gly ma17g00610) derived from phytozome v7.0 (chr-ID Gm17; pos 279219 to 280144)
tgaaaaaggtctgggttcaataagtttctcttgctcaagtttaagtccattgcttttgatttttcttaaagttaaatattcacgaaggaaattcaacaatgttacattagtcaggtgtgagtgaaatacagaagaatttgtgtcttccatcagcgatatagttaggaaaatgtcaattctgtatatatatatatatatatatatatgccatgttaactggcatcaagcatgtatccatattggacacttcaaatactcctagctcctagcctagctacatttaataagtttttactgctattttttttaacttgtaagccaatactacaaatgggaggattttcagagagtttcgctagcatttctcttacaataatttggtgaattataacattttattatgttatagacttatagtggctcataattttgtgttaattttatattaatttaaagcattgtattctagtcaattttgtcctatgttttatactattagttgtattcctgtttttgaattgtatcatccgtgtcttgtgttgcatctttgctttgtaggttagtgtcaatgatttatatggaacaagagctaaaaagctctggtttattattaacaccttaatcacactagagtgtacagatcatgttgaggctctcttatatctagaattaaataactgaaccatttctgatggcacactcctggtagaagcgcttacattatttggatttatctgtactattttactggatttgaatgcatagtttgtctgttttttgtcatgggcatctttcaaattcctatgaatgcctattagtaatttgcctgcctcctccatgcctttgtgggttctctctccatttacatttcaatggattcatataagagaatactttttttgtgttctgtatttaggtccttaaag

SEQ ID NO: 3418 - DNA, 3998 bp, Glycine max
  Intron number 9 from transcript Glyma08g20900.1 (locus Gly ma08g20900) derived from phytozome v7.0 (chr-ID Gm08; pos 15871574 to 15875571 reverse strand)
gtgaaggcactctttggcatagaacttattagcaggtacagtctaaagactttctccccaattgttggctactaatgtgcaatatgttaattacatccccgaagtactttatgcttaattttttgttctcatttgtaccattgttctagctactatttttagctagtctagtgatttgacaggcttgccttgaatgtatgaaaaatcaagtaaattctttcttttcttgattttaacatgtagacgtctcattgttgtgttatttttgtgatttctcatcctaaagtgtgttctcttgtatttagttcctagcaaattggagtaaataggcattttggtccctgacttttgacttcttttgcaaattagtccctatctttttgaaatgtaaaaaatagtccctatctttgcataagttttgcaaaatagtccttgtcgttaaatttaaaagtaacgccgttagtgaggtgcattgttgacaattttagtgccacatagactatccaacgtgacaaattgtcccagattgtgatacgtagactggactttgatgcaaaatttaaaaagtcctccacaatcccttattttgaactacgactcttctcttccattgttggcaaccagagacgactcttccattcctttagatggtttccgcaagtcctccacgatcccttattttgaactacacaaaagtacaaataaacgtaaaaagaaaaatacatcaaacaagaacttcccatccgatcattgccttggatctacctatggttccccaccaagctccactcacagattgtcatatggatatccttttggtgtctgatacaaagaaaataacagaaatcaatcaacatacgaagtactaaacagctgagctggaaaatagcattgtatatgaagcttcaaaagaggaaaatatcaaagaaaaggttgctactattacaagcaagagtgcaatcaggatacatggactataacaaggacacatgcaggacaacaaaaacctccattagtccatagaccatgaccatacccatctctagcaaacaaactgtatttttctttcaaccaaacaagaaattatgttcacatttagcttcaggaaaaattaagaatggccgtgatgaactagttgagaagcctgactatttctatagaatcatacatgacaggaatattggatataatgagaacatagattagttgtaaatctacagagggaatttgatttccattagcagctagattgcaagtttttttaactcagctatatgaattatgaaagttgtactcctaatatatggttctggaagtagttgccgctatactatttaaaagtgagaatgaataacgggaaacattatcccatcatctgaaagcacacaagtaacaataaaggctttcttcaattttaaaacatccaacaaaatcatatcctgttatctgaaagcacacaggttaataaaggctttctttaattttaaacatccaataatatcttcagtctgatactaggttcaaattatgatatacgatgtcatcatgattatcaaaatacaaacatgtgattctgcatgttctgcaagtttgaatctcaaaatttgatctgcaaacatggatggtttgcacgctcaaactcagtgcaatcatgagatccgatgcaccaaatctggcaataacccagcccaaatccaatgataatctacaaaaatcaatccttcatctataccagagagcaactgaaattaaacacagaaaaaaagaaaaagaaaaatctaagccattggctgatacgaattgcaatgagctcaactggaagtctggactttggatttataactgccaaatgaatctcaggactttaaagctgcaactcaagtgctaggaggactgggtgcggtgattcccccaacttctgggttccctctgcttctaactaccgcatttctcccatgtttgtaaggtaccttggtgattgcattgttatttggaagtagaagtgacaaaatgattttggctcattatgacatcaaggtatggctgcctatgatagacccataatgaatctgacccttatctagagactagactttggttccttctcttgttctgttttttatttcaattaattccatcatcttccatttttatggtgacagtccatttaggatatgactttttattattttgaatgtctttaacgttagataatgtcataattctttatttttttagcattggaatatgtatagtataaattatttgttttgtgtctacaacattcaacacagcaagcatcccactatagcgtgcacggctgtctgagatttataagtattagcagtaggctcaaaaggatctaaagtaaaaagtaaacaacagctcaaatcacctaagcagggaatgagaacgatagcatccaaatccaatcaaacttaatacacttccaacattaatactcatcaatgtcgacaacgctcaattttctataaaacatatgatgaacaacaattatcgtagaattggaatcagcaaacatcctaaaggcactataaatagctaaatagaacctagtcaaagtctacaacaagcataaattcacaggaacattgttctgagcacaaagttctcgaaatcagacattccacttccatacatctacattctacatgatgccaagttttcaccaacaaccaataatccagcagtgtcagctaattgtgacaattcgctcagagactcttcgatgttgaaatcttgttgttgctttgttttcttcgacggcaaagagtgacgggaacgggaagcggttcttcgctatgctgctgatgctttgtctcgaagcaaagcgttccgttttacggagaaacggtgtcgttggagtgaatggaggtgatgagaggggataatggtagcgttgttgttgaacttgaatcaacgactgaattaccgaaccgtagaagaatgttccagttccactcatctctttcttcaaccttccaccataagctcttctctttttctatgtattccaataatggattgcttttgctttaagttgacaactttttaaattttgcatcaaagtccagtctgtgtgtcacaatcagggataatttgccacgttggatagtctatgtgtcactaaaattgccaacaatgcacctcactaacggcgttactttttaaatttaacggcaaagaatattttgcaaaacttatgcaaagatcaggactattttttacatttcaaaaagatagggactaatttacaaaaggggtcaaaagtcagagtccaaaatgcctatttactctagcaaattgtgtcggtgacatattatcaacgtattatgtttttagagatttaacctattagtttattacagtatggaagctcatggaatataaatataaagacaactttttattcactgtctggggatggtggtaactatgctaaagaagaaattttttgctgacaatgtttttgaattaaatgcaaccaggaattaagacagctgcatatcaacttacaagagaaactagttgttgtatgatgcggttgcttaataaaatatttataagtctagattatatatttgataaataaatatttaatgcatatttaaattgagggcgaccctggcatagaggtaaagttgtgccttgttagtcatgggttcaaatctggaaacaacctctttgcatatttttgcatccatgctgtcagtcttggctggagaaaattttaattttgttctatgtatgcacattttccttgtgtagcattgtagtccttgctttgtggagaattctggttagttcaatttattatgaattaaaggagagtctgccacaaaaaaaaaactaccaaaaaaagagacaatccacacttttgaagtttattaaaatgctcattgatgcccatgaaattgtatcctgtttaatgtagtcattttgataacaacttgttaggattcattgtcaagagagta

SEQ ID NO: 3419 - DNA, 6682 bp, Glycine max
  Intron number 7 from transcript Glyma07g11970.1 (locus Gly ma07g11970) derived from phytozome v7.0 (chr-ID Gm07; pos 10244522 to 10251203 reverse strand)
atctacttcattagaaggtgaaggatctggacaaggtataattttactttccttccctttcttcctctttgacagtctgatgggaacgtttctctttaagttgaagtgccactggctttctactatttcgtggcatttgttattattatcaagaaactaaatattgatttttctgtaagggctcatgaaacaaataaaaaaattctgaagcttatcacatttgttctatatattttctttacttatatttcttttgttctattaaatacatacaaagtgatgcttaatgctttataattcaataatgcttgtagcttatgcatttgctcagtgtatttcttactctcactcacctagtgggtttttgttgtatatacgctcactatatcaatttatttgtcattctttcttcatggtttgtctcaaattgttgtccaattggaacatttaatgaagaacttgtagtcctttttggggagtagggaacaaaataattgctttatgttgcccttatttgccaacccataaaggtaatttttggataacaatttctttgattttgtagagatataccaaatgctgtctgcaattttgttccaatatgtaacaaactcattatttgttattaagatgttaagcttcttcaaatttaacttcgtttgatattttgtctgacaatattaaacatttttataataaaaataatctaaactaataataacaactaccaccaaggctcatctcactccaagggtcaataacatggatcaattgacaccattggggtatctatcaaaaaccgaattttcaattaaaccatttaaataaggtcattttcaatggttacttgttgtcttgtgatagaactagccaaaactctcattttattaatcttgtgggacaaacgtatgactagggatcagagcctagcctccctaaccaaccaccgtgattacccaagaatgagtaattccaggcaattagtctctatttatagctaaagactagctaactaactacctttaactgtcctaaacagttacaaggctaactactaactgtaactgatcttaatcagctacctaaccctggttctggcagctgctctggcttctgcttatacttgccatgggtcctcccttcatacacttgcttaacaggtagcttaacaatactccccgccaatagagcaaccttgtccttaaggtgatatgcaggaaattgttgcttcataacaacaaccgattcccatgtggcttcaaagtcaggtaaatctttccattggatgagcacttcagctgtgcctgcaggatggttttgatggtaccaggccaatatcttgttttattactcttgcagtacaaatgcaccattatggattggagcctagcctccctaaccaatcaccgtgattattcctccccctaattctaggcagtccaactctatttatagctgactgctaactaactaactgcctttaactgacttgaatggttacaaggctaactaactaactgcctttaactaacttgaacagttacaaggctaactactaacagttacaaagctaactactaactgtaactgatcttagtcagatacctaatccaggttctggctgctgctctgacttcctcttatacttgtcatttgtccttccttcatacacttgcgtaatcggtaacctaacaggtttctgacagcctttacagctagaggctctacccttagttccagctcatcagtcagcagaggaggcaagggttggggtttcaccgcaggagcaatggctttctttaatagagacacatgaaagactggatgtactttactctcaggtggttggttgagctgataggccactttaccaatgaccttagaaatctgatatggtccataaaatctagggcttaatttcttattcaactttttagccaaagatgtcaaccgatatggctgtaatttcaggtaaacccaatcatccacaaccaagttaacttcactatggtgcttattggcataggcttgcatctggtcctgagccttaagcaaattagtttggagttggtccaacaaagagtccctatcttgggtcagtctgttgacctcctctactgctgatgaaacagtggtgcctttacgcaattgaggtgggtcttgcccatagagagccctgaaatgatcctgttcatggattaacgaaaatgtgcaaaagctctatttgcctctgccattctatgagtgagcttagatgaacaattatagttagaattaaaccaaaattctgcccaacttaagcaggaaggccagtgctttggtttttcccctgtaacacaccttaagtatgtttctactcctctattgaccacctcaatctggccatccgtttgagggtgatatgctgaactaaatttcaattaatttccagcagatttgaataattccctccaaaattgactcagaaatattttatcccggccaaaaatgatggtgtttggaaacccttgcaatttcacaacctcttggacaaatagatcagctatgtcctttgcagtgaaggggtgactaatggggataaaatgagcatacttagtcaatctgtctaccacaaccagaattgcgtttttcccttgtgctctcggtagtccttctatgaaatccatagatatatcagaccaaacctgtgtagggttaggaagaggttgcaacaaaccagccagggatagggcctgatatttattctgttggcatgtttcacatgcagccacaaaccgtaatatgtcttgcctcataccctcccaataaactgaggctgttatccttttaaatgttctgaaaaaccctgaatgacccctacaacagagctgtgacactctgtcataagtgtttgtaccttgtgagatgttttagaaattactaacttgcctttgtaccataatttcttatcttgtaaggaatatcctgaatgtgcagatccatttaccagtaaatcctgcataattttcttcagtttcgggtcagccaaaacttcagactcccactgttccttatcagaaaatctgatcattgaaatggccgaatatgtcattcttctagacaatgcatccactgtcctattctcacatcctggcttatacactatatcaaaatcaaaccccattagcgttgaagtccatttaaactgatcctctccaagtaatctctgatcagttaaaaacttcagaattttctgatctgtcaatatagtgaatttgtagcctattaagtagtgtcttcatttctgtactgccaacacaatagccatgagttctctctcataaactgacttttttctgagccctatcggagagagtttgacttagaaaagccaatggtctcccctgctgcatcagcattgcccctaatcccttataagacgcgtcagtctccacaacgaagggtcgagtaaaatcaggtacagcgagaacaggaatttctgccattgcaatcttcaattttctgatagcttccttagcctcctcattccatttaaaaccatctttctttagcaagttatacaaaggccttgcaatcctaccatagttctgaatgaaacgtctgtaatatcctgtgagacccagaaatccccttaaggatttcacatcgctaggagtaggccagcttctcatgacctctagtttttgggggtctgcagctacaccttcctccgaaattatgagccccaaatactctaattgactctgcctgaaactgcactttttcttgttgaccagcaattttttctcagccaatagggataggacagctctcacatgagttctatgatcctcttctgctatagatgaggatatcataaaaaaataccagggcaaacttccttaggtatggccacatacctcattcattaaggcttggaacgtggaaggggctttcgtgagaccaaaaggcattactacaaactcataatgaccctcatgggttctcaatccagattttgggatatcttcttccttcattcttatttgatgataaccggatttaagattcagtttagtaaagattactgcacctgctaattcatcaagttgttcatcgataataggtataggaaatttattggggacaattattttattgagatccctataatccacacaaaatctccatcctccatctttctttttcactggtataatagggcttgcataagggctgatacggggcctaataatccctgaattcagcatgccatcaactagcttctcaatttcatttttctggtaatgagggtacctatagggccttatgttggggatttcagctccattttttaattcaatgcctatggtcttgtctccttgaaggaggaagaccaccagggttctgaaatacctcattatattcctcaagaataccttccatccatgtcggcatcaagtttgcttcctttacatcttgtatatcttgaaaatacaataggaatccctctccttcatttcgcaggatcttgacaatggatctcagcgaagcagcagatctagcccttgcaggctctccctttaatgtgaatgatccttcagttgcaggtatcttcagagttaactctctgaaattagcccttatctcacctagagatgccaaccattccatccctaataccacatccactcccatcatttcaaagacaaataagtcttgctggattttcattccttggatctgcaattttacattattccaaactccttcacacctgattttttgtccatcccctacttccacagtatatggtttagtaggtgtgactggaatttgctgttgtttcactgctacagcagaaatgaaattatgagaggcaccacaatccaccaatacaatgactctgttttcatcaattttgccccaaagtctgatggattgttttgaagtcaatcctggcatgctgtacagggacagctgaatactctgcagctgtttctcatgtcttgcctcctcttcttttttgtcttcttcatcttgtccttctcccaaaataaggacttggaattatttattggggcatgtatgaccaggctaaattttccatcacaacggtaacaaagtccttttcctgtcctctcttggaactcagcatttgaaagcctcctaaaaggcctacctctgtatgctccaatggacttcacactatttgattttgagctcgagctcgtctctcttgtttttgccatggtgactttgtttcctggatcccatgttacaattcttgaggaactgtaacttctagttaaacctcctctgtttcctccagcattacctttttccattagtgaatttttctcatctatccgttgtgcatagtccattagttcagggagagagtttactggatgcaacttcagctctgccctcaccacctctttcagctcattcaaaaatatccctttcaaatactcaggttttgttcctctcagcggacctccatataattctaacatttcacgatattcttctactgttccttcgtgtttcagactgagtagtagctcataggggctttggttcatcgaaggctgaaattgctgaatcacaacttgtttgaaatcggtccaattagggttttttgcgcaaaattcctaccactggtaccaggttaatgccttcccttccattgcgaccatggctgcctggattcgatcttcttcctccatgcctttaatcttgaaatagcattccaccttatttgtccagccaaacgcatcttctccgtcaaaaattggaatctcgagtttgcgccactttacctcttgatcgcgatcgcgataatcgtgattctggtgttctgcatggtcgcgatttccgcttccatgattggtgctcaatgagttccacactgtcaccattagctctgctaattgttccttcagctctgcttgcttgatccgttcatcttcaaagaatcgcttcagactcgtgacgtcctcacgcgtgttgatcatgccttcatagccccgttccagaaattccacacgtgcatccatgcttcctcatgttgaaaccatcaatagcttcacgtttctggatcgaaattttgctttgatagcagtgatagaactagccaaaactcttgttttattaatcttgtggcacaaacgtacaactagggatcagagcctagcctccctaaccaaccatcgtgattacccaagaatgagtaattccaggcagttagtctctatttatagctaaagactagctaactaactaccttcaactgtcctaaacagttacaatgctaactattaactgtaactgatcttaatcagctacctaaccctggttctggctgctctggttgttgctctggcttctgcttatacttgctatgggtcctcccttcatacacctgcttaacaggtagcctaacatcttgttaagagttctttttccttgcccattatttgctactactacaaggcaatacaactatgttttaattggtatatttgatcatttgtccttttaaggaacaattttcaagttagcaatagcaattctcgataccacatcatttttttcacctggtacaatttgataatagtatttttgtaatgtctttggaaaggatggagttctgtgagtgaatctaattgtaaaataaatttagcagaaacagcagctg

SEQ ID NO: 3420 - DNA, 3172 bp, Glycine max
  Intron number 1 from transcript Glyma10g06090.1 (locus Gly ma10g06090) derived from phytozome v7.0 (chr-ID Gm10; pos 4843023 to 4846194 reverse strand)
ccatcaaggctgttatgaaagtgatgaagaacaaacaagaatagtagcagcagcagaacaatatgttatacacagtatttgcagtaaaatgaaagagagaaagaagtgaaagaacacacaaaatttacgtgattcacccttaatcaggctacatccacgtaagggggtagagagattttatttctgatgcaattcaaaaaggaagtgcttcccaatacaaaacaacctttccttatatataagaaaaaaaggatcataaaaacagaacaaaacataataacagaattaattgccatatgaattttagtcacaacctaacaattcaccaccttgaactaacatccatataaaacacaaactgtaccctccaaacacacgtgaacttaatcccaacaatcaacattgagcaagcttaaacagttatcaaacttgctctttgggactggttttgtgaacatatcaacaggattgtgcaaagtactgatcttatgaaccttaattcttctttttgatcgaatgaagtgatatctaacatctatatgcttggttctatcatgatgaacctaatccttggccaagtatgtagcactaaggctatcacaatagatgttagcatattcttgattaattccgagatcatttatcaaacctcttagccaaattccttcctttgccgcttcagtaagagccatatattcaacctctgtagttgagagggcaacaaaatgttgaagggttgccttccaactcaccaaatagccactaagagtgtaagcatacctagttaaggacattctcttgacaagattaacagcaaaatcaacatcagaatagccagtgagacagaaatccaagttagatccatagaccaaacctacatctgcagtccctttaagatatttgaaaatcctctttacagccttccaatgttccttatgaggttggtttaacaacctactaaccatgctaacagcataagcaaggtcaggtctggtgcataccatgacatacatgagatttccaacaacacttgagtatggaacttttgacatatagtcctgatcagcctgagcttgaacatttattgtagcagacaacttctctctttctgaaaggggagtgctgatgtagatccatgacattcttgagtagtcatcagttatggaaaggaaataccttccaccacctagtgaaggtactcttgcaggcccccaatagtcagcatgaatgtaatcaagagttcctttggtggtgtgaattgatttaggaaatttaatcttatgttgcttgctgaagacacaatgttcacaaaatttatgttcatccagtttttgatttcccaatagctgttgtttttgaagtatcatcatacctttttcactcatatgaccaagcctcatgtgccataattaagttaagtcaagtatgttcttattgaattttgatgcaacaactactaggccatcatcaatacatgttgtaccttgaagtatatagagattacccctctttatacccttcatcaccattgtagagcctttctgaaatttcatgacctcattttcaatgttacatttgaacctctttccatccataatacctatagagattagactcttctttagctttggaacatgtctaacttcagtgagtgttcggataattccatcatgcatcttgatttttactgtgccaattccaactgtcttgcatgagacatcatttcccatgaagacatttccacccgatttctcttcataggtgtcaaaccaggttttgttaggacacatatgaaaggaacagttagagtctaatatccattgatcttcaaaatgttggtggtgatcagcaactgagagaacaagctcattttcagatgtggaaccttccttgacaacaacaacagatggtttgccctttttcataggacaatctttcttccagtgacctagctccttacagtagttacagatgtcctttggattgacatgagccttcttttttcctttaaacacctttttcttgatgttcttgttagagttagagaccacaagaccagatctatttgattcttcagaattttcaagtgctttagatcgaagttcccttgagtataagctggatttcacctcctccatggtgacacattccttaccaacactaagataattaacaaagctctcatatgatggtggtagagaggctaacagaatcatgacaacatcttcatcctctatcttaacatctatatctcttaattccatcaaaatagagttcagttcatcaagatgatccttaagagatgtaccttctttcatgtgtaaaccaaatagacgccttttcaagaagagcttgttgcagattgacttggtcatatatagcttttccaacttgagtcataagccacttgcaatttcttcattagcaacctcatataaaacttcatcagacaaagaaagcaagattagtgagtgagtcttttcttcttcttcagcaagttcttcaatctttaaaacaaaggccttttcttttgattcagaagccactggtttcttcacagatgcagaagcaacaggggcccaaacacgttgttccttcaacaaagcacgcatcttgatgcgccacagattgaagttgttcttttcattgaatttctcaatcctgattgtgtttgacgtgatttcttgagtgttcttgatcacagtgaagcagcgaaagataccagaaacaagactcgcacaacttgatcttcgtatttagacgagaatcttaaattcccttgatcgcaacttgagctcttgataccaatttgttatgaaagtgacgaagaacaaacaagaacagcaacaacaacagaacaatatgtcatacacagtatttgcagtaaaatgaaagagagaaagaagtgaaagaacacacagaatttatgtggttcacccttaatcaggctacgtccacgagagggggcaaaaagattttatttttaatgcaattcaaaaaggaagtgcttcccaatatagaacaacctttccttatataagaaaaaggatcagaaaaacagaacaaaacagaataacagaattaattgccatatggattttagtcacaacccaataaatgccaacaataatttgaagattctggagcatttgaggcagttgggctgtggtgc

SEQ ID NO: 3421 - DNA, 471 bp, Glycine max
  Intron number 2 from transcript Glyma06g21780.1 (locus Gly ma06g21780) derived from phytozome v7.0 (chr-ID Gm06; pos 18345781 to 18346251 reverse strand)
ccaaaaacttcaggtgggtgtttagttgacggcctctccatgtttgagcaacaactacaaaatctgaaataaaaatattcatttcaatgagtttcaagtctgcttattagtcaaccattttaaactaaatgtttgtgcttcagaatttagaattattccactttcttatttttgtttcttttgttctgcattttggctgatttcattatataatctagtagggtcagaagagtagcttgacttattgtcatattttcatatgtttgtccgtcaaaacttagctctcattcatctattactctgcttgaacattaaaaagtatatttgaatgctagtgtattctgacatcttgtgggacttacctggaaaggggcaaattgaaggactatttggtgtatttttatgccttttagatttttatgttaaatttcactgaatacattttgatatagtctacattatttgtagagg

SEQ ID NO: 3422 - DNA, 2306 bp, Glycine max
  Intron number 1 from transcript Glyma16g28620.1 (locus Gly ma16g28620) derived from phytozome v7.0 (chr-ID Gm16; pos 32545181 to 32547486 reverse strand)
ctcaaacggccgcgttccgactacggttcgctctctctctctctctctctctatgtgtgtgtgtgtgtgtgtctatatatatatatttcctacacgctctctttgtttcgtgcaatttgccctctttctctttcgttgtttgtgcaagtttgtaaatttcgattttttctttatagattctttgttgttggttttggcaatttgattgggtgttaaacgacgccattttgcttgcgcgttctcgcttcttagggctgcgtttcgagtggtgttgttgtcgtttaagggtgcctggctttctgggttcttatatttgttgggtgtttgttaaatgagtctgttatgatcacggtgttcctgtgattgatcaatttttgttctgtcggaattttacgaggttttgttgatgtagaaaaacaagggtgttttggactttatgcattgcatagggtttatatttggtgtgtgaattccatttaggtatggggtactatttggatttcagtttttataagatattggagagcccaaataagttgatgcctctcttttattttgtctgtttcctttgctatagggtatattcgaattaaggagttttgggagaggggagtaattttttcatttgtaaattggaataaaaatatttaatgtttgattgtttgtagagatgaataaggaatgattagaacttaggttgcatgataatctcatttggaaaaagaatttgtcaaataaaatgaaccttatattaaaggtatagttagttacaaatttatttgcaagttagttacttctcatattgtatataacagccacctagatggtttaatgtaatcaattttttctcattgaattagttccattttgaattccattttactagttctatcattctttgttctcttaggctctgccatgaggagggttcctcttccattgctgcattgagagagctctttctctctctcaccttttatccagactgttatgctttttgtttgagaacagcatttctggtggaagattataattatctgcaatgtatttggtggggttattgtgatgccatgttgatggagttgaatttccaatggatttatgggttaaacttaagggagctgattatttggccttacaaagttagggattcatgttaggtttgttagattttattgtcttaattactaaattgatattgggcctcattggtgtgccatgtttgtctgacatctgcatatgtggccttattcaatttcctggtgttttcaagattttatgggttgaatataatgtgatggattgattaattttttgacatcataaatatcttaatgttttttccttttcaaatattagcacaatgtcaaggataatgtggagtatcagtgtatttgtgctttgagaatagaggcataattataaactaagctagttggacaaactaggaatctagatgatgttgcagggctacaagcttattcttgtttctatgctttttagattttagtgattaagttcttactaggcatagtttccattaaaaagaattgaaaattattctgggtatcatttgcatttctaagctgtaattttcagatagatgcaacaatgactgagtgacagcaacaataagagattctgctcctggaattccatgctgcctttacagtgtttctgttttattgtggcttgtatttatttttgggcttgactttctacatcatgctgtttgggtcttgttagctttaattaggtcagcagagtgtggttaatatctttatagtgaaccttagttgcatagagggcaaaactcaattacatgggtatcccaaatggagatgaggtgatgactcagaatctgtttgatttccaaacattgtttttgttttctattttaattttaatttcctagcagtagattttatttttaaatttttttacttcaggaacaatggttggcatagatttattgtaatttcaaagttgccactgcattttcaacttccatttcctgttttgaaaggaaacatatttttttttacatctgatattattattaaaattcactgagcacattttcaaatgtgtttttttccccaataaaaacagaaaatacatgaaccgtgaacagccttaatttcctattctttaaaagtattttgttattgtttatggaaatgaaaatttaattaacctggaatgtactaataactctactaataatattatacatctttgtcaaatctgttattattttatttttacattgcagatatgcctgcttccggtctgtctttcaggta

SEQ ID NO: 3423 - DNA, 1482 bp, Glycine max
  Intron number 1 from transcript Glyma07g30910.1 (locus Gly ma07g30910) derived from phytozome v7.0 (chr-ID Gm07; pos 35882010 to 35883491 reverse strand)
ggctggcttcaattgccactaattgcaagtaaggatcattttttgcctttaaactcttgtgtgtagttttagtccataaaatacaataaatttgtgattcattaaggattttagttttacttttgttttgctgttgttaatctttttgtttgtaatatacatggtgtgattgagggcaagcccttacacaacggtaaagttgtgccttggtgacctgttggtcatgggtttgaatccggaaacagcctctttgcatatgcaagggtaaggctgcgtacaatatacctccccataccttcacatagcgaggagcctccgggcaatggggtacactagtttattcatggtgtgattggtctgcaagaaagaatgtggttcttgtgatgaattactggtggtgctagcttgttttctgttcatgggtttgcttttcttatcactttctatcaatatggtgatgttactgttttggtatgacatctttgcttttaactgttggatgatgtaatacagttaattgatggatttacttgttaacagttttaaaaatttgctttgatcctccagtttagattgcctcttttaaccatttctgtctactctttaattgattcattcttttcttagattttttttctttcttaagtgccttgttgtttgacatgttcacttgatgtgttttgttatgatatattagtggtgagatgtttgtgaattttgttgcaagtggaaacagaatctgctacagaactgttttttatgagggccacttcttttctgtatgacgaaattaacatttgagcatcgattgagtgggaacatggtaatattccttatttatgccaaataaaggcagctaagacacagggaatcgatggacttttatttctctagaaggtggccatcttacttgtgctgcccagtatgaggatagactttagctaatattgattgtaattgcatgcctgaaatgctatttattctctagctggagaaaagttgatgactatttcaccatgagaaaaaaatctataatgcttgttaaagaatgagaatttctgattaattcatagatgggttttttggaattcactaaaatacagtgcatttataaacattctgtagaatttgagtttgctacagttacatacatatattatgatctaatagggtaggcttcatattctgtgttcagttgtttaaccatagatatatatatatatatgttggcaagggatcttgcataagtagaacaaaattatgactgaaatcataaacagtgtgaaaattgttgattacatttttaatctttcttttggatttcaaaatctcaactcatggtactaccatattgagtagctgcaaaataggtattattttcattatgatggcgttctttgcttaatctttcatttgaccaatacataatcttcttcattccacttgacggcaggaatttgactgaacttgacatacaagaga

SEQ ID NO: 3424 - DNA, 840 bp, Glycine max
  Intron number 1 from transcript Glyma14g24090.1 (locus Gly ma14g24090) derived from phytozome v7.0 (chr-ID Gm14; pos 28770996 to 28771835 reverse strand)
cacaacttcgtcgtggtcgagttctacgcgccttggtaatatgttgttaatgttcttttcggattcctcatctcctgcattagcgtttcgcaacattgcagctctcattttttgttgttgttttttattattataataattccttaaatttaatctggggatgcatgagtatggaaaaaataaatatgctttggtggaccccacccgactatacctattgggggcactctgggaaatgtgcccaagattatttggattttctagtgagaaagaataatcttaaatccttttacaagtatatttctactaataagaaattattagaaagaataatttttaataatttaataaatttgaaccgatcacagaaagagtgtcgacaggcttctcttggactaattcttctatgggataagtattgaatgggttttacattttcaacacattaaaatgtatttattttttatttaatttttttttataaagtgatagtaagaagatttgtaggaagattactcaatgaaaaatgctatttagcattctttttattattggcactgaaacttatgaggaactataatttttttttacttactccttatttaacaagtcttactcatggttttgtattttttttttaataaagttgcactcatgtctaatatatatttttaatgcttgaaattctttatctgcctgagctgcgattgactatgaggtcacagtcattgaactcattattctgggcagtttattcactgatactgtattttaacaattttctttctcttaatatataattcatttttgtttaattcactttctaggtgtggccactgt

SEQ ID NO: 3425 - DNA, 6785 bp, Glycine max
  Intron number 4 from transcript Glyma09g06770.1 (locus Gly ma09g06770) derived from phytozome v7.0 (chr-ID Gm09; pos 5528730 to 5535514 reverse strand)
tttcagggaggcttttgaagactgtcttcattgaggttagtcttcatgacaccaccttcctatttttcatataataataatgatgattccttctcttatggtcacaatgtgacacatgattaatacatgagtgtgttcgatcctatttttaggaaattagttataaaattaaaaatatatatttattataaagattataaaaaaatgacatcataaattttgattaatatttactttaatagataactttttacataaatcactcgttttgaaagattaatctttagttctcgactacttggctagattcatccaaaatagttccttctctttactttatttattcgcattaaattggctctggtgaattggtaggtgtgtgagatctggatttcatttttttactcctaataataaatgaacccaatgttatattatatttatatcatgtatgtatattatatggcacaaaataaagaagttacagctagaattagggcctacatgcttggaaactacgagaccactttagctaaagtggaagtgcggaacacccattgcgaatagtattagacttttcagggcattcatgagggctttaactagaaattccgagtaaagccaagaggtgtaatatactcatattcatgataaaattattagtgaaagtcacaataaaacttatagttattttttgaaatggaatttcaaggaaatgaccttttgaatattacaatttaaacttaaaagaagattctatttcctataaaccatgctattttttattattatccttcaacttagtatataaaaaataattctgagaaaagaaaaaaaatcaaactttttaataaaatttcttacataaatgaatatcgaaattaagtttatatgtttttcttttaaattttttttggttcaaaccaacaaaattatctattaattaaagacatgaccctttcttgagaaagaagtttggctactacttatttggggtcatctcctttgtctattccgtcaataccaaacaaaatttatggtgtcttaatattttgtcatcattgtgatctttaacatatttataaaagacagtttaagcggagcatgatatttattttggatgttttttaatcaaaattaaagctttacaatttgttgttattgttattagaatgggattaaaccggaaattagtgtgaaatctcgtttagaagaacaataaatatctaataagaaagaacaataaatctaaatcttgaatcaaaatctttctaccaatcccttaagataaaaaaataggcttaactacttttttatcccactatttatctattttattcaatttcgtcctactatttattaaatgttaaatcaaatatcattatttttaaaagaactttaatgtagttttttccatcttttagtgatgatttaaaatagacactaattgtaaacaataaagataaaattgtaccgaaggaactatattgaggctattctaaaaataatggagcctgattcaatctttagttaatagtgagataaaatttaataaaatgaataaatattgaaaccaaaaatgtcattaagctttaaaatattaaatattttttataaaaaaattaagaaattaatgcgtttattatttatttgatagtttcattataaaatattaaaaatatttgtaggaaaatttataagaagatatataatgttattcttaaggaatcatggaactgacctataaaagaattacgaaacattatttggattagaagtgaaatagaaacaaaagaaatacaatgaaaacgatgtgttgtttagatggataaaaatgagaagaaaaaaaactaaaaaaaaaattcttcatttgtttggatgaatggaaaagagagtagaaaaaatagataaattacataaaaatattaatttattccatttttatcttaatacaaattatttattatttttatattaaaaatatttaatttttaaagattaaaaaaagaaaaatagagattcactagatttatcatcttctaatcatgataaatacggaagaactatggaatttggcacttttccttgtctatttcttttttaaccaaacaagagaaagctaagtaatctcttttatttcattcttttatgtttctctttttcctacatcactcaatccaaacatgggataaaattgatcctgaattaagtgtgtttaattaggtgttgagtattcatatttatactcatttttgcatcaaacacccaaaagaacataaaagttagttattgatgctctagcataatgaaattccatttttcatagtgtataaccaaacacattataagtaaatcgaatttaccaaatttaatcaattattaaaaaacgcttgctcttttattttttgtttttctagtttgcaaaataacatcttgatttgatctttatagaggcgtttggtaggggggaaaatcacgtttttcaagaatcataggttaaaaaatgccatcaagttttccaatgtctctcttaatttccacttcacaataaatacatacatatcagtgttttttttttttttttacttgtatgataaatgtgtaaattaatttcattttcagcatgctccttaaacattgtcgcaatcaaatttcattttgccgtttagaagggaacaggccaaaaaacttgggaggaatttcttactattaggtcgttgcattgaagtagtaataatagtgcaataccaagacctaattttgaaaacgtgtttctcattgttttgtgaaagagggatttgtgtcattcggcgtgcctctctgaccatgtggcaccgttttcttttctctttggcgcacgttcttgttgtttttcttgttctaatttaacctaaattcgatataacaccttcctccgcagtgactatgtcactaacaggcccacaccaaaagtgcaggacagtgtagtccaacttgtgactcaaaccaatcaaacaaaaactaacatatgattatttctcagagaattcattagggctgagtatgaatcgggtttgctatgctttttcttgttcatattcgatcaagttactttttttagatttaaatatgacttgatcaagacccaacatccatgaaacaagaaacatgtttgatatataactttttctttaagcatgagatcatcatggattctatctctaactcatgcctatgagaaaatatatttattaaaaaatattaatcatttaaataaatcttagtacctcaaaaaattaatcattaccttttaataaataataccttgattgaaaaaaaaaaagaccaggtaagctaacttttttacacaatatattagttttaacattatgtatagttaaattatagtagaattaaaagaagtagaaaacttaaaataaatttttttattataaatataatatcatgttatataacatattgactattaaataaaatttttattattaataaaaaattgttaaaaaaaaactgatatttttcaacagaataataaatattaaattgggctgggcggcacaaaatgtgatgtgaacctatactaaataaaatcattatagaggtgggcgacctatgatctttatgaaggtgtttggtagggaaaaaattcaagtttttcaaggatcatgcttacttttattttaaacaaagtcttaaatttaagttttataaaaaaatcataactaaaaaaaatccacaaaagataactaactaagttttaaagttaatgaatgtttcacgtgaatattataggaattaaaagaaaaactctagtcaaacaaactgtggtttgacagaaacgcaaaacgaattgtcgtttagcttgtgtctaattgtaattagttggatttggatcccaatcccaaaacgtagaaattaaagaccataaaagtgtcgtactatatgttagcagtgacaactatttcattgttatacggttttggtttggttagtctgtcgtttttcacagaagagaagagagagtgtgttgatgaggaaccttcttaatagccaaacacataaacgtgtttttatattttaattgaattgaaagtcaaataattcaaatgatcacacggggaaaaccatacataaaaagtagtactgcatatgataatattaatattaattatataattttttaatagttgcttgaaaagcttgcttgcttgtgtttgtttgtttgtttgttatttgtttattttatacaatttttttttaaaaggtattgaaagagagtaattggagagagaaggtgagacgtaaaagaaaaaatatatatatatatatatataataaataaaaaaattgaaatagcttagagatatatttttaaaattattttttaaaactattttatttttttatttttatttttttagaagcaaaaacagttttcaaaaataagaaacggataagtgtttttctctgtttcctttggatgttccaacgtccaaccgttatttcaagctttacggctgcaaataatgcattattaaaagggtttctttccaatattactatttggaggaaaaagatatatttgttcacaaaactagctttttaggtgcatacacacacgtttcattggtattttttttttaaatgagtaatatctttcatactaaataatacttagttatatatttaattttgttttaagacataaaagtaaaatagtttatattatgtatttttaaacaagtgaggtattttatttttcacaatggtgacaatgagattttgatttagaatattgtacaaactatctaaacctctaataactaaacggattctagtgggtatgttaaatggagtatattataaagttttcttcattaaaaggaaacctgccgtcgcattcaatatatttatgttctttctttgatgtcagttattattaattttagagtgacggaacaaacttacccaccggcaataaattagacttattgtaacctcatgaatggagacttgctcattgataataaaatactactcctaccaaacaataatcatttttttaatatatttcttttaatcctccgatcagagagaaaaaatgacctgattaatccaaactttgatggaaatttaagcaaaatgaagaattatttttattaaatatcaaactcaaataatatttaaataattctattgttacaatagaatatatgctttgacacggaggatttttacaataaattattacaaaattgatgattataattgcatagagatctgagtcataatattgcacatagattattataatttaatgttttttaaattattgtaatttattttatttcagaatttttcttatattcaattttaaatttctcaagtgctttatacgcaaataataattggcgctttaagaacatttttgaataatcaaatgtgaaatttgtttaaaatattattaatatatcttattaatttccaataaatctttaagacgatattaataaaaaaaattattacaaattctttgatcagtactactaacctttttatgtgtgtgtgtactactaactttttattatacaagagtcaagaaacttgtctaatactctcattttacttttttggtgtatgttgctatacttttatgtgtattttttttcagcaataatacttttatgtgtatgatattaaagtgggttatcaattatttcttaattaacgtcaactccaaaaattaattatttatcaattacaatgattgcataacaaatatataatagagtattattaaatatgactaaaaagttcttaagtatctataacctaccttagatagaaatgctttgagaaatattatttttttaaaaaaagaagtaccgcattatctgtctttctaaaaacaattccaatatactatagtgtggatgtgatttttgttctaaaatatatcgaggtagacgtggctgtttcaaattcaagaattattttataaccgagatagttcctcaactaaattttcaatatgctgtacagatgtcaacacctaattctaagagcaaaagtttcaaatgcattattactgttactataataataataataataataataataataataataataataataataataataataataataataatggaaagataatacagaagggttggcctagataagacctaaaataaacttttaagaaaaatttatatatatttttatcctcataaaattaaaaatacatgttatttattcttacaaaaatattcgtgtatttttcgttctcataaaattaaaatatgttttttcaaaaaaaaattatatttacatctatcatatcataactaatataaaaaaatcatagttataattttagatataactgaaccttactcttagaaaaaaaaacacaattaatttttttaaaagaatacttaaaaatattcttcaaatgttagtttctaagaatttttttttgaaaaaatcatatcaaacataagaatcccaataaaattttaaagaatctcctcacagtcatgtcctttcaagttattttgcacaaaaaaaaatttatataagagttttaaatcaatagtaacaaaagtcaaaattgtgtatgattatgaatgggtagcggtcacatcagccagtcctaagcatattgattattttaatccaataatattaagggaatatataccttctaattatttaaatcttgaagtaattgagagctgataaatatttaattgtctattttcaggcaa

SEQ ID NO: 3426 - DNA, 976 bp, Glycine max
  Intron number 1 from transcript Glyma05g36670.1 (locus Gly ma05g36670) derived from phytozome v7.0 (chr-ID Gm05; pos 40491365 to 40492340)
aacgacttgcactcacccagaagtacgaggaggtcattttctctaacacttttaactttcttttttcatacataacataagataatcaaattgaactttatatcccatagctaggtctgcaatttgttttttgttccgtgattctgtatctctttataattgggaaactactcttgtcttcagtatgattggttgtgctgaatgttttatcttttcatttgagagggatcatttttcagtgactcagtccttgaattcgaccattgtaaatgcttttttatggatatatttatgatcagatgattgacgtgatgcggttttcctacgattcaatacgttttggctgcctatccatttgtatcataacgagactatgtaccttacaatacacaagtgaacatcatggatacggatcacacgatttaactaagcgtttttttttcttttttaactaatctcgtaagaatagtgctagcaatgcactctttaacacactctttcttattgaataaaataattgaaaactacaaaatcataaaaaagaatcattaaataagatgtgagattcattgaattttatgatttttcaataaatctcaacaaataaaagagagtgcgtcagagagtgtgatcctaacatttctcatatcgtaaaagaaattgaaaactcatataagcttacattttgttttatggttaagtgattttatctatttctagtttaaaattatttttcattgtgtctaaatcttacatgattggaatctcaatttgatgacgttgctttgatttgatgaagttgaagcctaatggattatgtgtgttattagaggggacagtctcgttgcaatttaagtaataatagtgagcttggacttaaactgcaatgtgtgctgatgaatttggtgtgctattattgaataatgggagattcgtttggttttacttcttgcaggtgcttgttgctggaggtggc

SEQ ID NO: 3427 - DNA, 3407 bp, Glycine max
  Intron number 20 from transcript Glyma01g09430.1 (locus Gl yma01g09430) derived from phytozome v7.0 (chr-ID Gm01; pos 11525609 to 11529015)
taatattcccaactttgcacttcttctcagttaaggtaatcatacattatattgtggatcactaagggctttttaggcttgtaacgtgactaggctaacaagaaacttatggtttttctttagattcaaagttaggttctaagagagcacctacctcatattttttttataacctatggctttatatttcacagccccaactttcatgtatttaattcttaacaacacacaaaatttctttggtacatagttgctatcagctttttatttgaaccatactctctctctctccctctctctctctcttttgcaatagaaactataaaaactgaattacattggtattgtagtaactgatcacataatgcaatttactctggatgtatgttgttattagtgttcttgaaacaaaaattttcatccaagaatcctcctcccccaaattaggggtaaatttgtcttaacccatgctttcctacaatctaagataaggtagttattaatttcattcaagttgggtttcaaagacaatttattcagattaggctcaatagggtgcaagggatttattctagtaataggttggctatttggctcagtggctaagaaaatcaaaacaagcccttgattatttccaccttatgtatgtacttaacagtttaagaatcatgcaaaatcaggaaattaaggacaatcgttctctcacagttataagctcgcacatctcaccggacatttatgaagtgctcggcttacatatcatgatttttgtttagacgtgctaacctcttcactcttatgctttcaattcatacttcatcactcacaataatgcctgctcacacaagaatcataattttcacaatcatcttatcagtatatagtatatctcatttatcaattcatccagaacaagtcataaaattactgatttcctatgtttttatcatgcaatttttttattcaatgtctgaaataaaattattggaattaaattgttgaatttaaactgcataaaatgaaaataaaataaagaaaagaaataacacaactatcctaaaaaacacacaatgcaattaactaaaagagagataaggtaagaaatcatgggtttcctcccaataagcacttctttaatgttattagcttgacgagtccaatgccttcaaggtggcatgaaggtcacatagaacacatcttccttgcatttttttcctcttagctagagactccatgaaactcatgtatcctgaaaatgccttccatatcattgcaagagaagtgctagtgatcaaggagagaatgacacttagagatttgtcatgttctccatgcctttcttccttgacaatcaattgatgagaagggatattgacttggagaatactttcttgttgaatttctacttgtgagcacttctcccattgttgttgtgttctctcctcacttttttcttcatcttttttatcttgaatcatgctcttctacaagactttcctcatgagcttcaacctctacaaagttttcttcccttgtgatcataaatttagccacttcttttgctagcttaccaacttgaatttctagatttttaattatgtgttgagtagattcatatgtttccttgagttgcatcaacaaattatcaagattaaaaattctttcttcttcatattgattatagggttataactcttgctcccacctataatttttcatggagtaactcttgccaacctgactttcgagattttgaattgagttttgattggatttgaagctagctttggatgtttccatgaattgcataaacacattctttagattagaaagtcttttttcttcatgttgattgtaagggtgtaactcttgtccccaccaagaatttttctttgagtgctctcctccacaaaaatcacaatttacagatgatagatgactctaacccctaatcatgtgctttcaagatgctcagtccacctctttaaaatatcttccatggatcaagttcttctgagattccactctacaagcatagactcacaagaaaaaatatatatttttttgttttgtaaaaatgaatataagagtgaagaaagaaaaattgaaaaatagtttttttttaaaaataaaaataaaaagttaaaagataaatttgattgctttaaaattggaatatgcaaacaaccaagtacgaaggcaacgacaccaaaaacttgttaactcgttggtaagtgcaccaatttgtctaaagtagtaaagtactcgaaagtccgagtattgaatccacattgaatttctttgtacttggattgatgcaaacccaatttacaagcaagagataagaaatttaaatgtaaaatttgaagaaagtaagagagaggaaggataagaaatttaaaatagaagattaggagataatataaaaactaaagagataagagattaaagtaaaaaataagaaatgtagaagataaaatagataagataataaaaataaaagataaagataatgataaaaaaatgaattcagaatttaaaatatgttggggcctaactaccctttacactcaaccctggtccctcacgatgaaacttatctattctctccctctcaaatgccctaccaaagatagaatagtaaatcgcatgaagcatgaagatgtatgcagagacaaaacaaagtcacttttttattttttatcataatgtatactgataatttcaaaatttgagttaatttcttctggggctttgaaggatgttagtgagaaagagaagttagggttacagaagggtatttttgtcgtttgtgggtgcaggaagaaaaaaaaggtggtgcggaaagcaaaagcctaaagttgtttttgtttagcccaaaaaaagcccaaaagcactaccaaaaattaaaaccctaaccctaaatcctaaatggccatgtgtactctcgtcgtgtataaagatgaggacgctgcctttgcaaatgaaaaccaattgtgctgcagcggtgacctttctctaccttttttctatgttgttttctttcaatttttattaggtctttcagcaaatgattgttaatatgatgcaccatgtagccccttgcatcttctagttttagttgcaaggaaatcacgagttaaggttgtccaggtgctaaatctagccacggcaaataaaattcatgtttttgggtgtgttttattcgcccaatttgcaatttttttgccgcgaaattgttttgttacgcagtactgggtggttaaaatgattgataccagtgaataagtaaagcaaaatgatgaagccaaaacttttctgaaactgatgaggatatcttgtgtttcatatggtcttcaaagttctctgattgctttgcttttgttgttgtaattagggttggttca

SEQ ID NO: 3428 - DNA, 3785 bp, Glycine max
  Intron number 7 from transcript Glyma10g14310.1 (locus Gly ma10g14310) derived from phytozome v7.0 (chr-ID Gm10; pos 16393189 to 16396973)
ttaggaatattgattgtgagtcataaagagtttcatatttaacattatcctcaattttatcttggttttacattttttttaagtttattgcagaataattatgtctgtgctgaaatttagggatgtgtaaaatgtaaattactctgaacccccttctatttttcatttcttacacaaaacttctttctaaaacctacacaaacccctcctattttttttttttttacagaaatccatcctattttatgaatatgcaacatttaaatctaaaatctttatttttgtatgaaattgacaaaaatatccttattatagatttttttttatctcattataagaccctttatttattcaacgttacaaaaacctgttctattttataaatatattacaattaactccccctattatagtaaaaatttgaaatcattgaatcttaaatgtcaaaagttttaaaataaattaaagtaacgtaaaagaataataaattaaattatcatttatattattttaaatttttgtagtaaaaaatctaataaaaaattaatcacatgaattatcaatatgatgaaatgaaactaatattttaaaattgaattttcaagaattaaataataaaaaaattaaatcgtattttattgatttagttattaataattcacatgattaattttgtattgaatttttcatttcaattttgaaaaaattattatttataatttttttattatctatattttttattttcttttattttaatgttatcttaaattttttatcatttgaatattaataatttctaattttttctattgtagaggtatttaattgtaacgtttatacaatctgtaatgttaagaagtaaaagggattttatgtaattactaattagtcaaaatctgtaataagggcatttttggcaatttcatttaaaataaaggttttcgtttaagtgtatcatatttataaattaggacaggttatatgtaggttttagaaatagaagggttttgtgtgagaaatgaaaaatagaagagaggtcggagtaatttactctttagtgattgatttgacagaaagaaaaaaaaactgaataacattttgataggaaatattggattctgtggaaaaactaaaggtggtaagcatagcatcttaggagatgaaaggaaattacttactatcttttggatcacacttaacaactcatgcgacacttcattatatataattcttaggacaaaccaagagttgtgacatacttgaacacaataaatacaataagtaatttctaattagtgtagtgccttatttctaagaactagtgttttgatttattgaattgaagctcaactccagaagttttagaattgatttacaccagagtcttgtacccaaggacctaaagaggggcattgagagacacaaacaatagatttaccactgtgcaactgaagtagtagggccagagttctgacgactcttaaaccacttgtcaaattctaacatgcagccggtgtagcacgaggatgatcaactggctctgttggctctaccacaggtgtccgggccacattggcaggatgaagaggtttactgtgcagcttccagcaacggtcaatggtgtgcccagtacgataacaatggtcgcacttatatcaatttgtccgtgtgagaatggttattctttgaggcaagagcatataagggtctccgtatgaaccttggatgaaatttgaagtagtggagaggaggcaaaagtcatcataggcactgcgggagaactaagaatctgctcatgaataacagaatattttgttggtaggccataaaaggccaaggtcataaagaatgcactcctattctcagattctttcttagccttagcaggaatggatgcagcaggaggcaaaatctcaacacctctttgtagatcagttgacgtgctagtggtggggtcacttgccccgaaaggttgccggagcggcaatcgtggcggtggccaaaaaatgcattagaaaagggtataaagtctccagaaggagacctatgagaaaaaggggcgaattggagacgtacactactagagaaagtcctcataggtagctggagtactgtgaggctgataagtgggatgagtggaatgagcagagttgtctgagctacattggcagggtgcggtggtttaccatgtagcttccagcgatcaatggtatggtcatgacgaagacaatggtcacacttgtgacaactcagagttagatgaccttgttcgagagcatccaaaattattgctctgggaagcaagggtagatgtgtcccccatcataggagtggggatgttggtagtaggcttcggtggaatcctaagcagtgtagaacaagtggatgccatcattggggcgacaggtgacccatgaatttggtcttgtgtagcagaatactctggaggcataccataaagagctagagtcataaagaaagcactgcatttctctagttccttcttggcctcaattggaatagaggcagcaagaggtaagagctcattatattcatgtagggctgcatggagttgtcaaagatatgcaaacataggaccgactttcaaatttttggggggcaagaagagtcatcaagtcttggcacactccatatagctgttgagtatcgtttgtgtaaagagcacgcgcctcagtccaaaccgatttgcaaatgatatggggtaggaaaatcgatttaagggaggggtggagggtggacttaataacactgcataggttggcatcaatcttcgcccattgtgcacggtcaaccgcgagtatggaatcaattgtactagtgaggtgagatttgtaccccaacctactaatccataaggtgacttcagaagtcctattagagtagttggagccgtccaacttctcaatggagagtaggaggtttgaaaaaatgggagcccttgcctttgatggagtgacagagctagtggaagccatagtgggctgggtctatctttcttttactgatttttatttcaatataagcacaagggaatctattcactttcttttcttgattttttctaacaattaataataagattgtgtttgcattttgtatcaacctcatagatcacatctcatttattcacattaattatatagttaaggctgaaatatgttttgagtccctagtaaattaacgaattttgatttgggttcctaatattttttttccattgagtccctaatgaaacaaaaagttttgtttttggtctttttttattttgttttactcctaatatatattttttcttgaatccctcaaaagaccatttgttattagcccctatcaaatatttttcaagggggctaatagaaaatgaacaaaatattacaaggacacaagaaaaaatatatatattagaaggactaaaacaaaataacaaggaccaaaaacaaaatttttgttttattaggaattcaatgccaaatttttttattagggaccaaaaacaaaatttgctaatttatcaaggacccaaaacatatttaagcctataattaatatttgatctcttctctcttttatcatcaaaccaagtccatattatttcaacacatttgattgtgattttatttatccttccttttctaaacaatatgcaatgttttagcttacatatatgttttcttcatctactttagttcttgtttttgttatgtttaatatttcatcttcttttagattccactatccatcacaaaatttgtagctgctgg

SEQ ID NO: 3429 - DNA, 7198 bp, Glycine max
  Intron number 4 from transcript Glyma15g41990.1 (locus Gly ma15g41990) derived from phytozome v7.0 (chr-ID Gm15; pos 49289893 to 49297090)
cctgaaattgactcacctggttagttcaatttcactttactttttatgtttgattgattttcttttcttttcattgtttagttggtttgtgtttgtttccttatttggggcacaagttgcgttagaaagattccagcttcaacaacaatgctaaattagtgaattaattgacatgtgtttgattactctgcctgtttctttctttctatatgtttgtcacttcaaggaattaacgagttatgtgtaaataacaatgctggattcattaattaatcataatctccgtgtaaagttgcataagatagtttgtttctatcggtggcagtttttggaagggttatgttatttatttaaacaggcagaatagcagataaagagggggatatgtgtttctcaacaaaagcaagaatcacactaattatttcttctcccccttatgttgctttttgtgtcttataagatgttgtaggaatctgtttttaagtatgttttttgttttttttctcctgtcagagggccaaccgattactagttaagggacataaacttgccatatagtaatcattaatcaatatgtgcattatctccaaagtccaaacactgatggagtttgataccaaatttttatgttgaaatatctcaaacatcaattggcacttagtccctttggaactgcttgatccacgaattgagttctagtgataactgttaaatatgagttattttgatagtaaaaatatattgaaaatatctttaaaaatatttatttagcagttatatttggcttaaatattaagatttgatatttttcttatttatgtcttgcagatatgaaaatgagagattaaaggagaaaagatctagaaaatacccaaaatatcaagaaatctcaagaagatatgattacaagcaaaacaaatccaaaagatatcaaaaatatcaaaaaagaagatttttagcatcaagcccaagttcactacaacaactataaaaagagagtcaagctaagcagaaaagaacaacacacaacaaccccgctcctacgggtttcatttactccctctctttctttcacccctttctcattataaagccctcaatggccatgagtggctaagcctctagctagggtctggcagacccaaaagctaagcgatgtatgatgtactcactatttatcaatgcaaatgtgttttctattctattatcttttctgcttttatcttgcattattcatttttatattctgttagaggttagacggtcgggagaggataacttctaaataagatttaaagaaggtatgcatgcattggttttaggggttagacactcggaagagggtaacttctaatagaacaaaaagaaaggatttcataaaaaaagtcattactaggaatagaatgattattttatgtccatgcattcttgcaaacatctagacttcatatttcatgtattttatttgttgagtctttgcaaaggaatttggaagatagataaataaaataagcctgtcatcgtgaggaatcaggggcaagtaattgaacagatgtgggtagaacagagtcacctaaattgataaagaaaaatcataaactcatacatcctaggcaaacaaggcaggccaggtcccaaccttatcatattctgattttatcttctatttttatcttttacttttcttatcttctattttctcttatctttatcatatcttaatttaaatattttatcttctatatttatctttaaatcttttatcctttcttttaaatctttatcttatctactatattttcttatctttattttaaattctttatctattgcttttagattgggtttgcattaatctaagtacaaacaaagtccctgtggattcgacattcggacttccgagtactttactacttgtgacaaatttggtacacttgccaatgagttaacaagtttttggcgccgttgctggggactttgtttttcgtacttgattatttgcatattccaattttaaagcaattagttttcactttctattttttttattttaacttctttctttgttttctattatttttttagtgcttcattttatttttcaattttttttctttattcattcttattttattttttttatataaaaaaataaaaaaaaaactaaaaaaaaagatatttaagtttaatttttattatgtgataacgtgcacggtagttgtttcttttgtgaacagtgcacattcattctctaaagaacgcatcatggcagaagatcgtccaaagaggatgacgctagaggattactctagtcctattatacctcaatacttcaccagcatagccagaccagaggtgcaggcggccaacttctcatatccatatttcttgatccagctgattcaagggaatctatttcatggcctaccaagtgaagatccatatgaacatctggccacatacatcgatatttgcaacacgatgaagatagttggggttcctgaaaatgcaacacgcctcaatcttttctctttttcactagcaggggaagcaaaaaggtggctacactccttcaaaggtaacaacttgcggacatgggaagaagttgtagagaaattcttaaagaaatactttccagaatcaaagactgttgaagggaagatggaaatctcttccttccatcaatttctcgatgaatccctcagcgaggcacttgaccgcttccacggactgctaaggaaaacacctacacatgggtacagtgaaccggtgcaactaaacatcttcatagatggcctgcgaccacaatcaaagcaattactggatgcatccgcaggagggaagatcaagctaaagacaccggaggaggcaatggaactcatagaaaacatggcagctagtgatcacgccattcttcgtgatcgcacatatgcaccaacaaagagaagccttctagaactcaccactcaagatgcaaccttggctcaaaagaagttgttgtcccaacaaatagaagccctaacagagaccctcaacaagcttccacaacaactacaagcggtaagtcattctcactcttctattatgcaggtaaggggatgtcacatatgtggatgaacacatgagtcaggcttatgcatggcccaagatgacgcatccaataaagttaactacatgggcagtcataatcatcaaggattccatcaaagaggaccaccaggattctatcagagcgataattttctgcaggactacgattggagatattatccaagtaacaacttcaaccaagggggttcaccctatcagcatcctagccaggggccgagtcaagaagagaagcccattaatatagaagaattgctaatacagttcatgcaagaaacaagatcacatatgaagaggactgatgcaacaataaaaaatttggaggtacaaataggccaactagctgagctagttgctgaaaaacccactgaaacctttgcggtaaatgctgagatgaagcccaaagaggattgcaaggtaattttcactgagagagaagagaaagaaaaaaaaactgaggaagatgtgcatgatgaggaaggagaaaagaaggaagaaagagaaagaaatgaggagaaagcacaacaatggaagaagtactcacaagtagaaattcaaaaagaaagcattctccaagtcaatacccctcctcatcaacttattgtcaaggaagaaagacacggagaacatgagaaagccttaagtgtcattcattccttgatcaccaccacttctcttgcaataatgtggaaggtgcttccagaatacacgagtttcatggcgtctctagctaagaggcgaaaatgaaaggaagatgtgttctatgtgaccttcatgccaccttgaaggcatttgattcgtcaagctaatgacgttaaagaagcgcttactgggaggcaacccaagatttcttaccctatctttcttttagttaattgcattatgtgttttgtttttttagaatagttgtgttatttcctttctttattttgattttgtgcattttaatttcagcaatttaattccagtagtttaaatttagtcattgaataaaaattgcatgatatttgtgaagtcactatttaggctttttctgaaggattcaacacttgaaatgctgcatgacaattgtgaaaatactggtttcctagaagcaagattcagttaaacagtggaacatgaatcacaaagagagaaaaggttagcttgatggaaagagatcatggtccggtaagccgataactttatcttgtcccggtgagctgtgtgaacttaattatgagagaacgtctgtttttaaattcttaattttgcatcattcttagactgttagattatttgcataaggtggatatgatcaaggccatgtttcttttagccactcagccaaaaagccaacctgtgatgaatttatcctttgcacccctgttgagccaaaagtaataatgatttgtttgaataaacccctgagcctaattttgatatccttgaccttgatttagggttctaagagagcttaagggtttcaagttatgataagcccttaatttgggggattcgtaagggaatttgcctaaaaaaaaaaagcagcacacaatagggcaccctcagaagcttgtaagcccaaagtattcttaccaaaaaaaagcagcacacaaaaaggcaccctcagaagcttgtaagcccaaagtattcttatatatacaaaaagattacaaataagggcataaaaaaagaggtgcgataagtgctaagataaaaaaaaaaaactttgaaataaggacagaaaaagagaggtgtcataagtgccaagaagaaaagtgttgttagaggaataaaggctaaaaaataaattagcctaggcaggaaataagtgaaaaattttctaaggatgcatgctctcttataatcctaagtttttgaaatcccagaaaaatcataatttcttgtttagccgggccccgttacaagccaataaaagtccttagtgatccaccaagtgtaagtaagaataactttaactgagatgaagtgcaaatttgggaatcttaattgcaggtcgtaagatttcaaacactcaccccagacacttgtgcagagagagaaacactaaccttgtgagcaaagtgaggcaagccaacttgattaattttcgatactaactattttcatctcgatgttgtttgtgcttccattgtgagattatggcaaatgcagaagggaccagttgaaagaatttgaaaaaaattgtagctattgaaagtgttggagcattcggagcctgctctcatttttatttttgcttgaggacaagcaaagttttaatttgggggattttgataactgataaatatgagttattttgatagtaaaaatatattgaaaatatctttaaaaatatttatttagcagttatctttggcttaaatattaaaatttgatatttttcttatttatatcttgcagatatgaaaatgagagattaaaggaggaaaagatctagaaaatatccaaaatatcaagaaatctcaagaagatatgattacatgcaaaaaaaatccaaaagatatcaaaaatatcaaaaaagaagatttttaacatcaagcccaagtccactacaacaactataaaaagggagtcaagctaagcaaaaaagaacaacacacaacaacccccctcctaggggtttcatttacttcctctccttctttcacccctttctcattgtaaagccctcaatgaccatgagtggctaagactctagctagggtctggcaggcctaaaagcgcgatgtatgatgtactcactatttatcaatgcaaaggtgttttctattctattatcttttatgcttttatcttgcattattcatctttatattctgttagaggttagaggttagacgctcaggagagggtaacatctaaataagatttaaaggatgtatgcatgcattggttttaggggttagacactcggaggatgttaacgtctaatagaacaaaaagaaaggatttcataagaaaatcattgctaggaatagaatgattattttatgcccatgcattcttgcaaacatctagaattcatacttcatgcattttattatttgttgagtctttgcaaaggaatttggaagatagataaataaagtaggcttgtcatcgtgaggaattaggggcaaataattgaacaaatgtgggtagaacagagtcacctaaattgataaagaaaaatcataaactcatacatcttaagcaaacaaggcagaccaggtcccaaccttatcatattctgattttatcttctatttttatcttttacttttcttgtcttatttttttatcttctattttctcttatctttatcatatcttaatttaaatattttatcttctatatttatctttaaatcttttatcctttcttttaaatctttatcttatctattatattttcttatctttattttaaattctttatctattgcttttaagttgggtttgcattaatgtacaaacaaagtcgtccctgtggattcgacactcggacttccgagtactttactatttgtcacaaatttgatacacttgccaatgagttaacatctagcaaggtcattttgcgtgcactttagcttaccacccccctccccaaaccagatcatacacctcctttgtaaccaaaaaaaattgttaaagtttagatcgtcattctgatcaacaaagcaactttttatgctgaagaagagtctgagctgttatcttcattctgttgtgatccttagtgtctctgctgataaggcagaaacattgtctgttgtgatccttacgtgtttttggtcttgttctctaattagttgaagttaatttcacctcaataaaggtttgcaataaaagccaacatacatttctgaagtaaaactctaattctgattggagaataatgaaactgtaattaagttttgtcctatattaaatattataatcataaggccaattaacaaattaattagggcttttgtatatgctcaagtttcaaatactgttttcaaagtgttacttattcttagaattatgatgatcattgatcgataaaaatcacataatggcagggcacactggatcttgggctttagcctacccagaa

SEQ ID NO: 3430 - DNA, 2027 bp, Glycine max
  Intron number 2 from transcript Glyma12g15440.1 (locus Gly ma12g15440) derived from phytozome v7.0 (chr-ID Gm12; pos 14293920 to 14295946)
tgcccacttgatttggtaagtgctggtatcatattagattgttgctcgagttgtctttctgtactttcagtaagctaccaagatttgattatcatctcattgagtgatttgcttatgaatttttttgaggatattactatttttctgtttttgaaaatgattatatcacatgcttttacatggaatgaatatttgctggtgattcgagtgtggattttcactttaaggatactttcctcttgccaaactttgtagcccattaattgctaagtatgttatatcagtcaatagaggaagggcatatgtcagcttcagtcaagtttgagtgtagtctgatgatggatatctataattaacctagtaataattatcaatatgtgtaatttttagaattttgatttgaattttttatatacagaagaactcaaaatattcttaaattaataatcctgaattcctttatttaatcataagataactgttactcactgagttggcagtaaactcgtctgaggctttctcaacttgaattttaacatcatccgcgcctcttctccttgttatagggaacatgttaataccctattgtcatttgtcgatattgtattcctgcatttcatgggtcaagtccttttgggatcaaatggtctgactgtctccaagtgctagaataataggaagggttcttagtcttttgagtcattggattactctgactcagacatacttgtccagtattccctttcattccctttaccatactttgaagtcttgcatagccaagcaaagtagtagagcccatttcatcagttggaaggtttgtttcaaaccttgattgaagggtggattgagtcctgtctgataatctaatatgcagaatcatggctttggcagctcaatggctatggtgtatttgtatggagagaaatgcctgcgttcaatggtgtcttttaaccataaaactattatggttgctttgaggataatgatatacaaggagattggattgctttttttgcatatttaaggctttgaaccactttgattccttatactgcctcagattagcctctctactttaatttacaactattttcttgtattgtataaaatactgtaatccagaaatggtcacgtgttgcagctgtagtgttttcattgtgagtgaatggaaccagtataatgcgtgcttgctgaatggagcctgtatgatacataaattatttatctctataagagatgtgaactcttaatgccaaaatatggaaggtcatatttcacgtttcctcttgagaccttattttcttaatcttatcttcagactcaggcagaggcagagggagggggtgacctggtggggccatggtcacccgtattttttttatatttatttaaattactatagagattattttgtgatcctcctatagtgtgtgtgtgtgtgtgtatactttatctatctaatctatttcttttattatactgtttttgtactcaatagtcaattcaatatattaaatttcttgcatatgttatgcttgtgaaaacttaaattttcttttactaagtcgtgttttaggccacccttgaggcaaagttatagctttacctctgattatcttattctctcgaaattccaatacatcttgtttgaacatacaaaagttgtaagttttaatgtttgcagataatgatgttaaagaattgaataattcttaatcctgtatatatttaatgtgttggaaatataaatacttaccataaaaggtagtaggaggatagcattactctatttgttctctgtcctttccatgattccatccttctgcttagtaaatttatagttgacgctgtatataaccaggtgtgagtaatcttttcatctgctggcacagatttctgcatgtttccaatgtgtttgtactataatagactgcttttaggtaagccacatgtatcacgatctacttatattgatggttccttgtcaaggtggttgattggaactcaaattctgatcctgggag

SEQ ID NO: 3431 - DNA, 7263 bp, Glycine max
  Intron number 3 from transcript Glyma20g28930.1 (locus Gly ma20g28930) derived from phytozome v7.0 (chr-ID Gm20; pos 37863026 to 37870288)
gagctgtgggaaatcttctgcaccattccccaaaggtaataataagacccctttgttgaacatttcttgtgagatcactcctttaaaaatcatccaagtatattaaaatttaaaagtgagttaagatgaagaaaagaatgactagttcaatgacttgaaaatgggaaatgcaagtgctctgacattatttaagttgttttatgatagatggggaaaggtgtatgttagctgccacttagttaggatagctaggataactaactgtcagttagttaagaaactataaatagtccgaagttagaatggggagaattaggaagtggagggtggtgagacctcgaaactcatctattttctgtcttggatattggaagcaccataataataataatacacattttcttcctccgtttctggtccaattctatcaactggtatcaaagctccgatctaggagcgtgggaatagttaatggtgacgaaggcaaacacgagaatggagacacgcatggaagccatggagaaggctatagaggagaatcgtgaagcggttgaggcgagactgagttcgatagaagggatgatacaacgattagcagcatcatgggagaaaaaacctcctgaatcgaatgttcacgcaaacaatttgataggaaggaataaggggaacgttgtgcagggcagcaattggtgaagaactcttgaaatgccaatattcgagggagaagatcctatgggctggttaacaaagacagaaaggtatttccggttgcaagctgtaagagaagaggataagcttgaagtagtgatggttgccatggacggagaagctctagggtggttccaatggtgggaatcctggaacccaaaccattcttgggaagggttcaagatcacaatctcccaaaggtttcaagcatctaacttggggaatccttttcaggcgttgctagcgttggaacatgaagaaacagtgcaataattcataggccaattcgagaagcatgtcggaatggtgaaggggttggaggaaccgtttctggtggagatgtttctcaaggggctgaaagaagagatcaacactgaggtaaggctccatgaaccaaaaaacttgatggaatctatggtcaaggctcgtagggtggaagataagaatcggatcttaggaaagttacccgtgagtgatagtaaggggtataattttcagaaacccagttattcgggttagagatttgtaagggattggcaaccagcaaattgtaaggtaaccaatcctactaatgttgctaaaacaggatccagtggatggctaggtagaagaaccttccttaatttgttacccgcaaaagtaaatgagaagatgaggaaaggagaatgtttcacctgtgaagagaagtataatcctcctcatagagtatgaaggagatagttgtatgttggttcattaataaccattagttagttctcttgctctgtaccaacttgtatttttctgttttctattatagcatgtaacagttaattagttttaagttggttgggttagttaggcttgaaatagtgcttctatttcttcttcttatatagcctaattttgtagagagttctgttcttagaaaattctgcagagattgaataaagtgactgctgtgagcacagtgcagttttttggttcattttgtttttcttttctgcattttgctcattcttgttcatacaagaaactcattctttgtgaattaaaatctgatcttggcacaacaaattggtgcggtgagcgtggagtgattttgagttcgattcaagaaatgggcccggccaagtatgaggttgaaaaattcacagggcaaaatgattttgggttatggcaattgaagatgagagctcttcttgttcagcagggcctggtggaagcacttgatggagaagccaaacttgaaaagatgatggctgatggggataagaaagcactactgcaaaaggcacacagtgcaattatcctcagtctcggagacaaggtgctgaggcaagtctttaaggaaacaactgttgctggggtttggtcaaagcttgaaggtttgtacatgaccaaatctttagttaatcgtctttacctaaagcagtcattgcattcgtttaaaatgcatgaagatagatcagtaggagaacaattggatttgtttaataaactaattctagatcttgaaaatattgatatcactattgatgatgaggatcaaactttgttattgctgtgctctttgcctaagagttactcttatttcaaagagactttattgtttgaaagagattttgtttctcttgatgaagtgcagactgctctgaattcaaaagaattgaatgaaagaaaggaaaagaagtcctctacaagtggtgaagggctgacagcaagaggcaagaccttcaagaaagatagtaaatttgataagaagaagcaaaagccagaaaatcagaagaatggtgaaggaaacatcttcaaaatcagatgttatcactgtaaaaaagagggtcctacaagaaaagtttgtcctaaaaggcagaaaaatggtggcagtaacaataggaagaaggactcaggaaatgctgcaattgttcaagatgatggttatgaatctgcaaagacattgatggtgtctgaaaagaatccagaaactaaatggataatggattcagggtgttcatggcatatgacaccaaacaaatcatggtttgaacaattttctgatcaagcagatgggttagtactccttggagataacaagccttgcaaaattgaaggaattgggtctataaggttcaagtttcatgatggggctgaaagaattctcacagaggtcagatatgtacctgagttgaagagaaatttaacctctcttggtgaatttgataaaagagggtatgtgttcaagggtgaaaaaggaatactgaatgtagttaaagactccatggttgtcatgaggggaattatggagaatggcctctattctgtagatggtgaagttgtaattagctctgcagccactgcaactggaagagttttatcaaaaactgagttatggcacatgaggttgggccatgtaagtgagaaggggttgattgaattggtaaaacaggagctgttatgtggggacagaatggaaagattaaagttctgtgcacattgtgtctatggcaaagcctgcagagccaaattcaatgctggacagcagagaacaaaaggtacccttgattatgttcatgctgatctttggagtccaaccaagacttcctctcattctagagcaaggtatttcttgagcattgtggatgactactcaaggaagttgtggatctacattcagaaaacaaaagatgaggcttttgataacttcaaaagctggaaaacacttgtggaaaactaaacaggcagaaagatcaagaggcttcgtactgataatggtcttgagttttgttctgaacctttcaatgatttttgtaaagagaatgacattgcaaggcacaagacagttgcgggcacccctcaacaaaatggtttagctgaaagattcaacaagaccattttggagagagtgagatgtatgttgttgagtgtaggattatccatgattttttgggctgaagcagtaatgactgttgtatatctcataaacaagtgtctttcaacagctctgaatttcaaaacccctgaggagatttggtctggccatccaccgagtctaaaacagctaaaggtatttggttgtgttgcctatgctcacatcaagcaagacaaattggaacttagagttgtcaagtgcatttttctaggatatcctaaaggagtgaaagggtataagctgtggtgtttggaggctggttttaaaaggtgtttggtgagtcgtgatgttgtcttcaatgaagctgagatggcctaccagactaagcctagcatggttcagtccagcactgatcagagtaaggaaattgattctgaaaaattaaattttgaggtggagactaaagataaacatgttgaaacacaagctattaattggcctcttgatgaagaaaaatctgaagaagaggaacaagaagaagctgactatgtgctggctcgagatagaatcagaagggaaatcaaacaacctaagaggtatggatatgttgatctaatagaatttgctctagtagctgctagtgaagttttggaggaagatccaaaaaatgttaaagctgttttagctagtaaggagaaagaaaaatgactaagtgccatgaatgaagagattaagtctctccatgacaaccatacatgggaattgattaaaaaaccacctggttctagagtggtcaactgcaaatggatcttcaagatgaaagaaggcatccaaggagttgaaccagacagatttaaagctagacttgttgctcgaggattcactcaaaaagagggaattgatttcaatgaagttttctctcctgtagtgaaacataggtcaatcagaattcttatggctatggtggcagaatttgatcttgtgttagaacaaatggatgtgaagacaacatttttgtatgggaagcttgatgaggtgatattgatgaagcaacccgaggggtttgaagtcaaaggtaaagaggattatgtttgcaaattaaacaaatccctgtatgatctaaaacagtctcccaggcaatggaataggagatttgatgaatttatggctcacatacaatttcatagaagtcactatgataactgtgtttacttcaaatttccttctaaagctgagtttgtgatattgctattatatgttgatgatattttgatagcaagtaacagcaagagtgaggttgaaaacttgaaatctgagttgagcagggaatttgaaatgaaggatttgggagcaaccaagagaatattgggaatagaaatcaaacgggacagaaaaaggaaattgttgtatttgtcccaggagttatatctcataaaagttcttgaaaggtttggaatgtcaaattccaaacctgtaactactcctatgtcacaacagtttaagctcagtacaagtcaagcacctaagacatgatataatttacatggaaggtattccatatgctaatgttgtagggtcactgatgtatgctatggtatgtactcgcccagacatagctcatgcagtgagcttagtgagtaggttcatggtaaatccaggtaaagcacattggcaagccctgaaatggatactcagatatatcagaggatcacttggaagagttctgatttatggtggagctaggaatagcagaagaacagttgctattgaaggttttgtagattctgattatgctggctgtttagattcaaggaaatctctcacaggatttgtgttcactgcttttggcactgcaattagttggaaagttagccttcaaaaggtagtggctttatcaaccattgaagctgagtatattgctcttacaaaagttgtgaaagaatctctgtggcttgaaggcattgttaaggagctaaagatacaaaatgaagtgatcacagtatactgtgacagccaaagtgccattgatttatccaaaaattctatgcatcatgagaggacaaagcacattgatattaagctgcattttgtcagagaagttattggtcaaagatcagttatagtcaagaagatttcaactgatcacaatccttctgatatgatcacaaaggctcttccaagtagcaagtttttccattgtttgaacttaattcagctgaaggatgattaaatcctgtttctgcagcagccactggttttgttaatgttttgttattgaaccaaggtggagaattgttgtgtgttagttcattaataaccattagttagttctcttgctctttaccaacttgtatttttctgttttctgttatagcatgtaacagttaattagttttaagttggttgggttagttaggcttgaaatagtgcttctatttcttcttcttatatagcctaattttgtagagagttctgtacttagaaaattctgcagagattgaataaagtggctgctgtgagcacagtgcagttttttggttcattttgtttttcttttctgcattttgctcattcttgttcatacaagaaactcattctttgtgaattaaaatctgatcttggcacaacagagacccttgcttatgaaatgcaggttgttttcctcaacttgaccttgtccctcttgaagagagaggggtattgatagatggggaatggtgtatgttagtcgttaattagtgtagagttccaagccaaaagataaggtgcatttaatgcatagtggaaattaaatgcaaagtgaaaaattacattttactatatgaagtctatttgaacattgaaagttgttttgtttcaacttccaagaaaacttatttatttagttaatgacaatcttccctataaatagagaagtgaattagtggagaagatacacatgaagagagtgtgtgagaagagagattctgaaacaaagtcactttgtggagagaaaagtgttttcatgtgaaagtgttatcatttcttgtaactattaagtggagcactcaagttttagagtgatacactatttaggttaagttacaatcttataatcatttttgtgatagtaaaatacttttgagacggttctgtggacttaagcaagaggtatcgaatcatgttaaattcttgtgttcattattatttttcctatggtgtaatctttgttgtattctcataatcttttgtggttgtggataattgtgtttgtggagcgttaattatccaatagttaattaggatagttaggagttagttagttataactaactatcaattagttaagaaattataaatagtcaagtagagggaagctagaatgaggagaattaggaagtggagggtggtgagacctcaaaactcatttgttttctgtcttaggtgttggaagcatgataataataataataatgcacattctctttctctgtttctggtccagttctatcattttacaattgatattttctttggtttcccaactacctttatattactttgcaactacccttccatttcaaggttcttatgttatgtatttgactgttcactgtctatgtttattccatgtcggacatttggatattcaatggtctatgcaagaaataacataaattatcctatgttcaggatttttcttttcaacatccggaggtttgagcagt

SEQ ID NO: 3432 - DNA, 1231 bp, Glycine max
  Intron number 3 from transcript Glyma13g41920.2 (locus Gly ma13g41920) derived from phytozome v7.0 (chr-ID Gm13; pos 42083941 to 42085171)
gcgaggatctgggaagcacttggttagtgaggtatgtctctccagacaatgacaattatgactagatggtacttatgaactgatgtatgatctatggttgaatacacagttcccaaatcttttgttcctttgttattctgttgtcaacaaagggatgaagaggccagtcaaacagtgcatttttaactaacaatttaagtatatttgattgaactgaactgtattgtgtaaatagaaaactgattagatctctcctgctactgttatgggattgacatcagtattggtgggggttcaaatagacagaacaacatagcttgactagctaaatacaagtaaaccctcattttagtccttgaaattggaagtgtcggttactttagtctctaactttgcaaaacattatcacttcaatcttttttgttgcaaaattatgatgaaaaatgaagtaaaaaaggattataatgcatgactttttgaaaagttagactgaaatgaaaaaaattgtatattcgaagactaaaatgatccatgcttacaattttagggactagaatgagagtttactcagcaaattaaagattattctgtgcaacttgagagtgcctggtctctcttggccctagccatttactcacagtttttatcaatatcctccagcaatccaaccaaaaccctccagtttgcatcccctgtcatgtaggcaacaagttatttcaaggcatagtgtgtcccatgttgccttggattttggatccactggttctcctaaatctcttcctaatatattcccaagaccgtgatggagttctatctatatttcatcaagaagatacggtgattagtaaataagatttggtagcaacacatttttttcaacacttctctttgattggttgaaatttattgtaaatcacaaagttttataggtctcacttattaatgagtctcaataatagaaagtgtgttgctagcactcctcttagtaaattattgcctgaaattgacctgtatttttttgagtgtgaaattgacctgtattgagaaagaaaatggctgtgaatatgatttatgaaattgttatataaaattggaaggcacatctcaacagcttggataagttgattcatgtacggctatcattcgttgctacttgctagggttgaatttctaatttttgtttgtttctattttagtacacctcacttttatggatgatttgtgtcacagg

SEQ ID NO: 3433 - DNA, 7374 bp, Glycine max
  Intron number 14 from transcript Glyma02g48070.1 (locus Gl yma02g48070) derived from phytozome v7.0 (chr-ID Gm02; pos 51483513 to 51490886)
tagcttgggaaaaagcattcatccagttagctaaggtatgactactaaatatatttattgcagttattaattcttgtgtagcttatatgcacgaaatctgaatgtgtttgactgatttgtttgcaaaattaattttgaatgaaattgattttaaagtgaagtaatttgtatattgttggaaaaagccacccaaattgtggtcacccctagatagaaggtgtgtgttgaaagtcccacatggcgggtagccgtgggcaaaaggggatatgttgaagttccacatcgactaaagatagtgtcgagataaattatataagtggggagcaatccttaccttacaagccggttttgtagggttgagttaggtccaaacccactttttgacatgatatccaagcttatcctagatgggtccctatgtctgtcacactctaggcagttagccttgagcgtgagggggaatgttggaaaaagccacctaaattatggtcacccctaagatagagggtgtgtgttgaaagtcccacatgacgagtagccatgggcaaaagaggacatgttgaagtctcacattataggagtatacttacttgatacagttctttcttttcttaagtctttgtgtataggcttaatcatagttctctgtactcttgtagatagctagctaactgactagagttagttgacagttacaagagtaattgtctattaatttgaggtgtattagtgtattaagtaagttttactttgtgattcagttagggcagctgttagaacaattatgattcagttaggacagttgtggttttgttatttttgttagaagctgttatttctgttagagcagtagctaactttggttagttaattgccttagtcagtttatgtgtaatcatatctattttctctatagagaaatagaatcagtttgtaactaaccttttcattctgaatcagtaataatatattgtatcgttcttcttctttttctttctctcaaactctatgatgatattagagcttgaagttatccatggcgacaaatcagaattttgcttctgctactctttctttacatccaatttcttagaagttagatgattctaacttcttgctatggaggcaacaggtagaacctgtcatcaaggctcataaacttcagtgtttcgtggcaagtcctcagatcccgatgcgctttctcatagaggcagattgtgaagctggaaatgaaaatccagcatacaccgattgggaacaacaagattagattcttttgtcgtggcttcaatcgactctttcagtttcaatcctatctcgaattatcggatgtgttcattcatattagctttgggagcagatccatgagtattttcaaaagcaaacacgtgcgaaagctaagttactttgaacagaactcagaactacaatgcttgagcagaaaacaatgcttgagtttcttctgcgcatcaaatgcatagtcgatgtgcttggattgtgtggagatcctgttcttccgcgtgaacatcttgacgcgattcttgaaggcctaccagaggagtacggtccagagatctcagtgatcgaaagtaagtttgaaccacttccgattggagaagtagaggcactgctgcttgcacctgaggcatgcatgaaaaagttttagaagcgctcaccatcgattaatgttgctcaaggttaacatttatcttcgaattcttacaattcatcctcaaataatttcaattcacaaaatcgatccaattattctggaaatcatggtgacttcaatcatggcggtggctacagtcgtggaggcaatgattttgattgcggcggtggctacagttgggtaggaaatggctttggccgtggtggaggtcgtggtggtggtggccgagaccgtggtcattatgcaaattttcagtgtcaagtttgcttcaaatttggttacacaatagcggtgtgtcattttcgctatgattatgattttcagccaaatgcgtctctcacactggtggaaccagtgtttcaaagcaattcatcaaacaccttcggttcaaaatagaattagggaactaattctcacaaagactcccaacctactgcaatgctggttaattctgaaaatcaatatcttaactctactacttggatacctgattcgggtgcatcattccatgtaactgttgagtctcaaaacatccggcagcttggtccatttgaggggccagaccaaatatacattggtaatggccaaggcctttctattaagtcttctggttacacaaagtttgtttcacctattaatactagagtttctctgttcttaaaacaattattacatgtacctaccattactaaaaacttaaattagtgtcaacaaattttctaaggataacaatgttttctttgaattttatactaataattgtgttgtgaaatcataggaaaccaatgaagtcctacttcaaggttcagtgggtcttgatggcctctacataattccacatcttgcactcaaagactctgcctcagccacctgcttactttcaaattccagtgttgattctgctattacttctatttctagtggttctaatacacaaatttctgattccattgtaaatgcagtttctaatgttaaaacaacacttagtactagctctcaaactatatggtaccttagattgggccatcctaatgctaatgtactaagacttgtgcttaatcgttgtaatatacccatagttaataaaactatgttcgaattctgtgctgcttgttgtgttggaaagtcacatagactaccatcttctctatctcaaattgtaattctgctcctcttgaacttatatacagtgatttgtggggatcatctcatatttcatcctcaaatggtttctcttattatatcagctttgttgatgcctattttaagttcacttggatctattttcttaaaaataaatcagaaacattttctgtttttcagcaatttaaaaccatgactgaattccaatttaataccaaagttaagagtgttcaaacagattggggaggtgaatttagacctcttacctcatttcttcaaacccatgggatcattcacaggctaatttgccttcacacacatcatcaaaatggtgttatggaaagaaaacacagcatatcgtcgagttaggcctcactcttctcaaacaagcttctctccctttaaaattttgggatttttccttccacactgctgtttatttgataaacagacttcccagtgcttctcttaaatttcaagttccttatactgttttgtttaacaagtcacctaattacaattttttgaggaactttggatgttcttgctatccttttcttagaccctataataaacacaaacttgatttcaggtcacatgagtgtttgttccttggttattccacttctcacaaaggctacaagtgtctctctcctaatggcaaattatatgtttccaaaaatgttgtctttaacgagcttaaatatccttacaatgatctttttccatctttatccaactctgtcatttcttctaagagtgataagagtgattttttacctactgctcatattcctcttgtttcaccttcccctaatgagctcactcattcttctaaacatgctgaaactaattctacttctgtaagtgctgatccctctagatccattaatactgaatttcctaattctcaaaatgtcacatcatcttctcctctttcaaatgctgaaccaaattttatttctaataaacactctaattgtttctgacttaaacagaaatccaagtgaactgtacagcacctcttcttctcagtctcatactgtcagttctccttcttcttccaatcctgtgcttccctcacaaaatgtccatcctatgcaaaccagatccaagtctggaattcatcaacctaggctgcatccttcactgtttttggcacattgtgaacctaagactgttaaacaggctcttgctgaccctcaatggtttgttgctatgaaacaagagtatgaggctcttcttaacaataaaacatgggatcttgttcctcttcccaaagacagacaagctgtgggttgtaagtgggttttcagaattaaggagaatgctgatgagattgttaacaggttcaaggctaagttagtggctaaaggatttcatcagattgctggttgtgactttaatgaaaccttttctcctgtgataaatcctgttacaatctggctgattatcactcttgctttcactaataaatgggatttgttccagctagatgtcaacaatgcctttttaaatggtcatcttgaagagactatctacatgcagcagccaaggcttcaaaagttcagataaaaccttggtttccaagctacaaaaagctttgtatggccttaaacatgccccaagatagtggtttgataggctcaaggaaactcttttacagcttgggtttgtggctagcaagtgcgatccttcgctgtttgtttataaagacaaaggaaacattatctacattcttgtttatgtagatgatattattattactgttgtaattcagcaactctccactaagctgcattccaatttttctcttaaacaattgagaaaacttgactattttcttggtattgaaatcaaatcagtggctgatgggattattctactgactcaaagcaaatatacaagagatttgtttcagaaaaccaaaatggtagaagcacaacctattgcttcccctatgactgctaattgcgagttattcagtgatccatctctctataggtctgttgttggtgctcttcaatacacaacgattacaagacttgagttaagctatgttgtgaacaaggtctgtcagttcatggctaatcctatggactctcactggacagctgttaaacgcattctaaggtgccttaaaggctctattcatcatggtctgcatttcaacgctgctccttcctctcagccttttactatcaaagcccctgtgtgatgctgattgggcctcggatccagatgatagaaggtctacctctggtgcagtgatttattttggtcctaatttggtctcatggtccaagaaacaacaaattgtggctagatcttccactgaagctgaatacaggagcttggctcaatccacgactgaagttacatggattcaaactctaacagagttatctgttcctttttagaccccaacgatttactgtgacaaccaaagtgcagtagctatcactcataatccagttcttcattccctgactaagtacatggaaattgacatcttttttgtcagggagaaagtcttagctaaagagctcaaagtgtatatattcctgctatagatcaatgggctgatgccctcactaagcctctatcaccaacttgatttttctttcttaggtccaaactcaatgtagttgagtccatttctgattctcaaccccattgagtttgagggggggtattaatgtattattagtgtattaagtaagttttactttgtgatttagttagggcagctgctagaacaattatgattcagtttgcgtaggaggcatgtggaaattaatgacctacaatgttcattctgtaggagcatggaggaggatgcagctcatctattcttccattgcagcaaaattacacctatttggggggaatctatgtcttaggtgaacattctcagtgtgttcccgcagcgcccaaggcaacacttctcccaacatatgaatgatagggtggaaggaattcagggtaatagatggaggtcatggtgggtggcttttacctggaatgtgtggcagctaaggaacaagatcatattttcaaatggcacctttgatggcaacaaactgctggaggatgctttattcttactttggacatggctcagaagttttgagaaagattttgcagttcattacaaccaatggccatctaaccttagagatgcttttgttcttagttgagggtagaaatcatagtgtagtagtagctatataaatctgtattccagtttggtttcgtccaagactgttgtgtagtctgtcttgggaaccactccactggatattattgtaatcatggaacctctggtacttggtttcttttcatatctatatatatatatcttatctttgccgaccaaaaaaaaaatgattcagttaggacatctgtggttttgttattttgttagaagttgttatttctgttagagcaataactaactttcgttagttaactgccttagttaggttttttttttttttttaatcagcaaagataaatctatatatatattagagaagtaccagaggtactaaatacagagttagtcaccataaatatggttcctcaatcaggcagcataaatatggttcctcaatcaggcagcataaatatggttcctcaatcaggcagcattagttaggttatgtgtaatcatatatgttttctctataaatagagaaacagaatcagtttgtaactaaccttttcattctgaatcaataataatatcttccatctgtcttcttctttttctctctctcaaactctatgaaggtgtaactgttttctcattgggttgaatcttataacctttcacctcaaattctgttgtgaattttctctcactctctctttgagattcgttttcacatcgactaaagatggtgccgagataaactatataaatggggagcaatcctcaccttgcaagccggttttgtaggattgagttaggtccaaattcattttctaacatatatgaatgttttaactttaaagcaagttagcagtaagcctcaagtataattttttttgtcccatatcagttccctgatcacatggtgcataaccctaccatagaaagttagatgttagattttgattgtcaggtgattctaggaaagaaaaacttgaggtctccgttttagttaccctatcatgttctagtgaagtatgtttctgaatacagatttgtatatttattactgatatgcatgactgtaaatctggctgtaggcaatatattggtataaagttaatgttgatccatccactgtcaacttttgaaataagggaagtgcatgagtgctttttcagatacctacttataagtaggtttgaattaaattgattatattgtcctagtagaagtggctatataatattttttgagtgagtgtgcttttgctcgttgcatgatatagcagatatgctatctgaatgctaaaggtactctattactatctgtcttttcttctcattccttatccatacatattttgaaccaattttacatttggaaggacgaattgctgcca

SEQ ID NO: 3434 - DNA, 2076 bp, Glycine max
  Intron number 4 from transcript Glyma03g19470.1 (locus Gly ma03g19470) derived from phytozome v7.0 (chr-ID Gm03; pos 24766213 to 24768288)
ttgcctggtcgaataggaaaacagtgccgagaacggtaggttaactgaagtttttgtgaaattcttatatatgtatatatatttattataattaatcctttgtatttataaatactaaacttcatctatgattcattggattgtttagccttcaaagttttaaaagccttaaatttcatctgcatgttcctaagtttaagaggataactcatattttagattgtgttaggagtcccacattcagtagaataaactacttgatgtggtacttaagccttgtagttctcccacctaatggactagtcttttgggttggactctcctcttgtgcttagatcctaacgattgatgctttttgttgagagtcagaccatggaaagggctagctacctataggctagattaaggtgcaaaccgaacactgcttgatgaattaagtcgtccaagggaaaatggctaccactgggtcagtgtcgatagagtgaaagctgcagtggacgtcgacccttaaaaggggttgacaatgttagtagtcccatattgagtagaataaactacttgatgtgatacttttaaaccttgagattctcccacctaatggactagtcttttaggttgggctctcctcttgtgcttaagtcctaacaattgggttatcaagaaaatcttctttgcagcccacatttttcactctattttccttggttgtctccctctttatcaatggatcaacttcttcgtccatcataacttttcaatctttgtttctcttgctatctttgcttcatttttgctttcttctccactacaaagagtgtgattcttgattattgaaccttcttctttacttttgttttctgatttcaagaattgcaatgggtcatcatcactctcaaaattgctacccttcaagttagtttcctgttttgtgcttccgtcagaggtggctagttccacctttctggtccaagaacaagcctttgcttcactgcattctgacccattttcctccatgctatttttgtattgctgagtcaaatgaggatcaacctcttcattatttgaggatcttccacagcatatgttttagctctaaaatgttggtcctctctttcaagaacactatgcaactctcctttttgttgatgtggttttccttcttaatttgttcttcttgcttcaagatactcaatctttcaaagacgtggttaccatagcgatctccgaatcttttgatcaatgctatggaaaatgactcccaatctgaatttgggttcatttggcttcaaatgtagaaacaatgcatcacaatatcctccatgcacatgaatgcatattgcagcttatggaatgaaggaatttcttgtacctcgatagagtgtttcagccctagaaatccaaccaattgggtcttcccccacgaatgctcgtagctcccccttaccccaaatttgtgcttcctccatttataacactggctctccctcgaagacccgacaggtcggaccaaatgttaggaaccaagaattgaaatgatgaagaaaagaaaaaactttattgaatagtaagaaaagaacaaaaaataggagagaaaactctcctccaagggtttccccttcacaatggatttctcctttcacaaagagttaatgctcaatttacaatgacaacaaattttgcctctctcatatccttcttcccctatatatatctaataagcccccctaactaagtaactgactgactgacttattaatagctaactaactaactgactgactgactgactcgttaataactaactaagtgactcattaatagtctaactatcttaactagctctcccttctccttatatcttaacagattgtattataagatttgactacaactcttagctttgtatatgggttactcaaataatcaaattatgctagctttgttatttttgcgtttcatttttcctgttataacttattctgttgattattgaatcttcatgaaaaccaaaaatatataggcattggctttggtatacatgctcgttatcatgaaattggtttcaaacatttacag

SEQ ID NO: 3435 - DNA, 1895 bp, Glycine max
  Intron number 6 from transcript Glyma17g13750.1 (locus Gly ma17g13750) derived from phytozome v7.0 (chr-ID Gm17; pos 10539972 to 10541866)
aaatctgatttcaagccaatttttccttcttggcagtgatgggacaggtactcttgctggatgcatgaaataccaagatcaatgctatttttactgtcattatttccaactttgtcttaccttgttaatgatcatatacaaagaatgatatgattgcaagggacagggtaatggacttcattaggctcttgtttgttataaattagattagaagcggcagattgatgtatagacctgagaaggtatggcattacctgatttttttcctttactgaaacaaaaatgtatcctctcttgtgctggtgaaaatgatgtacatacatttcaggacaatttagtaatagatgatggatatttgctctggtatgttcttatccttcctataccattttcacaatggtttgttcttatccttatggctgccccatttaatttgggactatcaaattttgttcttttttcttctacatttaatttttacatcaggaaatgctcttaaaaaatttgggtgcattgatgcacaagcattggtagctgttggatatgtagaaaaataaaccgattgcaaggaatattcattttgaacatgatcaacaggtaacgaggttgggtttctcactttgaaagttgcttcctgaaataaaatgatgtgttgtggcttattaaaaacagtgtgcaagattttgggggctatcgaggtttgttctttttctcctacgtttgatttttacagcaggaaatgctcctgaaaattttgggtgcattgatgcacaagcattgagctgttggattgtggatatgtagaagaataaatcaattgcaaggaatattcatcttgagcatgatcagcaggtgatgatgtcgggtttctcaatttgaaagtggttcccggaaagaaaatgatattgtgttgttggcttactaaaaaaaaaaggctaaaatgcaattttcattttctcaaatctttgattttagtctccccactttttaattgaggcatttcatccctttaaaaagtttgtgattttagtttcattttttaatcaaagacatttcgtcctccactttaataaaaaatctgtaattcattttttttgggaataaaataatagttttggggggctatatagttttgttcctcttttgcctacgtttaatttttactccaggaaatgttcttaaaaatattgggtgcattgatgtgccaagtattggtagttgttggatatgtagaaaaatagatcaatcgcaacttgcaatattcgttttcaacaggtaaaaaggtttttcaatttgaaagttggtccctgaaataaaatgatgcatgcccctttaccgaaatacgggttttaaattaaacgaggtggaaatgagtttaggcagtgaattgcatgttgaactatggtgaaggcaggggcttagaatcttggtggagctgctgatgtcagagctaggtggtagtgagaaaagatggcaaagtccaccaagggtgctgaagtgatattagcgctcaatttgtgcccacactgcaattaagttcaagggaagtattgaaaatcctttggtgatggtaatttataccccttaattacagtggggtggtgggtcttgtagagactggtgatagacgtttatcatttgatttgtgtataattctaataattcagaatctaactgaaatctaccaccccttccaaggattcactatataatgtatataatgtttttttttattcactataaaatgtataagattttaagggattcattgcttacttttcagaagagtaaaatcttcaaattagtttagttcacgagattgtacaggatagatattatagtctgatattttaaactcgtatatttagtgtcttgtataacgtcatttgtaacgg

SEQ ID NO: 3436 - DNA, 1998 bp, Glycine max
  Intron number 2 from transcript Glyma14g11400.1 (locus Gly ma14g11400) derived from phytozome v7.0 (chr-ID Gm14; pos 9922463 to 9924460)
ttgaagagttctaccagcagtgcgatcccggtaacgttttttttcgtagaaaagaaaaagattgtatttttattatttgttttggtctgttcatattttgttttttcccccctgtctggaacattgaattgaactgatttctgaagtggagagtggaaattgtgtttttgtttgtttcaatttgaagaggaatttgaatttagttgagtgttgaggccgtggggttttcgaacttaatttttcgaaagtgtactttcatggttttgtaaatggctactggaagtttacacacacacacacacacacatatacaataagcgaaactgtaaattttttttgttcaatatggtcattttgtggaattttgtttctttttattattagttgttttaatgtaccctgaacggaaacccagaaactcaattgcaatgttttttgtaagcggagtttatattttgtttgtttcaatatgaaaaggaatttgaatttagctgagtattgaggctgtgtgggattttcagacttaaattttgaaagtatggaaaaacgctgtatacctaatttgctcggtttctcaatttcgtaaatggctactacttgaagtttttgtttttcttatctaataaacggtactatattttgttttcaatgtggtcatttgtgaatatctatttttgattttttagttgttatagctttaatgtagcatggactgaagcagtcatatgctaccacaaatgggaagaaactctagtgcaaaattttcagttagtagctttgaattttggcttgcatcattatgtttaattgtacatgggcccgtaaactttgtttgaaatatggagaattaggtttttgttaaatgggttcactctgctgtttcttattaacttgccacccttcctttcatatgaattacatttggtgggtcacaataaaatgctaaattttatttgcattgtagattctttctggaccatttgtcctaatccttaaccctcctgggaagtatgaatatgacatgatgtggaatgagtatatgcacctcttttgtgtctaatcatttgtttaatgttaatggacttgagattcactttcagttaggtatgattattcaagggatgtgcagataaccattgggttggtctttatggaatgcgatcaagccatattatgcagatcatatagttacatatgggagttggaaatggtggtatttgaaacaaaatgatgagaaagggaagggaaggaagtttatgagtttgtttggatgtttaaaattgtccaaattgggggagtattaaaaggttaatacaaatttatggaagactttggatgtgtggattatgtgaggccatcttatgttcctcctctcgtgcaaaaaaaaaaaattcaaatccaaaatttttacccaaaatctggcatatgatatgcaagttttcatgtgcaaaatgtgagctaaaacataatatgcaagttttgttgattttatactctggtactttttagccctactgcataatagtgagaaaatctgaatagaaggggaatgtgtaggttacttgaaatttatagatacttttgatttcagaagatagatgggttaggtgagggatttattttgactggaataaggtcattaattaaatatgaagaatacctgtagggacattttaactcatgatactgggtttagtctttgaggtgacctattttctcggaaacaaatttcagacatctgtttaattttgtttttctgtgtatccaatatagtacctaatatgaatcttttctttttgggtattttatctactaagtgatggataaaagttgtttcaccatgctaccatattggcatagtccaattgctgattatagtattgctatagcatttaatgttttttgtattgttgaaatttttgttgagactttagatattttattcaacttatgtgagctttgtgaactgtgatgcagagaaggaaaatctttgccttt

SEQ ID NO: 3437 - DNA, 2406 bp, Glycine max
  Intron number 1 from transcript Glyma18g10060.2 (locus Gly ma18g10060) derived from phytozome v7.0 (chr-ID Gm18; pos 8847118 to 8849523 reverse strand)
cagaagaaaaaagtcaccttctccagaatttgcgcgtaagattagattcaattcctctttgctatcttcttccctttcctttgtttttgtttttccgaagtgttttcaacttttccatctgaattgtaattctggactgaatttgcttgttgagctttagttcctccgaattatgtgcctgattttgatgttttctttctgtgattgttgttttttttagaattgtgtatattttttgtctgatttttgttgttaaacgtgatcgatttctggtcatcgcatgatatgcgggattttttttaatttcccattgttttccctgtgtgatcatgatgagctcaaaaaatggcatctttgtgctgtgcctttctgtggttcacggaaattgtggtgtatatttgaaattttgaatagaggaatgtgttgtttaagtaatcagtctggtttactgggttacgaggtcaagatattgttgaagattcattttgggtaagaattatgttgatgctggtgttggctcaatggttggtagttaaaggtgggtgatgccaacgcctttaaaggtggtagttaaaggtaggatctcaacacaccccctttcacccaagattggacatctggagcatggagattctaggactgatttttttttttttttttttgcattgataaactgcaggaacaggtagttgttttggacagttgagggtgactcaatatcagatctatgataagctttgataccatcttgaattgccaatctaactcaaccccaaaatctatttcatgagatgaggattgtctattcctttataacctctattttagccacatttgaaattgatgtgagatctcagcacatcccctcagacccaggattggatatctggggcatagggtttctttttatattgcactgggaaagtgacgggaccagatagtgttttttttttacagttgagggtgacccaatatcggatctatgatatgctctaaataccatcttgaatttgggttaggcttaaatccgaaaatctagctgatgaattgagaattttccaaacctttataagctctattttagccatatctatagttgatatgagatctcaacataccccttcacacccaagattggacagttgagggtgatgcaatatcaaatctatgataagctctggtttttcttccctctatgtgggtgactgctctactctttatcagataaacaaaacatgaggggtcctctcatcttttgtaattttcctttcaataaatttctttaacccaaaaaaaataaaagtataacttctcagttctgagtctatatagatcaatgatgttcacacagattctgattcttcttcaaactattagctgatcatatagtttcctctattgattgggaaatccttttttcatttccaaatatgttaaggaacttagtttttattgttgaatgtttttgtattaggatcgaaccctgtccatgtggtataattgtaagactattaccatacggactaaggatcccgattatggaacttagttgggggcaaagctgcaataaatattttttgacataaagcaaaagggatgttaggttcagctgataattagtgatcccttaagttttgctgcatttgaatatgagactgtggttcatttgtagaggtaactttgatatctctctcgctttttatctttgttggaaggctgataatatgacaccttattagggaagggtggagtatattcatgaagtcctgtttaaacatgacctaaatttgcctgtagcctctgcaaggttaccaatggtggttggcggaaggcagaaattctgccatataaacatgccattgtggcctatggcactgttatagcattatgctggcgcactataatggttatttaataacattgggccaatgctgtatgttcaaatcaaggtgagcaaatggctgtaataatgtaaaatacttgtgtcttaatctttcaatatcataatatttgattgcattatcatatgcctgtgagtgcttgttttgagacaccggagtaggtagcaagctgtggaatgttaaattatcataagtgggagtctttgtggcatagctatttatatgaaatcttggttttatgagtttctctatcctggcaagaatttatctcatgttaatcatgtggactgaaaaagttctctatcttgttgggcactacttgaagatttcttgacttactatattattgattgtggaatcttttatttcttgtattgtttatgctatccatcaatgtcaaatctattaaatagaacttcattgatatttcttctataaaatgagtaagtgtccataccttggtactcatattgtttttcattctttttcctcttatttcagggta

SEQ ID NO: 3438 - DNA, 2067 bp, Glycine max
  Intron number 3 from transcript Glyma10g31580.1 (locus Gly ma10g31580) derived from phytozome v7.0 (chr-ID Gm10; pos 40069502 to 40071568 reverse strand)
tgggaatttctagccaaactcatcactcgaaacaggtaaactcacgtcttcaattctcacgttaatttctgtctatatttttatcgatggatgtttgtttatattaacaagaaactcaactcataatcttttctcttttccatttttccttaatcatccaaatcacctcaatttctgtctctttatatataggtttcttttacttagcaaattctcatgtctcaagtctcaaccacgcaactaactctacccgtttccatctatctctttcgtttcatcactcctccaagtttcattcatccttgtttagttggcgagtttttgacccttggtattttctcaacgccccttatgtaacaatagtaacgggattgttacactttcctttcttttgagtaaaaagctaacttaattacctaccaaatataggtaacttaatttataaaactgtactcgcggtttatttttatatttattaatgtgtattatattttatttttaaatttataactctaacacgtgtatgaagttagtttttctaatacatgatattgtgtacgaaactacaaatttcaaatttttttataaataaattaaatactgactcgtacaacaataaagtcatgaatcggattatcagaagaaacaattttaaaagctaagttgagtggttgtttttctctactttctttgtatgcttttaaaattaaaaatcttctttttggtaatataaaaaattttcataacataatttttgtttaatcaccataattataatccttagctttccaatgaaatttcaaaatattatggtaaactttgttattttagatcaattgagactaattatcgaacttgtaatttagttatatttaaaatgttcatcctattcaaaaatatactatatcaaaatcaatttttatatggtcatttaacacctatataaagaaatatgaagaaaaaaaatatagaaaagataagtgatatatgcaattattcgaattagtgtaacatatacgaatgcctatttatatttatcatcatttatgtgataaatgcgtgtggtaacaaaactcccccaaataacatgtttaacattgagggcagacgacaccactacgtcacaagatcggagttgtactaagccacaatctttctgagcaaaactttaagccacgactgagcaaaactttaagaggcacaactcacatgtcatatctttctgaagtcgatttaagtagggcaggatcttcaatttcactaatttgagaggcacaggccattttgtttgttttctttaaataaataaaaaaaatcagaggccacccatttttgaaaacgtaattttttttatttaatttctaagaatcgaaaatatttatcaaaatttataataactcaggtacgtcctggttgtgctacgtttaatttattgataagttagagcctttaatttgatccaaaaagtagttttaaaaaaatatctatttttttattttaattctaagataagcaattataagtacagatatgcatatagcacaatcatgataaatgcaccgatttctcaattaatacaccgttattcatagtaacctatcaatttgatcctttcattgtatattcttccccatctcaaaatagcaaaaatggagttcaaagacacgaacaaccaactaattaattaatcaatatccgtcccttaatgcttttcttccgttcgttgggtttgtttgacttaaaaccgaattagggtacaaagtatattggtagaatttaatagccatgcccccacagctcaggcagctagcactagtcaaacgcgtcagaaactgaacgcagtagatggcgtcagatggtttttattaattttatggttgcattaattaatgattctaggtttgatggccatgaatgaatgagatattatgagagtggtaatttaatttcatgtgtgttggtgacatagactttttagctgacgtgaaactttgatattaatactacacactctctcaacttcccacaacagggtcaggacgttcttgcttgaagggttcttttgcc

SEQ ID NO: 3439 - DNA, 2284 bp, Glycine max
  Intron number 4 from transcript Glyma06g06280.1 (locus Gly ma06g06280) derived from phytozome v7.0 (chr-ID Gm06; pos 4487996 to 4490279 reverse strand)
taacatcaaagctattagagcagcttcagatcaaggtaattgaggaattcacatttcatacatattcttttgaatccaatttttcaaatgtcgccatcattattttttagttctactgcttggagtagccagggcaatgcccatactaatctttctttttgagcttataacaactgcaactgagccttattccactaagtgggatttgttgaatagatcaaatgataagactaggcttaacaaaaatttggaaaaaaaaattgttcaattgacagactgcttaattttgactgaaatatataatcccttttaaagattaaaaacaatacaaatttccatgctaatgttaggcttgttgaaatcacaatatcttgatacttgatggtgttgcaattcacaagttctccactaatacgagtctaggagactgttatatgcagcattaatataattatttagtcttccacaaacatataggtgacaggggttaactgtttaatccactttaggggaatcaaagatacagattcatacaggtgtctttgagaaaacattttcttaccaaaaatattatactcccaaaaaatttcaaatggaagtgccaaaattgtaaactcatactgaaaacttgttaattttttgggattattatttacctgagtcaatatatcagctcaatatatccttacctgtgtcagtattgcggtgtaagagctagcaggagcagcaacaagtctgttttccctctgatagatttctagccacccctgtccagatacagtcatgaggtagttatagacatagaagtacaaatacagcacaaatcttctatctggataattttgagaacccccgagaaaaagtaatgaaaggagtcaatgctgtcctatactaaaacatatctcctgttgtctaatgattgacacaggacaattaatctattaaaagcaatgtttttaagattgaaccagtgattgaactggtgaaggcattggtttaaggatcgatggttcgactgtagttaaactgtggttgaaccggttttatatttttcaatattatataatattttaagtaatcaagtaatatatagttaaaaacttaggatccaaaaaattataaattagtataaatgattaaattatatgtttcataagataaaaataataataattgagaaaatatttgatacttatgtgaaatatttaagaatgtatttgtatttatcttaaaatattttagataaataataaaaaaaaccaatttaaaaagaccggttcaaccctagttttctataccggttcagagatgttctggttttttagagtctctggaccggttgaaccggtcggtctggtctggttttaaaaactttgatgaaaagttactacaaattataagcaataaactaacagtggctaagaggactaacagtggctaagaggaatgatgggaaaaggatggatggtactgtcagtgggggaaaagaagttttcttaggttgctgtcagcctgtcacaattgtccaccttattataagaaagagttggtgtagcaattcaggccacaacttcaggtttagttacttaatccaggaattgctatacttggttttaacttgtcaaatgaggaagactgttgtcaagccatacaaggcattgaaataggataatatgctagaaattgttgtcccattagtttaacataattataagctttctgttctgtgaagcctctagcacttattatcatgtgtatgagcttttcagttataaatttctgtctctctggcaaagaaatagtgcaatattcagatgctattcttgtatgttttttggcatagttttccaatttgggacatgataggtgtatagaatgttgcttcatttcatgtaattgtagacctaatagggcagttgtcttgtctctgttatgcttttcctttgccaatatgtctatatatttatttgttgtggaaaatggaacgagtctaatgacagaaactggtgttttggtgaatgaattctaacatgaatttattttgtctcctattctaaattattgagggtgatatttagccagtgagttgatttattggaaactattttctgttcatcagtttacaagatttttttttttttttaaaaaaaatggaattgattttgttgtccagcgatgtattagttattgtttcctcctgtagagttctttggcacttattgttggataatttgtccttggtcccacaggtgttaaaagatttgtctatatctctactgctgac

SEQ ID NO: 3440 - DNA, 7007 bp, Glycine max
  Intron number 4 from transcript Glyma02g48030.1 (locus Gly ma02g48030) derived from phytozome v7.0 (chr-ID Gm02; pos 51417974 to 51424980 reverse strand)
tcacaacacttgccccattgcatacaaaacccgatgtacaaatcccttctctaacttcataatggaacatattgttgactgacactttgttgtttcaccagccctatcaaatatttcatttcactagaataaggctttatgttggatgttaatgtctaatattcaaattctacgactttttatatttcatatttctttctttgagtactcatttccaaatggaatcgacatggttggtgtcgcttaactcaccttcctcaaattatataaaacatggtaattcaaatattagtaatctgggtgatttgcaaaagttcattttgactctagggtttctttagtccgtaaacttttccacttgcttgagatgctataacataataagggttttgtgtgtaggtaaggttaaaagaatttgtcatctttgctggtttggtccttgtttcagagttacattaattaacctcattcaccccaaaataaatcttgtatgtactactgttagtttattacttttaaaggatagaagaagatttagtaatataggcataggacctttaagaaacctgttctttgtgtacatctatctcataaagagcttagtcaagactttttttttttttttttttaaatctacagccaattcttagaatttgagcttagggtataattcagcgcccacaaaatcagtttgtaaagtgaggattgctttttgaagttctagttaagtcacctttctaagcgatgtgcgactaaacacacctccttgaggctgcaattaaggtatctcaaaaaggccacattaatagaagtgactgcaattaaggtgactttccaacacaccctctcacacctaaggctatgggcctagatgttgcaattgggtggcccaacaatgaattttggataggttctgctaccatcttggaatttgggcttagagcccaactctaccctttgaaactagctttaaaaggtcaacttgtacggtgagcattgtccaaaccttacaagaactacattgccatatctttagttgatgttggatttttacacatcctttgcccccacaacccaattacaacaccctttcatgcctaggaataaccatctagagcatagacaaatatgggtggctcaataacagatctacgataagctttgatatcatattaaaatttgggcttagactcttactcaatcccaccaattgacttgtaaggttaagattgctcaagctttatatgctctatttaagtcatatctctagatgatgttggactaaacacactccttctaggctgtagtttaggcaactccctaagagtttgcaattaaggaggctttcttatccctccctctcctcattttcaaggctatataggcttggaacatggtaatgtgggaggcccaacaataaatctaggatagactctaatatggcttagggtctatctcaattccatagaattgactttaaaaaatcagtttgtaatttgatgattgtccatgccttataagaattacattggttatatctcaaattgatgtgggatcttaatgcacccccttgtgtccatgacccaatagcatcccttcatgcgtaggaataggcatctagagtgtaaacaaatatggatgacctaataatggatttagggttggttctaacaccatattaaaatttaggcttaggacctaattcaaccttgcaaaaacgacttgtaaagtgagattgctccagatttataagctttatttaagtcatacctctaagcaatatgagactaaacacacctccttgaggctataattaaggtgggctaagggtgaccacaattaaggtaactttacaacacccccttcatgcccagagctatggacctagagtgtggtgttaagaaccttgggagaaccacaccacaaaagccaattattgtgattagagagtcatagaatgtgggtttgagcctatctcaaccccaaaagctagctcataggtagggttgtctcccaattatatattctgttgtggtcttatctctagccaatgtgaggcttgagtttttctaaacacaccccttcatgctcaacactattggacttgatgcgtggatgacatggtgggaggcccgtttaatggatttaggatagactctaatatcatcttaggatgtgggtttggaaaactcagtggcaaccaacgtaggcttgtagttgtgacgggtgttcactgtgaataaagcaaagcacgccctcaggtggaaggaggcgattccagtgtgacgctcgctagagatgtgtcacgcgtcgtgtgcgtgaacttctcttgccggaaaggaccctgcgtggggtcattgtggcggtgtgttgagttgcttgtggacatggatgacgtgacgttctctcgccggaaaggaccctgtgtggggtcattgtggcggtgtgttgagttgcttgcggacatggatgacgtgacgttcttgaaaggtcgctgatgcagattgacatgtgggcagcacattggttgccaaaacaggcccaacactaggtgcaagtattgttcacctgcaaagaaagttgcgcacaaaatgtatttgtgcaagggacgttggtgaccgttgttgtggaagtggagtccgaaggaatcttggtagccatgaagggagaggcgacggtggttgttggcgaaaggttgccgagatgactgccaaacagtagcaaaggtgtgtggtactgcacggatgtttgtgaagagaaggaatgtaaccttagaaggacaaagaaaggtccaccggggacagtaggtccccaatggagaacgactttcgttattcctctgtcaagaataacctaagctctgatatcatagaacagtgttatttattgtgtaatgttttgtgttaatgtagaccacacctcatgctatttataatatgaaaaaaggaatcaggattgattacaagatcaatcaattattgattaataaggaaactaaataatgagtaataagagaaataatctcatattaaactgttgtaattaaaacttatcaaatcatatatttcacaaagagtttgttcttttcattcaccttcttataaagagctcagtcaagactttttatctatagctagttcttagaatttaggacctaacttaatcccacaaaaccaacattaaaaaattagattgtaagttgaggattgtccaagccttataaggacaacattgaccatatttctagttgatgtgagatcttaactcacctcatgcctaggattgcgtgacctaataacaactccctatgtctaggaatagacatctagagcatagacaaatacaggtgacctaataacgatctaaggtaggctttgataccatattagaatttgggtttatggtctaattcaacctcacaaaatcggcttgtaaaatgaggattgctcaaggtttatatgctttatttaagacacatctaggagataagatgaaacaacccccttaagacccccccccccccccccccccttctcaaggttgcagttaaggtgggctaggggtgactgcaaggtagatttccaaaagacttgctcacgtctagggctatggcctagattgtggtaatgcaagtggctcgacaatgaatctaggatagactctactatcatcttaggatttaggcttagcgactaattcaaccctacaaaattgactttaaaaaatcatcttctaagttgaggattgtccaagccttgtaaggactacttgtgcccatgatccaatgacacttcacacttgggaatagacatctagagcacaggcaaacacaaatggcctaataatagatctaggacatgttttaataccatcttaaaatttaggattaaggcctaattgttaactcattgacaagtgcaccaattcgtccaagtagtaatttaaaaagataagattgagtattgcttccacaaagatttcgtttgcactcaagatgatgtatatccaatttgtgtacaattaatgaatagatttacgaggagcaatttgaggcatttttgtgaagtaaacaactatactaatctaagctatgattgagtgagaaaaacaaacactgggagtggcaaaggatcgtgaacgcaggatttgaatttgttgggggctttcctatcgacactactctttgatgcgatataattaatttttctctattcaatattaccctagttatcacctacatctattagtgtaccctaaccatgattcctcacatgagagggcttaattcccctaatatctttctcaatccctcaagaattaaattagttgaaccgcatgactaatggagatgcgtaacagacctcacactgtccctagcaatgaagcatttagatgttctttccagttctaaggataacaagacattttccaatgcctaaaccctaaacatatcatatatatgggtgatcaaacaaatacatgtgaatacacacagaaagaaacaatgaaaactatgaataacattaaatagatagtgagagtcattacataaagagagtttggtggaaagttcctccaacaatgggtggtttaacctctcattatcatgagacacctaactatacaaaagagatgaaaatgtgtggaggaatggaaagaagatgggcgtggaggtagttggtggctcctaatggttgttgtcttcttcttcgagctctaggttttttgtgctactaaaatctagaagagtcctcctaaaccctccttatatgagtttttgtgatattcatgctaagcgcgagtaagtgactgggcactaagcgtgcatcacgcgctaagtgcatcttcacgtgactttaggctctccaagcagcttcctcacgctaagccgggatcttttcggctttccgctaagcgactacaacgtgctaagcgagcctggtgcgctaagcgagaaccatcaggcttcaacttctcttcaatccctcatttgtgttcctccaaaacaaaaatcacccaaaacagtataaatctaacagtttaggcatctaccacacaaaaactcagaggataccaaaatttcaattattcacacaaaaagaagtaataaaagaggagaaaattgataattcttatatgtcttaattacagaatatgcttatgcacatcagttatcactaactcaaccccacaaaatcaacttgtaaggtgatgatggttgatgctatataatctctatttaatccatatctctaggtaatgttggactaaacacaccccttgagactgcaattaaccaaaaatgaatttgggatgagctctaacaccattttaaaatttgggcttaagatataactcaattctacaaaattgacttttaaaatccagcttgtaagctttttttttttttttaaaaaaaaaacagcttgtatggtgaggactgcccaagccttaaaagtactacattggctattctctagttgatgtaggatctcaactcccccctcacacccatgacccaataactacatctcttcacgcctaagaatatacatctagaccacagacaaacatgggtggcctaataacaatctatggtggactttaatgccatcttagaatttatgttcaaaggcctaactcaaccctacaatcagtgtgaattgctcaagctttataagtcacctctctaggtgatgtgaatctaaacaaacctcctcaaggttgcaattaaggcaacccctaaatcctcacgctcacggcagcctaaagcatgacaatgcaggtggctcaacaatgaatcaaggataaattattaccatcttagaataagaaaactcccttaggcttagggataacatctagagcacaaagaaatatggatgacccaataacaaatcttggttagactttgatacctaatttgaatttgggcttagggcctaattcaacccctcaaaatcgccttgtaaggtgagcattgctcaaactttataagctctatttagaagctatgtttctaggtgatgtgggagtgtgggactaaacacaccctttcacagctacaattaaggcaagctaggggtaattgcaattaaggcggttttccaacattaaacaaattttgattcatatttttcaagcattttaaatataggacaatctagtacacaaggctcctaatattggagtctagggagggtagatgtatcaggcagccttacctctgtgagtggagagaggttgtttcttggatttgaatgtgacttcaaagtaagacaacaatgttacagttgttcaaggctcgccctctatgtaagcattgcaatatgtgaatatgaaaactatttatgtagagactctttattgtattgcatttatatattatataaagagattcagttggataaggatgacccaattgctagactcgcatgatttcaaagtttgagcttatggtcatacacctggttgaatgactttaggattgagcccggtgttacttttaagtttgcatttacttgcagtttgaaaaatcttaagctatatgaatgattttcatgtatgtactttgaaggttttgaagtttatatagccatcggataaaatttagttatctatctataaattttaacttcgcattcatgcgtatcgtacaagaatgtgttcttttaagcagtatgataaaaatagtgcacaagccaaactagctcatgcaaggctgaacgtgactaaagaaagttcttccatgctttttgtatacttttttcaatttatcatgcatgcaagtatttttattgtcttccttgtcttatcatgtatttgtaagtgtagaaaactagagaagggattaaaggtatatattgggctatagcaatgccaacatcttctgtcacttgatatggaaatatatccttgttaaatggcaatttaggcgtataaatgggattaaagcagcaacaattctagttgattattattatgtgcttcaggttcgttctcacatt

SEQ ID NO: 3441 - DNA, 9876 bp, Glycine max
  Intron number 2 from transcript Glyma06g38220.1 (locus Gly ma06g38220) derived from phytozome v7.0 (chr-ID Gm06; pos 41069126 to 41079001 reverse strand)
aggaccttggaacttgtccttttcataatctgctggtaaatgataactcttcaccaataataatgtaaaaagcctcaatttaagctactaaagatttggacagcttttttgtatgagtaaatagttcatgtaccaacaaggatgtaatgactaatgagtttttatattgtcatctaattatagttgttatgtataataagtttattaacttttatcataattatgttaaaacttaaaagttataattatcatgaattttgattgattgccagtgtaatttttttaatttttttttatagtgacaatgcataataattaaactcctttgtatgattgtatcttttaaagttcaaaacagattaaacatgattattttttacatacttaattgaagtgttgaactagatatctattacttattttattgtttattaattttttttaatttaatttgggtgttttgaactgaggtaatatttgtttcctgttatttgtatttattagctgatatttgtttcttgttatttgtatttattaggtaatatttatttcctaattttcagcctaggatcacggttatacagttagtaattcatgcgtattaggaaccttttgactatcaatcaaatcaaaggagaatcatattcttatatggtatcacgagactaaggtttctttcttgcttgctttcgcaaccttaattagttaccttcctcctcatccttcctctttcttttctctatgttgccatccaccatggctgaaacttccaaatttcattcaaccttagctatcaccaatgagaaaactcccatccccatcacattggacttggaatcaggacaataccacctactgatgcaaaggagaaagctgtatatgacaaggccaaagtcgatgatctccctctctggaaacggctcgatgtggcagtcttggagtggatttatgccacggtctcctccgacatcctcacctctattctcattgacgatgactcgactgaacatgcttggcacagcgttgcggatctctttcatgataataaaaactcaagggccctatatcttaacaaggctttcaccaacataagtcttgctgatttttttacaacaatgtgtattgcaattgtctcaaaagtcttgtcgatcaactagccaatgttggggctcccgtcaatgatcaaaatatggttttgagaatgctacaaggattgacagaacaatattctcattttatcactgtgatgcaaaacaagaaaaccctacctagttttgctatagcccgttctaaactcgccttggaggagaccaccattttagagtgagcaaaacaagaatctgcccttgttgcgcattcccagaattcagataaggatatgaatcaccaaaactcttctcaaggtaattttaatcataataatcttcataataataataatacttaccgtgacaaaaatggtactaacagaaaaaacaacaagaattttggcagtcggaactccgaaaaaggtggccagaacaccgacggtggctcaaacgatggctccggtactagtggcggacgtggaaaccaccaacaacagtggcagcctgggtcttggatgtagtgggctctatggacttgccctccttctccatatccttcctacaacaattgggccaaacccactttcagtcctagaccaccacagcctggtcttcttggaccaaagccttagcaagcagcttacaatgcaaatgcacccagcccaactaatattgaagcagctcttcatactctcagccttgctcaacctgatccgtcatggtacatggacatcggggctacatcttacatgacatccacggaaggtaatctctcgtcttattctaatttgagcaaaagtcatggtataattgttggaaatggccattctattcctattcgtggttttggtagtgctaatttacctcatccccaccctccattagtgttaaaaaaatgtcctacatgctccaaacttaattaaaaacttagtttcagttcacaaattcaccactaataaccaagtttttgttgaatttgatctctttggcttttctatgaaggactttcagacagggatgacactaatgcgatgtgatagtcagggcgagctatatcccatcaccaccaccaccacaaatactcaagtcgtttctccatccacttttgcagctttgtcttcttctctttggcattaccgtttaggtcaccagggggcatctattttagactccctttggcgaaataaattgattgaatggactaaaactagagcctcgagtttttgtcattcatgtccacttggtaaacatgttaaatttccatttgttgattcgcataattctacttacatgccttttgatattttgcatagtgatttatggacatctctcattttgagttcctcaggtcacaaatattatgtgctctttctggacgactattcgaaatttttgtggactttccctatctcaaaaaaatctcaagtctattcaacatttctcaaacttagagcctacataaaaactcaatttgaacgagaaataaaaaatatacaatgtgataatggtagagaatatgataatggtcctttttctgagtctttgtgaagctaatggaatttcttttcgtttttcttgtcctcacacttcatcccaaaatggaaaagccaaacgaaaaatccgttccattaataatatcattcgaactctattagctcatgcttcactccctccatctttttggcaccatgcattggaaatggcaacatatcttctcaacaattaaccaagtaaaaatcttaattatcaatcgccactaccaattctataccaaaatgacccatcatactctcatttatgagtctttgattgcttatgttatcctttattcccttctactacgataaataagcttcaaccccgttccacaccttgtgtttttctgggttatccttcaaatcatcacggttacaaatgctatgacttatcatcaaataaagttattgtttgtcaccatgtgttatttggggaaaatgaatttcccctctcaaagtttcatacttcctcttcctccacctatgattttcttgacaatggcttatcgccttatgtgataaaccatttacaaaatcagtctactcctcacattcaagtgcagaaccacccttctttggccccaacctagtcacctggtcagtcctgctcccctaatcatgcaactccctcttttccacaaccatgccaaccaacttcctcacccccacagtcggcccaatcgacctctaccaacccaaagtcatcatccttcactttgggccagtcagatatcaacccatatttagaccatacacaacatctccctcttcctcccattttccagcctacttcgagttccaaaaacaaacccgttacaaggagccaacatggtatttttagaccaaatacaaaatatcaacatggcttcttgatgtgatcctgactaggagtgtatcgcttgatacaggttatagagtttggatgatgccacttccaaagagggaagataagtcaggttagacgccactttcaatgaaggaagataagtaagggtagatgccataaggattaccttgataagtctgagattggttcaacaaggaacccagagagaagctttcacaaaattttatcaaatgccaaaagttttctttattgaaaacaaaaaccaatacatatagtgtatctgaacaaaaagataaaaatagacatgggccttctaaacagtttgggccaaaattacaataaataaaaattattaataaaaataaaacatatttggtatgggccttcaaattaatctgggtcttcagcaacaattaatagtcctggtaatgcctctacctctgggccttcatccttctccacttgggccttgctaagtatgtctgctaccatttgttggagggtacccattgactgtttggtcttactcctggtcataggtctctatatttgggcagttttaggattctcatcattcgctccttcttggaaaacatttgccctcaaatgttcaggatcatcatcgggttcaagtacctcttccttcctgttcttgttggcttgtttggcatagctttcattcttctttgcaaattgcaccttcacttggtcatacaatcttttcacatactcaactttggcatgtgcatccttatgttgagtctcttggggattggttttgtaacctggcctgttaagcaatgaagctcctaaaaggagatcaaattgatgttctatgcctcttgaaagtggcagtccatgaggaatctcattgggaaagacatctttaaatttctgcaataagggttcaacactaagagaaacagaaatagttaactcattagaattattagtggaaattttctttttcctattcctctgtggtgcctcactattttctttctcttgttctctttttttctctcattctgatgtggtcatcacacacatctataggggatagaggtttaagactaattctctggtcatggtgctggagagaaatcttgttggtgaagccatcatgcactgctttggtgtcctcttcaatgttaaccttcactagtgccatctctatctccttgtagtactcctccacaatcaaacttccttgggacaacatctgggtttttgtcacatggttctactgtagctagttggaacatacctttttcgcataacccttctcatcttagtccatgtatctatctcccgccctttttctctcttcatctctctttgatttttcttccaccaaacaaggccatagtctaagaatgtagttgctgctaacttcaccttctgctcttcaagataatcattgcaggagaatgcatgttgaatcttcatctcccaatcaaggtaggcgtctgggttactcctgcctttgaaaggggatacattgagttttactccctcaattctgtcctgcccctctattcagttcgttccattattgacccttctattcccaccataaggtctcccagcatttgggttcatttggttctctagtccttctattcgtctgtagagctcttcattgttacggttcagcaattgttgcatctgtgttatcattacgttcaataacaaacactgagatccgtctagctgatgataatcaccaccaccatcaccaactcctgacataataaacagagaaaaaaaatcttttgtaataatttaaaaaaaaaaaggtttcaagacctcaccacactctactcacatgtttctctctatgatggtagttcactcgtgtttaatgctctcgatataggcttttgtgtgatgttttcactcttgccttttaccactcactccctcttaagtttctgggtgaatcaaattagacacacaaaaggtatataacaggaaagacaatttaattatcacagactgagtaacagatttgatttggataacagattggacttgatttggataacagattagacttgatttggataacatattagatttgatttggataatatattagattggatttgatttgcataacaaatgagatttgatttgatttggataacaaattagacttgatttggatttagatttgatttggataacatattagatttgatttgatttggataacagatatgatttgtaacaaatagaataaacaaagaagaaacaaagaagctacttaatcacagaaaagaagaaaacaaaattaacgaagatgacaagtaaacttcaaatagtcataacttttgctatggttgtccgtttgaggcccactatatatcaaaatgctcagaattcagaggagaatccagataagaggatttggtccacgattttcttgccaaaagaaacacctctaactgcctcaatttcgtgttcaaagatcaaacattcactttctttctttccaattttttttttaaaatttcagcaactttttttttaatgctttcttttcaaatttgtctatgataattttggtgacttgttcaataggcaaatacgcacatagactcaagaatccactcaattcctaaattcttttggtaagccaaattgtccccaaacagaatttgaaacaaagttcaaaaagattttttttttacacaagaaaatagaacaagaacgtgacaagaacaagaacaagaacgcaaataacagaacaagaacgcaacaagacgcaaacaagaacgaaacaagatggaaacaataacgcaaataacagaacaaggacaaaacacgaacatggatagattacaaagaaaaagaattggataggatagaacctgtatcaagagccgaagctctgataccagattatgtaatcctgactaggagtggatcgcttgatacaggttacaaagtttggatgacgccacttccaaagagggaagataagtcagggtagacgccacaaggattaccttgataagtctaagattagttcaacaaggaacccagagaaaagctctcacaaaattttatcaaatgccaaaagttttctttattgaaaacaaaaaccaatacatatagtgtatttgaacaaaaagataaaaatagacatgagccttctaaaaagttttggccaaaattacaataaataaaaattattaataaaaatagaacatatttggtatgggccttcaaattaatctgggccttcatccttctccacttgggccttgctaagtatgtctgctaccatttgttggagggtatccattgactgtttggtcttactcctagtcataggtccatgtatttgggcagttttaggattctcatcacttctttactaatgtcaccaagtctcctctccctcgtaaccccgcgtctgcactccaagacccaaactggaaaatggctatggatgatgaatatattgctctcattaagaataagatgttggatttagtgcccgtccacttgatgttaatgttattcggcctatgtggatttttagacaaagaaaaatctgatggttcttttgagaggcataaggcccaacttttaggtgatggtgtaggacaacagattagagtggattgtggagaaacttttagcccgatagttaaaccggcaactattcaaacagtgctcagtcttgctgtctctaaagctttgcccattcatcagttggatgttaaaaatgcctttttacatagtgaactaaaagaaataatgtacatgcatcagcccttgggttttaaggatcctgatcatcctaatcatgtgtgtcttttgcgaaaatcgttgtatgggctcaaacaagctcctagagcctggtacaaacgatttaccgactatgtttcttctattgggttctgatgaggacatgaccaagagcaagggcaaggatccacttgaaggacttggaggagcaatgacaagggctagagcaaggaaagccaaggaagctcttcaaaaagtgttgtccatactatttgaatacaagcccaagtttcaaggagaaaagtccaaagttgtgagttgtatcatggcccaaatggaggaggactaaatggcaccactttgtctcaatttgagtgtttagtttatctaaataatggcccaatccttataaatttggttgaccaaaaatatattttgggttattcaactaaaagggctttagtttggtttagttcaagttgtaataaaggcccaattggcaacctaggcatcagccttttgggagaccaaatggtggctgacttgatggctgttgggggtgacttttggttaccacaatttcagttacactcagccattaagttcctttaattccctaggttaatggcattaagtttttttaattataggttagtggatcattactaaaatctgatgtaaagcttctatataagctgaaccattttatcaataaacacaagttgagttttattcagaaaattagagtttatctcttttatcttagtgagagtgattctcctaagttcttgagtgattcaagaacacccaagctatatcaaatgactttcacaacctttgtgtgttgcccttaccggaaagagtaattctttccttcctttcatcttcaaccttgttccttcaaaccacaattctagaaaatccaattctgcccagaattatctcgtgaccataactctcgttttactcgttcaaattaagtgattcttgagcctaaattgaatttcaaaacgagacctttcacctcgttttggaatcacctcatttggagccctgtagcttgagttataaccatttctatttttctgttcagccaccacttagcctacattttttttaccatcccattcatccattttatgccaagacccaccttattaaggcccaagaaattagccactgcccaaccctggaatcttgccaattttccatttttttttcttaatcaatttttgaattttccatcaaggtttaatcctagatgatactaagtcagcctttgtgcaatgaaggttcatatcaggttctctcagagcaagtctgacaactctctcttcatctacaagaaaggtttggagatggcttacattctcctttacgtggatgatatcattctcactgcttcttctgttgctcttcgcaagtctatcatgttacttctcaactccaaatttgctatgaaagacttgggaccactaagttattttttgggaatcgcaatcactcaacatgttggtagtctacttttgtcccagaaaaagtatgcaaacaaaatcattgaacatgcttgcatgtcatcttgtaagccttgtccaactccagttgatactaaaccaaaacttagtgctaaaaccagcactccatatgaggatcccactcactaccgcagccttgtcaaagctctcaatacctcacattcacgagacctggcatctcttatgtcgtacaacagatctatttatttatgcataatccaatggatgatcatatgcatgctctcaggcgcatcctgcactacgctcagggtacacttcactttggattgcatctttatcccgcatcaactacttctttgatttcttatacaaatgcagattggggtggttgcccaaatactagaaaatctacttctggttattgtgtgtttcttggcgataacttgctctcatggtcttctaaacgccaacccatactatcttgctccagtgctgaggtcgaatatcgaggtgttgccaatgtggtttctgagtcatgttggttacgcaatcttcttttggagttacattgtcctgtccatacagttacattggtctactatgacaatgttagtgtgatatatcttttcgaaaatccatttcaacatcaccgcactaaacacattgaaatggacattcactttgttcgtgagaaagtttcccgtggacaagtacgcatcctacatgtcccctcgcgttatcaaattgccgatattttcacaaaaaggctttctttggtgttatttcaagatttcagggacagtctcagcatacaacaacctcttgcttcaactgccagggtatgatagaatatgtatatatttagaaaatagttatttgtatttattaggtaatacttgtttcttgttatttgtatttattaactgatatttgtttcctgttatttgtatttattaggtaatatttgtttccttattttcagcctagtatcatagttatacagctggtaattcgtgtatattaagaaccttttgcctatcaatcaaatcagaggagaatcatattcttacatgaactgattgttctagtattgcaactcactctctttctcagggtgtttttcttcatagctgaggtgtgcctattgg

SEQ ID NO: 3442 - DNA, 859 bp, Glycine max
  Intron number 1 from transcript Glyma02g36300.1 (locus Gly ma02g36300) derived from phytozome v7.0 (chr-ID Gm02; pos 41685841 to 41686699 reverse strand)
tacaaaaccggtcgggtttggctggaccatcctctgtcacatacatgaacggcccaatagaaaaatcaattcggttataccaccaagtcccgattggactggtccgaccgaccgaccgaatcggatttcacaactatgattttgatagctactagaatcaattttggttcctaaaatcatggcaaaaaattgaaaaagtgaatcaactatttgttgctttggctttcattggagacttgaaattgattctcaaaaaattgaatctaatcgaaacacaatgtatatgtaattaccacgaaggttatttaattttatggatattttttaaataaaactcaaatttgataacattattaattaaaattaactactttgattgaaaccgtgaaaatacttgtatggtggagaattctgtatttttttattttttttattttgcagaatcgtgcaaatgaaattagtaaagaacgcattgagcaatatcatatggaagtaaaaattgtaaatacggatacggttcttcaagtaggcgacgaaattgctcttatttatggtcttgatgaagtaatgatgggtaaattagtgaaatttgaagagggtactatagacattgcaaaatgttggtgttgtattaatttgtattagtagagggatttaggacatttgcaattagtcacaaacttggaagctccttcgacagtcactcccaagtccaagcttttagttagtgatgtttttgttttcttgctactagggaaaaaaaaaaaaaacccttaaaaccaacattaatcaatgggagcggagtcttgtattgatctgttgttgagatgcagaaacgttttccatattagacaagttc

SEQ ID NO: 3443 - DNA, 2023 bp, Glycine max
  Intron number 5 from transcript Glyma08g40030.1 (locus Gly ma08g40030) derived from phytozome v7.0 (chr-ID Gm08; pos 39714571 to 39716593)
gcacctttggctattttgaccccgagtatacttcggtacgaatccatgccacaaggatcaattctttttttgcaatcacattttgtgcatatggtgtatgatgttttctattcataagtgatacagtcatgccacacctgctagtagttgttgtattaattatgaggaatactagcgattctacctgggtctctctctttctaacctctttttatgattgattgaaatttattgaaaattaccaattttggtggatcttacctcttatttaatgatttttttttcctgatttagaagtgagacccatcaaatttggtgattttcaataaagttcaattagagtgttagaaagagagtattgctatcatttctcattaactattagtttagtacacttcagaaggtacattacccactcaaactaagccagaaaatttaggaccaactgatacagaaaaaataggcttgaaataaaatgtttggtttggttctctttagaaacataagacgaaattcttcatccattgcaaaagaatttttttttcctaatagattatcagtaaatgattctgtgaatatttttgtttatacaacagatttgggttagaatcacagaaaggctcagtatctggtttagatggctttaaaaccaagttgtttcttattctctagtatattttctttgttttgttttccccatgcaaccaaaataccaaacatgatacaccaactaaaccttttagataggcagataaataggagttttcttgtctagagggcttccataggaggaggtgtaaagagttaaaccattttcaggtcattcccttctagcttaatcttcaggttaagtgattctgacaacctgtatataccgtagttttcttgtttttttttttttttcctttcctgttttttttttcatcggtaaatgttacttgttaatagtttgttttttgtcggaagagggaatcgaactcacaacctttcttccctcccttctctttatactaccaaactaactttataacttccttttcttttttccgtcccctgttgtttcttgtagagtctagcttgaacagaagttacacatgacacaactagaataggaacaaatgttccaactcataagaagcactttgttttactaatcacaacctttaaaaaagtagagcagaacaagtagattttaccataattggatatggcttgaagttaaaactgatcaaattctaaagtggatacatagatagatagccagtggtacttacaattgaatattgccaccaaaattggtttaattatctatctaccaatctcgctatctctctacgcatagaaacggaacatttccataactcaaacgaaaacgggtacatcatcattaacaacactaatatatcacccacccacgagttgcacgctaaaattaaattaaaaataactagaaaatcaaataaaatgtgttaaattatatgctaaaataaatttttagtcgttcgtatttttaatttggttatttattttttaagaagtccaatttaatcttttatgactagtgtctctgaagtgaatcaaattatcattcccaatctatcatggttattaattttaggatacgatttaaacttcgtttttttattgattcaagagataaaacttattttattatattctcataagaaaactataaaatctaaccgatgtttgaactaaaaaggataatttaaaatcgtataaaaagtaaattcaacgagcaatccaaaaattaaaaaatataacataagattctttgagaaaacataaaaaggattaaaattacttaaaagtgtattttagccatatatgttagccagctgttttcagatgacaatataaatttataggtaacagagtactagaaacagagaaaaacctcttctttgttttttaagttgatacctaagtgatcttggtctgctgacatagttaatatgttaatactatcaacaacagaccggaaaacttactctacaaagtg

SEQ ID NO: 3444 - DNA, 6399 bp, Glycine max
  Intron number 3 from transcript Glyma11g01490.1 (locus Gly ma11g01490) derived from phytozome v7.0 (chr-ID Gm11; pos 887931 to 894329 reverse strand)
gcttatatatatttggtaattttgctcaatcaaatgttttgattgggtttgatttagataaaaggattgttttttttaagccaactgatttcaccaaaccgtagaaatgattttaatctaattttagtgaagtgatagctagtgtcatctatataggttgaggtcaagagaaagattagggatataacatttacatacaacattctaacttaaatggagtatcgttctcaagaatgttgcgtgaaagtgagattagagagtctaatgatatatattttcatttaaaaacaataaatatattaaaagtagatataacttccattcaaaattaactcataatttatagtattttatccttcatttatagaatttgtttttataagcattattaattacaaattctttacatcaagcacaacaagtgcctccgtacgtagcttttcatcagcaccataaatctgcataaaataaaattaaacaattatatatgaccaaaaactcctaattaagaaagtctatgcacctagtttttcattagttaatttataaacaaattcatataatttaataaaaattttgatgataaatttaagatattttaaaataatataaattaattaaatcttaatatatttgatttcttatttgataaaaaatttaaagattttatacttaaataaaattttaattttaatttaaaatgttttaattttaatattttattttaatttatcagttaaaattgatttttttattgtgaacgatgatttctcatataatacattttgtaacatatataatttaaaccacacacttttaacttccagacaaagccagcacccgccatgttgtttagctttagccagtcatttataaaatatattaatgactactatgcattttttatatacttaagaatttcgttgtcaatagtcagtaattaattaattcttttttttggcttaaagaataatattaaggtgggttaatttttgcttttctcggcattttttttcatttttcatatatgcaacaaataaattcaataactttattctatgcacctcttgccataaaaaagaacactatacgaagaggatatgaaatcacttatctaatttagtagatttgaaagttttatattatcctctaatacaaagctaaaaatcccgaatttttcataaataaactaaaaaataagccttgcgaaatcaaatagtgttgacgccaagaaatatcgcggtaacagatacatatagtttcttttaaaaaaaactcaaatactgcataagtggagagactcctttattatatatgatgtatcattattcaatattttgtactacgtacttaaactaaagctttctaccatcagctgattttaattgtagcttcgttatttaattatacgtgtctgatgtatttatctgagctttcttttatattagggcgaaaatgctatgcatatcatagtattataatataaaaatcgatctatgtatatcacttatgattttgtatttgtttcgcggattatataattaattaatatcacatgctgagattgaagtatatatatcttatatgagaatcaatttatatataatacaaagtaaactacgtatatatatattttagcttttgatgaaaaaggtttagtattttttttgtcccatgtaaaaaattatgagtattttttaatttattgaattaaaaattaattccgttcatcttgtgtaattgttgttagtttaaagaaactttacacagtaaaaatcgaataaaaaaatatttaatatattgttgaagttatcattatcaccaataatatagatttacttagacgtatagcacttgtaagttgtgacccataaactcattgaattaattaaaatatttaactgtaatagaaaatacgtgtttaaagctttggagtggatggtggattgtggtatgacccaggttttgtttgagatggattgcaaagtcattgtggatagagtcaatcagttgttctcaacacaggatactacagaccttggagcaattattcttcaatgtaaatacattcttgcacagtaccaaaactctagggtttcttttgttaagagataagtaaatattgcagttcatgctcttgcaaaggctgcaatatatcttgctaaactcaatttttcatactactgcttgtatcaacaacactagtattatcaatgaaactccttgattttctcttttgtcaaaaaaaaaatgtaatagaaaatacgtgtcattgtatccttgtttattattttaataatattgtaaagttattttatttttgtatgttccttgatgcagacaacctaatttatctgatatcctcataccttaattagctaataatagaacccaactatgttggtataaataactatacacaggaattgagatatagtgatggttgatcaacatagctaagatcttgaagatagtgcttaccgaaaaaaaaaacccacttgtgtttaattttgttgggttcagtatttgtgtttataaatcatatctcaaaagttaaaaaaggacaaaatattttaaatgactatcaaggttcaatatcaatttgaaggaaagttacagtaacattttgtttttggaaatacaaaccgaaaaaaaaaaagaaacacaaaacaaaagaaaatatattttgaagattttttttcagttaaaatgacttgaaattgaaagtgaaagaaaaagtatgagacccaagtcaaaaaaaatctctaaagaagaaaacgggtcaggatgaaaaaaaaagctgaaataataagtgcacatgtacccttattcttatgttgttagattttaacgtttaattgtcatttaatataattatattttcttttcactttcttctccattaataataaaaaaaactctcatatcattttctttctttttatttgatatctccttatccaaaacttgagttggaaaagaaatgtgtatataattaattaaacatggataaaaataatttcgcatcccctagcttgtatgtctatatacacccaagtagagtaaagaaaagataggaaactatgttgatataaataattacacacagtaatagagaattgagatagtgatgattaaccaacacaagatacagaagatagtgcttaccaaaaaaaagaagaaaaaaaaatcaacctgatgagtgtgtctaattcttgatgggttttagtagtatccgtgtttataattaaaagaaaaagaaaaaagtcttatacttgcatgcatcaatgaatagcatgccttgcggttttcttttttgtctgctacttggagatggagaagggctctgcctctgaaatgctaaaagtcatcttgatttgctcaactctctcgttccatcatcttcttgccccttcggctccgacgatgctgccaatgccgatcttgaatagggtttgctgctaatgcatgcaattaattaattgaaaacctcttcatgttttatttaattattcattttttaatcatcaaaaatattattttgtattctagtaattttaaaatatgatatgtaatactataatttttttaacctgaattccaatatcacgctgcaaaaagaaaatcttgtgatagtgtgtgaaggaattgtatcacgctttaatataatgttgttttgactaaaatgaacgattggatcaatattagactgtgtttgatgcttaattaaaattcccttacgcaaaatcaacctaaatgtcttctactaatctttaaaaataagaaatatatatcaaactccacaaaatagttttatttagtgaaattaaaagttaataaaaccaaactattttaattggtatgaattttttgtcacttcaacttcgaatcaaacaacccatggagacgcctagaacttgtttggaaacgggttgagagcaatcggcatgcgtaaagttgaagcaaataattcttgtttctgcgttgttttaagattttgttgcaaatttgtatggaaatgtggatcttgaactcagattcaaatatgttactggaaagaattcacgtgcatgcaaatgtaaggtaaggttgttgagccttttaactcattcgattacgtccaatgtcttgtagcttttagtcactctcggacttcggtggctcgtaaatcatacattaagtttatgctttatcgtgtcgtaaaacgtaaaaaaaaaataaaaaaatattgtctcatgcttttatttggtgtgctgaacttaccacttttcaagagtccaaatcttctaatcctaataatacattttttttttaaaaaaaagttaatcctaatcctaataatacataaaaaccatagtgtcttacttctattatatcatttaaatctttatagatttaaataaagaaaagaggtgtaaacggagtggaaatcataaaccgtttttttgttttttttttaatgaaattctgagtagatatgacatcctcagttataagactaaaaaatgcggcttgttacaacaataaaaccgaaattcatgtctatcaattctgatatattggaatgaactgcattcatatagttacgagtttggctagcggttgcgttcttattcgtagactcagaatcgaagattcttatgtgacatgttaaatagtatctttaagatattaggtaaggaaataaaaaaatacttattataaaaatcataatttttttaaagaatttataaaaaaacaattttacgtatttcaataaaaatatttatttttttaattccttaacctatatcttaagaacactagttattatttgtcatataaaaaacaaaaagttaagggggaaggccagtcgtgccgaggacgcattttagctatacatttgttggtagttgtctttggaacaaaaaaataattaagggggaaggctagtcgtgccgtggacgcattttagctgtacatttgttggtagttgtctttggtttggttttgttggttggtaacttggtgtatcttagtttgactttataattcccatgcctatccttgttttctttttttattattttctatcacttagtaattctagtctcttagtagtctgtgtgacattttctcagttttttcaactgaatataagttgcaatttggaaatgtttgaataatcaaagaaggtatcaactgtcaacatggttgattggctcactaagtcagcttatgttaaggaactataaacttatttaacggtgccacttctacaagtctacaagtgctattcacaatgtccctgttgtgttgtatgtttctccaggttctctcagtaatgttgggtcttgaaccctttgcttagaaaaaaagaaggaaaaaagatcaaattaagatggtattacatagtaggggaccagggagcaaaaatagtattttctagatcttttgtcacagaaatcactcacatgctgctactgtctacttcttgtgactaaacgatatcaacttccgcactcacatgttgcgtttatagttatatgtagatgaaatcaactcctctatttttcacatgactttgtcccttgccaaacttcatggccaacattctctgcttccatctgtgcttttttgtattgtatacgttcttatgtcaaacaccaatgggagcttataacttcgggttcaccattcaactaatccgccacaactcacccaattctcccttctacaaaccagatgaactaaatgagtcattctaccagtttcccaagaaatcagatgaactccggaattttcaatgaaaacgacatgggaatcattggactaggtgggggccctctctcacttgttccacaattcggtaacctttgggagcaaaaggttctctcagtgcctggttccttttcatgcagaccctcacacttcaggtaccattagttttggtgatgccagtgatgtttcaggtgaaggagtagccacaactcctttggtctctgaacaaggtcagtctccttattttgtcacattggaaggcatattggaaggcataagtgttggggatacatttgtgccctttaattcttctgaaatgctttccaaggggaatataaatgattgattcagtcacaccagcaacatatttaccacaagaattttatgaccgactagtggaagaattgaaggtgcagagtaacatgttacccattcatgatgaccctgacttgggcacacaattttgttacagaagtgagacaaacttggaagggccaatcttgactgcacattttgagggggcagatgtgcaattgatgccaattcaaaccttcatccctccaaaagatggagtattttgctttgcaatggctggcactactgatggagaatatatatttggcaattttgctcaatcaa

SEQ ID NO: 3445 - DNA, 1237 bp, Glycine max
  Intron number 2 from transcript Glyma02g46350.1 (locus Gly ma02g46350) derived from phytozome v7.0 (chr-ID Gm02; pos 50336512 to 50337748)
tccaatttgccccgcgaagatcttaagcaggtattctggttttcctcttttttttttttaactttattatcgttattttgcattggaacactgaatgaatgtagataggaattggaggtaatcggaatcatgtgccaaaattccaagatatgattgcttggttaggggataaagttaaaagtgataaaagttgggcattattaacatgacctaccttttccttctttttggttttcctcattagtgaccactgattgcctgaatcaattggcatatggctgttttcaacttaactaatggtctcaagtttgagccctgattattcaactgcgttaaatattcaagctaagttttctgtccatagtaattctatctagctcgagcaggactaccttcatcccatgaaggatacctgttgtctctaccaaaataaataaataaataaagtgaggtgaaattggagtgtacacgcaactgtagaaaagagataacactgagattctatggttttacaaattgaccaattttttgtttaatgttcatttataatcccattcgtttcaaacaatataaaacaaaatgttgtttactttcaatttttatttgttctcttctctgcctatgctatcaagcatgcactggtgaactttgaacttcctctgtctttcctatcttaattccctcttcaatttcactttgctgagtcaaacttagttgctggtcttgaatcgggttgtcctttgatttggggaacgcctcttatattttccagtatctacatttgttttgatttttgcaattcagattcaaatctgattcattgttggtatggagaattttatcctgttattgaactatattgttaattatcgtcaactatttaaaatgatttttaaaacttttttgcaattgaaatattttttaattacacttatgatgtgacattttatggtctcctgataatgtttattttatactgacaatggattaattttgaactcttacaatataactcatgtagaagttgcctttggtattgttttatctctaacaactgaaatggtttgcggtttgggcatttgatggttgtgtacctgtgttgttaacataattagttgttcttgcttataagtatctctgctgtcttctttctttcttgctaactaaagcgtttctttgtttgcttctgtcaccaaaataaggtgtgggctattgcagattcaaagcgacaaggata

SEQ ID NO: 3446 - DNA, 799 bp, Glycine max
  Intron number 3 from transcript Glyma03g28510.1 (locus Gly ma03g28510) derived from phytozome v7.0 (chr-ID Gm03; pos 36426346 to 36427144 reverse strand)
atctcctgaagaagtacaatatcgaagaaaagcaggtcagttgatataaattgggaaaaaagcctatatctggcacagattaagtcttttgaactgattaagattgtgcacttgagatttagagtcttgcgtagataaaataacttgcattttttaaattaccaaaagaaaccaatttctgttgggaatcagcaggaacaattgatttcacatttaattcattgactcaaattttgtgtagaatagatatgtgttacattactgtggttacttatatagcatgctagtataatgtaaacttaataatggtagttgacttgtcagcataagcacaccatgcatgatttaatatgatttgttaatctgaaatgctaacaagtgaaaaggtataagttttatgcgtggaaacatgttggttatgattaaatgtgctttagaatttagatcatccaagtattgctttaaattatttacggttgatgactgaacaagatcttacagtagccatatgaaatactgagattttgtattcattcttctattatgttacatattatagtgtaatttgtattctatgaatcttaaatttcagggttatttttcatattccaacgcaaattaagttttgttgttctaagcttctccatgcactacagacaaattcgattgtgtcatattatggacttcagaacatattatattataacttgtattgcatgagtcttaaatttcagcattaatgttcatattccaagagaagtattcttatattaagttttgttgttttcagcttccccgc

SEQ ID NO: 3447 - DNA, 680 bp, Glycine max
  Intron number 1 from transcript Glyma14g03610.1 (locus Gly ma14g03610) derived from phytozome v7.0 (chr-ID Gm14; pos 2347682 to 2348361)
gttccgattcaagagtaatccgcaattacgcagaggttttttaattgttctcctccgcgctggttttttttttttatgccttttttgttcaacgtgtctacagtttcagtttaaattgatttcgttttgtagataccagtgcatggagttttgtttttcgatataataatgatgcattatgaccaagttcgttatgtagtacgaatgaaagagtaatgtgaacacgtgcatgcgtttttgcgtaatttgaactttgaaatagatctagggtttggctggtggggtctaacaatcgagcttctgaaagtgattggaaaaattagattgcaatctcttcgaatctaggtgtgatgatgatgactttgggtatgtttggattaccgttgtttcaaaaatgtgttcagaatgcaagatacaaagaggatcattctctaaaagtacgtgcaacactcaaaagtgggttcagaacagaatgatgagtgtctgatttgtaaagggaaatattctcttgggtcatcctccaaattataaaaacagaaagttagaagtgaaatgtgcttgtgccagctcgtgtatctagaattgtctttttttcagaagttttgattctacttctttgtatctgctaaagttgacttggattcccccctcctgcttccttgtaggcctttgctgtgcaa

SEQ ID NO: 3448 - DNA, 873 bp, Glycine max
  Intron number 2 from transcript Glyma13g39430.2 (locus Gly ma13g39430) derived from phytozome v7.0 (chr-ID Gm13; pos 40038246 to 40039118)
agaaaatatttggctcggaagccaggttggactaggtgtgtattgattaatcttttatatatatatatatatagcttgtagttggtcttggtcctcgatttgaaatgttgttggataccatatgaatatgaaattgaattaaggggatggaaggtggggtagatattagtaattctatagactgtaactttctaatggttggctttagcttattgtcaaattatgatgcagtttattaatgtatccaaagaaatgcagttatataactatcatgataaatatatacaaagacaaccaagcttatctctctcattgaagtggtgtaatctacatggatcaatcaatgtgattggactcactaaaaaacgaaatttcctgtgaaaccatttagaattttctaacttcctttaccccttaattagacaatgttcatttgatgaacatttttcgtattggagcctctttggtcgaatatttgttgtctctttaataggtgtgacttaaactttttcttggatacatttgtggctaatcatgatactggttgaggaatatggtggaacttcgttgctgaacctgcctctggtacagtatcattgttgtaccaaacagagatccagtagtatacaactctcaagagttaagatccctcctgtttctgactcctaaggatgtgttaatgcataataaaattgaaaaacctacaactatttcctgtatatttatactcttgtctagaaggatggagtgtgcttgttacataggcctctgatctcgtgtttcataattttcccccctccccctttttgttaggattctgatgtttttaaaagtacactttctaaacttgactaccttgatacagagttactg

SEQ ID NO: 3449 - DNA, 1698 bp, Glycine max
  Intron number 5 from transcript Glyma05g28900.1 (locus Gly ma05g28900) derived from phytozome v7.0 (chr-ID Gm05; pos 34611827 to 34613524 reverse strand)
ttgaggtaacgcctgttattatttataactatttatcctatcgactaattggttccatcactctactttttctcctgaataaagctatcataaagaggaggagcaacaattttttccactaggtggtaatagctacatgaattaaacgatgatagtgttgttgtagatatttatacacaaacaaaccaactattcacttctaaatccttcttaattgatttgctaatagcttttatttggcttcctctacctctaactacccatctgatatactctccttattgggcttctataggttttctcatacatgaccaagctacctaagacaagattgtatgatcttttctacaataggggctaccccaagtttccccccaatactattataattctatcttatctagtatttcatctcatccaactcaacactctcatttctgctacattgagtttattctcttgttggttttttaccacccaacattttgttccatataaaacatcataagttttatagttgtgtagtaaaattttgtttgagtggtacttttttttatcacaaataactcagggtactcttccatttcatttgtcctactttaatcttatggtttatatctcttttttgctaataaaaaacaataaatgaatgatattagttgttactactacaagtttacaacaaaaacaaaaccctatcccactaggtgaggtcaattacaaagatcacacaatgtcatttggcagaattaaaatcaaagtttcaaaactattattaagccttagatctcctttgctgatttcctccaacgtcctttttggtttccctcttcttcttttcgctaggctaaaaatcatataatttactcttctaactagcacctttgatgaccttctttgtacatgcccaaaccaccttaactggttttatgttgctattattacatcataacaatataaaattcgataactgtggaatttttttcaatggattagattattcagcttgtctttgtcccgattaacttataaggccatttgcagtgaaaattttatacatagtagttgccaggttaacttttccttgcatttgtgtagaggttaaattttttaattaattttttatattaatctcttaaattatgatagattggttacccgagtttcagtcagtattacagattaggcttgctgaaaatttatattcttctaacttgaatagtctcaaacgaatttttcttagccttgggtgaacggatagagttttcaggttacatgtaaactgtcaactgcgcattcatatttcctacctaaattaattttctgttggtcgaattgttgggggattttgtcccaataatggctacaaaataactcttaatataatctgcggctatatgattccacatgtgcttcagattttatgacagaatatctcttagaaaggtgaataatattacttaacaatgatgcaaaatcttaataatttatgtttcagcactggtattatgttctacatgtaactaaaatttggtacctttctttcttcttgtctggtctgttttattttcttcagttttaatgtctccatagaaaagtaatatgtccctggaaaacaatttaatttgattcctcatatttggttgttaaattcttctgataggaacataaactaaaggatattggtccaaacaattg

SEQ ID NO: 3450 - DNA, 2385 bp, Glycine max
  Intron number 2 from transcript Glyma05g24410.1 (locus Gly ma05g24410) derived from phytozome v7.0 (chr-ID Gm05; pos 30596285 to 30598669 reverse strand)
tggatagtctttgttgcttcagctctgtcagtcaggtgaggaattctttccctttgtaatattttttcttcttcctttttgctcctctttttgtattggaaataatcaatctccatgtaatgatgtcatgtgctgaatggctgtttgagatttgaaaattaagttctggtgctgtgctagtgaattgacttggtttgggacttttccaaattttattttcctaatcttacttgatgaaaaatgttatgtatattgattatttctatgtattaacagttgtcaactaccaactctcctataagcttaagcttttgagtagaggcataacaatggttttgtgcacgtgccttctttttctcatactgccatttaattataaagaacagtggggtcatgaaggattttcctacaatacgaggatcttcttaccttgtttttggatgtacttaacaagtatatctaggagctggtgactcaatgattgctttctgaatatgatatagtcctagtgagagagtcaagagagaaaataaaaattgtggagagaagctctcaaatcacatgattttcgattgagcaaaagaatgattgtatggaatgcaaattcagcaggacgtgtgcgagcattggcttggatgtggaaattggcaatcatactttactaaaaggttatgtggttttggtatctattatttaacatgcaacttaactgagaaattggagatgtaaatcatggaatttagatagagtggatgaaatggataaatgcctttcttatttgtgatcaaaaggtgctcatcaggtttaaagggagattttgctaaatagctataagaccaactatgttttatgttatggaatgttgggtggtgaagtgccaaccagaacataagtattgcagaaatgagaattggaggatggatgtacttgctagataagataggaataatatggatattatagaagaaagcaggaataccacttattgaggaaaatacgacacaatcttgcctgacatgatttgcccatgtgtggaggaaaacaattgaagcccctgtaagaggtattgattagatggaggataaacgaataatgagggtagtgaaagaccaaggaaaactccaagagaaaacattgaaaaaatctatatctaactataggtctttctcataatttggttttaaacagaatacattggtattgattgcttcaggtaatcgacttcttccagtggaaaaaagaccttttgttgttgttggatatataatagaggttgcacagattatactcttgaccactacttattctgagggagatcatcttctgtttctctcaaaagattgaaccagtggatggttgatccttccatataatttagccaatatgatcttcacttcttttgaagtatttttcccttcagagtatgtttctggctttctgccttggtgatccattcctcaggatcttccccattaaaggtgtgcagttccactttcttaactgccatacaatacttatccaaaccttggaaatttgaatccgacccctggttagaagaattccttcttttatgattggaattctcattttactccattgttctcttcccaaacagccttgcagaggtactgcaaaatgatggctggaataatgttttgtcagaagagcagtagatggttggcatgatgatagaatcatctggaagaggacatgattaatgacgtaagaatagagctagtaaattgagacaaactgctaaagaagtaccaaccaatttaggaataagaaccaagtagctataatatagcctaatggacagaaataagccaaagaaggcaaaagcggataaacctaaatgcaggaaaaagagagagaaataaagctaaacacaggaaaaaaaacaacaccaaatgcaggaataagacccaaacaagtccattacaagggggagaagtgcaacccattggataatacaaatgttatcaaacaataggagtgccagatactttagactcagcagcagatatagtgatggaatcagattatcagagatgatgccatgtcaatctcctaaaagcttaagctattaagtgaaggcctaaaaatgaatttttatttttatttttattttttaacaatggttatcagttaacctgaaaacaagttggttcaagtcaacctagtgagtatgaaatcattgattttgtttctgactttgtcttagtgatatcttccaacttatattctcttttggtagtcacagatgtaaagtttttcttttctttaatatatattactgaaatatgttaaactaggcaagaccaatatattctctgttattgtattttaaattctctatctttaggtggtcggagggcgttcttc

SEQ ID NO: 3451 - DNA, 1764 bp, Glycine max
  Intron number 3 from transcript Glyma17g12770.2 (locus Gly ma17g12770) derived from phytozome v7.0 (chr-ID Gm17; pos 9670893 to 9672656)
tgctttttctgaggtagatttggcaatgttaacttcatactgattgagtactatgatttctgttgatatccatttctggagaaggaaaatcaatatatcaatatatgagttataaaagcataaaataaatgggccatggaagactggtagttggaatctcatgaatcatgattcaattcatgtgatttggtgcaaatactcgctccatccatacagaagacatggagatttgttttgttgccagaaatgcatgctggaactttagaaattttgattctgttgcatttccaagttccaactacacaaaccttggtcacaaggttgtcaaactcgagagtttatgcaaactcgtgaagggtccataactgcacctgtaaacttgtaagagtttactaaacacaaaaacaatattaaaatttctaactgcagtagtactatagaataatagatatccaacattccaacttcatagtacagcaaaccttaattacagagtatgatattgcaattaaaaataatacataaatgaccaaatcaaaagttcataagataaaaacatttgcaaacaattaagcttaatcaagcttttaagtgttcaatcaagtagttaatcaaacattcagtgctaatcaaatcttgctaagctagtgaggggaggcacaacactacactaattccacacaacacttgtttcagggtttctgtttgaaggttataattattgatgttgggagggagaaaatatgacaatcccaaataataaatgtacataaggaaataaagaaattattctatttgtatacaaagtcttgcagttttataatattaaaagtatattgtacattttaataattgatcatgaatctaatgattcacaattaagtaggtctttctattcaattcctgatttgatagcatggaatgagtgggctaaatactaatggggtaggggaataagagttatagatatattaacactgtcatttgcctataatttattaaatcctaatgttaatattacaaatagctgtcttggtttcatgacttttatcccagctgtaaggttctatctgttttgtttttaaattttacgcttttaatatactaaggttttactttgaaaaatgtctaatttttttagcaaagtttttgcatgtctctttattttagattttttcctttactacgaattttcttcttccattgacttggtgtgtttggatggggaactgataaaggaatttaatttttaagtgtatttaaattatcatacattcaaaatgacttgtttggatatcaaatccaaagaataaaatgatgggaattttacaggaattttttccccaggcaaaatgaagcaatttaaggaattttaaataacacaaaattaaatttacataaattacttaatctaaaaaaaaaattgaactacaaaaaatttcaattgctttattcaaacacagtattttttataataaaaagaatataatcgaagtaatcaaattctcatgcactttaaatttcttgaaatttgaaatccattatccaaacactatcttatatctcatttgtttgtttaaatgtaatttttactttaccataccaagccattgctatagaaattgtttatacatctcttttgggagtaatggatatttgttctttatctgggttttgcctacaaatacttgcattttgaaattcactgatattttatacctgggagcaggatactcaccttttacttactgggggagttgagaa

SEQ ID NO: 3452 - DNA, 8406 bp, Glycine max
  Intron number 2 from transcript Glyma04g09400.1 (locus Gly ma04g09400) derived from phytozome v7.0 (chr-ID Gm04; pos 7633345 to 7641750)
ttccacacacattcagtcattggggcttggtcattgtgggcaggattgatgccttattctttcttagatatatgattgtgtgactatttatatttatattaattattggtattttcaggattgtcaatgggagtccttatattaattgttgatatttatcccttttttgtttttttttatgggtttttttttggggtttgagattcaaatgaagttttatgatattttttggcattcccagtagatcttaatgtgaatattttcaacttcaattctattgagaagaaggaagagaaagcaagagacatgactgaatctgtaaatcaatgtacacagcaaagtgtattattatatagtgtggataatgactacagagaaaataattgactaattactataataatgcaaatcttagaattgcctaattatgatagctgaggaatttaatggatgcaggttaaattttgataccattttataatttgtatttgaatataaactcaactttaaaagataaatcatgagttaatgattactcctcacttgtatacattattttaatcatattagtatcaatgtagggtctctcataccggaattttttttttggcaacgatggacaatggatccactaggaaggcatgaaataaggctgtcccttgttaggctctagtaccatgttgagaagagagaaagcgagacatgactgaatccatgtgtcaatgttgacagcagagtgtattactattatttcacagcataataattacaaagaaaataattgcctaattactataattatgtgacttttttttatcaatagggtgtaatttttttttattttttttaaatgggaatagttttgaaattatttttcaaaaagataagtcgtgttctaagttaggggttctaacacttgttacgattttattttttttaattaaaatcataaataattttatgacttgagtgtatctttttttttccgactttaaagtcgtaaattatttttttaatattttttatttgatatattttgtatatttaaaatttagataatcttttaataatgttatcgaaatttattttttaaatgaaatataaaagtaacttaatgacatttaatatatttttttgaatattttttattattttaaaaactaaaatttgaaaccaaatattaaaaaaatttgttactaatattaagttataatttatgattttgaattatttattttgtgtaaatgaatttactattaataacatgtaataatttagtaataaaagtaattgttaaattaaaaataacataatatattaatataaataatttaacaactattagtaataatttaggatcacacattggctttatacaagttaaattatttatattagtcctaaattattactaaaatatacaacatattaaataaaactaataacatgtaaaattaaaaatatttatttaataattaaataaataaaattgtttacaattttaaaaaaaataaaacaaaacaatataaaatataaacaaaaaaatagcgtgagaaaaaggaattacaactttaaagtcgtaatccattaaaaaaaatatcttatgacttcaaagttgtaaaataaaaaaaattatgactttaaaattgtaaaaagaaatttacactaaaatcataaaattatttacaattttagttaacaaaaattaaaataagatattacgctctctggtgacaccttttatgacttacttcttttcagaaataatttaaaaactatcccattggaaaaaaaagcaaaaaaaaattacatttagtaaaaaaaaactaattatgtaatcctaaaattgcttaattatcattattaagatatctacaatatctaataaactccgaaaaatatattgagttaaatgtcataaatggtcctgagtcgatgtgtacagttacaattttacatcacttgataaaaggaaatatgtaaatgaataatcaattaattgatattgataacattaatggcaacaggaagtacaattatagggctctgatccccgtactgtgaattttccttaatctaaacacgaaacatgatttatagttctctcccaaggtatttttctgagtaaaactatgagtgcagtaattgtcatgctggggtcaaattgccatcaactgatgtgtcttttgactaagaaacagaatctttggcaagggaattgtgacaaaaatttagagagtgtgtcaagatatgtgtctgatacatggatccttttcaaaggtgaccatgcttatgtttttaacttttaatttggtcaacttattcccacctttcatctgtacagtataagacaattaaaaactgtccattattacaagagtacaagaaatctatttcaaataggcataaagataaacaatctgcataaaaaaacgataatgatcttcaattcctttgcatatctcttgagaagatatcattaagaaatcatgacctgcactggaggtaggtcatcaaagatttgtttcacacgaaagattataagaaagagcccttgagagtatgagcattttgttccagagaaatatacctgaaaacagaaaatttagcacaacttaataaagcttttccttactcctgttaaagcctttaaaattagttgaatgaaatttggattgaaggacacacaaaattcactgagaacttcaaattgcctactcaacaggatgtgacctctatggcatcggttcaggctccattttgattttgctcattcattatgagcccgaattattactcagttaattcacttttccttgatccatcattgtctgaaattagatactgtttgagacagagtaaggcaatgagatttagccagagtcgcatggctattttgtactatcatgcaggtttaatgaaaatttgatttgtactttcgttttcttccaaataccacatttcaagtaactgattgacagatatcaatccagctagtataattatttacaaataataaaaattctgaattattttatagttctaaggtcatggtgatttatcttttgtaaacgaaactttgtgtgaaaggatctaatttgtgcatagttatttgaatattttgagctgctgagcttatgtataccaatgtttgaaatagatggtggtttcctgttggttaattttgaaaatcgagataatcctggataaatctgaagtcgtgtataaacactttcagattgaatcaaatttcggggttcaaccaaaattgttcaatcggataaaatcagaagattataattcaagagttttgttttggtcttgtgagtttttcacatgttatgctttttgaaccaggatgattatttataatcaaagaacaggtggtttttagcggttgaaggaagttatggaagttttatcctttgaaaaaaaacggttggcggttgatggaagtttatcttttttaaaaactgtcttttcttgaaaaataacttccatgtaacttccaaaatttgacttccatgtaacttccaaaatttgcctaaaccgagcatctcgttattacattaaaacaagcgtgcactcttattttaacataataaagagatcaattacactaaaatgtccaacagacctcccccattttagtgtaattaccgatcaaatcaccaaagtcataacatacaacaaactactgcatatatgaaatatcgtgacgattgaatttcatcttagcaaattacacgtttcaaatattcgaatatcagggtgtcactaaggattgaaccctttctattcataatgaatacatgaagataatctgcacaatagtttataacattactcttgctcgacactagttttactagcctgtgtccctatccttcataagcatatcaaagccaagtcccagcttcttgaagcggctaaacttcatgcttatataggtagtccttttctttcttgcacctgtaaatgcaatttttcaaaagaaccattgagaagttatacttcaacctccttaacttacagaaccgaacacattccttttgggatactttcgatgatgtgttccaatctctacatgttaagctttccacattgaattcagcacctaatgtcatattagatgggaattgggtatcttaacataagagatttcagatggactttaatcctaatcccacagccgacctttttacgagatctctacttaaccctttggttaaatgatcggccaaattatgctgagttctcacaaactccactgatatcacaccatgcatgattaactcccgaaccatgttgtgtctaacacccaagtgtctagacttcccattatacacttgactatatgccttagccaaagttgcctgactatcacacctgatagacatgggaggtataggtttgggccacaatggaatctcatagattagatttcttagccactcagcttctttaccagctgctgctaaagctacaaattcagattccattgttgaatttgtaatgcaggtctgtttcttggatgcccaagagatagcacctcctccaaggaggaatacccaaccacttgtggatgaataatcctccatattggttatccaacttgcatcagagtaaccttcaataaccgaaggaaatccagtatatgtcaaaccatagtcaatggttccctttaagtacttgaatactctattcatagcttgccaatgatgagaactaggattacttgtaaacctactgagtttagcaacagcataagctatatcaggcctagtactaatcattgcatacatgagtgatcctatcgcccttgagtattcaagttgagacactgctacacctttattaggtaatagcttcaggttaggatcaatgggagtacttaccggagaacaatctttaaaattaaatttctccaatatcttctcaatataatgtgattgagagatggaaataccattgtttccacgtttgatctttattcctaagatcacatccgcctcccccatatctttcatatcaaacttagaagacaaaaatgccttagtttcatcaacttgatcttggtcggtaccaaagatcaacatgtcgtctacatacagacaaatgataactcctttgccatgagtatcaaacttgatgtatagacatttatctgcttggtttataacaaaaccactagacaacacaacctcatcaaatttttgatgccattgcttaggcgcttgtttcaagccataaagagatttcatcagtttacacaccttattttcatttcctggcataacaaacccttcaggttgtttcatgtatatctcttcatccaattcaccatttaagaatgcagttttcacatccatttggtgaatcatcagattgtggatagcagcaagtgctaacaacagtctaatagtggatatcctagcaacaggagcatatgtatcgaaaaaatcaataccctccttttgcctaaagccttggataaccaatctggctttgtacttgtcaacagtaccatccactttcatctttctcctaaagatcatcttacatcctaatggcttacatccaggaggtaagtcaaccaatttccaggtattattttgcatgatggaatccatctcactttggattgcttctttccagaatacagcatcccttgaagccattgcttcactaaaagtctttgggtcttcctcaacattaaggcaatattgatattgaaattcaatatcattccttgacccttcaaccaaatagagttgaaagtcatcaccaaatgacttagcttttcttactctcgtactctttctagtttcagtactagttaaaggtatatcctcaatattaactgagactttcgacatggaattcatgtcctttggcctaggtatagatgtaaacctttgttcatcaaagatagcatcccgtgactctaaccgagttcacagcaacagaatcattagattctagcacatagaatctatatactttagaatgttcagcatatccaataaatatgcaatctatacctctttcacctatggttttccttttaggttctgtaagcctgactacagccctacatccccaaattttgagataactcaaatttggtgtctttttgtgccaaagttcatatggggtaaccttattccttttgttaggaattcggttcaacaagtaacaggctgtcaacatagcctcacccaaaatccttcacttaaacccgaataggataacatggaattcaccatttctttcaaggttctattcttcctttcggctacaccattctgttgtggtgtatagggagctgtagtttgatgtattattccagtagattgaaaataaaccggatcataatactcacctcccctatccgtacgaagagttttgattagcccattttgatgaagttctacctctttcttataaattttaaatttatcaagagcttcatcttttgtatttaataaatatacataacaataccttgatgcatcatcaataaaagtaacaagatattttttatgacctaatgatggagtagcatgcaaatcacacaaatcactatgaataaggtctaagactttagtctcacttttaacatccttaaaaggtttcctagtgatcttggtcaacatgcaagttttgcatttttcaatgttcatatcaaaaggaggaatcatacttgtttttgacatatcttttaatcttttgtaatgaacatgtcctaatctagcatgccaaatttctgattttgtcatattagttatagaactacacgaggccatacaaacagattcatgaacaaaaggaacatcaatgtttaatttaaacattccattacaacgataaccaaatccaacaaacgaaccatgtcttgacaagatgtacttgtcactttcaagtacttgcttgaaaccacaattatttaaaaccataccagacaataagttcttacgaataccaggtacaaataagacattatccaaatacaaactttttccggaagtaaaaactaaattcacacaacctaatcctaggattggttcagttgcaacattgcccatcttcacaatagagccatcatcgattggtctaaattccttgaaccaacgacgatctttgcacacatggcttgttgctcccgaatcaaaccaccaagcaacgtcgtcatcctgcacatagaatgcatcagatattagtgatacataatttgaattcgtattcgaattaaaattattcactacaatctgaccttgttgcttttcaggatcattagacccacttggaccagccttgttctttcctttgaacaccccgacaatccctctttaaatgaccaggtttcccacacttccaacatgacaattttgtctgtttgtttggacctttgttcttatttccttgaaattttcgtttgttacctttagcattgtaattttgcttaactgttccactttcctctaccatattaacgtaagaggaacctgctacggttttattattgactttgtcaatttcctgagccctcagcgactcctcaatcatgaaatgactgccgagttgaaccagagtcaactcttccttcatatgtttcaaggtatgcttgaagtctttccaagaagaaggcagtttatcaattatagatgaaactgcaatggattcatccattttcaaatcatgttgagtaaactgacccaaaatccgcagcagttcattatattgctccataacaggcctcgaatcaatcattttgtaattaaagaaattactaactaagaatttgttacttgaggcatcttctgccatatacttggattcaagagagtcccataattccttagcagactcaacattttgataaatatcaaagagagagtcagacataccgttcagaatgtgtccacgacaaatgtaatcgtcgttctcccatttcgaacgcttccttgtttgatccagagtttcgccttccatatacaccggcatcggtgtactcagcacatacaccacattcaatgttgtcaagagaaagtgcatcttcttctgccatcttctgaaatcctgcccttcaaacttgtccaactttgcaaacttgcttgtcatcttcgaactatcgttcgtcatctcgaaagatttgattcaatcttttgttggttaattttgaaaatcgagataatcctggataaatctgaagtcgtgtataaacactttcagattgaatcaaatttcggggttcaaccaaaattgttcaatcggataaaatcagaagattataattcaagagttttgttttggtcttgtatgtttttcacatgttatgctttctgaaccaggatgattatttataatcaaagaacaggtggtttttggcggttgaaggaagtt

SEQ ID NO: 3453 - DNA, 2234 bp, Glycine max
  Intron number 5 from transcript Glyma04g39560.1 (locus Gly ma04g39560) derived from phytozome v7.0 (chr-ID Gm04; pos 45745028 to 45747261 reverse strand)
cctggcaggacagaggtaacagttagtttgagcatatgaattgaatgaaagatttcatgaatgtaaagatgtttactataatttgattttaagaaaatacgacaaataaatgaatccagtcctatgtatctaaccttgtgacttgtctactaaattaaactatattactccatgcatatatatatatattgtacgtatcgatcatacgggcggatattgtcgtctttaccaacaaaatccggcaaaaggtcactttcgtaataaaacaactttgttgagaaaaataagatttatttcggagatctctttatagtattttgcaaagtccaactctcttatgtttggaatctctatactgtacggaaatatcaattgtcctcttgtgtttgatttcattttgcaaggatcttttgttagaatttgatgaaggccgaaaaagttagtggaaacaaaaaggaaataacaaggaactacagaggacatcataatttaaggaaataattaaataccttgccgtccaatttttaaattaggaaattgggttctatttttctatttttgtggctgaagatgctttacttttacgtacgactccgagagagaaggttacagttttcatgtctgctcatgtctcatgcatgttagaggaattcttggttttcttttcttgtctttatttaattctattccttctctctttttattcttgatggacttttacatgattgtttatgcaatgcaggtcctctgttgcagcagaaattttagtcattggtcacattctctctttattaattactattatactccaatcaatgatctagattttgcaggaatgtggctgtagatcgagaaattttgttgcaagaggatccaagttgttgtttgtgtcatctttgaatctatttttttgtggtgttttcagtaaaattggaagataaattagctgaaagcaaataaattaactaattgaagtaatagtatttattaaaattaactactaaactaattgataagttaagtgtaaaatgatataataggacattttaatgagagagtatatgaagactttttttttttacgcgagtgagaagaatatatgctgacccctaataaaaatgaatgtaagttattaaacatatagagtaattgatatataattattttaatttaattaatgatcttggattttagttttatgcatattatgtgactcaaaaaaataaaaagtaagttagtgtgctcaaaaaataatgatatttaactaatatatttcaatccactaaggcataatggttgggattccaccacgatagataaccaaaaacttaaatttgaccctcattattgtcatgttattgtatatatatataaaaaatcatgaatagtgaagattaaaacaaggagtgttttttaaaaagttatattaacttttaaatgatattaaattttaactatttatgtataattagatacctaaatttatttatttcattttcatgaaaatatccctatgagtagatataccctactcagagtagatataccctactcagagtagatataccctactcaattatttgacctgttgaccataatttaaaatttggtaattacatatgtttgatttgaatttttgttttctgttgtttaaaaaataaaaatactgaagattatgatatattgacttttttatcttttttgtattgttagattcgcattttcattttacccaaaatgaggttcttgtttttaactaaaaacattgaaaacgaaattttattattttcatttttgagttgttttctattttcattttcacagaatatattttcaaaaatccaaccaaatactttttcatcatcattatttgactaatttaatggcttgtttcactaaatacatttttaaaaaatgactaaaagagtgaaataagttattttatcaaatagttttattttactcaaacaaatatttgaattagttaaatgaggtaaaactaaattatgtaccttacaaacactctcattgccatcgttacatataggagaaaaaatggaagtgaaaatttcacagataggttttaattttattagtaaaattatattgaaaacttatccaccttatttttttcatcgccgtagggaaaaacttatatcttgtttgcagctaatagtagctttgaaatgctgattctactaagcatttgatgtgtataggttgaacagattcac

SEQ ID NO: 3454 - DNA, 1387 bp, Glycine max
  Intron number 2 from transcript Glyma10g38120.1 (locus Gly ma10g38120) derived from phytozome v7.0 (chr-ID Gm10; pos 45986822 to 45988208 reverse strand)
aggaccagtgtggaaggaattttactggtgtgctaagtcattgctctctttctttactttattttgttcaatttgcttcctatatgtaaaatatttttcaactttgtcctaatcatatgttgccattacttgtctttacttgagtcattttcttacagtaaccctttgaactacacagtgaggtaaatttggtttgacaacaacattgttaaaaagaccattctgttcagttaaagaccaaggttttaacaatgctatttaccatgagatccctcttgaccacgttcttcaatgtagttcttggcactcctctccttctcttcataggattaaaaaccctacaatctactcttctcaccagggccttctgtgtacatgtccaaatcatcttaattgattttctattatctttttctcaattggtgccgcaccaattgttcctagtatacaatcatttaatcattttgtatcttgtattttgttatatgatcacattcatcttagcattctcatttctactacttagaccttttctcttgtccctgtaaacaccaacatttgttaccatggagtatagccagatgtatagtactatgaaaaaacttgcctttgtgtttggtaggtactttgtagtcacaaataatccctgatgcctttctccattttagcaatccagcttgtatcctatgtgtgacatcctcattaatttcaccattattttgtagtattgataatttgatatttaaacttagacacttgtggtaccacatcttctcccgataattgcatgtaatagaatagacatacattatggaacacggggactaatcttagttgctgttttgtcagtaataaagaattgacaagtatccagtcacgggcatttggaattctatatttagattggatagtagactgtttaaatttgagcctctacaaatctcataatggtgagagccttatgcattgttttgcccattatgagggtgagtcttggtacaacaataagattgttaactttcgacctggtggccatgactcataaggtctagtcatgaagatgtcccctcccccagaaaaaaaactgacacactgagaccagaagggcccatctaagaggggggaaaagtggatcctatttttggtgggagtgggaccctttacttacatctgatcaattccgtgctaacttcatttaggtcacttaggtttttactttttcagttactttttgctataatatggtttctcactgtgttcttgttaattccctttcatagagaaagaccatctaattccctttgagattcttcttattgtcctatctcatctttatacttttaaatttccaggtacaagagcacaatcatcctcatatacttcttct

SEQ ID NO: 3455 - DNA, 1568 bp, Glycine max
  Intron number 5 from transcript Glyma16g34320.1 (locus Gly ma16g34320) derived from phytozome v7.0 (chr-ID Gm16; pos 36964373 to 36965940 reverse strand)
aatttgaggtttgttcgttttattttcttgtcactgttagttaagttatattgctattactctccaactgagttcttggaaaatcccttatttagtgatatatcctagttttagtattgcagaggttgtgcagtagaaatttaaagctttttatcttttcccttttctccctaaaaaaatttattgaaaagcattttgaagtgagtgttgggattctgcattgattaatgatatgaccaaaatagtgtatctaagggacaaccctcatcctatgagtaaacttttgaggttgagttaggttcaaatccaaatgttaggatgaagggtgaggattgccccttacatatgcatatacactattttagtcatatcactagccattgtgacacctccaatgacgagggcaaagtgttaatttgattgagttcagtaattaatttatatgactaggtatgtttttcgtccttggaattaactctgtaacagtgaaaggattttcaaattctgaatgtgggctttccacaggatgaaaacatgagatcttatggaactctttcctttattattagggtgtcctgagaataaaaggaagatgaagatgagagtggaggtggggagagaaattaaagtatcgaaatatatgcatatgcagtaaaaactccaaatatccacaattctgtagttttaatgttaggcactcctatatgggcaagggcagaagagggaattgtgtaggctatgacaaacttgcataggtggaagcaagtgctgtaagcattgtggtaaagttagaggctgcatgtagttttggggtaggcaatcatttgggtagttagaggcaaacattgtgatttgtttattttcattctcaatttctatactttcagcgtagtgcatattacgattgtaataagatgatttgttctttgaatattttctctattaatccatagtaaaatcagttcctatcacataatcactgcctaatttgttttaggtacaacattcattggtttgaacttatagtttcgcattgggggatgatttagttgaaatcagcttgataaatagattccaaaggcccacgaatatattcagaatttctaaaggagcagataattaagacagtatagatttacttgtaggatttataagggactcttgatggaacttaaacatgaattttcagtccattctattattcactcagtggtttaaagcttgttttacatgtttatatatcttgtgatcttgcaaatgcattgaccaagaatctacataatcaatttcttgaaattgtataccatctgactgtgttcttaaactctgaatacaagaagctagttatacaatgtgtgtagaaaattaaaccatggaacttataaccgacatacaaaagaaataggctaagatgattggagtccctcaattagtggagaaccaaaacaaaatatctgtaatatcttcagcaaatcatccattacagcttacacaaacagaatttaatgttttctcaatgatttctgcatttatttttacttgtaggggtattggtgctgttgtttata

SEQ ID NO: 3456 - DNA, 1392 bp, Glycine max
  Intron number 1 from transcript Glyma03g02160.1 (locus Gly ma03g02160) derived from phytozome v7.0 (chr-ID Gm03; pos 1908038 to 1909429)
tattctcttctcctttgggtacgtgttcttcccgatttcaattgtcttttctctctcgatttggatttttcaattgattttagatcttagttgattgtgtgtatgtgtgtgtgttttgtttttattttttggatattgattgaattagtgaataacattctgttaggagagagatgatactagttatttttatttatctgttgtttgcaagattaaaaagtcttgatatttaattaatttacacattcatttatcgaggaattaaaagaaaagggggataaaacaggaaatccgttgtgttattgtaaattaccgaaattgtctttggttttttcggataaaaaaattaagaaaatttattatattttttggtttttacacgacaaccttaaaaatagataaaacagaaccgagggagtagttcttattttttgggggtttatgattgagagcttctttggaagttgaaactttttttttaaaaataaatattactgggaacttgggggaaaatggttatttagctaaaataaacttatttatttgctgatttggggttttggactttggagataagttaagtagttttttttttctttcttgaattggagtatgtgagggaaaagcaatgggtgagagtacatgcagtgagtacgttgatgtgacgttagggtacatgcaattatggctactctgacgtggtaatttgttatgttgtgatgagaatggcgcaataaagactgcatggcgtgaagatcataaagtgtggttggtgaggaaaatgacaaagctttcagctctggattgagtattccagttgggggataactaactaatttaggttttagttagtgaagttcttgattttattctcgggttaggtggtggtgggagatgactgatgagaggggaaaaaatagttatagactttatgtgtgcatctctgcttgatttatgataattgttttgtttaaggggaaaaggggacaggtaaaaagaaattaaatattctctataattttgtctccttgtgatgctatgttttatggaagggagcatatggggatagagtctgtcatgtacgtgtgggagagaaacactggaaaacaaagataaattaggaaaataatgtaggaaacaaaacagtgcctttgcttgttatatcactacaaacctcagttagataccctctttatgttgtctcattggaaaggagcatatgatggttaggttgtttttacttgaaggttcatttcagtttcattttattttatatatttacgagcatgcccttagcttatattggttctgaattgtgaatatctctgtattgttgcctccttctgtccatttgcagctatcagtggataaaacggaaaggaaaacctgcac

SEQ ID NO: 3457 - DNA, 4704 bp, Glycine max
  Intron number 2 from transcript Glyma02g11440.1 (locus Gly ma02g11440) derived from phytozome v7.0 (chr-ID Gm02; pos 9624896 to 9629599)
caagtctcgtatttgcttgttacattattctcgtactttgttttactagaatatattccattgcaaaactaaggcgtagcaactcttgaatcttaggcttaattttttggttcttaattagttacaatttatcaaagaccttcttatataaagctcttagaaatatttaaaagttgtgacatatatatacttgaaccataaatactttatttaaagaagtaattcttagagtagcattttatttctaggaattatagtgcttggatttttttaaaaaaagaatcacgattttaaattttcagaaaataatacccctttctaattttaaaatttctaaaattttgttgcaaaattgaaaaatataaaaattaatttgaaaaataggcttcatagaaacgtttacaattatttgtaaaactttagctcaatctcttattcagccttctctatgataaaatgaaatatatgttcaatacgcttttagccatttatgaaaaatcatgattcttgatcatttctgtcaaggactttgtcacaaaaaaaataaaaatagttgaagaccattcaatgattttacttcacgttcttcaaaattcttctaaaccaaatagctacaaatattttatgagtagttatgatatattatgatttcagagaagataagacttttttcttccttgatgagcataagacaatttactttctaaaaaaaataattaattgatcttagaagtcttttgcataagtttattaactaccacatagtaatatttaatgatgtcactaataaagaataataggattggccaagagtatttgaggtcctatcctaggcaaacattatattaggactttttagtaatataggtggaatatgtattatataaaattatttttaaatttattttctttaatttaatttttttgatgtaagattagctattaaatttgtataatcaggtttagatatatatattttttcatttgataacaaaataaaatattcaattttcttaagacacattagaaaacaaacaagatttattaatttaattttaaaaacttctttcaactaaagtcacaatgaaattaataattaatgatattttatataaatgcatttggaaaagatcttttaataaatttaatattttaagtagtgttttaatttttacacttaaaatattttttctttttagttatatatacacataaaattaaaatttcttttagggacctaaaaattaattgaccttagtggcttgtcataggcaaattttaccctttgtattggtaaggttcttattagtgattctacaagttttctatatgaagtcttatttaccttctccttgtcatatcatttcaaaagcttcttagtaacatttattaaaatatttggcaagtttgtattataaaactttttcaatagatttacaacatacttcaattttcttgagaaataaaatttcttcaatgttcttagaataactatatgccaaacaaatactctgcaaagcctaagttcgtcatctcgtgcctaagcttgttatataaataagttatcaacataaaggcaaataatgataaagtcatatgcgtgccttgattaatttaggatatgaagagaaggttagctatgagttatttgaaagagtaaattacattttagtccctaaaaatataaagtaccatcataatagtttctgctagaaaatgtcaaatatattcttgaaattaaaatttgttagccatattagtccatgttgctagttttgttagagtctacaatgatagtaagttataaaatttaaggactataatgataagttgtacatgtcaagaggtaaaatgagtaaatgagaatagtttgaatttcagttttttttttgttgacatttttctaatttggaggactcttatggcaatgcctcacaattttaagaattgaaacaatccacttttatttcaaactcccaaagcatgttttaggtcatacaaagcttttataagttgacaaccttatatttttttcccttgaattaattggataaccttggggttgctgtatatacatgttctattgaagtttccattgagaagtctgtcttcacatctagttgataaaataatggctttaattcaagtaataataatggcttcgaagtagttagattatataagagaaaaccttttaattcttcaccataaccaagagaaatttatcctttttactctctcatcaagcttttctttgctttaggaatgaaaaaaaaatgatataccatgcgattaaagaatttcaggaataatcttttattttcttttgtgccaagtttcgtaaagtgtcatattagtcaaagtttttgttaacgtcttgtgaagagaattgattattgttttggaaacttatgctcaagagttatttagtagttctttggctttcatcgcactcgccattttggtaatgttttatattcttcttattgttagatcagtctgtcatggcttatactagttgaaagttacttttgattattaatgtcattttctttacagtgaccccagaagagtttgtaagtaaactctttatcaaaagttcttaaagttataaagttttgttgattttgatcttttataaggatccttgagaatttttatgatttatacaagaaaaattgtccacatcattatagaaatatcacaaataaatactaagaaatgtctattgttgctaaatgatgaagttcttgtaggtccctaatggtctgcctgcacgagctataaacgtcctttgactctccaaggtgaagttaggaatgacaatttttgaatcttgccatagattcaaccttcaattcatatacataatgattgatatttaaggaaggtcaatcaccacttctttttgtcgtaattctttcaaattttgataattcaagtgtcatcactctaactaaaatgaaaccttaagtagcagaaaaaccttgcttaattcataggtatgacatcccctcatttgttttcttttttctttttttatcagttatcatacatgtttcttttttttttttatcaaattatactaaataacattttagtatgaattggccaacactcaagattttgagatataatgaaggaacatagaattcttaggagtgaccttatcattatttcttgaccattcttggtttgagcttcccctcccatatcctcattaaatcttaataatcgcttttgtagttatatttttttgtgtttcttttgaacaatttttttattgtaaatcttgctctaaaagtttatctaaaaatagtctcatatatccttattttattcatgaacttcaagatagtttgtcaattcatgaatgttatatgtagaagaattcttaaaaaaagtgtttaattgcactcttaatctttctaagttgaattgtgtatgatttatgccttcctttttttatcaactatttaaacagttttggtatcatctgtcaatattcttctacttagaatcttcgaatttttttttatccaaatatttataggtttataatgtatttgagatatatagaataaattaaaagtttagaagtaagaaatttgatatagaaacttgataaatttggaagggctttacaagacatgagcttaggatttgaaaaagatactacctatggtccattttctaagaggagaaattttgttctaattataagaaacaaagttgagtcaaataacttctttgaatatcattattaggaatactatttcgggaccttcatataagaaataaataagtgcatttttttacgcaattataaaaaataaagactcattttcaaattattaattgttaattttattggttaaattataatttttatctccattaaatttctaatacacaattttggtttttttcgtgattttattccttaaattttaaaaatttataattttattttaatatttaatttttcatattttaattattcaacttaatggttgaataatgacatgttagtattgtgatgaagtataatattttaaaaattaattaattaaataaaaaaataaaaaaattaactatgcaaaattgaagttgaagaaaaattatgattttttttaaatctagggactacaattgcaaaataataaaaaaaaatcaaaatcacggattaaaaataaaataaaaaactaaaattacaatctagctaatattattttatactcataatttattaatttattatgaagtctaataatgacacttagtcactttccttgtaactgaataatacattgaactaaatataaatgctttgaccaatcagtcattgatttgtgtggaatttcaagaaagaaatttcacactttccttgtaactgaataatacactgaactaaatataaatgctttgtgtggaatttcaagaaagaaatttcactaaaaataatcggttaaatttttaattccgtatgaatatttgacccaaaaagtacaaatgggccgctttgatttattgatagacacatgcatcatgcatcgtgattgtaaattttttaattatttaacttttaaaaagtatttcatatattaattatttagcttctatcataggttaatccactcatcatttcaagttgattaattttttttctttgtgagaaacatttttctaataggtaggagatac

SEQ ID NO: 3458 - DNA, 761 bp, Glycine max
  Intron number 4 from transcript Glyma09g25050.1 (locus Gly ma09g25050) derived from phytozome v7.0 (chr-ID Gm09; pos 31122855 to 31123615 reverse strand)
caccaatattcacattcatagtggtttattaagtaattaccatgcacatttgcgtaaatatatggtctatagtgaaattatataaataattaatgtgatttaagatattaaatatttaattattctacatatataattctccatcttgaattgtcttctaaaagtttcaatgtatttacaatgcaataagctccaatttttcaaccaagagttataatcttatattttggatttgtttagatacacttttctaaaagtatttatagtagaagaaaataagagggtaaaatgaaataaatttttctataagtttaaattaaattatttataacttaaaaataagcttttcgagaagttaacgtgaggaagtttttataaattagtttatacataaattaatcttaacttttgggaaaaattactttatttttttttcttattttattcgactataaacttttagaaaagtttgtccaaacaaaccttggtagatgaatatttttttaaaacaaaattgttaaatggattggttgctctatataataaattcaaacttagtaaataggattattcccttcaagcatctttgcaaaaacaatttcatgagatcacctaaaggcaacctttgtaatttatatcacttaattgcaacatcaaccatcgtgttatctatttatatcaattaattacaacatcgatgatatttgtcaagttttatgggcatatctttatatgatttatgcaggtttacacaaaatagc

SEQ ID NO: 3459 - DNA, 2383 bp, Glycine max
  Intron number 4 from transcript Glyma04g03950.2 (locus Gly ma04g03950) derived from phytozome v7.0 (chr-ID Gm04; pos 2892412 to 2894794 reverse strand)
gggccgcagtccagcaaataagcaggtaatctcgttctcccaaacatgcagagacaaacactctccttgccattttatcaggtgtactccctccactcttaatacaagcaaaaataaaactaatactacaattaaaaaaaaagtattttaaagattgtttgattataaaaaagttaattaaggtcatttaattttattaatatcatttaaaaatagaaaaaaatattttttccaaaattttccttcattaaaacattatatcaagtattttaaagattgtttaattaaataggatcaacttagttactgtatttctttttaattactggatttttgtttatattttttttatcatttttaaagtttaatataacattaattattcttttgtctattatatccttatttttttacttaatttttaattaacttatacgtatgcattttattgtgaagtagaaatggaaagaataaaatttaaaacctcataaccattttattaggatcaagaaagttcattgcatttaaaaatctaaaaaaacagataaaaagaaacaaagatattaaaatttggttatactttttggatcaacatacgttttttttttaactttattagagagaaaagagtattaactacataaacaagtgtcatattaatggcatatttgatttaaagtacgagaatagaagagacattttttaaattagtaaagcataataactcccactaaaaaaatataaaatttatttttaatattattttcatctttctttttaaacacactataaatgactaatggcttgcttgcctggtagtgtcatgtcctgccatcagtgtggaacttgactaacttatttagagaaagtcttaaatatgaatttagtcatgtatgttcgtgtttttttatattagttttgttcttgtaaattttttatttatttttcatttttgtaagtttgtgttttctaaattttgattcttgtaagtttttttttttttttataagtttgtatttttttccattgagaaagtgtagctaagtagttggttgcgtaagatatataagttggtgtaaactttcttatatatgtctataaatctttcagataaaaaaaagtttctatttttttttaattttgatccgctaacttatgaacctggagggattaaaaaaaattgaaatcttaaatggattaaaattgcaaaagcataaacttacaatgattaaaaataaataaaaaatttatagaaatcaaaattaaaaagtgcaaacttaaatgaaataaaaatgaaaaaaaaaccttacaagaccaaaactaaaaaagtgcaaatttacatagactaatttcacatttaagtctttgagaaaaatatttgacttttttttttgtcttaagagagctttaatagaaaaaaactattttatataatttaatattttccaaacactattttaattagtataaagagaatgctttgctgttaaaatcaattgcttgataatcactatatatagggaaagggaaatatatcaacaaatcctacgtgtgaatatattcacttgtttcttagaaacaaaaatattatcaagttataatagataaaaggtaaaactcaaataaagttcattgttattaacaaatgttgacacgtgaatttttcttaaaattcctctatatattaaccaatattagattctagttttgctgttcttgtttttatgctttctgatgtataaaaaaacgactattatttaatgttagaactctcatatgttatcgtttggattgaaaacttgataacaataatatgattgtaaagtttatcctttattaaaatacttttaagggtataatttgttgacatatttgtaataaatagatatagtgaccatagatatttcccaatagagaagcgttatctataatctatcactaaaatataaacgatatagtgatatacccatttggtttatacagttttttttaggactcttctactccaactcaaaccacttctctagtatcataaatgttagttacttttctctcgataaataaacaaatttttgtttacatggttaagaaaacaacttaatatattagagttatttttaatactttatgtatacataaataaattaacatcttactcaaaaaataaaaaatacggatacacacagactcgaaagtatcttagtttccacaagcattggataaagcttctgcttttcattgcttgattcctctcaaaattaaaatacaaactttgtagtaactgatagagcttcggattcgttttcgtgatgtctgacattataaattgcaattattgtatctggttatatgtttgggtagcagtttagagcagattttggca

SEQ ID NO: 3460 - DNA, 7071 bp, Glycine max
  Intron number 4 from transcript Glyma09g15270.1 (locus Gly ma09g15270) derived from phytozome v7.0 (chr-ID Gm09; pos 17777687 to 17784757 reverse strand)
cgtcttcttggtgctgaggtatatcatttgttattgtggtgatagatgtcattatttgttaatccttttaatgacatctactgtgcctcccgagattatctctataaattaaacattataattaatgcaaatgttatcttgtgggtttgcatagtgtgttttgcgtataaatgtcttttaatctgtttgtttgtttcttttcccttttaatttacatataggagataggatccttccatgaataaactattcattgttcctcttttgttagacatacactaaacgtctttcacacatattttttggagcttgactaatggataaaataaactgaatatgtttgttctatatttcaatcatcagctttattcacagaataatttatgaatattctgaaactacatagtttgttatgaaagttccaaagtttttttttctacacacctaatacctatgttaaatattttagtatttatctatgtttggtagcttagttggtaagctttattcagaaggcagtagtgaattgttagtcactgtcaatagtttttctctctctcttggctcttgtatatatgtatcattttgaaatcaataaaagctaagagagaaagagtgagtttttccctcaactcacctcagtcttcaagttggcatcagagcgggtttcgtccgtcgttagctgtcatttctggcgagaccagggttaggatcgcctcgaaaaacgtgactcacccctgaaagtcatgccgtcaaaggagctcccacgcatcgccacgcgccgcctttgtctcgtgcgatttccagcgcgtgaagcccacgcgccgccgcgccaccgtcgaaagctgacccgtctggtcccgacagcttcgtcgtcagtccctgaacacgtttcaggcctcacctctcgcttccggcatgcttttccgtcagcccttgtgtgtcctccctttttcatgttagggtttgttgtttggatttgaaatggcctcctctgaacctgttttctccttttccgggactccaaccatcaccactgcaaaacttaactggaagaattatctttcgtggtctgcttccgtggagttgtggtttctcggtcaagggcaccatgaccacttggagaaagcttcagattctgttccagacgataaaagacctgaatgggagaagcttgactatcaactttgcattgtgttatggcaatcagttgagtcagatattttggagatccttcgatcatttaaatcatgttgttctttttggaagaaagcccaagaaatctttgctaatgatatccaaagcttgtttgatgcaatcatgaaggttacaactcccaagcaaaccagccatgacatgatcgctcatgtgggcaaggcctgggctgtcgtagaagagctaagaaagttccttgtagttgattcattggaagaagtgaacaagaaacttgacaagttctacatggtcctcattctgaggagcttacattcagactttgatcgtgtgcgtgatcaagtacttactggggaccaggttccatcaatggattccctcatcactagacttctccgcgtgcctcattttattgaaggatgagaatcctgctgatggtgtggagacgtcaaccatggttgcgtctcgaggtagaagaggcgatcgcaatagtagaggatgtcgcagtggaaggggtggacgtcctcattgcacctattgcaagaggatgtgtcacacccaagagaattgctatttgttgcatgggtttcacgacaaggtcgcacatgtctctagatcagaggaagaagagtctagattctctgatgaggagtatcaggagtatttgaagcttaaatctaagaaacccaacagtcaagcttaatcctcatctgtatcatgtttttcaacaacatgtatctctcaattcattgaaggtcctagtccttggatactcgactcaggtgcctctgatcatatttctggtaataagtccttcttttcattcttttcctttccaaaaattcctcaccttgttattgtagctaatggttccaaggttgcgtctcaaggaagtgatcaagtttcattgtctccctctttgaaattaaattttgtgttattcattcctcagtgtccctataatctaacctcattaagtcagttaactcgtttgttaaattgttcagtaacttttactgctaattcttttgttattcaggaacatgggatggggtgactgactagagaaagacatgaatcacgaggactttactacttggaatccaatccacctgggtcttgttttgcaatctcaaaacccaaacttttgcatgatcgtttgggtcattcaagttttccaaaattgaagatgatggttcctagtcttaagaattttcgagtcttgtcaactaggaaaacatgtcaggtcatcatttcctcaaactgtaccaagatgtaattcggctttctctaccattctttctaatatttggggaccaagtcgtgttatatcttttgattttcgatattttgtaaccttcatttataaattctccagatgtacttgattttatttaatgaaagacagatctgaacttttgcctatattcatgtcattctacaatgagattgaaaattaatttggaaaaacaattaaaattttcagaagtgataatggtaaaaagtattcctcttgtgatctctcttcctttttgtcttccaaaagtattctacatcagtccacatgtcctcacacaccacaacaaaatggtatagcagaaaggaagaatcatcatcttcttgaaactgtatgttccctaatgctaaattctaatgttcctacacatcattggggagatgtggtgcttactgcttgtttcctaattaatagaatgtcctattcttctgttgaaaaccaaatccctcactcaattgtctttcctcatgatcgactatttcatgtttctcctaaagtgtttggttgtacttgttttgtccatgatttgtctcctggtttagacaaactttctgctaggtcattcaaatgtgtcttcttgggttattctcgtcttcgaaaaggttacaagtgttactctccaaccacgagacgatactacatgtctgtagatgtaactttctttgaagacatacccttcttctcaccctccgtagaccatacttcgtctctccaggaagttcttcctattccttctccttgtcctctaggtaacttagaccaaaatgtcagtgttgtcccatcttttccatcaaattcacctaaagttgcctctctacctttgattatagatcaacacaggacaaggcagattgaatctccagtacttgaagtctctcctcgtgatccttgttcttcttcaaccagttctcaactcatggatccttcatctctttccacttcttctcatcattctgactcacattggcccattgccatcaggaaaggtacttgctttactcgtaaccctcattctatttataatttcttaagttatcaccgtttgtctctttcatatggttcctttgttttttcattgtcttcccttactattccttccactgtccatgagacacttgatcatcctggctggcgatagactatgattgatgaaatgcaagctcttgaaaataatggtacttgggagctcgttcctcttcctcctggtaagacaactgtgggttgtagacgagtctacattgttaaaattgggcccaatggtaaggttgatcggcttaaggttcgcttggtagctaaaggctacacacaggtatatggccttgattactatgatactttctctcctgtagccaaaatcatcactgttcgtctgtttcttgctatggctgccatccgtcactggtccctccatcagtttgatattaaaaatgccttcctccatggtgatcttgaggagtatatgtatatggagcaacctcttgggtttgttgctcagggggagtatggccttgtgtgtaaccttcaccgatctctctatgggttgaagcaatctccttgagcttggtttggtaaatttagtcatgttgttcagctttttggactgaaacgaagtgaagctgatcactttgttttttactgtcatacatctcctaaaaaatgtgtttatctaatggtttatgttgatgacatagtgattacagagaatgatactactaagattgtctagctaaaagagcacttattcagtcatttccagaccaaagatctgggatatttgaggtatttccttggtattgaagtggctcaatcaggagatggtgtagtgatatctcaaaggaagtatgctcttgatattttagaagaaacaagtatgcagaattgtagacctattgaaagccctatggatccaaatctgaagctcatggcagatcaaagtgaagtttatcctgacccctagagatataggaggcttgtgggaaagctcatttacctcaccattactagacctgatatctcctttgttgcgggagtggttagccaatttatgcagaatcctcatttggatcattggaatgttgtcatgtgtattctgagatatgttaagagagctcctgaacaagggttgttgtatgaagacaagggtaatacgcaattattgggatattgtgatgctgattgggctgactgtcccatggataggaggtctacatcaggctattgtgtcttcattggaggaaatcttatttcttggaaaagcaagaaataaactgttgtcgctcggtccagtgcagaagttgaatatcgatctatggctatggttacttgtgaactcatgtggattaaacaatttttgcaagaattgaggttgtgtgaagagttgcaaatgaagttgtattgtgataatcaggctgtttttcatattgcctcaaacccagtctttcatgaaaggactaagcacatagagattgattgtcatttcatacgagagaagcttctgtccaaggagattgtcactgagttcattggttctaatgatcagctagcggatattttgactaagtccttaagaggacccaaaattcagactatatgtttcaagcttggtgcatatgatttatatgctccagcttgagggggagtgttgaatattttagtatttatctatgtttggtagcttagttggtaagctttattcaaaaggcaacagtgaattgtcactgtcaatagtctttctctctctctcttgtgtcttgtatatatgtatcattttgaaatcaataaaagctaagagagaaagagtgagtttttccctcaactcacctcagtctttaagtacctatatttaaaacttttttgaaacaacttttgatccagtggcttacacttgatgtatgtcattttttggagaattgttttgtactgtatatgtatagatgcatcatgctaaaagacatgataaaaatagagatatgtaagatttgggacaagatagtgacactgacatgagaatgtcataagcaaagagtgaataggcaatttagtccctgagattgtatccattttgcatattagtccctaacttaatattaaattcaaaatagtccttatctttgcataagtgttgtaaaatagtccttccgttaaattttaaagtaacgccgttagtgaggtcaattttagtgccatgtggactatccaacgtggcactaaaggatgacgtggcatgacatgtggacgtgtcttttaaaagatgccacgtcatttgatgataacaaaacgagtaaataggcaatttagtccctaactttgtacccctgttgcatattagtccctaacttaatgaaaaattcaaaatagtccctatcttttgcataagtattgcaaaatagtccttccgttaaattttaaagtaacgttgttagtgaggtcaattttagtgccacgtcatttgatgatgatagaatgagtggcttcttcaaatttgatggttctgaaccaattgaggcatatatatgaaaaagaacccacacacatttgcacaaataaaaagaaccaaaaatccaaagcaacaaccttatttctgtagccgtcaacaccaatgggcgaggtctgcataaccattctcttttcctctttttttttcttcaattaccatcgatgtatcattttgggttttgatttttttttttgtgttttgaataggaagagaaaaaaccagaggaaaacaaagtggaggagaaaaaaacaaatgaagaagaaaagaaagaagaagagaaaaaaccagaggaatcaaaagatgacaaggaatccaaggaggaatctgcgccgccaaaaattgtgcaagacacaacctttgcaatgcatggacactttaagcatgatttctggcatcttttaagttagggactattttgcaacacttatgcaaaagataaggactattttgaatttttcattaagttagggactaatatgcaacatgggtacaaagtcagggactaaattggctatttacttgttttgttatcattaaatgacgtgacatcttttaagagacacgtccacgtgtcatgccacgtcatcctttagttccacgtcggatagtccacgtggcactaaaattgacctcactaacggcgttattttaaaatttaacggaaggactattttacaacacttatgcaaagataaggactattttgaatttaatattaagttagggactaatatgcaaaatggatacaatctcagggactaaattgcctattcactccataagcaaatgaaaaaagataaaattcaacattgtgttaatacaattagctctatgtgactaattgtagcatcaaaagattaagtgttgattgatttatatgaaaaaacacttggatttatttattactttgttaatttgggaattgtatgctctttctctacattggacaaagtgttgtgatgcgaccccatgtgtgttcaaatcttgttatattgaatttaaatatctgtcttcatttgaaaaaatggtctacacgttggtctatctaataggataatcttgtaatataggcgagacccttccattctgggactactacattgaa

SEQ ID NO: 3461 - DNA, 2899 bp, Glycine max
  Intron number 23 from transcript Glyma10g02410.1 (locus Gl yma10g02410) derived from phytozome v7.0 (chr-ID Gm10; pos 1677869 to 1680767 reverse strand)
agcaggtatattagttttatttcattatctatgaattttctttacaatttattctctttggaatagtgggtgagccattgcatagcacaacaataagattgctgccttgtgacctggttggtctgggtttaagtcttgcaaacatttttgggtcaatagggcaagattgtgtatatatgacatgtgactctgctttaaccccacggcagagggagcctcatgcactgttccacatctttttatcctaaaagaagcaaggtgacttgacacatgcacactagaaaaaactgctgactgctgattataataaataaataaataaataaaatatttgtcaagaacaataaataaaattaatctaaggtaacaacttgaaggataatatcacaagcctcataaggtcacttgaaattagaaactatcgactaacaataaattgactaagaacaagacaaagctaaattaaaaatctaatcctcctactacttttcctccctaatgtagtcatttacattgtcatctagtgaggtatatccctattccttctctcccttcaattcttcaaaattaaataggttaaatatgtttttagtcccctacaaataggaaatgtttgctgttagtccctaaaaaataaattatctccttttaatcccttgttgatggaaatgtgttgtgtgtggtctttattttcataaatgaggagccaaaaggacacagatttttgtgaaggacaaagatcacatctgacacatttatcttttagggactaaaaacatacatcatatttgtatggactaaaatatattttggacattatccgtgtcctgatatgtgttggaatcagtgcttcataacaagccacatgtattgggttatgatgttggctagttcatctgttatcgttgatggtaagcacatctttgtttcttttgatgttgttgaacaacttcatattgttaacattaactatttcttgccgtatcgatttcttaaaaagtttaagccatagctggtttttgtcaccattaattggttgactcactcgaataaggggagcttactttgtataaatcacaccaaaatgaatggtaagtagcaaatagagtgattgcatgctttgccaattccttcttttttgtgaagtgcctcaacaagcccaaggtacttaaatgactctagttaaaaactaaagacaacaagagtcattccctttgaattgtcttctttatcaaaggaagcttttcactgtctgcaaggattaagtgtatggagtatggactacagaatgggttgcacaaggagctggttaatgatgtattttatcatccaacatttactgactaaaacatagttgcttccatcattaatgataccttgaaaatttttcctccttcaaacttctccagaagagaatcaagcagcacaaactgttattgccagtcttcacaagtttagatccatcaatcgataattgcttaaaaatattgttccaatgggagagtttaccaagaaattgatcaaacgtctttccttcccatcagtccttacatctaacataagggagcagccttgtttttccccctaatccttctacaaacagatttagaatactccacctcattgttgggaattggaactcttgtgacgtaatatcttgtatagcttgcaaatttgaccaaaacttccaacatttgtaagcttttctttgaagttcttcaatttgataacatttaatgatattgaaaccaagatatatattgagggaccctagctctttctcatttgttgcatgcctctcttatgttagtttcccgcaacctcccttttccttttctatgactgttgctggttttctaagaaacaaattcattggccttttcttagcaacatttgtgcccccctcctccccctccttttataatactactaggtgctttaatttccgttaggtttgtcaagttcctcctcagtttaaccacattccaacttgtcaaggtcaagatccctcacatctggaatctctatgcaatttgcttctttatcttgctcacacacatgttcacaaatcacaacccttctctaattggtgcaagttgcaacattacttatcttccccatcagtagttgtctggcttctgctttcgtaatccctcttttaatttttttccacaattgtaattgtacacaatagttttcatgtcattttcttccatttagtggcaatgttggactctggggatgtcttgccaccagtccaggaactctgattatcaacaccttcatttgccattattctagaatcactaagtgcaaagagaaaagttagtgtcactgaggagcaaaccaaaaaattgagggagagtggacaaaaacaaatagaatcacatagacaccgtaaataatggaaaacaggaaagaacagaaatgaaaacagaaacgttgagaagaacaggcaggaacaaagaaaacaaggaagagaaggaactcagaaacaaggaaacacatgaaggcacaagtggtcagagaggttgtgctaagaaatcaatgacaaagaaaagtttgatgggttgtttgccataggtggaactcaaactctggattatgcatattgttgtttggtttttgtagtgcacaaatcgtggagtaggttgttccagttcctttaaaacagtgaattgttgggatgcttaaatgtgtgtgtgtgtgtttgcaatacatatatcaacaaaatctaaaccttttcaccattgcataattcaaaatgtacaatgccattgacacctgggagttaatttcatgagagtccattttatggccagcaagggtagtgtataatgtttcatatgtatgcatttatgcaggtttgtgttagtgtatcatcggagtcaacaaacat

SEQ ID NO: 3462 - DNA, 1540 bp, Glycine max
  Intron number 1 from transcript Glyma05g13110.3 (locus Gly ma05g13110) derived from phytozome v7.0 (chr-ID Gm05; pos 13639099 to 13640638 reverse strand)
cgagtaattgcagaaaccccaaccctcctttcctctccctcctcctagatcgagtcaggttgttttcgtgtttctttctctttctttttttctttttctctttcccaattttgtttctgcatttatcgttttctgacacaatgaaattgttttcttaatcaactttaccatcaattaccctttgaattttatgattgatttgggtttgttgcaaattctccatcttttttagtactatgattccagggttttctgctattttttgagcttgattagtggatatgtcattgatcggttggaggatttttgtgtgggggagaaatgggattgtatcaatttcgtttttttttctgtcggtttgaattagaaatggaaataacgtcgtttttcatttttgggtattgataattcccgaagaaaaatgcaaaattcgcatgcgccttgattgccacaattgatttagtcgttgcaattgcaaatttgaaaaaacaaatataccttttttttttccttttggttgtgtaagtcccttgctcggaaatgagttgagggattgccttcactgggttcagggttttctattatgtaacctttttttacttgtttttggtagcatattaactgatcacttgttcattctttctcttttagggtatcctatttttggtaaccttcacttgatcactttttctgcctctttagaattgaaacctttagttggtagcttcacccttcatcaagattcatgagcatagaaccccaccgttcacctaccagaccaccaccgcttgcatcttcccaatctctgctcagtagtgattaatttgacttctatgcatggagggaagggggtttgactgtgtgtgtgacttgtgtgtgggaatttgggaactaggggatttgactgtgtgtgtgcatgagttgggtgtgcccatgaagggtcaagggttgggggattatggtgaaagcttctttctttcaatgatgtatggtctataacaatatttagtctcaaatctgttccgctgttctgttttctcttcttgcgtctgtttgtgctagttaaaaaattgtgcccccttgtctttttttattcaccaagttggctattggtagatttaccttccaaagttcattccttgatggataatttggcgacaactgaaatgtaattgctgaatgcataaacttgttagtagacaattttcattatcaggggttaatttgattaattactgagaaataaatgaactctatctgtctgcgattcatcttatatagttttacaagaaagtataggcaaaacacgtaaagtttagcattgttttggatttgctttcatattatttgttgatgttattgcatcttactctatatctcttcatagaatggatagcactgtaaaaaatggtttatactgaattaatagaaagaaaaggctaataatatttgaaatgttttcctagtagacttgtgtttattcttattacacttctctttctttaccttgaggatgctttattttcatttgtgtagaatc

SEQ ID NO: 3463 - DNA, 1226 bp, Glycine max
  Intron number 9 from transcript Glyma05g09280.1 (locus Gly ma05g09280) derived from phytozome v7.0 (chr-ID Gm05; pos 9026767 to 9027992)
tggaaggggcaccacacttgaggtatgcttagtttttaaatctatcttgaagtttctatcatgtttgcaccacctaggtaggtgatgatgggtagaagcacaggtttaggttgtatttgagaaagccaagtcaatttctatacctccaaaataaagaaagaaagaaagaaaataaggagcagttttcagacacaaagaagaccaatgtatattaagaaaaccaacagagaactactcccaaaattgatattctaaactgctgaatttctttctattttttggtagctcttgcttattcttatataggtttcattctttagtttcagctaatttcaaagttttggctagtgacttccagtgcggagatctccttgaacagttttttttactcatttcccctcaaacaattcttttttggaactaatttatcaatcagatttttggttctttgtttctagatttgtttcaaaactatttagacaacaatttcggggaattaaaagaaaaagtttcctccctgttagagatggaaattggagacaaatggattgtttcatgttaatttcaaatatatttttggttaggagctttttttttactgcggtagttgtttatttgcttttaaaaagtaacaggtaaacaataatttaaagccaaaaacataacactagtttgaaaagttgcattttgaaatttattactgtagtatgttcccttaatctgaatctgctacttaatatcttttaccgaaaatcactatttaatatagttcatgcatgagccttcataaaaaatgggaaattcccgtgcctcttgttctcattttgtccaagtactctttgaaattctctaactgtcttgcatcttgaaactaatatcaaatataatatttatgaaaacaaatgtttatgcacactttttattcatagagaattttgtactttgaaaatacaaaatttcttagtttgtaattatatatataaaaaaattgtaatacagtcaagcacgttagtgaaatttgcttgctttctgggttactgttaacaagtgtttaattgaggaagtacttgcttttcagtcttcaatctaaacaagagcactttcttacacaaatttagcataggtatgcaagaccagtattcttgcaaatcaaatatgcctttctgaattcagtgatgttgtaacactcaggtattggaagttcagcttcctgggaaaaaggtagt

SEQ ID NO: 3464 - DNA, 4211 bp, Glycine max
  Intron number 3 from transcript Glyma06g46020.1 (locus Gly ma06g46020) derived from phytozome v7.0 (chr-ID Gm06; pos 48743413 to 48747623 reverse strand)
gaatcaggtacgtatatttttttttggcaccaatagcttaaattgtaggcatgtggatgcagaggaatgggaatgctagtgttttgtgctcaatttttgtagacggcaattccagtgttgatcggaaccaagtttgatgcttcattcagctctctattgatttgcaatggaccatagccaatgaggtaaggattccaatatttaacatcaaaattgcagtttaagtatgatcttcctcataacaaaaggggagtgaaatcaaacatattatttcattaaataaattgtttctacgtattattccactaaataacgtgaatataagattttaaacggtttccttagttctttgttttccattctccattacagaatctagaaaagagctcaagtatgaaagcacaatccacaaagattattttgaccagttgctccttgttgaactcaagaatgtgtaaataacagtgatgaaactcatctcctgaatgttgtcgatcaaactcttaagaaaatggtattcggtagctttcattgatatgaaatggtgaataaatacatgatcctctctaccatctttttatgattattgaggataaaatatcagaacaaaatcacaaacaaaaagaaaaaaatatacaaggatttggatcaattacaatttaaattcaaatcataggtaatccctacaattaatggattctaacaccccatctcaaattggtgcataaatgtcacacattctcaacttgtcaaaataattactaagggtcttggatgctactgccttggtcagcatatcaacaagttgttgttctaattttacaaaaggaaagacaataatatcatcttcaatcttctctttgatgaaatgtctgtcaattttcacatgttttgtacgatcatgttggacggggttgttggcaatctctatgactgatttattatcacaataaagcttcattgcatccttttgttcatatccaatatcctttaagagacttctaatccataacagttcacatattccaattgtcatccctctaaacttcgcttcgacacttgatctaacaactaattgttgctttttactttttcaagttattagatttcctcccacaaaagtgaaatagtcagcggtagaccttctgtcatctgctgattcagcccaatcaacatccgtataaccctcaactttaaggtgaccatgatttgaaaataacaaactttttcctagtgcagattttaagtaccttaatatcggttcaacaacatccatatgtggtttttttgggtcatgcataaattggctcacgacattgactgcatatgttatgtctggtctagtatgagacaagtaaattagttttcccactagtctttgatatcttcctctatctgcactggttgcatcaacacaatgaaaattcttgtgattttgttctatgagagtatcaattggtttacacccaggcattcatgtttcagctaacaagtctaaaacatactttctttgagaaagaaagataccatgcttggaccttgcaacttcgattcctaaaaaatatttgagatctccaagctgtttcatgtcaagtttagaagctaaatgtctctgtaagcttaaaattttatcaggatcatttccagtcacaatcatatcatcaacatatattatcaatgtagttactttaccttgattatgcttgagaaacaaggtgtgattagaattgttttatgtgtaaccgaaaaacttcatagacttcgtaaatcctccaaaccaagctcttggtgattgtttcaatccatatagaacctttttaagcttatacaccaaaggaatatttgagtactttggtataccgggaggaggatccatataaacttcttccattaaatctccatgtaaaaaattattttttacatcgaattgaagaaggtgatccatcttgatttactgctagtaataataacaccctcactgtattgagttttgcaactggtgcaaaggtttcttggtaatcaaccctaaaggattgagtgtaaccctttgcaactagccttgctttatatctctccactcttccatcagctttatgtttgacagtaaacacttatctacaacaaattgtactattttcatctagtaaggttacaagtttccaagtagtatttttctccaatgcttgcatttttgttttcattgcctggatccacctagaatccactagagcttcctgcaaactactagaagtaaaggcagtagataattgagatacaaaattgacatatgacttggacaacctttcagataacacataattgtttatggggtatttgactttacaattaagaatgggttcatacttaattgggggttgtcctctattaatacgaggtggaagagtgtaagggctcactatagggtcagaatttggggtagaaaagacattgcattgtatatcagtattatcatcttcgaccatattctcatttacattattctgaatttgatcctccatgttctcatctccattatcttgaattccatcatctattgttgttggcataacatcaaataacttgatatctttgtcaagtctatcatgattttgcacctccaaatcacccccctcccccccgctttgaggtgaagaatgaagtgttttcaagggaaaaaacaattcatgctcatgaaatgtaacatccattgatacaatttttttttgtagatggatgattggccttatacttcttttgagtggtgttgtatcccacaaaaacacatttcattactctagattctaattttttccgctggtgaggatgcaaatgcacatatatggcacaacaaaaaatatagggtggtaaatgattgacaaaattaagggtgaaatgatgagaaagggtatcaagaggtctcttaaagtttaacacacttgagggaactctattaataagataaactgcagagcctaaagcttcaccccataagtaaaaaggaatattaccgccaatcaatagtgatctagtaacctctaaaagatgtctattttttctcttggctatgccattttgttgagggaaattaggatgtgatgtttgatgaagaataccagcagatttcataaaatttgtcaactcatttttgtagtattatcctccattatcagacatgactatctttattaaagtattaaattgtgtgcttatcattttgtgaaaaaattgaaaaaccttacgcacatcacttttgcgtttaagaatgtataatcaagtcattcttgtacagtcatccacaaatgtcacaaaccatcgcatttcattatgtgtgtgaagaagggtaggtccccaaacatcagagtgaataatagagaaaggggcattagctctattgttatttataggaaaagtaacacgatgactttttgccattacacaagtttcacatttaaaatcagagatatgacaatggttaaacaatgaaagaaataatcttttaagatggctaaaagatggatgtcctaattgcttatgtcattgccaaatatctcttatattcttagcttgtgtttcatcacttatagagtgagccaatatttttcctttggtatattgagaattaccttcaagatagtataatccttcacttcttttaccacggctaatcttctcattcgtatgtatattctttagagtacaatatgtgggaaagaacaagaaaacacttatgagactaagataattgactaacagagaaaagattgtaattgagagaaggaacaaaaagcacattagaaatggataacaagggagaaatggatactgtaccactacccaactagagaagacacaccattagcgtttacaatgactgaaacataactattagaggaaatctgggtaaacatatttctatcacaagtcatatggtttattgcacctgtatcaattatccaatcattatccttaatagtaacagaaaaaccccaaattggttgaaatgtaccaacaaatccagtaacaacagtggagttgtccttgggagacttcaccttttttctttttggtgccatttaggataacttgtatcatcaaaacgctcaggtttaaggattgaagacaaatcctgcatatgtggaacaaaatctgattcatttgacctattcttcattttcatactcaaaagctaatctctaattcctaaagaagaa

SEQ ID NO: 3465 - DNA, 2121 bp, Glycine max
  Intron number 2 from transcript Glyma16g31920.1 (locus Gly ma16g31920) derived from phytozome v7.0 (chr-ID Gm16; pos 35170585 to 35172705)
tctgttcaagaacagaccaaaggctctcatttctagtaagatttatctttcctttccttccattaaccccctctttggaatatatatttcgttttgtagaggacagttgtgaagcaacatatgacattagaaaaagtgtctcaacaacatttccaaaacttttggtgtcttcatagttagggattcttagaaacatttaggtgtcaacgtgtgtgacgtcgattattataatcccttactttaatcctagatctcatttgtttatttttagtgctaatcctcactaattgctatagtacatgttccatagtactatgagtgctattttatatccggggtacttcagaatttcttcctttcgttcagggtttaggggaaaggttattcatatttataaattcttggtccctctgcctacttttaccacttttgagaaaagagagagaaaaaggacgtgaagtgagactgttctggattttttttcttctcttaaataatagttgatgaaagggggaaatatatgaatttagtagtttaaaaaaattggaaaagattttgttagaaaaaataaaatccactttaataatctgtgtaaaaaggagcaacaccgggaagtttcaatttaatggagctagattatatgatgtagactagaatagttggaaattggaattcttccctttgaggctctttccctgtgtacatatgtccatgaataagattctgttattgcatctgagtctatcttactgtgggtctcacatggttgctgtacagcttaggttgcaacaactacaaggggtcactgccttttattggcattgctaggaaaaaccctttaattattcttacactatctatttgcacacgttactttttcttcttcttatcttgttctatttttttgaatcaagacgatcactcctaccccaaaaaaaagtgttttgcaatctttgcatcgatagtggtttcctctccacttcaatcaagcaatcccaactttgaaaaactctcaaaatttctctttacgtgcttgtttactagtatatgtccttctcatctttaatttagatgcttttccccaatcttgtcttcgagtaacccaatattcaatttctaatatatgaatagtaggtgggggcatgttgcatataactccttgaagttcatcctgaaagatcacatctttttttaattaactataaaaagcaacaatcctaacacattttatcttattgatactaagatgctcaatttaaatatctaaatgtccaatctcagtagcattctgatttattctaccttttttctaaattattgatctaaatatagacctttaacaatacttaattaaaagactgtacaatccaaaaggccgttgtcccatacgcaatagcttacacctcacaaaaagaacttggcagattcttggagtaaagtgatagcttttttggcatttctttcaatcaccattagttacacactttaattttctttcctaatcagaaaatgattcattttatgtttaatatgcaagaataagcctttataatttatttacaaggcagctttgaattagaacattcatggaaacctgccataaattagttgctaaaataataagcaagaatatagggttttcattgcgcggataatatgcaaatgcaacctcattctgccacattgaaagacctggcaaagctgccatttcaattttaaaagggtggaaagctgcggcagtttccattttggcataattagatggctaaagtaatcttcaaataaattaccttatcatatacattaaaatactctaaatttttacattttttttacatgtagtttgcatatcgtgttaggctctgtttcacatacaagtgtgtctcttgcataggtgtgaagatagtaaaggacaccaaatagtaacatattgatgctttgaatactaacaaacatagttcaggacatgtcaattttgcatttcgtatttctttttgtctcttccattttccgtgccttacatttactttgtgaaattggaggctacatgctaatgttatccttcttattttccttgcttttcaagagccacagataacatccagggaaagacaaaagcct

SEQ ID NO: 3466 - DNA, 2173 bp, Glycine max
  Intron number 13 from transcript Glyma01g45540.1 (locus Gl yma01g45540) derived from phytozome v7.0 (chr-ID Gm01; pos 55764227 to 55766399)
gtgcaggtttcttcattcccttcagcataaggtttgagaccaatgcttctaattggtatagctatttatttagttatcattctctgggcatctttttcttcaattcaaagtataatttgttttcagtaaaaaatcatttgttttttaactgcttatgtattgcatgtgttgtagaaaactacttttcaagggtactggtactcattgggtatacttggacttgggtactcatcaaaattaatttaaaaaaaaaattatatgcaacttgagtacgattctgatacaattaggcactgcttgaattatagctaggtatgccttatgtattagctagatcttgttttcccaaaaaatgacaggttattaggtaaacttagagatttatttaatcatttttgcaaatgtgctatttttcctatttaattgaatcctttcatccttatttgtgagatgcaagtttttttttatttcttttattttaaagcccataaatcaaaatcatactatttttcattatttctaggtcctctgaccttgtgatgtaattctttgatattttgtgtttgctgtatgcttgtacactgatattaatacaagagagttatactgctcaaggatgtcaaagtgttggaaagccaccttaattgtggccccccctagcccaccttagttgcgacttctttgggggcttccttaattgcaacatcaagagtgatggtagtcccacatcaactagtgataaggccaaattagtgcatataagtggaggacaatgctcaccttacaaaccagttttgtagggttgagttaggccctaaacccacatttttaagatggtatcagagcctatcctagatttattgttgggccacttgcatttgtcatgctttaggctggaggtcctgggcatgaaggggagtattggaaagccaccttagttgtggtcccctcctagcacgccttagttgtggcttctttggggattgccttaattgcaacaccaagagtgatggtgtagtcccacatcacctagtgataaggccaaattagtgtatataagtggggaggagggggaaccctcaccttacaagtcgattttgtaggtagtgttaggccctaaacccgcattctaagaccaagcagctgcagctttggctaatgactaaaatgagagctgaataagggcagatgttagtcagttactccattgtatagaagggattggttataaataggggaaatcagattatagggattcattctgtgaatttgattgtttgtgtgaaaggagaaattcttttggaaaggggacacccttggaggagagacttctctcctttgttctgtacatttttgttctaccaataatatacttcatatcttctctctgtcttctgttctttggttcctaactctcagatttagaaggaagaatattattgtatattttttatgaggtacatcaggtgcctatatacacaagcctgttggctattttaggaaatagggacagttaattctaggggacaaatccctgtgattatgggattgcttcctaatatacacacctagtattaatagcaagatacagaacaattacaaaataaaaatacagcagggataaaatataaaacttcctaaaatagaagcaacacggttttgacactctccctcaagctggtgaataagtgttctccattcccagcttggatataattctttcaaagttactgccgttcagccccttggtgagtatgtttgcaagttgaccctgagtggaaatttggaaacactgttttgacactaacaggcttttatgcttagcataacataagaggaaatttggaaatattgtttattatgtgggatgcttttaagatttttatgtaggaacttataaacaaattttagagtcatctcagcagcatctctattataatttttaaatgttgtagaaatacaaaaaatttccaccacatataaagggttatagagagatgaactttgttgatctggattaccatattttccttctacctccctcaattgttaatttcatagctttctagtttttgataactttgatggctggatcttgtttacatggcgtagtaattcaactattttataaatcttttggatattcctgccatttattatgtaggtgaaagat

SEQ ID NO: 3467 - DNA, 3169 bp, Glycine max
  Intron number 1 from transcript Glyma10g32500.1 (locus Gly ma10g32500) derived from phytozome v7.0 (chr-ID Gm10; pos 40970038 to 40973206)
cacagtggctttcgcttccagatacttgtcgcctggtacacactacatacatacgtagttcatttgaactgaaccacttatgcttttctataaatgaatgaatcaatgattttggttattcacttgactagtggacatggtgcagagagagagtaagatgtgtagagttttttaatccccaaattgagagtgcttttcttttgttacacgggggtttcagtttgcagaattgaactaaaatgtgactggagatattaataattaataatctaaatcaactgtaaaaacagaacacttctgtaatagtaaaataatctaaaccaactgtaaaatgtgtttctatcttgctggagactgtgaatcccttgagctacatgattgtatttgtattcaattctcttttgtgattaacttgttgcttgagcatttcttttcttccttgtgcagtagctttagctttgtcgtgtacaatactaaccttgagttcattgccacttggcagaggtttctgattctctgatctggaaagtcaaaacggtagtacggtactatccagttatgcttttataatttaaacacaataaatgaccctttccatctcctgcacagtgccttgatggaacttcaaggttccaatgacctaaccatagaaaaggtagtctccaatgtcttgaataccagttctgacagtagacaaacaactgttattgtgttcattttaatcaccatctgatagaggggttctagagacacatgatttcatgcttctttggtgcctgggcgagttcatgacgtgaccttagtactgaaaatctgtagaattggtagaattggcccgcagaatcatatacttggcagaattgtagttttttttttatctgcttgacaggtcaggtttaaaagtgttttgcccattttgggcttctacaaacctaagcctgtaaacccaatgctcacaaaccaagtgctcactaaccccaacactaagagaaccgagaaaaacaactgcttgtattcattttcaacctctcacaatcctcccccaaaactactgcccgacttcactgcatccagagctcttctctgttttaatctggttctgttttgttactctgcagctctaccctctggtttgctgtttttctggttttgtttgtctggttggacttttctggtctgtttatctatttcgctgttgctgtgatgaaggagatggagaagatagaagaaatgacaatctctttagtgattatgattttaatttggatgatctaaattagaggtctcggtgttcatgtcttggcattttgtaataggagttggcagtactgccggaggaacttacagcttgttctgcatgactttatttattgactttcatatgctatgattaggaatttaagcttaagtatttgatgtgtgttatagaggtatttttctcttatttatgttttgttatatgcatttatataattttatgaatcttgtagaattttatgctgtgttttgattccacgatttacagttctgttttcccttcctgagtgagtaaaaaatttgagtttgactactttgcttatgctgatatgctttcaagctagatcatgtgagggaaagacttgtaatgttgaagttctattgatactttgtagcttgatggttatagtttatcataagccatcttaagcaccagcatttatcgaatgccaattgataatgttattatgagattttccaagtggtggtgcttagatgtatatgccaattatgtctaagaggctgcatttgctgccctaatttgagaatagcaattagattaaattgaattatttaaaagttgctaactattaagttttgattgggagttcatctggacactggaggagtgtgctatccatattttagttaaatttagattcttaagagcaatcagcatgatacattaaaagaagggagtttatttattttccctgtagaaacatcatagaaataatatttgagtaataactagagtagagaaaggagaaagatctttgtcaataacaaaatgaggaaagttaagggtttgttttgattgttttgattgtattattgttttttagtttttaaaaactatttttaaaacaactttctaaaactaagttttagagagtagcagtaagggaagatgtaaaattacattggtaatagaaacaaaacaacttagagatgttttggtttattggttttaaaaactaaacaagagatattagttttgaaaatggttttcaaaaactaatcttatcagacaagttattttccttatattttttgtttctaaaaacggaaatcagttttcaaaaataggaaacaaacgtgccctaacactctaattcttgaaccataacaatgttggatgtattgactattgaaatatgacttatttagcatagtattgacaatgaaaatctgaggctttcttttatttcctttcttagtcaatagtaggttaaggggatacattacgttttgtaatttactttttcatgtcctaaaactattcaggaaaataaaccatgagtcttctgtgctatctgaaaatcaatgattcgcctggcggcctggcctggattaagtattaaggggaattttgtccttcatgcttatttaataaaacaaacaattctatgttattttccagtccttgatgactgggatgaatattccttttgtttcccctgctccttgcttcctttgttaaatattcttattcttatgcattgtggtggaagtggttgaacactcacatgattcacacaaggctgaactttgagctacgtgattttatagaataaatgttctgtgagaatcacctgaaagcagaatagggcattttattttagatacattaaatggttgtcatgaagcttaaaataaccattaaaaaggaataaacttctcaataatagtgtaaacttaatagtgatgctatatagactatagatttcctatgttttgcagtaatagtactagagatattctatgcagtttttgaattgttatttctccaaaacatcactattattttttaaaattctccttggtgtattttttgtatgttcctttcatctatatctgtttaattttttcattgatgcaatatgaaaacaggttaagtcattgcttgctg

SEQ ID NO: 3468 - DNA, 1546 bp, Glycine max
  Intron number 17 from transcript Glyma11g08140.1 (locus Gl yma11g08140) derived from phytozome v7.0 (chr-ID Gm11; pos 5759132 to 5760677)
gattgcaaaaagaacaggagctgaacctagtgcaagtaagtataaggaagctcaatgttgttagtgttgtatcatcattgttgatttaggaaaagttttttttttaaatttcttgtttctgttattgaatgattgcctaaataatttcatggcatgctaaagatatttagcagttgcattctttgcttttgatcttggaagtttttttatcctagtataattgcaagagtgtagaataataggaggtatgggctctggattctcaactgttggagtccagctgttcactgacatcttcgcattgctgatgctggtcatgccagcaccattttatttgacaaaaaaataagcatttgctgaattcttcaaccagcagtttgtttttaatgctttagactttatgattctttttcagcaatttccccctgtggacatggatccagatttgtgatgatttgagaaatagaatgttctggaagagggattaattactcatattcagctttaaaatctcatcctcttaatgctattttctatcaatttacttgtctgttgtgagagtgctgtaaacaggaaaaattattcaaccgtgtccttggatagttagtagttggttaggttagttatgccagctatcactatgacagctgagcctataaatacactgatgtaactgttacccttggtgaatgaaatataaaatcatattcttggaacttcaaaatggtatacagagcttggtgagatctgaaaataattctcttcccacctcttccgctcccccaaccttctctcacacctttctgaaaaattagatgataagaattttctttaatggaggcagtgagttgaaccagccatcaaatctcattgtcttcaaggattcattgcaaatccgtcgatccctcctgtttcaactgccaactttgaaagttgtgtttttaaggcatctattaaacccttgttggcattgctttaatgttaaaacatattggagaagttgtcacttcattgcagtctatttttcacttaatttttgtagattaaacatttacttccttgaccaaattgtttgtattgattttttggtttctttactagatatctcttctctttgaactttatgttgtgcattaactatacgatgccattatttaaaatttaggccacactatttaatacttagaagaagctcattcttcctagcaaacaatctgaggcaagttaaatttgaagtcattttttttattgtggttctaccactgcaactgcacacttaatatatccattagaaaatttatgtgcatattatgctcattatctgcttaatgttttcccatttattctacttctatcataatccctattattgctttgctttctgttatcaatttgtattcatggtattttttactttgttcaaatgctaattttagtatattttaaatttaaataattttaactgtacatttatttgtcttgtcttttaagtggctggttaacttgctttcatggtcattatggaattgcaggttaaagaaagcaa

SEQ ID NO: 3469 - DNA, 1338 bp, Glycine max
  Intron number 7 from transcript Glyma09g39120.1 (locus Gly ma09g39120) derived from phytozome v7.0 (chr-ID Gm09; pos 44278721 to 44280058 reverse strand)
agcagcaagaccacttgtaccccctggttttgcaagtgcaaagttggaacgcaatttggcaaccaagacatcccttaacactcattcaacagaggtaactagataaagtttgtcatccccatcttagttgtggcctattgtagcttagttattcttaaaagctgttatttttcaaatgttaagctaaaagattaaattcttaacgtattgaattaggcattcaactaggttttacttctaaattttaatttttgatatcataatgttttgtctttgtagggaattttagttgttacttgttactgttaattgttatgatagaaagttgccaagttggtatttcttgtttgagaactaagtccatactatgtggtattttgagatgggaatcatagatgaaattttgtagtttaattcaccataattgctcagcaagcataaaattgttagaatagaaatcactaaaggattttatgattccaaacttcaaagtgatggttagaatgtggttataaaaaatgtcctaactgtcttaagagtgatcttcgtcttataaaattaaatagtttgaaagtgaatggtggcttcattcaagattctagtttcttttcttcaatgctggaaggttcaagacacatcaaatcttagattctgataaagctagttttgattttgatgttatcttgtttgaatgttggtttcatgtctaatgataagttaaaaatctaaagatttcaagttttttatagagcaacctccaatcaaggaagagtgcaaaggagtaaggagatagtttatggtacctgtaatttgactgtgtcccaggcgtaagagaggatacaagagactagattgtgatatactgtttaaaactatcttctgctctaatatttgatgtcccaagtaccaaactctgatgtcaaattcaaattttgtataacagaaatgttttattcagagtctctaccttaattggattaggattttgcctctttgcgtattggatgttgaataaatacagaggatattgtaggattttgccacattatgtctcgcagagatactgctctccataaagattgaaagcctagaatttgaggactcattttaaaatgagaagaaaagtctaatttcttcctagattttaaccaagttaacctttaaaaccatataatgttatttattcaactagctgataaatgaagtgtgctttattgtaatatattatattatatattataatatgtgccattattcttggctcttttttaatacatttttttattctgatgcttgcataggttggacaacctgcgcctggtgatactggaggtaacc

SEQ ID NO: 3470 - DNA, 2357 bp, Glycine max
  Intron number 2 from transcript Glyma18g46530.1 (locus Gly ma18g46530) derived from phytozome v7.0 (chr-ID Gm18; pos 56236173 to 56238529)
accaagttggagcacatataaaatccttcatatttttatccagccattgagatccaaaattcagattagtcacaccaacgttaaaaacagtcaatatcaaataatcatcaagaatagaactaaccccatctacttgtataactttttgttgctcaagtactagacatgcaagcatggattgttggagataatatccaagatgcagttgtcttttttcatacagatctgatgactccaagagaggaaggatgtgaggatgaatttgaaatttattgacaaggggatacttggcattaccatagggtacaatcaaatttaatttcaaaagctcatcaatcacatcctcacccacttcctctgctgttttatcttctgtattttcaacataactctctccaatccaccaataaattgtacttaaattctttataatagcatgttcagggaaaactaagagagacaacaagcaaacacttctttgctgtcttagcatgcaatacctttccagcaacaagtgattgttgtgttgggttgaagatgagtgtagtatttcactactcttgtgatcctcctcatcataatcatccattgggagcaacttgtgagcacattcccctattctcttgcaaatgccatccatctcttggtccaacctcttcttatccaacttgcgaaaatggccatccacctcttctaatgtgtcaagcattacaaaaatgatgctttgacgaaagagataggaaaataaaaaacaaaaatgaaccttgataaaatgaaggattacacttcaatgctcatgcttcagttaatttccttcatattataataaaactaatattaaaaattaaaatgacatctaaatacagtaataaattgacaagattatccatataattcataattagcaatttatttatatattaaataatgaccttatggaaataatttgtattagtagttttcattaatatttcatagtaaaatcatagaaatttagagttaaaacatacctcaaacaagattatttccaaagaaacaaaaattcaattactaaaaaaaaatacaaaataaatgcaacataaaaaattaataaaataaaagaatgtactgtatcatagaaattgaagtttgcagaatgtaaaaagagtgtatataaaaatttagtgttaatcatagtaaactatttaattacaatttattttaattttagttaatttgatatatcattggtttcaagaattgttgattaattattttatatatatatatatatatatatatatatatatatatatatatattattcatcttatatacaatatatacattttaacttgttaattaaataactgaccctttaaagactttaaatatcatagtaaaaatgatctggagaaatctttataataaaaaatagggttaattatatttttattcttaaacttttaattattttttagttcctaaacaatttttttagcatttttagtccctatattttttctttgttaatattgatgtcatgacaatccctttggcagcctagtgatcacatgccatgtcattaaggaattgatgagacactcacgtgtaacttttttggttaatcggattttaatctcacatcaactagtttgattgctaatgtcatcaactcgtctgaacatcagaaatttaaacacagtagtttataaaaaagaattaaaagaattacacgtgattatcttatcatattcgctgatgttgtgacaagtcacattactactaacatgattattaattgtcatgaattaattgacgttgttatttgacataaaactattaacaaaggaaaaatataacaatcaaaaacacaaaaaaaaaattatttaaggagtaaaagtgaaatttgtaaaaaaaatagatacataaacataattaacccttagaaaatatatgattaattcttatatctgtaattggtgaacctttaaggtagtatgttcaaagttatttctaattaatcagtaatgactaaatattgttaagacttgtaacagtgatgatgatggattagataggcaaaacctaaaaaactctaatcttctcttgggatacttgttctaacattcttggttagcatatggagttaagttgtaatgtttttttttttggtaagatgggaatacaaagttaagttgtaatgtgaaacaacgtaactcaaatatataacataaacaattcaaatagtaacttaaatatttaaggtagtttaaagtaaatgtaactcatgttgaagaataatagtaagtaaataaaccgaaagctaacagaacaacatatagtatatgatgtaattattgatcgaagagaattgt

SEQ ID NO: 3471 - DNA, 2484 bp, Glycine max
  Intron number 7 from transcript Glyma20g02380.1 (locus Gly ma20g02380) derived from phytozome v7.0 (chr-ID Gm20; pos 2036930 to 2039413 reverse strand)
ttgcaaaactctctggtggtgtagctgttataaaggtacctaattcagtaaacatgtcaggggctgtctgtattctggtggcctttgttctttactttgctaatgttactttatcatctcttactcttgggttttactggatcatagtgttatttattgcttttaacttgacttgagaaatggattgttgacagtttgtcacctactagccttcttgatatgtgatcttgtcaaaagtgagatcctactaattttttcactaatcacttctatatcattcatgttatatttattataatatatcatctatttgttgcttatcttctctgcaataatttttcttctactttttaatttcctattttcagtcaaaccaattattacaataatatctatatcattcatttaactaatgactcaaaatggcccattgattgtctaataactcaaatcagaattgtggtcgttctatttttatccctatcaattgttgtagggttctgaattctatgagattgagtcttgcaaaaaatgaaagataatataaatctagattctagatctcacaccacgtcagttcccgcataacattcttgtctgaggttgagtcttgacatatcagtaaggttggtgccttgtgacttggaacaggtttaattgtggaaacaaactctttgtttgtggtgggtgcctcatgcattgggctgcccttttattcataatatttgtgtgaggatttcaaaaataaaaaaaattagtaaaaatagattttgaattgatttctttattttcttagtcatagggctttgttcatcattaatgttggaaagtctcacatcacctaccttaagatatatctattgggaaacttcacttaatgtcaattgatttaacacgaactctaacatggtattacctcaattagtagtatgcagttcatgtacctattgggcaatttcagtcaatgccatttggttcttcttacaacatgggtttgggtctaattcaatcctacaaaattaacttgtaaggtgaagattgttccccacttatatactctatctcgacactatctctagctaatgtggaacttcaacatgctcctctcttgtccactgctacccgccacaatgtgggattttatcacacctctctttgcgcacaactacctaggggtaaatacaattaagatggctttccaacactccccctcacgctcaaggatacctgcctagagcatgagaaacacaaggatccaccaatgcatttaggatatactctgataccatattagcaaacaaatttgaataaccagttgcatcagggtccttacttttgctagaaacaaaatcacccttgtttgtccaactcacaatatcaacttctgtgtcctcaaagactttggagggttaatttgttcatccagaaagttctccaccttaatgatgggcttctcacagtgacccatgttatttaaacccttttattgcacctcctcctgccttgatgcaaccattttaaagtagggacataaggttgtatttcaaaaactttaattcgagctaagttatgcaccacatccttatgtccaattcacaatatcaacttctcacaagagtgaaaacttagctccatttaaagtttttgaaatacaaccttatatccatattttaaaaggattgcatcaaggtaagaggaggtgcagtagaagggtttaagtaacatgggtcactgtgagaagtccatcattaaggtggagcgctttttggatgaataaattaaccctccaaagtctttgaggacacaagagttgatattgtgagttggataaacaagggcgattttgcatccaacaataatgagaaccctaatgcaactgactattcaagttctcttgttaatatgatatcagagcctatcttagatgtattggtgggtccttgtgtttatcacactctagacgggtagccttgagcgtgagggggagtgttggaaagccgccttaattgtgctcacctctaggtagctgtgtgtttgaagtcccacattgtggtgggtaaccgtgggcaaaagaggggcatgttgaagtcctcacattggctagagatagagtatataagtggaaaataatcctcaccttataagtcggttttgtagggttgagttagacccacaacccacattctaacagttttaaatgaaaactaacaattagcttgtatcctataaaagaagtgaagtatctactacatgatccttgtatagattatgcatgaaatctagtaggccatcgtgttaattgcacagatcttactgactttcatttgtacaattttttattgcaattcgttgtacagatagaaacaactctcttaaattttttccacaatatgttacattattttcattctcatgtgtttattgcataatgcaataaccaattgcgtaggtaggtgcacatactgagctagaactcgaagatag

SEQ ID NO: 3472 - DNA, 2498 bp, Glycine max
  Intron number 1 from transcript Glyma04g09460.1 (locus Gly ma04g09460) derived from phytozome v7.0 (chr-ID Gm04; pos 7689139 to 7691636)
gggcccttgtagagctttgcttggtgatctcactggtaaatatatttctccttaaatattaaatacattacatgtattcttttttcctgtcattattcttttcttcattttttgaatattagtatgctctcatatgttcagtttggcaccaacatggctgttatttagatcggttactgtcaaggaaatacttactaaattggtgagctaaatataatggctgattaatttacattaaaatgggcattaggtaatgttgatctcccaattttcaatatgttaaattgtgcaaagtagtagatgttcaatttggaaattttctgtgcgcttttggtattgacctgcagctcggtagtttttatttgatacatagactgcaaatgataaggctgtgtaacttgtacaaggctattcaaggataaggtagtttccaagttggtagttagagacaaaattgcaacaaatgtatgcatttattatcttgtcatgaaaaaaaaatagtgctaactactatgcacatttgaaaccatgagtcatttattatcatatatacccaatggctatgagggtaaagctggatgttgttataatctatctcttgttgtctcatttgatctttattcaagatgcgtatcccatgtaaacttaaatctatgctggaagcagtttgaatgcctacttgtgttaggttatgagtagttggtttgagttttttttttttttatatatatatacttttaaacttgctatctctccttcctatatatgaggtattctgagttttgaatttggtacagaacaatttagctactattgtgagagagtaatcttctccaggttccatagatcataatttctattgtattgctgatttgttagtttgctaaatgttagataggtttcaaatttcaattaggctttcagttttctgttataactgattaactaaatcgtagctgtcataaatgtaacagtgagcccaactcatccataaatatgagtctagtctggattattcatgatgtttttagaagtcaaggagcagaatttatttattttattttctgtaggttttgggggatgtggaggaagtcaagggaggtggttttaagaagtggctatgtactagctcaatggggttgcattgtcaatgtcttataaagagtattttttttttataagcgtcttataaagagtattttgatcatattcctaactaatgggggaaatctgaacacaccccttcatgcctagatcgaacatttggaatgtgaagtttgcaagagtagacattttgcaggtgacctaacatcgagactgaatgggctctaataccatgttaattttaaaggggaagatttgagatggagtagctaaatggagaagagaatattttagagagaagatctgaatgaaaaggttttgttatatttagttgaatgatatgttgaactcttaatagactaagtggagcctatttcctcaactaagattaaatgggtgtaacttcctagattcatggatatgcaattcctgaaatacatgagtctactatttcttaagtacattaagtattgttatttccgctgaacactctaataatagctagagattgacatagctggaaattaacgtagctgaagatttgatggagactactatttcttaagtacattaagcattgttatttccactgaatactctaataatagctagagattgacacagctggaaattgatgtagctgaagatctgatgcatacttgcattctcataccccataaactgcattgttctaccatgtatttggtttcatacttttaaagctagggatgtaccatgtaggaagcaaaagacttgctacgttatattataaaattatttttgtaaacatttctcacatctacttggatgtttctattccttttgtctgcctttattctatagttttccaactgaagaaaaactatgtaaaatctgaaataaaaaattaagcatcaaacattggtaactgtatgtaaacaaaaacattgtaccagattcttggcagggaatatgctttcttgtatctcatgtttggtaatagtagtaaaggataaaagtcagctccccccctcccacaaaaaaaaatgatcccaataaacgtggcatacaattagaatgatagaaaataataaattgtgcattaattattaccagcattactttctacccagatgattgtctgcttgatacgtaattctgaatgcaacactcagttatggtaattatcttttttattttcatctcatcttgcctgaattgttctgtaaatgtggccttcccccccccccccccccccccaaaaaaagaatagaatatttttttatgtcaattgtaatttgtttgagaaataaaatgtcagctatgaaaagcaaacaatacattgacaaccttcatattttgtttatctatctttgaaatgataggcaaggatcaaagaaggacacgtgttgcaa

SEQ ID NO: 3473 - DNA, 2454 bp, Glycine max
  Intron number 2 from transcript Glyma19g27270.1 (locus Gly ma19g27270) derived from phytozome v7.0 (chr-ID Gm19; pos 34550876 to 34553329)
gataaccccggttttacttctttcttgcaaggctggtacgtttttctttctttctctctttttaattaaattttccttgttgattattagattagatttagaggagtatttgttttttttttctaaaaaaacttgtcaagcttggaggagtatttttttttttctagaaccctgggggttgtcaattcacatgatgtaagtatcatttttattgtgtatggaaaaaatatatgttgaaagaggtaaatgaatttaagtaccttgagggattacttaacttctgatcgagggatagctttgttggtccagaaaagtaacgtttatagataccaatttcttccccttttctaaattttaatctcatggtttaagatcacataattttgttgtgggaaataaatattgatatccgagttcaaccaaaaacaagaatttgactttaccattacatgaaaaaataatatttctgatgagtttctgtaaatgaaatatctgcttgatgacttaccaattaccatagatagaaacaagacacccaatgctctcaaagaatgcaacattgctgaaccaaagtataaagaaactaaaaactaatgtaccccattgcctaaaggctccttgctaaacgaaggtatgggagagggttattgtatgcagccttgctattcaaaatcatgaccaaccggtcatcaaggcacaacttttcctcctcattggaaacaagattaatatttatatcactaggctattcaagtaaatatgcattagacatatacttaaaaaatatttcctgagaataaaagattcctaggaatgctagtttatgaataaatggatataaagctgttccaccttcataggtgggagtaaaaatttcacatagtaattgagtgtagagttactatattttcccatggtaattgacggtatatatattatttttagtaaaattgaataatagccaaacacattttataaatttttccaagaatcctattcctagaaatctcatgctcaggaaagtaatttagttgggaatgaaagaatccttgtaccaaacaccactttaggctaatgtttaggttgaaggcaaatcataacatagtcacttacaataaaattgagtcctgtgaagcacactaacagtaacttcatagttatttctactcaattctagctacgtataacattggcatgctaatcatagatatgagtagctaaagatttggtagaacgtgaaggcacaacacccagcaggctaaggctaataggagtaatacacagatagtgtacactaggagatatacagtttggagggggctttttccttccttggtgttctgatatttaataacagatgtctttgctctttgttatctcgtttcctacgtccaatttacactctctccccgagtttctatggagtctgcatcagtaagagaaaaacgacctccttgatcacttgaaatagtttctagtacgttctgatttatggatttcaagtctaaaaatataggaaataagacaactgtatgtatagctcatcataaaactctgactctagctggaccaatgacacctgtactgtacttgtccatggaatccatagatgtcctcacttcacatcaccacggaataactatttataagtccacatgtgacaagtctttgttgtgtaaaatttgatgacagttctttcaaactgggtattacttgagaccaaagtattctggaaatctaaaacaaaatccgttggacaaccatgtcctctcttttggttacagctcctgttgttagaatgattaacctggcatcaaacctgtagttctagaaatacatcaaatagatattgtatttctggaagaaaaatgacaacaagtagaatgactagagctaaattttctttaatcattgaagtcaactcccactattgtattacttcattaatttcatattacactataaaagcaggtgacttgaaccattaaattaaaatataaactaaggtcaaaatttgctcaaacgttacattttgctgatgaccttgacctcttttttcttttaaatgcaaatttcatacttttcttggttcaacaaagcatgatatttgagtcatttgttaaatttattaatccggagccaagtttttgtttaagaaactctcatccaaggagggactagggataaatatttcatatgactacttcctcaatgtgcagaaatgtcatttgcttttctaacatatcattaaacaaaaggaaattgtatacaattgctatctttcagcttgagaaatcaactttttcaattaaaaaatcctatgaaatccttttttactttccgtgttatattgcttgtccttttgtaaagcattcttggttctgaagactaagattcctttgttcttttacatgtgcagcttgacagcattttgctgctgttgtttgctagagg

SEQ ID NO: 3474 - DNA, 8847 bp, Glycine max
  Intron number 9 from transcript Glyma01g13950.1 (locus Gly ma01g13950) derived from phytozome v7.0 (chr-ID Gm01; pos 17450128 to 17458974)
tttgttcatctgaacctgctataattttcaggtcaactttttatttgccttgctgcagcttttgctctgatgcaccaagcttttgctcatctgaaccaatgaaattatttctgtttgcgatttcttttatgtggtagcattgtctattgcatgaaatttaaacattttatagtagaactgtagattcttttcttgtttgttctgcgtgattgtcccaatctgaaggaggtttttgaaagcattttaaagattcactattgttgagcattattgtaaataggacagattcgcttcctataatatagctctactctggcaagtagtttctaccataagtctataatataacataaatgttgagcaagagaagatgagaaacattggtgtgaaaagactagtcttacaagctcctaatagaatcttgatgttagatttcaacttaaaaccaattggcactaagtgaagttgctcaacagatatatataagctgtaccccaagaactgaggcaggcaatgtgggacttcctaacaccccctctccatagaggcctgccaatacaggcgagtctactagaataggcaagatctaagatgggctataggctctgatgccatgtttgatttcaacttaaaaccaattggcactaagtgaagttgcccaatagatatataagctgtaccccaagaactgaggcaggcaatgtaggacttcctaacacttgagagaaaatatttttgaaaacagaaacgaaagaggagagaaactttaatttcattaacccaacaaactcaacagtgcaaaactgtttatatagacaaagctgttagttatgacagctgtaattagttgtcactaactaactatctatcttagtaactagtcttaactacactaactattagagtatatgtaaataactctaaaattttgcaagggctgttagcttttgctaacagcactacacatgtatcactaactaaattctgttattcagttatcctgttataacagaattctgttattcagttttgtgcttaggctgaaggcctagaggtctataaatacctcttttgtaactatctttgtaactaagcttcagactcaataatatcagtatcatttctcaatatttttttctccttctttgttctctaaatctaaaatggcatcagagtcattttttcgtgaaagctcttctcttcgatttttccagtttcttcttccacattcatggcttctgcgtctcaacgttttacttcgcactcttttccgacctccatagctgagaagctagatgattccaactacctacactggcgacaacatgttgaaccaataatatcagtatcatttctcaatatttttctctctttctctattctctaaatctaaaatggtatcagagccaatttttcgtgaaatctcttctcttcgatttttccagtttcttcttccacattcatggcttccgcgtctcaaggttttacttcgcactcttttccaacctccatagttcagaagctagatgattccaactacctacactggcgacaacatgtcgaaccgataatcaaatcacacaaactgcaacgttttgtggtgaatctgattgttccgcctcgatatctcacggaagatgaacgaattggcgatcgcatcaatctagaatacgaggcttgggaagttcaggaccaaatgctccttgtttggctccaatccactctctcgaagtctgttctctcatgtgttttaggctcgaatcactcctatcaagtgtgggagaagattcacgagcatttcagtcttcacactaaatcaagagcgcgccagctgcgaactgcgatgcgtgcagtttcgcttgaaggaaaatcaatggatgaatatctccataagattaaaggctatgtcgatgagcttgccgatgttggtgttccagttcgccataaggagtacgttgatgcaattctggaaggtctcccttctgattatgcgtcagttatcttagtgattgaaagcaagaaatgaactccatccattgttgagattgaagctctgctttacggtcacgagacttgtctttttcgttacataagagacacttaattgctcacttttccatccttgaattatactcaaggttattcgcattcaagttcatataaatctagtgattctggtggctctagagggttgtatggttgaggtattggtggtcgtggtgccttttctgatcgtggtggtggctgcgctggtctcggaaggggtcgtggtggtgacagatttgccaacttccagtgccaaatctgtctcaaatatggacatacatactactaatgtatgtcattttcgaactgacataagctttcagcctcatgagtcactcaccctttttaatccaactacacttcaaccaatttcttattcatttggttcgagtagatcttcaaacacttgggttaatcctaatcccaagcttgctgctcagccaaccaatcaacctagtgcttacaaactcagcttctcatggcaatggtcaagctagttcaacctggattctagattctggagctagcttccatgtgactggtgaatcacaacatatcaaactgtttgcacactttgatggacctgaccaaatatttataggaaatggtgaaggtttgcatatttctagcactggttcctcatcctttgtgtctccttatggctttcatattactttcaaacttaataagctattgcatgttccttcaatttccaaaaatctgttaagtgtgagtcagtttgcatgggataactctgttttctgagtttcatcctcacttttgtcttgtgaaatcacaataaagtactccttcagggtgttgttggtgctgatggtctttattcattccataacatcagatttcaagatcactcttcttagttgttgtcaacttccacttctggttcgatcacatctcctactgttaataaaagttatgttgtagcttctagttctgtaaattcacctcctagcactattagtctatggcatgctaggcttgaccatcccaatagtcatgtattgaagttagttttcaatcagtgtaatatttcaccatctaataaaacgttttcagacttttgtgcttcttgttgcatgggaaaatctcacaggctgtcatctcattcttctacttttgtttactatcctctagaacttgtctttacagatttatgggggccatctcatttaacttcctattctggcttcaagtactatgtatccttcattgatgccttttccagatatatttggatatttcctattaaaaccaaagttgagactacatctgtttttcaagattttaaatctttagttgaactgcagcttaataccaaaattaaaagtgtttaatctgattgggggtcctaacctcctatggtatctctcacagattgatttgtcctcacacacttcatcaaaatggtgtggttgagagaaaacacagacacatagttgatctaggtctcactttgttacatcatgcagctttacctctacaattttgggactatgcctttactactgttgtctacctaattaatagactgcctaccgcatctctaaactttgctattccctttgtcactcttttcaacaaagatcctgacttccatttcgttgaaacctttggctgtgcctgttttcctttgttaagaccttatcatactcataaactcaattttcgttctcaggaatgtgtgttctttgggtactcctcatctcataaaggctataaatgtctgtcttcaattggcagaatttatatttctaaggatgtgctgtttaatgagctgagatttccttatttggatctatttccttcatcttctagcccagcacaaaacattacctcctatttcagtcttaaccctgatctgtctcctcctcttgtaactcctacaccttcactttcacaactgccttcctctcactcaccttctgctccctctattccttctggctttgcttctatctcaaatcaaccttcatctgagtctacttcatctcacacttagtcatccaatacagagtctcataatgaatctatacctgctccaacttcagttcctactaacactcatcctatgcaaactagatccaagtctggaattcataatcctagactccatccttcattgattcttactctttctgaacctaaaaatgtcaaacaggccctagaaagttcagattggtttgcagcacttgaagctgtgacttatgtgtggaaaaactattctcacactagcttagctttattgaattcaaaataacatatttatatacatcaagggggaaagagacagcttgacaagacaagtcatactgttgtcttctagaacaagataagcaggaaactaagtaagctacaacaacaacaacaacaacgccttatcccactaggtggggtcggctacatggatcaacttccgccataatgttctatcaagtaccatacttctatccaaaccattaatttcgagatccttttttataacctctcttatagtctttttgggtcttcctctgcctcgaattgtttgtcttctctccatctggtctactctcctcactacagagtctaccggtcttctctctacatgcccaaaccacctaagtctattttccaccatcttctctacaataggcgctactccaaccctctctctaatagcttcgtttctaattataaaatctatcaaaagatacacataattataacactccccctcaagctggagcatataaatcatatgcaccaagcttggaacatataaactgaatcctaggcccccttaaggacttagtcaaaatatcagctggctgatcattagaattaatgaactcagtggcaatctctttggacaatagcttctcccgaataaagtgacagtcaatctctatgtgcttggtcctctcatggaaaactgggtttgaagcaatgtgaagagcagcctgattatcacaatataacttcatttgcaccactttgcagaatttcaactcttcaagaatttgtttaacccacataagttcacatgtaaccatagccatagatctgtattcagcctctgcactagatcgagcaacaacagcttgcttcttactttttcaagagataacatgtcctccaatggagacacagtatcctgatgtggatctcctatccatgggacatccagcccagtccgcatcacaatatccagatatttgtgtgttacctttgtcttcataaagcaatccttgtcccggagctctctttatgtatctaagaatacgtgtaacaacattccaatgatcaacacggggattttgcataaattggcttaccacgccaacaacaaaggaaatatcaggtctggtaatggtgagataaattagttttcccacaagtctcctatatctttcggggtcatgatagatttcactttgatttgtcatgagcttcagattcagatccatagggctatcaacaggtctacaattctgcatgcttgtctcctccaaaatgtcaagagcatactttctctgtgagatcacaaaaccatctcctggttgagccacctcaataccaaggaagtacttcaaataccctaggtctttggtttgaaaatgactgaataagtgctcccttagctggacaatcttagtagcatcattccctgcaatcactatatcattgacatatactatcaaataaacacattttccaggggatgaatgacaataaaaaacagaatgatcagcttcacttcgtttcaacccaaagaattgaacaatatgactgaatttaccaaaccaagcccgaggggattgcttcaacccatagagggatcgatgcagcttacacacaagacccccctgagcaacaaacccaggaggttgctccatatagatctcttcctcaaggtcaccatgaaggaatgcatttttaatatcaagctgatggaggggccaatgacgcatgacagccatagcaagaaacaatatgcatgcaccttatcttttggcttgaaactttacattaactacccgagattgactgcagttgaataactgcagttctcttataatactccaatacccccctgcaaactcaaggtggttgaggcttttgggggaggctcaagtacattgagtttgcccttgagacaaaaaaaccgagctggagaaagaggctgtgtcaatgtatctgcccactgatcaagagcaggaatgtgatgaaccataagttgttttgtcagcacctgttctggaacaaagaaaacatcaatctccatgtgcttggtgcaagtgtgaagaactggattatgtgctagtgctacagcacttcagttattagaaaagatgactggtatggtgaaaggaactcctagttctgccagaagagtttgaatccataaagtttcagctgtagcctgagctaagctgcggtattctgcttcagtgcttgaccttgccacaacttcttgttttctggaccaccaggacaccaaatttggacccagataaattgccactcctgatgttgatctacgatcatcgacatcaaaagcccagtcagcatcatagagagcttgaatggagagaggtctgcctagaatagcaggtctgagatgaagaccatgggaaatggaccctctgagataccttagaatacgtttgactgccacccaatgaatgtctaagggattagacatgaattgacaaactttgttgacttcaaagcttatttcaggttgactaattgtagagttctgcaaagcccccactacaaaccgatagagagtaggatcaaaaaagatatcagccctagacttagacagtttacagttagtaaccataggagaatatatgagttgtgcctctgccatgtgagttttctgtaagagatttctgatatatgtactctgagtaagtactaaggagttatcagaaagagtcttgacctcaataccgaaaaaatagtcaaactttcctagctgttttaaagagaaagtggagttaagtttggcagtgagatgttgaattagttgaggtgaactaccaattataataatgtcatccacataaaccaaaagataaactgtttgagattgagctttgtagataaacaaggattggatcacacttgcttgctacgaaaccaaggtccctgagctatgatcaccaccacgccgactgccacgattaaagttacctccgcgatcaaaaccattgctagagttagacacaaaattctcagaattaggttgtgaggctttgtttggcacatttagccttcatatccatgtgcagacggaaaactaggattagcctgtgtgttgttgactgccggtgagtcagagaaagcatgcttctgaaacctttgaagacgaccttcatgagcagcaatgcttcaaccttgtcaatcggaagagattcaaacttgctttcacagagtaataatcttgaagaagaccttcgaagatcggacttccaatagaggctagagaatcagaaatagccttgattttgagtagaaattcatgcataggcttgtctgcaagcactgtcacgtgtagttcagtccgcaattgacgagctcttgctcatgtttgtttgtgaaaatagttatggattttctcctagacttgataagagtgaatgcttccaagcactcgagaaaggattgactttgaacgagtcgactgcagccatgtgagcagcacctgatcctgcttctcctagcttcatacgcaggattttcatgtccgattgcactatcttcatcagagaggaaccccgaaggaattatcggatttgctacaaaccgttgaagacgatgagatttgatcactggttccacctgttgttgccgcataaaaaattggaatcttcgagcttctcaacaatggagtttggaaatgcggaagaggaggtgacaaattgttcgaagaagccatagttgatcacactaggctctgataccataatagagtctcgagagaagatatttttgataatacaaaagaaagaggagagaaacttcagtttcattaacccaacaaactcaagagtacaaaactgtttatatggacaaagctgttagtcatgacagctgtaattagttgtcactaactaactatcttagtagctagtcttaactacactaactcactaagacttaactaatcttaactacctgagactgcagttgaataactgcagttctcttacaatactccaatgtctccaagctcgaaatgtctaattctaggtttgaaaggatgtgtggaaatcctgtattggctatagattagatatggccaaggtaaataaaagggacacgggcacacaatgaaggtgtcgaacatagagaagaatcctgcaatgaaggatgttactttctgatgcgaagtgtaaggattgggtagttaagatcgagatcagattattctgatctgatctgattctccccatcttatccttatacttattttgtaaccagggtggttaggatttctcctgaccagttctgcctattaactcatagttttgatcaatcaataatgaaaatatcattttcttctcctgaaattacaagaaataaaggatattaaattacagggaaataaatctgtgccaataaagaaagtatggtaataaagaaattaagattagaagtatcacaagctccaacaactatgattcacaaactgttccgtgttgaagaagtcattgaatttattatttactgaatataaaatcttgtttttcagctgcgttgacacctctggacattggggtcacggtg

SEQ ID NO: 3475 - DNA, 802 bp, Glycine max
  Intron number 9 from transcript Glyma07g39030.1 (locus Gly ma07g39030) derived from phytozome v7.0 (chr-ID Gm07; pos 43628926 to 43629727 reverse strand)
gagcttagctgggtcacagctgtaagggctttaaggtaattggaatactaatgtgtatcattgctttcagcatatttatctgctgttactcttttgtccgcattaagtcatcttaggatctataaaatactactggtagttgcattttgttccatactcatattaagttgcctgcttatttagcaccatataatttaattatagctgaccttataaatggaaatgatattattttttactatgatgattgacattgagagaattgtggcagagttgttgaacttgttttcctgaagttagtaatgtttatcgctaaaaatatagccaatgtaaataaaattggagaggaactgtcatattaggtgatataaccgtttcaatatttttatgatgcattatttttagtagaaatcatctgcggttttgtcttcatatcctggttcctgagtaattttcaaattggcttgtttgacctatctgctaattctaccaattttaatcaagatcatcccaaagccatggctcacatctcatgcattttaattgcctggttgaaaccgctgtatctggaaactatatcagtaactagatgctaaatttatgactcttttacttctgttgatgacaaagaaatcttatgaaatttgaattaatatatgaagcaagcatcttaggacaatggagtaaattgtgtggatatgaccagtttaactcttgctcagattcacttctgggcctctactttcattaccaatttcattctcattgaaccaacgttgcaggagagagggtggaatattac

SEQ ID NO: 3476 - DNA, 3529 bp, Glycine max
  Intron number 4 from transcript Glyma15g11950.1 (locus Gly ma15g11950) derived from phytozome v7.0 (chr-ID Gm15; pos 8850905 to 8854433 reverse strand)
gaagtaagatctctgacatttttttttatgtaattgatgtcttattggttaattctcaaaagatgtcattccacaaatcttgttagttgtccatcaacatctatgagttcttttgattttggaggattagtatgtgtttggattagctttcaattctactaaaatcaatttcaaaatcaagttgaaggctaaagcaacaaataattgcttatacattttcaattttccgccatgattttgggggtcaaaattgattctaggaggtatctaaacacattattagcgtgtgtttggttaggtgttggtaaaatttattttggttaaaattgattttgaagtgatgtggcttatgtttggatgttttattataaaatcaagttaggagtaaaattcagtacaaaattttgaatccaatgtagaagctattcaaagttgcttctattggacaagtggcctcaataacttaaaagagagggtggattaagttttaaaattcccactaacaagtgacctttatctctctcttactttttgaagtcagacacacatatatatagatccttcgtgtcctttcaaaatgatttcaagaaatgtgtcttttcaaaaagctttttttgaaattctttattgataattaattacaggtttctggtaatcgattacacagttatattttgaagggttatgacttttcaaagtgttttctgaagtgccgttgctggtaatcgattacaaaattgttttcttgtattaagcattttgtaaaagattgatttttatctactgattttaaaattttaacttcagatttaagattttttaactatatatttaatttcaaaattttcttttctaaacttgaaatagttttctttgaatatgaaactaatttgacaagttcgacatattctttatgcaaatcattgaatgcatcttaaagttcatcaaaagaaatagataagttatagttagaagacattatctcttctccgctttcatagtctttcgtccatatttatgatttaattttctgaatcacttgaagaatctatgttattatcttcccaagtgatatatgttttcttttttttgaaatttctcttgtcgaattttttcattcttctctcaaggacaggacaatcgatctcaagtgtccaggttgatcgcattcatagcattttggggctaaggaggaatctttttctttcttctttgaattaatatctgatctcctttaatttcctttgtttctcataaatttattgaatctctttatctttcattatcatttcattcttctctaggtttttctatagtttcatttttcactaccattgtagaaataaatgaaccaatttcaatgacttcccatatatttaaatctatgacttttataaaaatctgcattcagattttccaattgtgataaccctcaccattgaacataaaaggcctattaatagaattttcctcaggaaatgaaaaattagataaggttataactattcttgaagtttttaaactttagacaaaaattctgctctgatatcacttgttggacaagtggtctcaataacttaagagagagggtgaattaagtttcaaaattctcagtaacaaacttttaatccccttctaaatgataaacttagaacgcagaagaagaaacaacaatcaatttaatcgatgttctttaaatatgcaagataaaattaattgcaataacataaatgagttaagggaagagagaaatgcaaactcaatttatacttattcggtcatttcccgtgcctacgtccagtcctcaagcaacccacttgagattttcactaactttgtaaaaatctcttttataactcctgaacaccctagggatccctttcccttgtgttcaggaaactcacaattcaagatacaaccagtctcttgattacagctgactttttgagatgatcagaaagatttttctcttttaaagtggatgatacaaattgaagttcctagaaaaatttctctctttaagagatgataatacaatttgaagttcctggatgaactctcaatagatttgtaagtgtttgtccaaaagttgttgagagagcatttgacaatgaagttctcttagaatatctttttcttgcttttcgaagttagacacacatatatatagacccttcgtgtcttttcaaaatggtttaaagagatgtgtcttttcaaaaagctttttctgaaattcttcactggtaatcaattacagatttctggtaatcgattacagagttatattttgaagggtcatgacttttcaaagtgttttctgaagtgccgttgttagtaatcgattacaaacatctggtaatcaattgcataattcaaaatttaaattcaaaaccctttttaaaagctgtttttcaaaattgttttctggtaattgattacactgtctggtaatcgattaccagagccttgatctcttggaaacacttgttttgaggcaaaaacttatcttgaattaatcttaaaacaatgtttgtttgttaaagcaaccttatattaatcttgaagcaatacttaacctttgaatgttttgttgaaataatcttgaaagcaaccttgtttgattattctttggtatcatcaaagtcatgtattcatatattcacagcttccacctagaatcaattatggactcaacatcaattttgaattcttctctaacgtgaaaccaaacatgtgaaaatgcattcaaaatcaattctagactcaaaatcaattctccaacgccaaaccaaacacgcacttagtccaatggtatgtttccctgtgaaaataatgatattagtcccgtaattgtactcctatcatgtgcatatccatgtctatttttatagataataacatgacggtggaaaatgttttcagaagaaaatagtaaaaaaaaaaaaatcagtagagaatagcttcctgacaaacatattgagttctaagatttacattttgttcaagcccttgttcaatggttctaagaattgaccaggaagctgtgttcttttctactactacaccaaacaatggaaaatgctttctgaattttttttgtgccatcaaataacagaaaatgttttcactcatgccaaccaaataagcaaataccagaaaataaaaaaatttaaaaatgaaaaccagaaagttattttccttaatacaattggtgcattttctaaatattttctgttctattgaattgtcatggaatgaaatgacagtaccaacatagagtattgttttttttctagaaaatgcttttttctgcatcaaccaacataaaatgtttttctgctctaaaccctggaaaatattttctggaaagatattcttcataaatgaaaatggggagcaaaaatatatttttggggggatttttgcaagttttgtagtttgcaatcacatgcatgatttgtgactctattatacacatactttattgcatgtgataagcttggacttctattgcaggaactagggggga

SEQ ID NO: 3477 - DNA, 1836 bp, Glycine max
  Intron number 7 from transcript Glyma06g22050.1 (locus Gly ma06g22050) derived from phytozome v7.0 (chr-ID Gm06; pos 18793258 to 18795093)
ttcttcagaatctggctgagttccagttttcttgtgtgagtaattttcaaaaactttgacaaactatgctgctggctttttttttctttttatatttatttactttattacactaatgaatattatctaaacatccgattctgatcaactgaaattttaaaaagcaacaatgcaaggaaatttacccgtacgagttttgctttaggaaattttcctcttgtcatgttagtaacattttttcatttatctcataggaaatgaaactcagaatattttttcatacatgtcaaagtggttgaaaagaaagatatcttttacatatccatccaatttttcaacttttcctaaacggatggcaaaataaaattatcgcttgactcttgaggtatatgcaaccttatctctgcaaggtaaaaggttgttatagaattgtaattggtggcctctagattagttttaaaaattgaaccggtgatcaacccaatcaagtcactgggtcaattggtcaaaccaatgggtcgctaattgacctgcatgacttggtttgtattcaaaaaaattgaaaattttataccgggtctttaaaaaagcaaaaatatcacaaaaaaattagtataatttcacgagctcaatattcaagttcaaatctagattaatattatattatttatcattcataattattttaaagattatatatatatatatatatatatattttattatgatcttttaaattttaaatatttaatataataacccccaaaatggcagttttgtctgctaatgtttatatatgtttataacaaaaacatgtgaagatgtatgagagacctgagcaccaaggatgcacgacctgcaatgctaaagttgtagtagttagttttgtaaaaaaatgtttttggctagttgtattatagtgtgacagcattggaagctgtgcatgtctattacgtgagacaatgcctagctgttgtgcatgcagatcgagaaagtatgctgctgaagcagatttagacagctagggctattgtgcactgatcgaaaaagtaaagctgcacaaataaaaaaaatcaagtttggaaactcggttcaataaccagtcactacatctatcggtttgccggttcatttggaaacttggctggtttgctcccgttcccaacaagtcaaggacacgaacgatccaataactggctcggaccggctgtatcagtggttttggttacctgtccaaatggtcggtccaagtcggtttttaaaactatgctctagattgtatatgacatagactaaactactaaaatgtgtgattcttcctttgatggaccttttcatggacaaatcctgaattgattttcaacctcaatatgggtacaaattttgataaacaagattcactcactaaggtggacataagttcagtttttcatgtttcactgccaacccctttcctttttcgattgttcttgtggttgcttttttgtaattcaaactgtagaggattcctgagtttgtgacaaatacactttggccttgtgatcagatgattttctgaattcatggatggaaaactactatgagctttttgggatattgatatcagtttttttgttttatatacacataatataactactctttctatctattagaataaaaatttcagaagaactttctttggtatgcttttactttttaatggatttccttttcagctttgtgttgttttcttttatatacctattgatttagaaatgttatcttgatttgaaagtctttcttttgacatcatggtctacttttatttttacactactttgctatatataggtc

SEQ ID NO: 3478 - DNA, 1274 bp, Glycine max
  Intron number 3 from transcript Glyma20g02860.1 (locus Gly ma20g02860) derived from phytozome v7.0 (chr-ID Gm20; pos 2511501 to 2512774 reverse strand)
accgaagggtgggttgttgcactttcaaatagatattatgtaggcattttgtctctccagagtttgagttgcaatttaatttagtgtgatatgtttgtgttcttgccattgtagataaccagtatatcgtaagtataaaagacaaatagaaatatcataatactatctagaaaatggtttgtgttgtgtggaattattttccttagtttaattttcaatacttgacatgcctggttggctgatactttgtggatggtttttgtctgtaatattggtagtttctcctgtttaaaagcatattcctggaaaggttgagtttgtttgtcttacatttgtctaactctaatatactattctcaatattgaaaatgtttgggtgcacattcagtctggaatttttttctaaaattctgtaaagttgaaaggttgcatggggagagtggtaaccagaataacagaaagaatgaaatgacagatggacataaaagaattgatactggatagaattgggcataaggagagaagtcctccaagggatgttcccctcattctgttacatcctttactatttatcaacctactataacagaataactgtcaacctactgacttcggtctaacaagtctaactattgggcctttcctcactagtgggcccctttttcttatgagaacaaaccttccaaattgtgtctgtctctggctgggacctaacagaaattgtctaaggactctatatgtttgagaggatgtctatatactgagactgagtgcaagaattttacttttcagtagggatttgtaatcaagtatttctattgtctgtttcgcatagtattattattttagttgagtttcctaccttgtatgaaatctgtttttgaacaggtcaatctgtccattttaagtttagggaaagttttgtaattaaaggtgaatggatcttctaaatttgcaacttctataagttaatatttctgtaaaaaattcatcatctatctgatatttttattccatttaactcttgtatcttacattttatttcaagttccaagttccaactgctgcttaaacttttctgtttagtgaagtttcaaaatctttaacatttatatgctttattatttgagttctataattatttgatgtaaggagattcctaatttatattaagagaatggtagatgttaaagcattataattttaaagattacttaatcaaaatctcataattcacttgatgaacttttttgcagaccattgcaacggtctgt

SEQ ID NO: 3479 - DNA, 1412 bp, Glycine max
  Intron number 3 from transcript Glyma01g05000.1 (locus Gly ma01g05000) derived from phytozome v7.0 (chr-ID Gm01; pos 4661871 to 4663282)
attggaaccaaaagcaggtaacttgtgcttcctctatggagtctatacttaggtcccgtttgaataaatttctcacaagcacaaacgagagcaaaaactaacaagtaaaaatgtataatttaatatgtagaagcactctcatattagcttctctacaagctcattttaatttatatataagctaattttaacttaccatagatgaaattggaggtgtgatttggggggatgatttcaacagcacctggatggatgtgatagagttttgtcaggattgaaattgtgataggaggttttaatgtcgtgttaaggctgctgatgattgtttaggggttttggctaggtggttaaaattcctttaggggttttaatgtcgtgataaggctactgggagtgttacacttaataacttgagatttcttgtaaaatacgaacttattcgttatactttaggggttttggctaggtggttaaaattcctttatttttgctacccaattacacaaatgcaataggttttagtgattgtttagagttgagaggctaccctggtctgccagctgtgtttttttcactttggagtttggggaaacatatgttttgagtagtttaatgcatgatgctaatggttaagtttttttatgtaaaaaattagtggtggtgtgaaaaaaaaaaatgaatgttttgagagaaatccacacagtggttagatttaatttagaataggcctgactttgatttgaaagaattcaagacaaggtcattctgtaaaactgaaattttatttgtgcaggtctgtgtgtttatgattttgtttatgtatgaaattaaggaaatttaatctttgtttttgaatgagccttgggttagacatgtaggcaatctcacctagtaggataaggtttttgttgttgtagtttctgaatgagcctcagagcaaacattatcaagtagttatagtagattttatgaatgatttattttctcatcctatgactaacaagtagtaactcatcagaatatcattgtccattgcgttcatgcttctgtatgtgctcattcccaactcaactgaatgattctttcccccttctttgagaaaaataaagatatgatttcactgttccttagtgggtatagctatcagctatgagatatgcaagtagtgtgcagtttcaatttcaaaccttgcaatgcactatgcctccatttctttctccccttctcctcatgggacctcttgtgggcttcccccaaggcccatcagtgatgggacctcccttgaaccaaaaagaaaaacaatgtgatttcattggaatttatgattctgttgaacatagtcttatagtttaaaacgtgaggtaattgtccactttgcttgaatgcagatattctcactatcagtgagtgaa

SEQ ID NO: 3480 - DNA, 2910 bp, Glycine max
  Intron number 1 from transcript Glyma06g02540.1 (locus Gly ma06g02540) derived from phytozome v7.0 (chr-ID Gm06; pos 1694500 to 1697409 reverse strand)
gaaaggttccatcagaccttgtaggtatacactatattttttttatccctatgctcttacgtgatatatagtagcatatgcttgagaaatattttttgcacaaccatttatatatagttctttgaaaaatactactgtttctgagttaatctttgacttgttaatttatcatattaatcttgcccttaagagtttaaaattatacagtttaatttctcagttcattttaatataaaaatgtgaaaatattcgaatattttgatatctaaaagcaaaataattaaatatttaaaatatcactaactccacgatatttacaaaactgaactttaaaattcgtactttaagaaaagttaatattcaaatcaaacataatgccatgatattccaatatttaatgttaatgttaaattaaagcacttaaatgcttgtccattgatcattaaattgtaacattattatgacttgacgttaagcagatgacatggcaattaatatttaataatatttaagtaaaattgcagtttttgtttttttttttttatattattcaaaaataatttaatattttttatcgataaatattaataattaatatattatattaatagagagatttgaacaaaatgacatttttattactccaactcttgtcttattaagtattagttgtcacacgtaccatctatttaatgcaatatagaaggattaaaaatgtaatttaacttaaatattgttaaatattaattaacatgtcatctacataatttagattatggttaattaatgttagtataattttggcggtcaatagacaaatatttaatagttagaacaaaattatgaattttataaaaatgagatattaaaattattgattaaaaattggtggataaaattgtaaattataaattataaattatagaatgactaaaaatgtattttcaccgatatattatgaatttaatgtttatgtattaattatataaaataattttatattgttatttaaccataaattattgtttaaagtgtaaaactttttatacttttagcgcataatcctttttttgggagtgaaaaaaaaaacttttgaatcaactaaggttttcaaattttgaattgatgttaaataggaaaataaatcctttacaatgactctacaactgtataaaatttgaatcctttgctgaattttattaatataatatgttttatggaatcattttaaaatttttttcccagcagaaactatcccttccgttattaatataatatgtttttttcatttgatttgatattaacttaaatagaatcttagattttccaatgtatttcaaaatatctcataagtttgactctttttattaactgtatgattaattcttgatcaacatttaattatatttaaaattcataattttttttacaaaattaatgtatattgtcaattatgttatgcttattggataatttaatatgttttttaggatcatctcaagatttttttttccatgagaggttgttccttcctgttaaacaatctttattttctcaaataatctttttccggtaaaataaaattatagatataaatgatttgacacgtatatctttaattaaagtttaagaatttgattctaactcaaacatgctatagtactaatttaccttataatgagtaaataagtgaatatggcgaaataagattagttaactatcaaatacaaatattattgtataccttatagtctatatatatatatgtatataaaagaaaattgtccagccattcccatatgtctaacggtggaaccgtttgcattttatttttgtttttctaatgtattttatttttgttttaacaatatttaaatatatattttttttattattttttctcttcactctttcttttaccaaaacaaccatgtattgtacgaattccaatgcaagttatacatataaaaaagaaaaattagaaaatcaaaaggatacatgccttttagcgagacaagtaactgagaaatcagccaatcagattcagaattgtgttccctgcaaaaactacagaatgtctgaacgtccgacgccctgcggtctggctttactagtacagtactgatatttaatatttttatggtaattatatataaatatctcaaaatcgtaagtaattagggtgccttggtttcgaaggaataaaaaaattaaattttatttcatgagattcacattttttatattttattttaatttaaaaatttttctttatttttttttaaatcagacacgtcctttattttttttaaaagaattaaaatcacaaacacctaattaattaagtgtgtttagattgcaacggttacaaaaatcagattattttaaaatgtaattatatgtttcatcaattataatcataataagttttatttgaataaatttattgaaaactaatgtaaacataattattttcgttaggaagaagaagaaagaattacataataaaagaatttttttcttaattataattatatttttttatctacaagattaaaatctaaaatcttagaccgagtttaggattataatatgaaaacaaataaaagagaaaaaaatgttaaataacaatcgtaaattgcaaatgttgtattttatacaaataacttatatttttagagaaaaaaaatcaaaatttaagctaatttttcccaaaattttaccttttttataaacaactttttctcctaaaaacaactgaaataggataaattaatccatctcaaacatgttcttaattaataattacttgtatctctttcccttcttaataatcaggaacatattgtaacacaatttcttattatatgatcagctgaagaattgggcattaaggaacttctgccagca

SEQ ID NO: 3481 - DNA, 2019 bp, Glycine max
  Intron number 4 from transcript Glyma04g23560.1 (locus Gly ma04g23560) derived from phytozome v7.0 (chr-ID Gm04; pos 26789161 to 26791179)
caaggggtaagcatggaaaaaaataaataccagtgttttacttgacttgttatgagtttagattcaatgtttgtttgaaacttgctatcagtaaacaccaaagtgatacatcactgccgtaactaaattttattcctcgcagtagaagcttctaaatgtgtcggtcatatggttgagacccattgtgttatcctcaatgttctgaacatcctttttggccctttggaaacctgtttgattaggatttggtcatatgagatttttccaaaagagagatcaccatattacatttattgttacttgatacatgtttattatataccctaatgaacttgtgaccatatggtagtcaaattcgagatgctaatgactcagaaaggggtcacaaaattgtaaaacgagcaatcgtaacttgaaaccaacatctataaaaataatatatatgcatatactcattatgtatgaatcgagataatataatttgaggagtaaattcttatatatgcatcaagatagtataaataataaatggttaattactatttttaatagttgtcgttatcaatcccgctttgggtgaggagcatatatgaagagcagtgttattaaatagtggctatggtgccatggtggaatggcatagcagattttttgccaaccgccattggtaatttgtgaagagaggctcaccatggtggcgccataaggcacaatggcatgtttatattgtagaatttcagccttctgtcatccgccattgacactgatgaggagtttttcatatagtgatgcattacttctccatcatgttcactaaattatttcataataaatggtttgagttcatctattctgtgattatataccgtcaagcaagccatcagagggctgatcaaggcagagcaaaaggtccgatcatggcagagcaaggtctagttgtggctgagcaatgtctggtggcagcaaaggagagaagttgcaatgctgaagaagaataacgtattgacgttcacaagttcaaggggcatattatattatttctttattaggtgttaaggggctgtgactaataagttttacgggttgggtcttgtggggttaaagttttagaagcccaaaaccaaacaaataaccctaattttaacccatctaaagtgaatgttcaaacaagtattggatgctgttcccatgagtttgtgattcagtttgctgtttttaacaattccaccaacagatgattccacgtgtggacgtgtgtggagcagcaccacaaaatcagactcgcatgattctacgagtcagaatgcgatactgactaccatgcctgtgaccaataattacatgatttttttttctttctagtttttatctatgcccaacctggcatgctgctatgcatcttgatcaaattgaacatgtgatgcattcttcactgataaacagctattttggtgggattttatctaagtaattaaaattttcttgcttttcttgtggttttgtagtttgttggttattaatgtagcctcatttgcttttatccatgtatcaatggccactttaactttattattgatttgtttactatatttatttatttgcacttcggagtttataggtttattttggtaccaagaagaactaagttgtgctctcactgctctgtaatttgagtaattacaattatcagagaattttattttatgctgaactgctgttaaagaaagggaattagttttatttagtagttacatgttttctgtatgttattcttttgaagtctgacccattcctccttagactagtaattgatgatgactaagttgtgctggccttgttagaatttcttgattaattgattgaaagtaattgtcatatgctcgtacaagaagttttgtttaatatcataatgtttcattgcttatccattagattgagatgatgaatttgtatatttattttaatctattgtctacttattcagggaggacctactcctacgctggtcaaggccgaggt

SEQ ID NO: 3482 - DNA, 575 bp, Glycine max
  Intron number 1 from transcript Glyma15g42000.1 (locus Gly ma15g42000) derived from phytozome v7.0 (chr-ID Gm15; pos 49315253 to 49315827)
ctgattgttccaagtaacattcatatgcccttcacataaggaacattaattaagaacactttctcatacactcttttcaattaaaaattattagatggtccaggaatattaaggtcccaactaatatttacatgacacataaatgtgtttcttattctttttggtagactaaaaaacttagaatacacgtgtacatagagataagttgaaactatagacgcatagtaattcaaaactactgaataatttcttttttcaacacaattagtattactaaagtttattgaaatttataaaatcatacgtagaactcattaaataagtagtgaaatctatataattataattatatgatttttttaaaatttaactgataataaaaaatgtgttgaaaagagttttgttaacaattactggccttacatattgtgttcttttcatattttgcttaactatttgtaattttttattgttttaactgacttaaaattaattatgcgtttttaattttactttaattatttgctacactttttgcagggtgggttgaaacttgaaattggagggtgctgcag

SEQ ID NO: 3483 - DNA, 1527 bp, Glycine max
  Intron number 7 from transcript Glyma07g12360.1 (locus Gly ma07g12360) derived from phytozome v7.0 (chr-ID Gm07; pos 10645655 to 10647181 reverse strand)
ccaagctgcaagcttctctcgttcttgattgaataaacggactgggtcaacatattcatcttgcaggccagccaaataagcatcaacaagatagtctttggataagcaagcttacaagaaatcacatcaaatgcatcattaaattctgccaaggtgccatgctgttgcaaacgcctcaaatcttgaaggtgatcttgatggcatatatggtggtgcccttctctgcagctatgtccaagattgatggaagcataataccttttgcgcattagctgatgcagctgattagaaataccctccaccatgtctgaaagtgcatcaacctttgcaagcttttgctccatttgaacaaatctttcttccatttcacacatcatcatcatctatgatcttgtttttgtgtccatgggtgaaaagattctgatctattgaacgtgaacagccagctctgaataccactcttatagaatttaggtgggaaagagagaagaaacagaattgagaggatagaaggaaagagaagaaaaacagagaggtcaaggaaatgtgcactgcactctgtgattatcattcagtctgtctaaaatacaacaaacctgccttatttatagacaactacctaacagccataaaataatagtagctaactgacatccttttctttttatatttacatatcatttacgacatgcaattgaaagtggctcagattgtggagtatgaatctaacttttactagccaataatatgctttatcctatggttctataaggcgtaatgtgtgtaatatcataaaagtgaataacaaaattgagtatgggtaattctccagcagataacaagttgaagggaagggagaatgaggtaaacacaggacaaaagataaagtgaagaatcagtaggttgtgcatttatcactcccaatggccagatcagtggagcgctgggcatgttggcaggggggtgttgggatcccacatcaactagagatatgatcaatgtagtcctgataaggcttaagcattcctcaccttataagctagttttatggatgagttaggtcctaagcctaaattctaagataaatgatgaaatgctcgtaaccaatactatggtttgtttttgacattatggggtttaagtatggaaagagaaagagagataaaagaaaatgaaacaataattaatatattaacaaagataacatttcagtgtgttgaatttgttatgtaaaactagctctaacccctatttatattgatcataatcctaactactaaaggaaacaaatcatgaaaagataaggaaacatgggaactaatagtaagagataatgaggaaatagggaaactaatcctagcggataatctaagatatgataagatacttttgatattttcttatattctagcacgtcccttcaaaccaaggcttactaagctttaagctggttacaaataaatcctttaaataaaagaaatcaaactatacaatttcagattgtggagacaagtctttgggactatc

SEQ ID NO: 3484 - DNA, 7402 bp, Glycine max
  Intron number 10 from transcript Glyma13g23420.1 (locus Gl yma13g23420) derived from phytozome v7.0 (chr-ID Gm13; pos 26815511 to 26822912 reverse strand)
ctatataggttaaacaaaattctatttgcaacgaagttacttgtggacgttagtcacaagaaaaccatataatgcagaagccgcaaaaaacatttgatggagatttagtaaatatcgtaattttattgtgttttaagtttcttgtgttgatggggatttgctgaaaagcttttatgatgtcaatgtgtcagcccaatggaccctaatagcactgataggcccaagcgaacagtaaacaaacctgtaaaatatagagactatgtttaaaaggtgttagtataagaccgttgggactctagacatttagtattttcctttccaagaagcttctaggactttaacagctggctgctagctgtatttgaccgttgtgtgttaattcaggctttagtctgtgtatttaaagccttttatcaacaatgagaagtaggaagaaagtattattttaatatttatcactatgttgctttttcactggccgatggtgaaaacaaatgtataggcaattaaacatgattggtttctagcgagtcaattctacactttttttttatatatgtttttagctgttaactacgtagcctgtttctgcacttgttattggaaaataactcacctacctaaatacagttttctcacattatagacatgtcctttcgtcattctatgttgacacttgacactcttgctttctatgttatcttgacgtcgtgttaggcctaaaagtgtttttaattttaattttaattatattatctaatcacgatggatatcatgagtcaaatctaggttccatttataatacgtaagagcactttgaaaaataataaaatattgccatgattagaataaagcaatttgggtagtattttaatgcctttttacgttactctttttttgttggtcgtatgatacccattagagttataaggaatgtcgctcatcaattatggccctgaaattttcatctttattattttatgtttacttattttgatcaaataaaaccattaagggcgcaaatgtatagttgcttctgaagcttactagtgttgtgaacttcaatggtccatatatatggacataaggttggcaagaaaccatttaatatccaaaattataagagggtgatcatgttcatggtttaaagccaatgcaatggggttcagctactcttttccaatcctggggtttgtcttaatttcgttcaccttggtttggaataatttaggtggccctaaatggcgtgaattgatagtttgctcaacaggagtatcatcttttgtgagtaaaacattatacggttactggaataagttcagagtctagcattccttttcttctttgcatggaaatttcttgttaaaacttactttagacagtggttgtaactgtattttgacgtgtatgtttttcaagattaatgttgtaattctcattttgagtacctcactcacaaatcattttgtttgcttttcacaaacacacaaaatccatccacaatgaggagcttgaccaacaaaaaaaaaaatgaggacagtgcgatgttgcttgtgtgcataaattacatttttacaagatatacataattcaagtttatcactttcccattaagacattagcaatggggaaaataattataagatggtatgaaatttatttgaatttgccatcttggtgtgttccttactccatcccctcagggatcagcaacaacaggaagtagaatgacatttttagtgtgacggatgaatttatgtacataatctcacctcaaaaaaagaatcatttgtgttgcagagaagaatgttttatccttctagcaagcacttgagattttgaagcccctcagcagatatacttcttctgactctaggcctttctacaaccataggaggtggtggttctgagtggaaacatatcatcaccactgtcaagttgtctgttgctcctctctttattgcttcccctattatctccttgcaacactgcttcacatcattgtgctcttgaagcctccttcgagcaaagtctacagcattttggctgcgaaaaacatcccagattccatcactcccaattatcaaaaattcatcttcttttgttaatgtcatcaatttaagttctggctcagcactcaatggtccaccctttccattcatttctttcattccttcaagatgccagtcacctagtgcacgagtcactcctaactggccgttcaggtaaccgtcatctatgtatccacctagagactcaatcctcttcctttctttaatacacaatggcctgtgatctttggacatttctatagcccctccaccacgggacaatacagcgcggcagtctccagcattggcaaccagtaaagacctatacaagacaatggcattcatttagaacattgaaatagtttcatcaaatatccattcaacataactcagccaattgctatgattcgatatttatgcaacttgcaacattggtggagagaagggaacaataaatcctgaaagggaaggcatagtgtgatatataggcactgcatctgacttcaaaatcagtgtgccaccacctcccggatatgaactgtgaaaattatacatggttttacaaaggcataaaagcagcaaagatgttcaccttccaaatataattgcagtcagtgcagttgtaccagaagacagggaagactcggtagaacatgatcttgcaaactctgcatcaatctccaaaaatgaccttgtgactaccttctctaattccaaagggaagtcagcatcctcaacaatcacccgtggcagatgatcacgaacaaattgtgcagcgctcttccctccgtgtccatcaaatacctgcacagtaaaccatttttctctttacatgtcaaatcctgattagtaggatgcatatccacctattcaaaatgactaatagatgttcagtctcttctgaggtgaattttcctatagcttatataatttacttattagtcacaagtttcaagtcagactttagaattgctatactattacaatttctgaaggggaggaaagggggggtgacaatgataaagagtccacaatgtcaccttttaagaaagttcaaaaaaggaaacattttcaacaccgaatcttgcaaaccaggttgaagtatttaatatccctaacttcgacttataacatcatctggtcattgtctagttctatacagatccaattatatgttaatttgcttgcaaaaattttgggagaggaaacttttgaggcttgagtttctagctcattggattatgtgaacacaacaagatgcttgacctttctttttaagttgtccatcattgactacttccttccttcttgctggtcactgtttaggggtggactaagactgttctatttttttttccggtttattattacaaatataacatgactgcatgggataaaatgaaatttatgacaccaggcgaatggcataatcggttagatagcttacaccataaaaggaaatagcttccttgcaaagttcgttattgccaaatttttctgccaagtctccaatgcatatgtgggtatcctccatggaagggcgatctccaatatcagaacactctccagaccgaagagtagggacaaagttcatcatgttctgttttttgtccacaatttctgcatcctcacatatgctttccagctaaaatgtaccacagcagaaaaatgcaaatgagccaagatgataggagccttgtgcagagaaataaagttaactaacagaagacgctaagcaaactcaagaaaaacatgaaaagtaagaaacagatgagtattctcgagtacacaaacacgaatattattctgaaattgtaccaggtgtcaatttcagcagtatgtaactactttcatatctacaaagtcaccaaactcaattttatgaatcaacaaattgtgctaacaaataagaaccatttagaaacaccaatcgtgatttacatgcaagcaatgcaggctgattcaattgacagcacaatcagtttccacattgatgttaccaagtacacaaagttaatctccatccccggagacgaactaatttccgacaaccaattctaacattagccacccttttgataatcacatctgagagaatttcaagatcaagtaacctttagaggtcatatttcattagcaagttctcttcttccacagatacccaagaagaatccaagcaagcgattaacagccatatgggcagacacaaaccaaaatctaattaaaaatagaagaatccatgacttcacaaaaggttaaaataaaaaacagtgaacaagattcatgaacaatggcaattaaagtactattgaagtctccgaagcataattgaaagagtggcctacaaattcaaactaccgtacagtaaagaaaaaaagaaaaaaaaagacaccccataaaggaacagaagaaagagaaagatgaggggaaggaattccttacaggagatgaatttacaacactgatctggtcagagggaattctaaaagaagagtctttttctttgttatccatgtgggcacgcaagagatcacaatgcaaaggccatgaaactctcctattgttatcaacgttcttctctatatgatcttcaccaacttgttcgccatctttcacacacatggtgacaacaaaaacacttgcggtcaagtggcacgttcaactcagcaactggcacttgcacttgcacttgcaggcatggaaattatgaagtaagagtagtccacacacaactccacatattaagagatcacacttgatggaattttgttgcttacactacaaagagatagaaagagagagagaaagaagattcttagaatatgttgggacaatgatggcgttgttgtgtgtttacatataagtgttagtggaaagcagtgtgaaaggagagaagatgggagccgttaagttcctgatttttctatgaaagcgtggtccaaaattgttggttgagtttattaagtggtttcttgatattataatgttttttgctcacaaaaataagcttctatgatgtccctttctatgcttacctatcatcttgtcatcccacctagttttcttttttatgtattaatattaattttcctctcttttttctctccctttattgcactcccataatatcccatgtgaaaaatcttctgcgatatttatacccgaatttcatgtcttttcttttctccatacctgcttctattaattttgtggcttttatttagccatcagtagtagtagtgcttattgcttgatggcgtgttcagggctcaaacttggtaaagataatttccatgaaaataagggaagctggtgcgggaagttggaatacatacatcattaaatacaattgactatgactaattgaccatagatattttaaatgtccttttttttttaatattacagtagttgagcgacattattttaattatttgtaaattttccttttcgattcagttaaattaaggcatttatctcttagtttcctttttaaatgtttttagatgtcaaatctttttaatatcatagtttactgatattaagtttattattgataaattttccctttcgattcagttaaattaagccatttataacttggtttgtttttgaaatgttgaacttttaaatgttagttatatatatatatatatatatatatatatatatatatatatatgtacatcaagattgaaacaaattttgttatcactttttattttaaaaaagcattttaagacacatgtatataaaaaagaaattatatttgtataataagaagagaagaaaggaatatgaaataagataaatgatgtggtaggaaaagttaaaaaaatgttacatacacaacatgatttatatacaaaagataaacaaataaataaaaaaataaatataattgtgttaactataataataataataaaaaattgtgtaaactaggacaaatgagtgcacgaataaactaatatgacattattctagtgtaatctatcttaatttgagttttaaatatacatttacgttttgatgaaagaattttgttgttaataataattatattttatttgagaaatattgtcttacacgaagaatagctgtagttttatacaaagcaaaattaagtaaaacggttttatttatttaaacaaaaagtgaattaaaattaaacttaaaattaatttgtttttcctttcacgattattaattatcctcaatagaatcattttatgccagctagagatgtacgtatagtccttgtttgctagtgcacattcaccctctgccaaccgtattaattgggaataattaaagtcttctatattatgtaaaatctaaaatgcaaccgaaaaacttactaggaaacgtttctatccattttcattttcgtttcttaatttaattaaaattcataaatataaataaataaactactaaatatttttattattaattatgaatatttttttattaaataggattaaattaaagcgatataacttttaaaattctgtacaattaaaggacttttaaaattaaaaaaattattaaaataaaatatatgaattaagatacatcaatttttgcttggagtgattatttcaacagctcatcgattaacaatgtaattagttaatcattaattactaaaacattaaattagtaaaaaaatttaattatcaaaaagttattgatataagtgatcttgacttcagttttttaactaagatgtagattttttaatagatattaatcattattaaaaaatgatagatactctataccatcgtcatgataataaaaaaataatttaatttattcacatttatttcgtagaataaaaaaataagatcatttttaagttatatttttttattttatttttagaatttatttattaatcctattttatatctacttatttttttggagatgagaaggacgagactttgagatcacttttaagttatactttttttatccatttttagaatttatttataaatcctaaacaaattttattttaattcttaaatttgtaaatatttttggtgtttcattctcttctctttttcaaagtcaatgctatgttttttcatataaacatttaattaaaataaaaaaccttaagtatgttttcatataaatatatctcaaattgatagaaaaaatgtcaataatatagtaattaataatttctatataatttaaaatataaaaataacaaaatattatctttaaaatgtaatttttttatttcataataatattactgaacaaagaattcctttagtaattaattaatttaaatttgtgacaaaaaattagagagagaaaaattcattaaa

SEQ ID NO: 3485 - DNA, 877 bp, Glycine max
  Intron number 1 from transcript Glyma19g41990.1 (locus Gly ma19g41990) derived from phytozome v7.0 (chr-ID Gm19; pos 48097841 to 48098717)
actactacatctgcagattccaggttcttgtccttctattctactattaataacgccaaacttaacaactagatttgtgtatttctgttataacacacgctagctagctgttcatttgagcaaccaaacccatggctcttgcgttgtcaatgccatctgcaaactgatattgcaatcaagcgataagctcttcacaggttcatcgaaccatttatgatttgtgggatttcctttttttaactgcacgcatgccctcttccactttttgtaacctcgattcaagcttattaattacaaaatgataatctccttcttcttttttttaaagtatttcccaagtgatattttacttgtccttggactagattttatatccaaaattgttttggtttaactatattttgttctctgtaatatacacaatggtttacacacacatatataattatagttttttgttttgttttgattcttttgatcaaatagttattttttcggttttgttcttgtaatagtagtatatttaataatttgctttttttttatcacttttttttcaaaagaattaattaaaaataaataagttataataaggattaaattaaaaatattagaataattaaaaaaatactagtaaagattaaaatatttttttgtaaagacaaaataattttaaaaagcctacttaaataaagaagtcatatattatatggaccaacaacaacatatttagtatgaagttcattaccttaacggagattctgaatagttgaataatcattaatggttatccaatactacgaatcctagatctgatattacctggttaactcataaaacaggagccaggcaaggcagaaggtgagttagccaaaaa

SEQ ID NO: 3486 - DNA, 2172 bp, Glycine max
  Intron number 2 from transcript Glyma16g27090.1 (locus Gly ma16g27090) derived from phytozome v7.0 (chr-ID Gm16; pos 31117174 to 31119345 reverse strand)
gtcgaaattaccatatttcttcccataagaacaatgtaagtagtttttaattttgtatttttgtatgaccaattgcttgttaaaattgaaataccaaactaaaagttaaaaaaaaaaattgcattaaattctcactatatgttttatatactctattacaaaatccactaggttgccttagtggtaggagattaggataggtgcataaggacttgtattcaattttcattgccaccattgtacacacaaaagatacttgattgcaagaatttattcataaatgtaagaattgtttggtttgaaaaaatattttttattttcaattttttatattttcattgttttatatacatttgtttaagaataggaaataaagtggcaataatttgacatttttataattaaagaagaagaagaaaatgttttctcaaaccatataaccctaagcttttttgttccctttcttattctttgaatgtttttcttcttgttctttttcttcttgagtgccaaattcattgattagtattgcataaaaatgaatgcaaaattattctttgcatatatctcttattttaaagggattgaaatcacttatcttgaactttgtctttttctctatcctatcaatggcattaactcaattaataaaagttcacgtcatctcttcatagtttggaaacgttttggtgtgtatttggaatcattaagtaacgtggatcacatactctcttttcacttcacagacctaaaatacacagaattaagtcttcataactttcggtttacatgcatcaagtgatacccgaaatactacaaaacacactattaatgttacactcaatcgctcccttttctatgtaatggatccctcctttttttaaggttaaaaggcctttatccctgcgaaattaacgttggacgttttccaatacagtgtaagatattagcctggcctcaaaacaaagtttgtgatatggtgagagacaaagcttgagtgtagagattacatgttttttttttttaattgagttgtgtgatttgattgatgggacagaaagagagatagaatttgggaatctgtaatttgaattcatgtaaagaaaattatagagcctttggtttaggaaagaaaaaaaaaagcaaagtggaaatgttttgataggttgtttgatgaaaaaaggtaaaagcaaagaaaattaaatatgcaactaaaacaccaaaaatacaccttataggaagaaaaaaagtattcaaaagtaagaatattttaaatatttattaaaacatttcatctcctcctttctttccgtttcaaagagtttgcaaaattcacgagtcctgcctacgttatatatatatatatatatataaaagaaataaatgatagtatgttttttgttttaaaatatagaaaacatataattgttgattttcttttataccctttatttattataaaaaaattattgagttattaagaatataactcatactcattaattaaaagaaatattctttaaattatgagtaatttcactatatctaaccaccacttaaattaattaattaattttatgagtacttttagaataaaatttaaatttatgataatattaattaaaataaactattttaattatttttattaatgttgaagaattagatatttatttcttatatatataaatataattatatatataaaaatgaaagtaatatatactaagacattttcttttacaaacatagtgtacgtagaagtgaaatttgtggtttagcattagttctaactcaaatagacatcgaaacttgtggtatgacaatagatgattaggataataattaatggattatatgtttaaaggtgtcatcataattattatatgtaaatattaaaataaactaatatatgttatgtaactgataaaatattatttttgtacaacattacagttcccgtcaaagttagatggatgttaaaggattttcaagagattagttaagaaaaataatttaacaagatttgggttactaatctgtttacagtgttggcgtgtgctttatgtatgaactaatcaatattttaaaagaaaaggtttgtaaaactttcattaattttgttcatcatttctaggtcccacttgtttattggtcttctttcccttgtac

SEQ ID NO: 3487 - DNA, 971 bp, Glycine max
  Intron number 1 from transcript Glyma06g04980.2 (locus Gly ma06g04980) derived from phytozome v7.0 (chr-ID Gm06; pos 3518193 to 3519163)
agataaccgagtgtaccataaggcttgcttcagatgccaccactgcaaaggaacactcaaggtctctctctctctctctctctctcttatgcactctttggatttgtatctacagatatatataataataatgataattcttcatggttatgtagcgtttgactctagttgttcagatctttctgtacctggatctggtgtctctagttgatcatctgaacaaaccagtggcatcaattttagcacttgctttgattgattgttctgtgtttttaaaattaagcattttcattacaagacacttcctgtgaggactcttacctgttcttgatattgttgtaattttttttctcttaattttctttccaaaaactcgcctggatttcattttgtcgaattatgaaccagcttttgaaattaaaaagtgaaaaaacatgtattatacctcagaatacaatccatccaaatttagattggcaaatctatctacttgtgctcatttattttcttttattttttgattgatgaggtggatggatctaactctgcctcctcccttttacgagaaattacagtcttggccaattaccacgtgatgcattattaactccttttcataaattaaaaattgattatactaataatttaggacaacataattctgaactatacaataatttttttcccttttactgtttttccactaaaactgaaattggtttggcaatctttagtttttggttgatatggtttaatttgtagatgttctgttagttttcaaaaactggctatggcaaataatattggtacctctttgccttcttgtgtattgaggtgtgtaactggatttaattttataaagtttactcacagagtattgtacttttaattgcagcttagcaactataactcttttgagggggttctttactgcaggccacacttcgaccaactgttcaaaagaactggta

SEQ ID NO: 3488 - DNA, 5539 bp, Glycine max
  Intron number 6 from transcript Glyma01g16610.1 (locus Gly ma01g16610) derived from phytozome v7.0 (chr-ID Gm01; pos 20496876 to 20502414 reverse strand)
accaaggtatcttcctcttgttttgacttctgattgatttagaatttattgttaatttttataatagcaggctgatagaaaccactgtcaatggatgacaaacacaattgagaagaacagtgagttatggaaactaatgtggaaatgcgtattaatcaaggaaaagcaaatacagagggatcagtatccctactgcccagggctaagctcctccagaggctaaggctctctgtccataactaactataatattctgtacttctctctcactaccagcatccccttataccgtattccactgacatgtatctctttcttctacctcagcaattattctgtgttttccttcctattcctcttagtgtagactctccatatggtgggcctggccaactgtagagaacaaggcccattagtatcagagcccaataatgaggtcctaacattgtccccctcttgagaaacagacttgtcctcaagtctgaacatgggaaattgactccgaatgttgaactattcctcccaagtggcttcctcaacagccttccctttccattgcaccaacagttgactcaccaaatccccccatttttcaatggtccgggctgccaacactgtttcaggctcctggacagtagcggtatcaccctccaaattgttgggaaggtctttttcaacacggtagtctccaatagccttttttaagagggacacatggaaaacaggatgaataggagcagattcaggtaactggagtttgtaggccactgcacctattttttccagcacctgaaaagggccataatactgaggagacaatttgggattgatatgggtctctactttttattgaccatgggaatgtagtttgaggaaaacccactcacctactgcaaaactcctcttttttcacttgagatcaacctgagtcttcatccggcactgagctcgttgtaggtgatgctttagttgacgcaaatcttcatcacgatccgacaactttcgctgcactgcttctacctttgtttctactatcaaaaaacgagtaatttctgggggggggggggtctaccatacaccacctcgaaagaagtagtgctcgtagacacatgaaaggtggtattgtaccaatactcagcccatggcagccataacacccaagtcttgggttgatcaacaataaaacatcaaagaaatgtttccaggcatctgttaatgaccttagtttgccaatctgtttgtggatggtaggccgtgctcatcttcaaccgactgccttgaagcttaaataactcccgccagaaaccactgacaaaaataggatctctgtcactcaaaatagatgcgggaataccgtggagtcgaactatctctttggtaaatacttcagctatcaccttagccgtgtaacggtgtttcagcggaatgaaatggctgtactttgacgacctgtccaccaccaagagaatggctgcaaaacctttggactttggaagttcagtaatgaagtccatcgagatttcttcccaaatctgattaggaatgttcaggggttgcaataatccgccaagagctgtggccaggtacttttgcctttgacaaacatcacattccttgacaaactgtaggacatactttttcataccaatccaatataggttagcttcaatacgcctataagttcggtaaaaaccagagtgaccaccttgaggagtggaatggaattcctggagcagaatagggatccatggaaaattggcagaaattaccaggctcccctttagaataatacaccattagtgtaagaaaaacctcgcttggcctcaggattctgttttaatgcagcaataatggtggtcaatactgcattgcgatgcacctcgccaatcacttccttgcctgtctgtcattttgggtaatgagctaacataataagcttccccttgccatacatccttgataaaggatcagcccccgtgttctctagacctggtttatacatgatgtcaaacctgtagcctaaaagctctgcggcccaattttgttggttcattgtgtttatccgttgcagcaacaattgtttcaagctcttttgatctgtgcaaacagtgaattttctgctattaaatatggttgccaatgcttaatggccaaagctactgccataagctcctttttgtaagctgatttggccaaatttcgttcacttagtgccttgctaaaataggccacgggtttgccctgttgtgtgaggatggcccctaacccttggcctgaagcatcactttcgatgacaaactctaggttgaaatctggtaaggctaacaccagtgccatgattatcttttctttgagtatttcaaaagtctcctgagcttgaggtccccactggaacccctccttggtgagaacagtcaatggttgagctattttacctttgtctttgataaacttccggtaatagccggtgacacccaaaaaacctcgcacgcctttcacgtgcttaggtaccgaccattggtgcacactcttgattttattaggatccattgctacctcgtctttggagatgatgtgtcccaaatactccactgaagtttgagcaaaataacacttcttttggttggtcagcaactgttctctgcgtagaacctccaacaccgccatcaaatgctgcatgagaagcccaatctggcctaaagactaatatgtcatcaaagaaaactaacacccacttcctcaacattcctctaaaaattttattcattaatgcttgaaacgtagagggtgcattcattaacccaaatggcattactaagtattcgtaatgcccctcatgggtttgaaaggcagttttatgtatgtcctcatctctaacccgaacttgatggtggccagatttgagatccaatttcgagaaaaaactaagctctatgtagttcgtccaataactcatctatcacaggtattggaaatttatatggcactgtcaccttatttagagctctataatccacgcacatacaccatgttgcatccttcaccagaatcaagggactagaaaaagcactttgattcagctgtatcattcacctacttcatctgcttctcaatctcgttcttgtggtggttcggataacgatagggccgcacattaatgggaccttgtccctccaaaagaatgatggcatgctcctttttccgtggtggtggtaagcctcggggtttcttgaaaatatcttggtactgagtcagcaaattgttgacctcgtgttcctgctcagagagagacctatcactactgattcttggcctaatagcattactgacctgcaattttgtgctgaaaaacaaacctttgaccacttggtaaggcttattaccgaataagctttgaagtgccacctgcccggtaaccccattttcctcaccatgtaattcaacccattcatcaccatgttggaattgcatgctctgtttcctcaaatcaacccagatctatccaagagaggttagccacgacattcctaaaaccacatcaatgccctccaatgcaaacagcagtgcatcaattgaaaactgaagagcccctaatttgagctctacccctttacacgctcctgtagttatgaccttatggccatcccccatcttaatgcgcattggacaagtgtcctctatctgaattcccattgctgtcaccaatttcgaagaaatgaaattgtgtgtagctccactattgaccaatatcagaataggaacccctcttacaaaccctttcaactttatagtgttaggtttccagcctttctctggattgaggcttcccaaatgcatcacactgcattcaccatctaactttgttgcatccgtttgattcgcagttaacacctgggcttcgccttcgtcctcgtcatcgtcatctaacaccatggcccgcaactgccgatctaggcattggtggtgagagtggaacaccccaccacatcggtaacacaaccccttttgttgttgatgcagaagctcacgatatggcaaatttatgaaatccttgtagctgagaacgaaatggctctcttgatgggccaggcccattagtttcttcttcccgcacctctttacttcctcacatggacccccattagagccattgatgtgacttgcaagaattgggctggttgtgacatgttggttggatcggtaattggagcccgacccaaacctgtaacgaaacccaggagtctgttgcatctgatttcctccttccttctttgacaactcttgttccaccgctcttgtgagattcaacaaccgtgaacgtgagtgagcctataactcgcatgttgcgtgtacgtcctcttatgccttcctttaacccatggatgaaatacccaaaatattgatcttctgggaggcggtgtacctgggcaatcaaatgttcaaactcttggatgtactcatctacagcacccacttgctagagtgctgaaagttgctcataaaaatcctcttcttttgatttcaccatatcgctccaacaactcgcgtttgaggtgctcccaagtaacttccacttcattgtccagcaacaatttgaagaaatggatctttgaccccttcatacagagttgggccaagcttactcagatctccgggctcgtctcctaaagctggaaataaatctccgcacgcaccatccatcctgctggatcaattccattaaacataggcaattccaccttctttgcagattggcggaactcgttgatgatgcctccctgcaagctcttcacccctgaacctacggtggaaccaatcgacaattgacaatcattggtcaagcatggcaaagcatcgcttggttctcttccgcctttgattgcattgttttgaggacatttcgaagatttgcgacttcattctccagggaccctatgcttccatcttcggtggcatctggcaggtcggtccagtttgatagaaaccactatcaatggatgacaaacacaattgagaagaacagtgagttatggaaattaacgtggaaatgtgtattaatcaaaagaaagcaaatacagagggatcagtatccctactgctcaaagctaagctcctccagaggccaaggttctctgcccataacaaactatagtattccctacttctctctcactaccagcatccccttatccactgacccatatctctttcttccacctcagcaattattctgtgtttcccttcctattcctcctagtgtagactctccagatggtggggcctggccaattgtagaggacaaggcccatcagtagcagagccctcaaatgaggtcctaacacaggctaatgtgttttgttcatttttttcatcagaatgttataatttttttatggattgttcgttgtcatactttgggtaaagcttaggaaagtaaaagttatctgcatgcaaaagagtattaatggtggatgatcttagatttaatttatattatgttccaggctgacgaagttgaagctgttttgtccaatacaaa

SEQ ID NO: 3489 - DNA, 2611 bp, Glycine max
  Intron number 1 from transcript Glyma12g02280.1 (locus Gly ma12g02280) derived from phytozome v7.0 (chr-ID Gm12; pos 1423670 to 1426280)
agattctaaggaagatccacccaaactagtgcctggtcagttctcaactttgctttgcttcaatggttgtatgtgtagctgagcaatatgattgatgtttttaagtgaaaacactagtactagtttagaacatgaggggaaagttaattgttcatgtttttagggagagtttgtttgacttataacctagtttctagctctgggttgtttgattgtgattgagttattgattccattttgtgtctacattctaaagtatgtgaaactgaatgttgccaagataccaatcagtattgtcaatgataagtggtgggctcatagacatgcaatggatggtgaagctgcaaatggcgggggcttggaaaccttgttataaaatgtaaaatatactaaaaggacctgcagaacacaaacaaaaggaatttaatgaattatatctagaacaatgaacataataaaaacattttctggcaaataaaaactcattcctgtgtcaacttaaagctaccatatatagtggctgtgcaagaatgctatctagttatctagctcacaaagaaacaaagaaatagtcagaaacacatggtgtgatttgcataatacagacaataaaagaaactgagaaatgcctaagtagttagaagcagagacaaatgaaagatatcacaaacagtgtttgagatttgataaaacagagactagggccttctgagaagatacaaatgaaagatatcacaaacaaaacttgagagagtatatagacagagatgatagaatttgttcaaaattttcacccatcgcagtctagaaacatgcagcagagatgagagtaaaatggatcataaggttttcatcatttcatgcctttctcttcattttttatttttttattttttctgaacaagatcaagtaggaacaccaaaacattgtttaaaaattggtaaccatgtgttggaggtatgggcagacttgccaaaatgaggaaattctcatatgcctctatcattttcactcaggtgaatgttcattttgagaacacagttttcaatacaagtgttatttttttttttggaaggctcaatacaagtgttataattgcaaagcctgagtactatgtgttttttcattcttcaaagctcaaatcttattgtttggacttatcattggatatggtatatttggaatttggatatggacccatacatggatgtacatctaggatattataatgcagtgaaagttcaacttgatttcagattattcctctctacaaataggccaatgctttttaagatagcttattagtttccgaccctaccagacattggaattcttcattaacatgtggccataaaactgattctttcctcaaattcttattgtcttcattgatctatttctttcattcttcattcttatgcatttttgctgacagtggtgcattctccttgttgtgactctttagtgggttaaaaattcaaattcttctactaggatggcaataatgtgaaaaattagggtggaacgtggaggtgaaaacaaacttgttatgtgtcttaaacatcccaatatattctgatcaattaaataaaaaatgctggggttgtttcttcatttgttaggaagaaaaaattgtcattcttcccattctacaaaagtttaatggcgaataatgtattctaaagttatattagggtagtgtttgatccaactttttggattctaccgaatacacaattttagaataattcccaaaagtgattttttttatcaaatgaaaaaaagccctaaaggtagatatagaagctaatttgaggagcttttatttttaatgagaagatatgtcccccaaaattttatgccaaacattactttggtcattaatgctacatttaaatacttctcattgggcaacaggggacaacattttgcaacatggattagatgtgtaagtgaggaatacatgctttgtgatgtatgaagaggagaccaggtccatggatgagtaggggctagtgaatccagtgtatatatgaagtttcccactagatgcactaacttattgcccattaggatgaaatgtttggaagtgaataagaaagtgacgatgcggaatagtaaatttatttgttagcatttttgctggtagttatgtacaatttgtggaggtaattgtaatttgatcctgaattgattttggcatctttatcttagtgtatataccatcttgacttcctcaacttaaaatatagactgattgaatgtcagggctgtgcttgccagtgactccttgagaaccttgatggcaaatctgattttgtcagagcccttcattagccatgctccttacaattgaatgctgtcgacatttaataattgcttcccttgcatattgtacatgattcacattataatattattatgacaatatttgatgcatgtaactgacctcactaaatgggaaagggttgcttgttattgttgttcccttacatatagtaaaaacattgaatttcccttgctgtactgtaaggtgtattttatgtatccaatttgaacgttttaaatattctattttctgtgcaggaagtgagatatcattctttaaaa

SEQ ID NO: 3490 - DNA, 173 bp, Glycine max
  Intron number 10 from transcript Glyma10g01400.1 (locus Gl yma10g01400) derived from phytozome v7.0 (chr-ID Gm10; pos 1029927 to 1030099)
gggtacgtttgtcctccaatttcttgttaatttagatttgcttggtaggattattaactattgacatgatactatggatactatcatgaagcacaaatattctgtgttttttatttataaattttcgtgaatttcttgaattgtttgcttgaaggatctgaacgcgctgaggg

SEQ ID NO: 3491 - DNA, 1588 bp, Glycine max
  Intron number 1 from transcript Glyma11g19950.1 (locus Gly ma11g19950) derived from phytozome v7.0 (chr-ID Gm11; pos 16754036 to 16755623)
ggccactattcccttcctcattccaaagctgcaaggtaattccttttgaactactcatagttttaggtgaaaaaataagaacaaaaaaaagaaaccaattttttcataagttaaagtgagttttttatttatttattatcattagttaatttgtaggtattttctcaatcttttaaaaaaattacatgagagaacttctataaattaatttatggtgaacttattttaatttatgaaaaagctcattctttttctcttcttaattttcccttagaagtactttaataaaaaataaatccaaacatgtccttctcatctaattaatatcattatcacttcctcaccaatgagaagtctggaatggcaaagtgatgtcattcagagtaaatgtcttgtgatgactaaaaaagtgctttgcaactaagaaaaactctttttcttcttagtgatattaaagtcggcgattgttgcatcgctttcttttctttttttttttaatggaaatattctggatttcgttgcatcgaaaaattctgtacatcagcatggagaagaatggtcacttggtatggtgcatcttccacccagtatttttccagaaaatcataagccaaatttgctaatatatatatatatatatatatatactattccccgcccactttataaacatatcaaaagttttaaaatgctcattcaacactgtacaattctccagaatatcgtggaaataagatctaggacgtgtcttcatcctctgccactgttggcatatctattaagcaatctgtctcaattattgtttttatgggtgaaatctgtctcaattataataggcaaatacatctacttccattttttttaagtacaattttttctatatatatatatatatttgatatgacttaaatgatttttttaaatcttattattcttttcacattgttcgcatgttttttctccatgacaatacactccttccaagacaaaacactcccctttaaaatgcatagcccatctatgccaaaaagccttagctactattaatattggtttactcaccattattttcttttgtgtgtatttttttgacaaattattttgtgtactgttactcgatctttacatattcaaagtcggtactggtctttttttcagaagaagtcagtacagatcttaagtagtcataaattgtcctacaaacaatatgcttgtagatataattttgaaaatcttgatcaatatcacaatatttttatatgaaaaaagtcttttatttttttaacttctaatggaatacctgcaagttgatcaacatcctaatataattttataaaggggtcaaattaacatacaagctaatcaatgtaacttataaattactaaaatattttatcaaacacactcttaatattatatttgttgttgaatttggatctaaatttaattatgattacacacccattgttggtttgaagtttgtgaattaattcaagttctgtattttgattttgatttaattaatataaaatttgtccttttaattactcgctaatagatgatcctgatttgaattgccatatgcaga

SEQ ID NO: 3492 - DNA, 2988 bp, Glycine max
  Intron number 2 from transcript Glyma11g20480.1 (locus Gly ma11g20480) derived from phytozome v7.0 (chr-ID Gm11; pos 17279640 to 17282627)
cgaaactcggcagcaagagtttctctgcttctgtgagttttctgccctcatttcatgcctctatgaatggatgccttttgtgtggttgactattttgttccaccgtgttgtcccgttgcctaatgtagaggggaaactcggaattttacttcaattcagttcaactgtatctgataaatttattgtgtgtgtagtttaattatgtgaaactgaaacaacatgaacatatcaacattgaagcgtacattttgttgatttgattgcttttctccaaattcgattactcaaatggctatttcatttgttttcaatgaatgtaaccttcactgtagacctacttagatagctgaaattgtagcagggatgtgaatttctacaataatgttgttcaggaaatttgtcaggttgaaaaaaaaaagtaagaaacattggtaattcaagcctaaaaaatcagcaagtaatactgagtgagtgagaggggagattatcttaatgctttaacatcctttgactcaactctgtgtgtttctcttgccctgttagatatagataccttgccaaacttctctgtgcataagagcagattcattggatgacgttagtctagtttagattttagaagataaacttgtaaaaataatatgctaaagattcagttttcatgcatttacttgataaggagtctatgaagcccaatactctaaaaatggcagtttcagtgtcatagccatattcaacactggtatgtgtaccacaccttgatgtttatccaaggagtatcctccattctttattttttaaatttatttgactgatacaattgagatatggctttgatactttgaaaaggactaaaattacataaggctatatctttcctttgtatctttatagctatagtagtgggcagttatatggagctaagactttttgtgacattttgacatgggggttggcgggaagtatgtaactttgtaacatgttcattggggaaattgtatattttgatctgggcaatggaaagatttgtaagaacagttttttcttatgatcacatgtattttgtaaactttgatcatcatgcactaatatagttatgtatttataagaaatgccaatgtctcctcacattacgaacactgaaattgtgcatttattcaaaagtttttttaattcatgttaatatatctaagctgtattgtatcgccaatttttaatattttctcatatccccacatttttttcatactgtacttatgttgtatcaagtatccacgattgatggtaagcaggtttattcagctactgccattgcatagtctgctagtaagttaatttttgacattctgtcctcattagatgtttcctctggcaaagtgacaggaggagtaaagctaactttccagtggttctccgaattcccttgaatcctcttgcttatgcttttttttttcttctctatgtacattttggtttcaaactcaaatcatggaagagggaacttttattgagttaaaggtatacttaaaatgtttatttgtttcttgctgttcaaaagttgtctactaacaacttttcttatatgcttattgcttaatttgctgctattagtttttaaatataatagttgacaccatgaaaatctttgtctcaattttcttggtacacatgcctgccttaactttgtgtggtattgccctcaagaagtgacaaaaattctatgcaatgcttgtacgttggaagtgttttggttattctgaatgatgacattgatgagtatatgtgtattcatatatcaaaacatgtaaaatttgctttcttggatcctttagaattagatggatagatgtgtcatgtgtgcttgaacttggtatatgacacattagtgaatatccctcctcctggccaaagcctttcctgtctatataggtttaaataaaggaaacatcatgcactggcaaggttgctgacagcctatgaagcacggacactcttgccaaatggtgtgtcagcgtgttcggcacttgtcaaacacgcctttgacatgtgtcagacacccttacgccaggtcttaattaaaaaatattttatccgactcgaacacctctctgacacaccttgttcatgagtcagacacctctttgttatgtctcaattttatttctgctcgaatccttactattttttatggtctattattatatgaaaattgtaaaacttaactgtttttagaaagtgaatatgtaaaaattaattctctctccacacacatacatatataaggagggatcaagttattctaagagcaactctaaagagttactcctcatcctcaccattcatttttcttggaatctaatggttaagattttagagttactctaggagtaacttaacccccccccccccccacccccccctccctcaagtgtcctatattttgggcattaattgtgctgtggtgtccgttttgcatctggtatccatgtaggagttggtgcttcatagctgacagctaagctaagactgctcagtgatctcagattaaatagaaattgtcttgcggcaaggattaagtagattgagttgtatcatacagcttgtttagccacaaacaatcggcaagtctatgcaaatcatgaactgaagctgcaaatgacataagtagttttaccaacaagtttctttggttcgtgatactattgactttatggcatctgataattgagaactgtacatgttttttaattgtagcattcaattcatgtgaatggctctgtggcatacacataaaatgttagaagaaattacctagtatctctctttcttgttgcttaagacattatgtactgttgaaaatttccctctttatttatctagatacatacacatattcatcttatgtggatctgattgttttatctttttttgttgctttgatgtgtgttttcccaaaaaaacagctagcgaagactgtcagacctgcat

SEQ ID NO: 3493 - DNA, 564 bp, Glycine max
  Intron number 5 from transcript Glyma05g30140.2 (locus Gly ma05g30140) derived from phytozome v7.0 (chr-ID Gm05; pos 35573982 to 35574545 reverse strand)
gacttgacaagagtgactactaaagagttgatagcgtatgtgtgcacttgttttcttgccgcgtccattatttattcatatttaacatctcagactcagcttttgtgttgccttcatagtctgcataaacatgtagaaattgatttaggagtaattagcttgcccttttccctatccttatcaatatgtcatgaaattttgatttatttatatttttgttttatatataatggatttgcccgaactgctacatgagtcagtcatgtaaagttggtagtaaaatgtaagtatatggtttatggtctgttctgtagttcttatattatatagggagtcaatgtgtttatttgttcaaattcttagcatgcgattatttactcttatttggcattttttgtgtgtaaatatgtaacgtagttacacatcaaatttatttcgcatgccataatgatcatacatttccctatatttcttcatccctgtaatgactaatgagaagaaacaggagtattttaaagattcttttgatttttttgttgacctgtgacagaaaatacggccttg

SEQ ID NO: 3494 - DNA, 1809 bp, Glycine max
  Intron number 1 from transcript Glyma06g00460.1 (locus Gly ma06g00460) derived from phytozome v7.0 (chr-ID Gm06; pos 213345 to 215153 reverse strand)
ttcaattgcgtcggcgaggcggcgaaggtgctgtctcccactgtgttgcttgatggggttcgaagaagaagacgagtttaaaaaattgtgttgattttttctgtattccatgacgatttttaacataaatcatccactcccacggtcaataatgagaccaaggagggagtgacgtaggtataaaattaatcaagctaaaaaaaatatcagattttaatgttgttaggatgaaaacattactcaaaattttacagaattaaatctaaatatttttatatttatgagtacaaaaatatattttattctagtttcatacgttttctttgtataagactccaagtaattttttattttcttttcttttcttttttttcaatagtcaaggttagataatctataaccttaattcctaacggtttaataatacttttattatattaagacttaatgatttgagatttttttaagaattaaaaccttttttaaattaaaaactaaattccaaaaattagaaatactaaaatgaatgtgttcaaatgagatttttatttaaaaaaaaacttctatactaaaatcgtctttaaaagaaacaaataaacaagagagagagagagcaaagcatcttctgcgcaatggcggtttcgtcaacaactcagtttcggtactttgcttcaatttccttcccttcgatttttcatcctttctcttcttttaattacgaatttacgattgcttttctttcttcataacttgcttttactcgctttattattgaatctggagtaaatggctttcttgatattgacatgagatgagagggtaccaaatttttgcttactgaatgattcgcttattctttattattagtttttcaagtaattcattcatatgctcacattcggattattgactgtgacttggagtcctgctactcttatgatgccattgtctttctttcctgtcaaaattaattaatgaagtagttgttggcttactgactttattagtcatttgagtagttaatgttttcaaaactagaattagtacatttcccaagaattccttttttcttaatgtagttaccagaagtttcagaaactttggacaccactagaagttccagcacagaattgagtataaacagtttcgcttcttcgtacatgtagaaacttagggaatagaattttatcgccatgtatcaagactccaatgtctagcacccttcttgtgcaataatctcccttgatatactgatttctactgcttgctttctgtccattttccttcattttatgttttttatttcattttttccctcaaggcttgaggctggacctatcaattgattaattgcagacctagtttttatttttgtagtcaagtttcttgtatgttgaagttatttcaaattccttaatggaaggacaaattgtttattgcttaattattcttccattcagatatgatttatttatttttgttttgttagtaaaaatattaggtttaagttttatgttgttgaaatcaatttacgaatatatagaatcaaatatcaatatggaaaatcagttataattaaatatggaatttatagtcatgatctaatttgtaatataaaatttaaatatttaatttgttcagtatggaatctttaaatttcacatatgctgaagtgttctgtgcttctgtcttcttcattattttgtgttaaatatgatcattccaaatgttttatgtcttcattacacaacagttcgtgcttgtatctcgtctcaataagattgtatttttctctccatttcagattta

SEQ ID NO: 3495 - DNA, 1017 bp, Glycine max
  Intron number 9 from transcript Glyma08g22800.1 (locus Gly ma08g22800) derived from phytozome v7.0 (chr-ID Gm08; pos 17294627 to 17295643)
ccatactaggggcagttgtcaaggtaaattgttttattcagtattatgcttgtagcttgggtagtggtctgtttgtttggattttttttatagttgtaacttgtaagactacatttcttttcatcacttatttacaatgtacaaaactacaaatagaatttttggtttcagaaatgaaaaatttaagatttatgctgttcatacacccatatggctgaacttttcgtcagcttaaatgtttggcatgtaatcatctttgaagctgctagcctgctattgtaatcatatgttgctttcagattgaatgattaccttatatatgttttactctctaaacttaagagtaggacatgtcttttttgtcttttctttatgataaaaaggatgcgtaaatgcgtaatattgtagaattaggactgtcatactatgtgatttctttatttttgttcgttcttgcatattctccaatattcagttttgagcctttccttaaatagtgttttatacaatgtcccctcataaagtggttagttataccttccaccatgggatggaaactatgtcatgaatatgatgataaataacagtgatacaggggagtaacttctttgtttcttttggccattgaaaaatcttgctggtgaaggctttgttacacctataagtgtttataatttatatttatataaccaaattcacttgatttttaaaaattcagaattgatcttttgaagtcattttttaaaagatattcataataatattttttataagtaaagcaaatttacctcttgtgcatttgacactaatgggcccctttccatatttcttatacgggagtttatctttttgtattattgaatttaagatttgatatttgcgtgattccttttctcttagccatttttaagtgccaatgccgaaatatttacctaatgccatcaatcaatttaatttttggtacgctaataggtgaagacagttaaaggcatttctgaacttcaaatacctcctggt

SEQ ID NO: 3496 - DNA, 5612 bp, Glycine max
  Intron number 9 from transcript Glyma01g27250.2 (locus Gly ma01g27250) derived from phytozome v7.0 (chr-ID Gm01; pos 36375067 to 36380678)
ggaaaaacatctaaagagtcttattcctcaggtaacttgctatcacaatctttcttagcatttgaatgaatgttgcatgattttatgcattgaatgtgtgacaccctcaaccccgacagatatataaataagaaaatcataaaaatatgaaattttattaaaccaattttattcaaatcacgtaaacaaatctatgagggtaaaagggttacattcgtttcattcttatcaaataaaacttattaaaaacatctccgattcaaaacaagatcgtttaagtttacaaaaggaaacaaattaaatagtagaataaaataaaataacatgttcagaatattatgccaataatatagaaatccatatcttaatgtcacatcctatcagagtgtcgtgtcccagcgaccgttaaaccgaagttctttaaagccatctacttaatcatctgttcccgcgaacataaggttcgagatcatcacaggatctaaatacacacaacacacaggaagtgagttatcacattcctaaacaggtagagataaacaaaatcacatatatctaagtataataagctcaacttagcatatttcagatcattttactactcatggtgtaacattacttgttctaaagatttaatcacaaaatcacattccacactttcacattaatcacatgttcagaacaacacatctcaaatacaacataatgtctcactcacataattcattacccaccatcgcgtaacaagttacaatagtcattacacaagcgttatgcaacagatacactaagactcaatcctatatgaaatgtgataccatgttagtgagaaatctcgttgggcgcctaggaatatatgacaagacaaaccacatacttgtaaatcagataactcttactaggtaaaatcataagaaaatcggtcagagtcatgttgttttgcgagaatactccaaccatgtgggatcgatatatacttaaaggaacactcaaaccaggtgtatttattccaaggcctagactctgaagagtttgtcagggtttctcccttctgattcaggtccaacatagaaaacattttagcacgtagactctatctatgaactatacaaaacatacgactcctcaattattctcaaaatgattttatcttgtcgcacctcaaagtgattaaattcgttgggttctcacagtggttcccatcacaatactcatcacgcattaactcgtcgcttttaaaggctcttacagtcgtgtgattgtatgattcatacctcacaactcaatccacacaacatctcaatacacatgtatattacaattcaatacatactcaatttatcagatataatcaatctcaatcacaatggtataattccaaagtaacatgttatcacacctcatgaatcatatacacaccacataatattaatatatatatggtataaacatagactttacctatgaactatgcaatacatacaactactcaattgttttcaaaatcattttaacttgtcacgccttaaagtgattcaactcgtcgagttcctacactggatcccatcacaatactcattgttcttaaaggattttacaattgtgtgattacatagttcatagctcacaactcaataaatacaatatctcaatacacatgtatctcacaattcattacatcttcaatttatcccttacacataattgcaatcacaatttcatgatcctaatataacaacttatcatgctaatttagtaaatcttgtccaaaacacaaataaattatacaacaatatttctcacaacatggaacctcaaacaattttacataatcatatcaaaattaaaggaatcaaaatcataagttaaaaacacaaaaacaccaagaacactcaattttatcaaccaattcgcatcaggacatcaattggtctgtcaaacacaacaatctcctaattataatcataaaagaataattacaatacaataaacatctcaaaataaacctaattgccataaactcatccgttacttccaagaagactcacgtgtgtagtccgatagcgataatgacgtcttcagtggtttcctaagattcctcaagcttttcccttggttgctctgttaggatttccaagcgttagagagagagaagagattggaacctccatttcactgtctttgtgcgtgggacatttttctcaccacatacattattttgcaaattccatcggtggggatgtgcaagaatgagttccaaacctggtgttcaaatttcacgacgatccaatggttaacgagtcaaagatcatagttttactaggataggtttgaatgtatgtgcgaaaaagagagttccaaacctggtgttcaaattttacgacgatccaatgattaatgagtccaggatcgtagttttactgggataagtttgaatgtatgtgcgaaaaagagagttctatgcgagagatatttctctcaccacatacattatttcgcatatcccaaaggtggggatgtgcaaaaatgagtttcgaacctgatgttcaaatttcataatgatccaacggttaacaaatatgggatcgtagttttgctaagacgggattgggtgtatgcaggaaaaagagagagttttggaagagaaaaaaagaaaaacgaatttgagaagagagagcgtagaaacatatcgtaaatataaaaattgacttaatatgtctctacttataactagggtattctcagcctattatttactcttttattttattttattattttataaaaaagaactctattttactccctatcaaatgaataaataaaacatttttttttattttctaagaatatatatttattttatttaccttagaattattattttaattaataaaattatttctccttatttatttaattacaaaaatcttattatttttctaaaaatctatttatttttatttttttttaatttattttaaaaaaatggagtattatagtatgtggtcaataattattcttgtttacatagcaatcaatatatatgatataggatttttttagaattgtttggattgatgggataaataattacagaatgaacgtagactgtagttatacatgtcaaaatgatgaatattgaattttaaagatgaaaggtagagaaaaataaataaggggaagtggatgtatcactccacttctatgtttggttcacttccttttgtgaaaattgtaaatcgttataagcttacttataattttcaagtgcgacatgggagttggtcgagatagaagactagaagtatgaaacttttatttttaaaaacttctttctctctttctctgtcatgttgacgaatgatggagaagaatcgtagttttttggtttgaggaagaggaaatctgtgaatgctttctctctctttctttccttgtgtttattattagtatttttaaacagccttgttgacgaatgatgaagaagaactgtaggtttttggtttgaggaaggtaaatctgtgaatgtgtttagagtggatggcttctcttagaatgtgggttatgagcttaactcaaccctataaaactgacttgtaagacgagggttgcccccacttgaatattttaatttggtcatatttctagtttgtgggaatataccactgaaccaccaccctcaagtttgcactttaggcgacacccaaagaggccggcaggctaaggggtgtctgcaaataaggcggctctttcaacagcttcgttggaggctggaatcattatgacacattgctgcatggattcttctattattgcacactatcttcatcttccatcacatccacaagaatgactaaagtgaaagggaactcttggcacgtagtatctgcaaattcaggatcagaaggtaattcgaagagttgttgaacctgagaaatgatactatgtgatatttgatcaaggcttgatgggaagcatttgcgagagcactgagggttggatatgaaactttgtagaaattcttgatcattttcaaagaagcttttacggattatgagtgttgaggtttcaaatatggttgatgctctaataataccttgatatgagaaataatttgaacagtgttgaaaacagtcatatggtctacatgaatctctagatttggggttcattgccaattcttctgtttccacataaaaatagtataaacctattctttcttctaggttggccatgttaaatagtgcatacggaggaacaataccacaatgaacaatggtgtggatgaatagtaccacactaaacaatgcatgcggatgaacaattgctatgaacaacactgcaaatagtgtatgaatagcaaactgttcatggtgctgttaatagcaaactattcatctgcatgctttgtttactgttgtattgttcatccacgtgccctgttcaacatggaaaaatagaagaaaggagaggtttcgactgttttgatgtgggatgtgggaacggaagaacaagtgatgatgcccaaacccagaattactgctctacactgttcaaagtatttcttgcatcgtggtattattagagcatcaacctcaatattaggctaagaaagcttctttggaaataatcaagattttctttgaagtttcttatacaacccatggtgctcttgctacttcttcccataaagccttgaacaaatatcacatagtattgtttcacaggttcaatcactattggaataacattttgtttctgaatctgcagattcagaatgccaagacttggcctccaacgaaaccatccactctcagaaaacattgacaaatttactcttcctcaaacctgaaagctaccgttcttcaacaagaccgttaaaaaaaaatactaataatacaggcaccagctgacataaacaaatgatgaagttccaactaaaaagaaagtaagtgtaaaacaagtttttaaaaacaaaagttcaaaacttctagtcttctatcccaacaagttgaaagctttatattcctaggaaatatgtatggcatagtggctattagtattatgtggagttacatttcttgttattgttgtttctctttaatgtaaatcaatctgaaatgattataaataagaggtgctgctgactactaatttcatcatatattattctcttcaacactagacttgatcttgaagggatctttggacttccaaagggtcaatagagcaagtccttttatcttattagaagacaagtgaacaaagtcaatgaaacatttttagtctaggtcttcacagtattcctcaagagctatcggttttactttttgaattctgttactttgcttccaagttgttagacaaatgtgttgctgatgatagattatagaatactcgcgaatatcactttatgtaggtacattagatttaatttagacaatgtgttcgtctgaaccaattaatgttttttaggtttgcttaatttgatcatatttatctcactccttccacacatttgcattgcagtagaaaccgtttaggcggttcatttgtctaatgtttgattgagaatgtctctcactttccttagggtcctactgttggtg

SEQ ID NO: 3497 - DNA, 544 bp, Glycine max
  Intron number 1 from transcript Glyma10g41680.2 (locus Gly ma10g41680) derived from phytozome v7.0 (chr-ID Gm10; pos 48708017 to 48708560 reverse strand)
ggcctctcttgagcttcttcgttcatcaaaggaaggtgggctaatcttgcattttttatatatcttggtgtttggatccatttaagtgttcacgcagccatcctcaacgttgcttcaattctcagtgttagtggatgaatttttctttttggtaggtggtattattaataattctattcatagattcaaatgttgtctatttaggattttctcaaattgttattatggttaccttttttgttcaacgtggtattcttcgaaatataatttgtcattaaagtatactactactgtcaatcccagctgaaggggttctagtgtgagattttagatttatctccctctctgctcttttctcatgagtactatgtgccaaacctgaatttttttaaatccttaggtgtaaagaaaacataccaaacttttgttatggacctttcttgtaatgtaacattaggttttattgattctgctggacttattagtttcgtgctataaatggcatttaatttgtttttcagatttctgaaatttcatccttatt

SEQ ID NO: 3498 - DNA, 1202 bp, Glycine max
  Intron number 13 from transcript Glyma18g53810.1 (locus Gl yma18g53810) derived from phytozome v7.0 (chr-ID Gm18; pos 62065629 to 62066830 reverse strand)
tcaaaaggtttgttttttaaaaatgaactagttttggactttggtctttattgctgagattttgctttttatactttaggtgttttggtcatgttttgggtttatctacatcaataaatttcgagtttatttagtgtcaggctccctcaatataaaccccagcaatctgtgataagggcatgtctttactcttaacaggtcccataccccccaaaaataacgtaacctttgtgggttaatgcacctcctgttgttgattctatggttttccaccacataaactgggaaaaggggggaaagtagcattatgccttagctttcttttaactagcatgctttctgtaggatccaaggaaatggaagcaaaggtgattataatataagaaacattctaaatgttgaagcacatttttattggttggatagacttggtgaattttatggagttcagttaattggttgtgtattttttatttggaataatttcaaattaacctcatataaatggatttttaaataatcttcccacttattctgtcttcttgtacaagtttggcgaagaggctgtatgtcgtttctccacatgcataaggatttgtctgtttgaattcacgtgatataagagtgaacaccttattgtctagttttgggtctgggttagattgggattttctgaaggggctggaaggatatgtagggttaagggtaaaggggagctattggtgagaagtgagagctgagagataactgtggacagatcatggtttcctttgcttccactagcagctgataccatatgactaagtagaaggggaaagaagaaaacactaatgcctgaacatatgtggatcagatttatgtacatctagtcatctatatttatactgtatgtacagctaattacaaatttacaattagtagtagagtggtagtagactaattcattcgtatttatgagtgggagagggatgcagtagcctttggattctaaaggcataaacaccacctccaagtaattgtgtttttactgttattttaggtgagctttgtttagtgtttttctttggaccaagaatccaatatatgaatttctgcagatctctacatacaagcattctgctgttgctaactctaatttttggtgacttgtattctaatttatgcaggcacacagtatacacaacaatcatacaaagtaagtg

SEQ ID NO: 3499 - DNA, 2655 bp, Glycine max
  Intron number 12 from transcript Glyma10g08710.1 (locus Gl yma10g08710) derived from phytozome v7.0 (chr-ID Gm10; pos 7633488 to 7636142)
ccgacctgctccagttcaggtgtttttaacatctacatatttagatttttttccctttgtatatcaactagtaacttctctgatccttcttaccatattctcggttttcccactatctctactttgtagtatgctgattttgtgaatctgcattttgttattctgttcagttgtgagtgttggcacattcttagagaaagttccattgtattatgctacgaattaatgtaatgttcatcttgtgtaatacaaattgaaagttccattgtattatgatagaactggaccagaaacagaggaaaaaaatgtgtatcattattatggtgcttccaacacccaagacagaatacaaatgagtttcgaggtctcagcaccctccacttccaaattctctctctctaacctttattaattttcctcaattgactatttatagtttcttaactaactaacagctactaactaacagttagttatcctagctgtcctaactaactgacagctactaaggctcttagctcttcctaggatatctcctaacaaacacctttccccatctatcatattattaaccaactctttcaatttctgttgtattatactacaaattaataatgtggtttggggataaaggatctgtccaaattcaatgcagcattgagggggagatggatttgggatctagctgctaaccacaatcagttttgggccagagttctcatttccaaatatggtggttgggtagacctgcagagtggtagagataaagcttggcattcccattggtggaaggaccttagaagactctataatcagcctgatttccacagcatccatcagaatatggtttggagggttggttgtggggacaaaatcaaattttggcaagattcctggctgagtgagggatgtaaccttcagcaaaaatataatcaactctataccatcagcagacagcagaatctcaccatttctaagatgggaaagttctctcagaatacttggagctgggagttcaagtggagaaggagattatttgattatgagtacgcgatggctgttgacttcatggatgatatttcaggcatatctatccagaatcaggcccttgatagcatgttttggaaagctgaccctagtggtgtctactccaccaagtcagcctataggcttctgatgccatccatcagccctgccccgtccaggaggaattttcagatcctttggcatttgaaaatccccccacgagctgcggttttttcttggaggttgttcttggatagactccccactaggggaaatttgtccagaagaagcattcctattcaggatattatgtgccctctttgtggctgtcaacatgaggaggctgggcatcttttcttccactgcaatatgactaaggggctgtggtgggaatccatgagatggatccggggtataggagctcttccaactgatccggctagccattttattcaattctgtgatggttttgctgcttcgagtaaccacagtaggcggggcatgtggtggattgctctatctattacaatatggcagcataggaactctctcctgtttcaaggcactctttttgaaccgcagaaagtcttggaggatgcattatttttagtttggtcttggctaaaagttggagacaaaggtttcaatacatcttataaccactggtctaccaatcttgtggaggcctttggttaaatgatatctgtattggtgtcctttgtgtggggttctgttggggtttcgttatttctgtttttggaaggtggcacctagtgccttgtaattgttatcttcagtacccctggtactgtttagtttattaataatattctaattttgccttccaaaaaaaaaaaaaattaatgtgattttcatttttgtgtaatagaaattgaaatagttggttaataatgcttagtttaattggattgggcttttaatgccaaaaggtagctcataatatttcagtcgtattcctagctgatatggggcatcttaagtcttaacacagcatcctgacatttggaatgctaagttttgaagaatggacatctgcatgtggcccaacattaaaattggatagattagtaccatattagaaatgaattaagcctaactcaacccaaaggctagctcaagggaggattgcccaagtcttataaggagtattttggctatattcctagctgatgtagaacatcataatgagtttaatctagctaattgctatttgctagcatttatttttcttagatgtgcatatatttgacttgtagatcagccttatttgtcctgaattcataaatgagaaatcgtttatatataatattcaaaagaaatttacttgtgacaagaatcaattttgaagaactattaggtatatatgtctttaatctatgcttttgtttcaatattacatatatcttctccgcgtatatatccagtgcttaatttttttttttttgggtgaaatccagtgcttaatttagtgatcaagcgagtgatataataaaagtcattcatggtaacatgtactatgtgaatatattcaatttgatactttctaaattgtaacatattgcatgacatgcaggtgacttggattggttatcccaatacaacaggatt

SEQ ID NO: 3500 - DNA, 5072 bp, Glycine max
  Intron number 1 from transcript Glyma01g04240.1 (locus Gly ma01g04240) derived from phytozome v7.0 (chr-ID Gm01; pos 3735818 to 3740889)
aaagcaatatttaattgaactttggatagctagtttcttttcatctaatgataagttagatgctgaagattgttgactcgttggcaagtgtaccaaatcgtcacaagtagtaaagttctcggaagtccgagtgtcgaatccacagggactttgtttgtacttagactaatacaaacccaatttacaagcaagagataataaatttaaaataaaaaaaatagaaaaagatagaagataagaaaagataaaattagaagataaaagaaaaaaataaaagaattaaagataaaattaaaagataaagaaaaaggaagaagattagaaaagtgaaagataagaaagataaaagattttgataaaaaaagataaattcaagataagataatgttgggaactgacttgcctagcctgcctaggatgtatgagtttatgattttttctttaccaattcaggtgattttatcccaccaacatctattcatttacttgcccctgatgcctcacgatgacaagcttattttacctatctatcccccaaatgtctttgcaaagactcaatagataaaatgcatggagttctaattctagatgtttgctttgacgcatgggcataatacaatcactctatgtcttgcaatgattatgatatcttttcttcttgttctattaagagttatcctctcccgagcgtctaactcctaaaactaatgcatgcatatcttctttaaatcttatttaggagttaccctctcccgagcatctaacccctaacagaatataaatatgagtatgcaaggtaaaaacagaaaagaaaataggaaagaaaaacctggtattgcattgataaatagtgaagagtacatcatgcatcacattggcttctaggcctgccagaccttaactaagggtttagccactcatggccattgagggctttacaatgagaagggggtgaaagaaagaaagggagtaagtgaaacccctaggagagggggttctgtcgtggtgtgttctgtcccttggactggctctctatttatagctgctgaagtgggctttgggccttcgtaggcgcgctcagcgtgacaccccctcgctcagcgcgtgtagatcgcgcgcttaacgcgcatgttgcaggcttagcgcgtgcttctgttagatcgcgggcttagcgcgcgtgttgcaggcttagcgcgcgcttctgttggatcatgggcttagcgcgtgacgcgcgctcagcgcgcgtattggctgggcctgcttcagattttcttcttttcttcaaattttctggcctttttgcttgttacacctccagtttttatatctacagccaaaattcaacaaaacatcaattctttaatatttaagcgcaaataactgctaaataattatttttaaagacaattttgccttattttctattatcaaaatacaattatttagcagttatcaaaatcccccaaattaaaactttgcttgtccctaagcaaatcaaattaaaagcaggcttcgaatgcttcaacactttcaatggctacaatttctcagattcctccaactggtcctttccgcatttgtcataatcccacaatggaagcataaattacatcaagatgaaattggttagtatcggaaatcaatcaagttggtttgcctcactttcctcacaaggttagtgtttatctctatgcataagtgtctggggtgagtgtttaaaatttatacgacctgcaattaagattcccaaattttgcacttcatctcaattaaagttattcttacttacatttggtggatcactaaggacttttattggcttgtaatggggcctggctagacaagaaatcatggtttttttgggatttcaaacttaaggttataagagagcattcatcctagaaaaacttatacttagcctaggctttatttgtttttcagccttaacacatatgcaatctatttttcttatttccaaccttagcacttatggcacctcttttttttttctgcccttatttatttttttatttttttttttattttttggaaagagactttgggcttacaagctcttttttttttttggtgccttattatgtgctacttttacattcccaagaccatcttcattctacccatcccccaaattaggggtttattatgactaaaacctttatgctctcttagaaccctaaaataaggttagagatatcacaattaggctcaggggtttttttttaaaaaaataattactaattttggctcaacaagggtgcaagggataaatttcatcataggttggctttttggctatgtggcaaaaataaaaaaaaaaacatggccttgatcatatccaccttatgtaaataatctaacagtctaagaatgatgcaaaattaggaatttaaaaacagacgttctctcataattaagttcacacagctctccgggacaagataaagttatcggcttaccggaacgtgatctctttccatcaagctaaccttttctctctttgtgattcatgtctcattggttgactcacttttgcttccaggaaaccagtattttcacaattgtcatgtagcatttcaagtgttgaatccttcagaaaaagcctaaatagtgacttcacaaatatcatgcaatttttattcaataactaaatttaaactactgaaattaaaatgcataaaatcaaaatgcacaaattcaaaataaagaaaagaaataacacaactatcctaaaagaaacaaattgcaattaactaaaagagataaagttagaaatcttgggttgcctcccagtaagcgcttctttaacgtcattagcttgacgggtcaaatgccttcaaggtggcatgaaggtcacaaagaacacatcttccttgcatttccgtctcttagctagagacgccatgaaactcatgtatgctggaaacaccttccatattgtagcaagaaaagtgttggtggtcaaggagagaaggacacttaagggtttatcatgttttccatgtctttcttccttgacaatcaattgatgaggagtggtattgacttggagaatactttcttgttgaatttctacttgtgagtatttctcccattgttgtgctttctcctcatttctttctatctcttccttcttttcttcttccacatcttcctcagttaaaattaccttgcactcatttttgggcttcatctcagtatttaccgtaaaggtttcggtgggcctttcagcaactagcttagctaattgtacttctagatttctgattgctgcatcagtgctcttctgatgtgaccttgtttcctgcatgaattgtaccagcaattcttctagcctactcctttcttcctgtggcctgggctcttggtcacgtagaatgacataatcattggccgccatattctttattagctcaatagcttcttctggagtctttaactcgatcttcccaccggctgaggcgtcaaggagctgcttggaatggggttgcaagccatccataaagatgttgagctggactggctcactaaacccatgtgtaggagtcttccaaagtaacccatgaaagcgatcaagggcttcactcaatgattcatgagggtgttggtggaaggatgagatttccacctttccctcaatggtcttggactctgggaaatatttcttcaagaacttctccaccacctcgtcccatgtccgcaggctattccctttaaacgagcgaagccatgtttttgcttcaccggccaaggaaaagcaaaataagtcaaggcggatggcatcttcaggcactcctactatcttcactgtgttgcaaatgtcgacgtatgtggccaggtgtgcgtatggatcttcacttggtaggccgtaaaatagattcccttgaatcagctggatcaaggaatatggacatgagaagttggccgtctgcacctctggtctagctatgctggtgaagtactgaggtataataggactagagtaatcctctacttgcctagcctgcctaggatgtatgagtttatgattttttctttaccaattcaggtgattttatcccacccacatctattcatttacttgcccctgatgcctcacgatgacaagcttattttacctatctatcccccaaatgcctttgcaaagactcaatagataaaatgcatggagttctaattctagatgtttgctttgacgcatgggcataatacaatcactctatgtcttgtaatgattatgatatcttttcttcttgttctattaagagttatcctctcccgagcgtctaactcctaaaactaatgcatgcatatcttctttaaatcttatttaggagttaccctctcccgagcatctaacccctaacagaatataaatatgagtatgcaaggtaaaaacagaaaagaaaataggaaagaaaaacctggtattgcattgataaatagtgaagagtacatcatgcatcacattggcttctaggcctgccagaccttaactaagggtttagccactcatggccattgagggctttacaatgagaagggggtgaaagaaagaaagggagtaagtgaaacccctaggagagggggttctgtcgtggtgtgttctgtcccttggactggctctctatttatagctgctgaagtgggctttgggccttcgtaggcgcgctcagcgtgacaccccctcgctcagcgcgtgtagatcccgcgcttagcgcgcatgttgcaggcttagcgcgtgcttctgttagatcgcgggcttagcgtgcgtgttgcaggcttagcgcgcgcttctgttggatcatgggcttagcgcgtgacgcgcgctcagcgtgcgtattgggctgggcctgcttcagatttttttcttttcttcaatttttctggcctttttgcttgttacacctccaatttttatatttgcagccaaaattcaacaaaacataaattctttaatatttaagcgtaaataactgctaaattattatttttaaagacaattttgccttattttctattatcaaaatacaattatttagcagttatcaaag

SEQ ID NO: 3501 - DNA, 7724 bp, Glycine max
  Intron number 7 from transcript Glyma15g40170.1 (locus Gly ma15g40170) derived from phytozome v7.0 (chr-ID Gm15; pos 47135620 to 47143343)
aaataaggtaaggttgatcatattctacattgctttatgcatagtcattgatattacacacaaacatggctgttgcacaattttgtcaatactatcatataccgttttaactattacatggccttttaattatttaagagattgatttccaactgtgactatagatgccagccaggtgaagggatgtagggttctaaaatcaagtttatatttattattatgaatctttagaaaagtgtgatgctagaggaaacagggcttagaataatgttgttggcatctctggtttagtgattgggaagattgggatttttagcatttgttggaacaaaagggatggcgaggcttggcacaacgattaagttgtgccttggtgattggttggtcatgggttcgaatttggaaacaacttttgcatatgaaaggataaggatgcatacgatgatcctccctcataccttcgcatagcgaggagccctcgggcacaaaggtacgatagtttttttgttgggacaaaagggtatcttgcaaggatggagagtagtcaatgcagataggaacagttagggaagctagttaccggaggatcattagataaagggggcatttaggaaattgtattttgtgaactgagcaagtgctctgttataaaagcggactcccttggacaggagtttctctccttgttttgttgaattttagtcaataaatacaatcatccttttcttgatagcagcaacttctgtttgtgagaatacattaaaattatccaatgccatcatgattatatattagaatatcttatacaattagttttcacatttcctattaggagtatgagaataaaagactctcttttattctttgttagttgatatgttttgttaagatttgtaacagttgttaaacagctcataggtctcctttctgttagaactgtgtaactaacttggcctttgctaagttatgctgcaccttataaataggactaagatctctctttgtaattcagtttttatctttctcagttttatacaattgattttcccaagagtttctctcttctagatattttctttggtttctttctcttaatatggtatcctagagcctttttccttcccctgtgagaaaatggcgtcaccttccacaactttttcccaaacagtagcttgtaagcttgatgagaaaaattacatgaattggcaccagcaagttaatgctgtccttcgagctcatcaattagaaaaatatgtcgtcaatcctgttgttcctctcaagtacctctctgaagaagatcatgcagcagggacaatcaatccagaatttacgaattgggatcgtcaagatgctctaatcatgtcttggcttctttctacgctttctgattcaattctcagtcgtgttgtgacttgctgtcattcgttccaagtctggaatgccatttgctcccattttcatggtcttacgcgtgcaagaactatgcaattacgcttggaactgcgaaccatcaagaaaggcaacaaatcttgcagtgagtatctgcaaagaattctgcaattgtgtgatactctaacagcaactggtgatgcaatctccaattgtgaacaaacagatgctattcttggtggtcttcctcctgaatatgaagctctcatctctacaatcacggcatttcttactcgtgatgctgatgtctctgttcttgatatcgaaaccatgattcttgcccatgaagcgcgtcttgagcaacacaagcaaactgctctacaggagcctctaacattgaatcttgctgaatctacttcagcgccacatattgttccagccaacattccagaaaatcatgtagttgcgaactacgtttctgctcaaggagctgctactgcaaattctatgctgttctcctcgaatccaaaccagtactcctctcaagggaactttccagcgaacggcagcggctatggccgtagacagaattgcggccgtggcgcacaaggtcgcggtggccaagtccagtgtcagatctgcaagaaacgtggccatgaagcctcaacgtgttaccacaggtccgctgtggctccgtttggcaacttcggatccccatactctttggtcagtacgactttcagcttcaacacagttttgcaccacccaactttggtgctccgcaattttttggcaacatgcagcaaccatactttgctgatggcaccactcccactccctggatgccatacttacctgatccacattttcagaacccagcgcctccttttggttatcaacccactatcccacccaataatggcaccaccctccagcagcagcaaattccacctactgctaacatttcccaggcttggtttccagattcaggtggttcacactatgcaaccaatgatccacataaactccttcagagcagtcaagctgcaggaaatgaacatatcctaatggctaatggcacaggtacaagaatctcttccataggctcaaatctgtttaggtccccctattttccaaacactactctctcccttaaaaatttactgctagttccctcccttgccaaaaatttacttagtgttagtaaattcactcgcaataataactgtttctttgagtttcatccttcctattgttgtgttaaatctcaggattcacataaagttcttcttcaaggagctcttggagaagatgacttatacagtctttacccttcacttgcaagaaccacttctcataacaacagcacacactcttctgctagtgtccacaacagtctccttagtccaaaagaaattcatcatactgttgtatctagttcttttaaactttggcatcaaagactaggccatcctaacaaggatgcactagcaattgtactaaataaatgtaatataccctttatcaacaaaactagcagtgatttttgtaattcttgctctatagccaaatctcacaaactaccctcttctccctcttctactgtctatactgcacctcttgaattagtattctttgatgtttgggggccttcttcagtagagtcatcttgtggattcttgtatttcctaacttgtgttgatgcctattccagattcacctggatttatctgcttaatcataaatctgatgtttctaacaagtttcagctttttgaagctatggcagaaaaacagtttcaaacaccggttaaatctattcaaactgatggaggaacagaatttaaaccactgacacctttacttcagcagcagggaatcattcacaggttaacttgtccttatacccatcatcaaaatgggtctgtagaaagaaagcacaggcagattgttgagttgggtcttgctatgttaaatcaagcattcatgtctttggaatattgggatcatgctcactgccacctatctcattaatcttcttccatcatcaccacttaattttgaaaccccttactacactttttaaaagagttcctgattacaaggcacttagagtttttggctgtgcttgctttctgtgtctaagaccgtataatcagtcaaagttacagccaaggtctgaagaatgtctatttttgggctattctgaaaatcacaagggctacaagtgtttgagcaaacaaggaaaaatatacatctctaaagatgtgatactcaatgaaactcacttcccctttcctagtctcttctctccaaaatctcccaacactagctgcaattgcattcctgtacccttcactaatacacaatcctttatcttaccaccttccaatcctcctatacctactgcttcctcctcatccacagaaaatttctctcttccctcacctagtcaaaatccttcatcaaccaatcagtctaattccgaaaatactgcaccagtttcctctaccaatccagtcatacctcctaacattcatcctatgacaactagatcaaaaaatggaattgtcaagcctagactccaaccaaccttgcttctaactcatgctgtgcctaaaactgtcaaaacagcacttaaagatcctaagtggaaagatgctatggatgaagaaatggctgcactactcaaaaacaatacatgggaactggttcctaaacctcctactaggcaaccaattggttgcaagtgggtttttagagtcaagcataattcagatgggtctgtcagtaagtacaaggcacgtcttgtagcaaaaggcttccatcaacagcctgattttgatttcaaagaaacattttccccagttgtgaaacctataacaattagaactattctgactttagtcacttcctttcattgggatcttcagcaaattgatatcaacaatgcctttttaaatggcaagcttgaagaaactgtctatatgcagcagcccccaggtttcgaacatgacagtaaccttgtttgtaaactgaacaaggctctctatgggctgaagcaagcacctcgtgcatggtttgaaaagctttcagcaactctcatctctcttgggttcaaggctagcaagtgtgacccttccttatttgtctcttcctcatgtggaaacacaacttatacgcttgtctatgtggatgacataatcctcactggaaataacagtgttctaattcagcaactcatttcatagctaaactctattttctctcttaaacatcttggcaagttggactacttccttgggattgaagtcaagtataattccacaggttctgtcatgctttctcaaaccaaatacatctcagatttgcttgaaagtgtaaatatggaagaagctaaaggaatttccacccctatggttagtaatctcaaattgtcaaagcaagaaactacatgctttgagaaccctacgctgtacagatctgtggttggtgctttgcagtatgcaacaatcacacgaccagaaattagcttctcagtaaacaaagtctgccagtacatgtccaaacccatggaagagcattggagagctatcaaacgcatacttaggtaccttaaaggaactataacgcatggttggctaatcaaacctgccaagaccactccttctatcaagatttttgggttctgtgatgctgattgggctgcagatcaggatgatcgtagatccacttcaggagcttgcatttttcttgggcctaatatggtctcatggtgggctaaaaagcaagttttggttgctaaatcaacaactgaggcagaatatcgaagtctggctcaagttacttctgaaattctctggcttgaatctcttctgaaggagcttcacataccttttgatactcctctaattttctgtgacaatcagagttcagtagctttagctcacaatcctgttcttcatgctcgtactaagcacatggaacttgacattttcttcgttagagaaaaagttctcagcaaggatcttgttgtctctcatattccttctcaggagcaggttgcagatatcatgaccaagcctctctcaaccagcagattcctaagtttacgtgacaaatttaatgtagttgattgtgccaatcaaccaccttgagtttgaggggggaatattaggagtatgagaataaaagactgagaataaaagactcttttattctttgttagttgatatgttttgttaagatttgtaacagttgttaaacagctcataggtctcctttctgttagaactgtgtaactaacttagcctttgctaagttatgctacaccttataaataggactaagatctctctttgtaattcagtttttatctttctcagttttatacaattgattttcctaagagtttctctcttcttctagatattttctttggtttctttctcttaatatttccttatctctttatctctttatatatagtggtcgtataggggtatgctaaattttccgttgagcttgttatgcctttctccatttcaaccacccaatatgtatgttgtgcatgacatcttcgttaatcccccatatttttgtactattgatttcagatacttcaaaagttgtgttactcatttttacctccaaagcatttttctcttgtttcttgataaaattataatgtatatgctctaaccttgctgtaactcaagtgaaagccctttgattctaaattctgtcttcaaagctcaagtttagagttaacctctcttgattcctcaattagaataatctgttaataacatgcatttagagatggtctttgtatgttatgttgggcacatccaagattaaattaaacaaggaattaatgctgagtctgatgtaaactcatccttttacaaaagtctttagtttctctttctggagttttctcattagtagttactccatttatgtctgtatggtccagatttgttttctgaagcctttcacaatgcttctttgtgcactcaatcatgttttttcaagttaaaaaaaatcaatttgtaagtctttttttttgtttcaatatgtttccatcagcccttgtggaagataaatagcttctattgtaaacccactggacataaaaccaaattgattctttgctaccatagtctctactcttaatctatactcaatcaccttttcccttaatttcatagtatagttcattagttttatccctttatagtttgcacaatactaaatatctcccttgtatataggaaccaaaatgtccctcctccaatcatcctgcattttcttatatttcaaaatctcattaaatagcttatgaaccaaatgataccttgttttcttacacattttccaaagttcaataaaaatatattaggaccaacaactgtcattatccatcctcttaagaatttgtttacatgcaaattctgcctggttcccctacacattgcatctcaagtcaatagaatacacgataaaatatttttcaaagtctctatttagtataaagctggaccaaacaaagccttaaaacccttagtatttagtataaacaaggttagcgtttttattgttgtcacattgcaatacatcagaacactcaagaaaatattgctcaaagtatctattttctcaatttcatccttcaatacctaaatcctatcatttcaacactataatatgtagtgtactgatatcattcagtggtaagccattttctacacttgacattttagactgttagctttataggctgtttgcatgctcattctatgtgcatgttgcatgcccatgtgctttgtttatacttgcaataaaaaaaatgtcaaatgcctgagcatagtctaaccttttgtatttagctatagtactatgtagtacctattgagtgtgtgggagtttgtgatctgttttcatttcttttttcaagggattgcatgttcatttaaggttatctttttgaagttgatgatattaaatagttcataatgtggctttgccttgacaaccatgtttttttttacaatttgcctcagtgaagtacagtctcaattcttaaaattggaaaaaggaagaaaaaccaatggttgatgaaatcctagttttagttttataaataatttcgcagagttatttatttatttctgttgggtacatagttttatttctttaattatttaaaaactatgcactgaaagttcccttttcacatttcttaatgtatggacaatggtgattgtgatttgactcgctggttataatccctggatgtgcactacgtgtgatgcaggaagttgttaataggag

SEQ ID NO: 3502 - DNA, 1007 bp, Glycine max
  Intron number 6 from transcript Glyma05g32970.1 (locus Gly ma05g32970) derived from phytozome v7.0 (chr-ID Gm05; pos 37739550 to 37740556)
gcacctaggaaaacttcaggtataggatatttgaatcttatgcacttcttaaatatcaaatcaagtatttatcatgatattgatattgtttattaaaattattctactggactactggttgaaaactaaatcacaaaaatatttttttcttataaactaatgatgtgaatacatttaggtaggtttttgaggtattctttattttttaaatgatataagttatatatgtagtttagtcattaaagaaagtaattctaatactgatagtgccaaactgattcaaattttaacaatctaaaagttaaaggtattcacaggtttggtcattcccatctcttcttaattaatgaaataggtctaaatatggagcctctgtatcaagattttattttattttgtatccttactctatattggactcggtgaaaacaaaacaagaccaagctccataaaggtagagtagccctcagttaagactggaatcacagagaatgccagaaaagaaagaaaaaaattattgaaattcttcagccactgaatgactgaatattccaccctcctaaaacttctctaccttaattcttgcctaaacctcttacccctcttcctcacatttattccaccttctggtggtaatttccaaatcgctccactcattccccccatcccccctcttcatactgcaccagctgtttgggttgttaaaaaccttgtcttctgcttataatactcctatcctgctggaacaaaattgtttcctgtaaaggatatcagcagtctctaccataaaaacttttttttatataaaaccttgtctgttgaaatgattactttagatattgtagaacacctattgcaaaagagattaatgtatttgtacatttatttcactttgcaagcttataaaacagataaaagaaaatctgaagttcatggtaaattagtaataacaatgcttgatttactgtataggttggactttcacaagcaagaaggcttgctcaagg

SEQ ID NO: 3503 - DNA, 2343 bp, Glycine max
  Intron number 1 from transcript Glyma07g35500.2 (locus Gly ma07g35500) derived from phytozome v7.0 (chr-ID Gm07; pos 40681716 to 40684058)
acttgctcaaccacccccaccttttcttcccgcaagttagtttttttttttttttacctcatacatatctgtatcagcaaagttattgatgggttaaatatgcttaggtcctgtttttggacaaacttttccataaacactttcagaagaagaaaataaggtaaaatgacctgagcttctctcataagctaaaatcaatttgtgcactttagcttttggagaagttaaatgagaggatttttatgaaagttaagtgcataagttgattttagcttatgggagaagctcaattcattttagcttcttatttttttctcctataagtatttatggagaagtatatccaaacagagcctatgatgtgggtttggagaagtgtagctttggttctgtaatgatgcaatcatgcaaccttatgtgtgatgtaattgagcaatgaaatccacattgttgaatttgtggtatatttgctgttaggaggtgatgatcatgcttagctgaaagttggtactgattactgaatgtaatcagttggtagacccttttaagaaattttttttttttggattggtgcttgttttgaagtagatttgtggattgtacaatcagttaggaggaagaatgaaaatatgccttaaaattcaaatgtagatgtcatagtaaattatgagttatgaggtcaatattaattggttgacatttaccatcatgtttagtggactcctgccaaagatgacttgttttgtagtttatactgtttattgccttcgaaaacgacaatcaagttatattcttcttggtgaggtcagctacataaatcaattgatgccattgggttctaccttgttaaatatattatattatctttgtgaatatagaaagctagaaattagggatttccttttatttcctttccatgtatccttaattacgttgattcccttgtgattataaataagatcagtttgtgttggattacacacaattcctgtaatatagtatcaaagcctattctatatccattaaacgggccacccaccatccatgcaccaagcccaaaagtgttgggtgtgagggggtgtattgggaaaaaacccaagttccacaccggctagagatagtggcaagatagaatatataagtggaggccaaccctcacctcataagctagcttttgggattgagttaggcccaaatccacattctaagatacctaaaaccaaattttgattcttcctctgcagtctgctcctatcttattctcattgaagcctatgttggtcttcttctcgcataaccaaaccaccttaggacgatatcccttccatcttttcttgtatgtccactgatccacctcagttttctcatctcaactacacttatagttggctcttgttagcacttcactgccagtgttcactgccaaacagtatttctgattctatagctgctcagtagaattttccttaaattcgttggcattttgcgctcacaaattatacttgaactcttgaagcaatgaagcatttatccttttcttaccaagcttgaattctgaatgtgatatccacatcaacctccatatcacttaatggaaattggaaagcaaataagactgtaactatagattcccttctttacacttgcatcttttaattcatgcatgtaagggatttggctcctctaaagtgaaagagaataaagtgagaagctatggccatcgattgagaaatcaacagttgagattttgattaaatgcatgcaaatgtataataaattacgatccggttcaaattttacctattgattttctaatcaacagttataacatctcattgtactctctaaagtgaatctttcactttagaggagccaaatagtttacatgtaccattataagttgaaactaaaaagagcattgttgcaaaacattacataaaactcaatttctagcttttatgttaccatttaacttattctgtatattaattgtaatatatttgtatgtactcacttgaggcagtttgctggtgacttgtacattttgtttggatactaatattattgatcgttgcccaattgctggatcaaaattgtgtcttgttgtttcagacgggctcccacctcccatgaacatcctagttgcctcatcttttgattttcagtattatgtattcttaatattcaaaacaactatgtgaatgagtatatgtaatataaatcaaggcatattaattgatggtttggtggatagggtattagttgtactttatactattcttacaccttttggtaaatattaaagccttatgacctgaaatctttcaggaaattatacaagta

SEQ ID NO: 3504 - DNA, 6418 bp, Glycine max
  Intron number 2 from transcript Glyma04g40600.2 (locus Gly ma04g40600) derived from phytozome v7.0 (chr-ID Gm04; pos 46585579 to 46591996 reverse strand)
gccttctaatccaccctctttcaagtaagtcttctcttccctctcagccatacatctctcactcgacaatttctgcttgctgacttggtctgacaagcttcatgtcatgttttatgttttatatgcatgtgacacttttggttttattaagagttaataacttgtgatgcaatatatatgacgcctcctttactttatatgatgtcattgatgttccctttttataattaaatttattccataaacataaaaacctttcctatatgctaacactttagatttgttttggctcaaaagacaataaaaaaaaagatgttaacacttttttattatataaaaaatttatataataaataaatatgcctactaaaaaaataagaatcatttagtcttttaatatgaaaaccacatttctcttttcattcaattcacctttgcgcggactaaaataatacaggatctttcataattttttatgttgtcttaccaactcaaaagtcgaatgaaatatttaatgtataagttacttaataatgcatgttgattatatgaaacagatatgagttcgattttttataatacatttttgaggaggagtaaaaagtcttggctataactaaatttctgactgaatgattgttgttaataataataaaaaaaagccgaatgaaatacttctattctttgtcgttgtatgtttcttctctcttcattctctcgtttcaatatagaaaccacctctatcttcttattctttctacgtatgaattgcaaaagaaatagtgagtctcacattttttttgcgttgtcttccctccttctaccacactgaatagatgaaatacttttatcaccttttactgttgtcctacgtttctgtcctccctattttctcttttcaaacaaaattattaatgtaaaaatatttgcatgattacttaactaaaatttatttcaaaatatttttcaagtaattattataattttttttatcaaatatgactatgtttagttggatttcagtataaaaatatatattaacattttaataaaattctttttatattctctcatcatcattattattttataagtagtaagttaaaatacgtttgataagatattttcattaatttttattttttttatttgtcgaaaacttagttaatcgtttgataaacaatttttttttagtatttttataataatttttagtattttttaaacattaaattttaatttatatatatacttttaatatatttataaaaaaattaatattttttaaaaataaattataatttaattattttttatttttaaattttcttttatttcaatcatatcaaatatttataatttaataaaatgatttttcaaattttaattattagttttcaaataatttgttaacttttaattgaatttttaactaattttatcaaatataatattaatgaaaaatacaaaattatatataaaattaatacttttagaaagtacaaagtacaaaatatactttttagttatgcacgtgtctgtttcaactttcattatttatcttctttccttttgggaaattaaagtggcgcaaatttcatgataaagtagtgtggtcctgtcggggatcagaatcgtattcaataaataaataaagagactcttttggataaaataagagtctggctatcttgtgacccagtcttaccttggattaataaaattaaaaataatttttttattaaaaattatattagagtgtatttcttttgtttcatattatatgaaatttttatacagttattaaaaatgtaattatatcttgaattttataaaaatatgctgtaattttttaatatatcatttaccttttcaattaattatctagtaacaattactctaataaagggtatttaatgaaaaataataattaatattttgttaaatttataaaataacaattaatttgaaataattttccactaaaacgtcataaaataaagagtatttaaatattatagaagaatgtatttttgtgaaatcaaataaaatatttttctttttattttcttgatgcttgtgaaaataaataagagtctcgttaattaatgtttcaatccttactcctctgtgataagtaatgttggatgtctcaattctgatctcaacttctcagggcagattttaattatgaaaaacttgatgtatatttgattttcaattaaaattattgtgacgtgtgctctaatataattcaacaagtaaaagtaaaatgaaaacagaagtaaaagtgattagcaaaaactattttaacctcaaacatacttttttacgttatttctaaacatatacttaaaccagttatgcttattaaagttgaatcgagtagaaataatttgtgtgtgttttaagttttttgttcttcttttcatttaaaattagctatctcgttattcctcacccaaaaaaaaagtagctatctcgttaacccactactttcagcatagtgaaggagagtatatatgtcgtaaataaaaatatatatttcgtttgaactaaataatttccaatagggacgataaataaaaatagtgaattgaaataaacaaatatataaaaacttatatatgtcataaatgaaaaaatatatttttagaaataatatatttatgaaaatcattagtaagttatgattaaatatgatttcaagttttaaatttcaattcgactaaattaaaaaaaaaatcaatttcaattggactgaataatttccaaattacaatacaatataaaaataaaggttatttgagtaaaattagttaaaaaaatagttgcaagttagaaagttagctcaaaagtaaatttttttattaaagttagaagctgaagatgtagtttattaatttataagtatttggtaaaattatttgttaaagtaactttaaagtgtaaaaaataataaaaaaataaaattattatttatttaaaaatgataattaaggaatttgataaatatattaaggataaaaatataaaaatataaaaatcaagaaattaaaaggtagtgttttaaaaaatgctactaaaaatatatttatccaaacaagctttttaataaataaaaaataaaaattaactaaaatatcttgtaaaatataatcaattcaaatagtatgattatcggttgaggtagaattgtgtgtatgcattattattttacaatgtgaatgtttcataagaaatcatgatggcatgaagacagaatagtaatcaaatataaaaacattacaattgtccttaaatttaaaacgttacactcttgactttagagtcttgttttgcaaatttttaaaggaaagatttggtggagtctagacaaaacatgaaagcgaatgaaatcgataaaaaattaatgtgtccaaattaaattttaatgtaaataaaaattatttcaaaagaactctaagatttaagcaactttgtaaaattatcttacttttattttatcatttctatctatttcctttcatttttctccttagactaaagatacctaagcatatgtctagttaggctgaaaataagagaaatgattttgaacggaaagaaaacatcaaaattttcaattccattgtttttttggtaatgctaagaaagaggggaaaaagaaaaatttatgtgaatactaaataaaaaaagagtttatttttaaattcatttaaaaatgaaatgatgacactcttctgtaaataaaaaagaaacaaatatagcattcacacaaactaagaagtttaaccttattgattaaagaagatgtataaattattataatttttttggtattttttatattcttacatataaaaatataatattttatttttatttaaagtatttatattatataatatatattcatatttttttacttttaccaaataacacaaataatataaatttttgtgttctctttctttcttattttttttcctatatcaaatgctataactcaagtaaaatttatcaccctttatataaatagtgatgctgtgtagacatctatacatgtcattcactctatgaatacatataattattttttcatattagtttttattatgtcttatcatgttttttcttactccaaagggcaatttggacccatgtgtctatagagtatttttcttatataaatttgacttattggtgcattaatttggcggtgacgtgggtagatatttccgtcttgacgtaacctctttgattgattgatcctcagatttgatgcttgtccctaccccgctaccaccataacgtcttccttttttatagttgaaatattcttgtcatacttaattacttattcgattttattataattatccttttagattgttttatatacattaaaaatatttaatgaaaaattataaaattaatcttactgttattaattgatttcaattttttcaccatgataatatcattaaaaatataattaaaaataataattaatactttattaaaaacttaaaataataaatatttaagattttttttaatttttttgtacaattattattacaccagagaggcacggagggatacaaatattataatgacaagaaaaaattaaatccgcctacaattttttttaatcaactctcttgtatattaaatattaaatgcatttcatattgtctatatgttaaatatatttattttttataaagtagaagaaaagttataaaaatatatggtaatactcttttaagaataatttgactacaaaattttttaaaatattctttgatacgaaaaaaaatgttgattatcgtttataatttttaatgaaatattaaaattttatattaattttcaccctaataaatactattacattgatacacttgaaagatgatttgcggatattttatacttttttagtttcaaaaatattgtttttgtgaataaaacatgagaatgttattctcgactatttaataaaacatatttgattaattatgaaattagttaaaaatatttttatattttcataaataattaaacatatatttggttaaattatttttttggaaataattattatacttattaaaatattcttattatgttaaatatgttatttcttattaaataagtaatttttttataaaatcaacaaatgacaaacaaatggttcaaattattatatatctcatgtttcaatataaattttttttctctactcctttaatatttattagagcatgataaaaaaaacataaatatacctatttgcaccacattaaaaatgtaaggaacaattggccatgagctcatcacgtggttagtgataccaccaaaaccaacgaagtgttgttacccaaccaagaagttcaccactacaacacgtcattcaaatatttaatggaatttcactcaaacccaacatataagaaagaagtaaacaataactcaataagtagcaatatacggttatggttctattacttcggtgtgagtttaaaagctgcaactataagcatgttatcttataacatgggagtgtgatgatgattaggaaaagaatatatgtgtatttttactcaaggaaatttttgttccatgtaaataaatattttatatcccttacccgtgaaacaaatatttccgtagagtgaaattaaatggaataacaaaaaaaaatatttgtaataaaatagttgatgaagatgtgagatccaacctaatttttgaaaatttattctcaaattcatgatatagtatttttaccaaacaagaaattatagaaattaagaaaaaaaatattttaataaaattgactcttaataaatgctattattattttggtaaggctaataaatactatagttatcttaaaaataatgatttttcttaattgatgtaaaaatcaattaaaatggaggaagtgcatgatgagttagagtaaaaagttcatttccaataaaatccccacacgtccgatttgcgttgatgagcatcagcatcattccaattatagaaaacgcaaacccatgtgatggatgctatttaggcttttaagtcgagcatcagcattattgtaatttttttcttattatttttttttctacagtttgatttttatttaaaaaatttataattctgattaaattcttaatgtttcatatgttttttttttcttttttcaattcaacattaaatctaacatatttactgaagatataatcaaaattaaaaataaaccaaaattacatatattctaaaatagaaaaactaaatcagtaaataaaagaatcaaaattataatttaagctaacatttttatactcacccccctcttgatttggcattggcagggaaactgtgacagaatactgcacattagttaggg

SEQ ID NO: 3505 - DNA, 1995 bp, Glycine max
  Intron number 5 from transcript Glyma12g00270.2 (locus Gly ma12g00270) derived from phytozome v7.0 (chr-ID Gm12; pos 46587 to 48581 reverse strand)
accaattaaagcgaattactgaggtaccttttatgtccatgttttttgatattaaccattttatctaacttgatgtcatttaacttattttttttttagttaaacatggtgatattttctttcatgttattgaattttccatgtcagcttcacatatgtattgccgcgtattgcatataataagaaatttgggtgaattaaaatcagcatttacttagtatttaaactcaccgaatagttgcattcattcagataaactattcttggtgttttgacatgaagatgtgatcttaagggtctaatatttcttcaatcttgtttaatatcataaattaagttatgggggacgatcttgttttttctgtttcgtgggacatagtctcagacatatacattatcaatgggccttgtgaatttgcgacaggaatagaacagacttgtacatcaattgttagtcatgtaatgttttcatccacttgtataggttaggcatgagtgagctcttaatgaggagtttagagggtatattccagaaggaataaacagtagaggattatttataaacggttccagtggtagtaaaggaggttatttagtcaaacaggggaaactgtaatgggaagacatcttttgggaaaatagctgaagctgagacattctcatttgagagaaggggacaccccatgcaagaggggattctttctcttgtagtctacatttctaaacacaaacaccaatctttctaccttttctttctgttttctatgttagtttccatcttaaaatcaattggccttaagtgaagtttcccaacagatatataagctgcattcaaagaattgaggtaggcgatgtgggacttcctaacacctacctccacaaatgcttgccagaacaggtgagcctactacaataggcgatttaccaagatgggctataagttctaagcctctgataccatgttatattccatcttaaaaccaattgacacattaagtgaagttgtccaacaaatatataagttgcacccaaagaattaaggcatacgatgtgggacttcctaatgttctattcctttgaattcttgtcatgcctaatccaagagcctatcaaatatcattatatgaattgaccttgggttaagatggtaaaaggacacacttatgcaatgaatgatttgaaggtctacatagatgtaatttcagggattaggaatttgtaggtaaaatcttggtattctatctgtgggtttatatgatgatatctgcaagatggataggaaaaaaggggctgaagctctgtctctgtctctttctttttctattggattggaagtggaaaggggggagggggggttggaggtgctaaggcaagatgtatttgaacatcaaaattttaaaagaatgggcaccttatctccaacttctactcaagtagaagggggaagctgttgctatcttgtatagcaagaatgacaatgtcaatctgatatgattaatgatttttgttagattttacaaatatgggacgcctagaatgtttgtggtaaggcctgttacactgattgggggcattggaatgaagaaataaaatccagaaatataagctttatcaatctttgtaaatgagaattggataggatcatagtacaagttagctgaaattgttaaagggggtgagctaatggagtttcctttttcccaaggctatgagatattttaaccaccagttgttggttgttatggggaagcatatacgtctggctaggattcttttgattttcagcttgcctgtggctgtgccattattcttatgcattctactttttggtgttccaagcttgtacacttgaagaaggtcctgactcccaccagtacatgtggcaaagcactggacacagttttgacataataagtggagcattacccctaatatttttgttttggaataatttatatggttttgtaggttgaatcaaagttgagggaggcaact

SEQ ID NO: 3506 - DNA, 4457 bp, Glycine max; identical to SEQ ID NO: 2813
  Intron number 3 from transcript Glyma01g03720.1 (locus Gly ma01g03720) derived from phytozome v7.0 (chr-ID Gm01; pos 3174684 to 3179140)

SEQ ID NO: 3507 - DNA, 449 bp, Glycine max
  Intron number 1 from transcript Glyma06g33920.1 (locus Gly ma06g33920) derived from phytozome v7.0 (chr-ID Gm06; pos 35117421 to 35117869)
agatagggcagggaggttttggagtagtctataaggtgattgcagtagtagtatggtattatctagatttgcgaagaattggtatacctattaaggctatatttgtaattttgtataaacttcttcataaacacttactggaaaagaaaataagaaggtaaaatgaattgaacttctcccacaagctaaaatcaacttatccaattaaattttgtagaagctctttcatttaactcctcaaagattaaggtgcttaagttgattttaagttactgagaaaatgatgtattttaccttatttcttctcctataagtacatatggagaagtttatcctgtgagcttaagaaagatgtgttttgtttctttctatatatttctttttgagtaacagataacttcctccactgtacagggaaagctgagaaacggttctttggcagctataaa

SEQ ID NO: 3508 - DNA, 9055 bp, Glycine max
  Intron number 12 from transcript Glyma07g30580.1 (locus Gl yma07g30580) derived from phytozome v7.0 (chr-ID Gm07; pos 35548606 to 35557660 reverse strand)
atttcctctcttctacaacaggctgcacaaagcaggtatatggtcttaggaatttggatcctgctaatcctttctcgcttgaagttaatgctttgaatgaactttcaggatgaatatgtgcaagaatgcatgttttcttccacatgaattttagatgacttattattgcttttcaactaatcagtttaaccttccaagtttctgtctatgatataactggaataatattagtgtactcgattcagctggaaatttaatgtttatgatagacaatgtgcccttgttattggtctaccgtccttatgtaatataattgttgatgtatgctgtaattcagttagttagttagtagttaggagttagttagtttgacagctatgaaggttgttgtagttacatgtgcagtgtgtataaaaataatagtgatcatgaatgagaaaggatgagagtgcagaagttttaattcagaattataagttccctctattttttcaatcaattctttcatcttctcttattctctaacatagagtgagtgagtgcatagtgtgagtgtgtgtgaagaactttacttgcttcaacaaactggtattcagagctgaggttcaagatccttggataccgaaattgagatggcttcctcgaatggaaatttttcagcatttatgcttgttctcaaaggcaagaactatgatgattggtgtactcagatgaaggtaatcttttgatttcaagatgtgacagaagtggtgcaagaaggggttcaagaacttgacaggaacccgactgatgcacagaaggtggctcaccgtgatttgatgaaagacaattttcattattcatcagtgtgtagatgcagacaattttcagaaaattagatctgttgatactgcaaagaaggcatgggatactctagagaaatcctatgcaggggatagcaaactcaagaaggtgaagttgcagaccttgagaaggcagtatgaacttctacaaatgagtgatcaagaaagcattggtgagttcttctcttgaatcttggcaattacaaatcaaatgaatgcttatggtgacaagcaatcagacttggggatcattgacaaggtattaagaaccttgacaccaagattcgatcatatagtggtggcaattgagcaaggccagaatcttgaagaaatgaagattgaagaactgcaaggaatacttaaaactcaagagatgaggctcaatgaaagaaattcacaaagatcagctgagcaagctatgcaagcccaaacaaccaaagggaacaactatgatggtggcaagaataagaagggaaagggaaagtggaagaacaataagtggaaggtgtcaggtgagggctccagcagttctggaaatcataaccagaatgaagaaattgacaagaaaagtggagggaatcacaaagcgggcaagaagaaattcaacaagaaagggattcagtgttataactgtcagaaatggggacattttgcagatgaatgcagaaataaaagggttccaagaaatgcagatgaggttcaattagcataagatgaggattttgactctgataaagtgttactaatggcaacaataaactcagaagaagacaatgttaatctgtggtatcttgatacaggctgttccaatcacatgactagacatagagagtggtttgtaaacattgatgataaggtgaagagcaagatcaagtttgcagataacagctctgtaactacagaaggcattggaaaggtgatgattcagaggaaggatggacaacactcatttatcaatgatgtgctatatgttcccaatatgaagaataatttgctgagtttgagacagttgctagaaaagggctactcaatgcagatggaggacaatcaaataaagatatttgatagaaataggaggttgattctagaggcccctttgtcaagaaatagaacattcaagattggaattcagattgcagaatttcaatgcttggctgcttctataagtgatgaaagctggatgtagcatcacaggtttggtcatctaaatttcaggagtttaagtgaattgaaaagtaagaaaatggctcatggtcttccccaaattgagataccaaaacaattgtgtgttgagtgttgtgtgtcaaagcaaccaaggaattctttcaagtcagaaattccaatcaaatccaaaagaaagcttgaagtgatttattttgatgtgtgtggtccttttgaagtgaaatccctaggatgtaacagttactttgtgtcattcattgatgaatttattagaaaaatgtggatctatctcattaagcaaaaaagtgaagtgtttaacatttttaagaagtttaagttgttgagtgaaaaataaagtttttttttggaaagcaaagatatatatatattgattgaaaaagtaccagaggtactacaagatacatataggacctataaaacaggaaagaaaaaccaccctacaaaaacaacaccctactagatgtcacactaggtaaaagctatagacattcctgaagaccagcaatggaaaggagtcttgaaatctttttccaaacccctcagccaagtccataaaaggaataagatgctatctgtcaacttagagatgtcaaaggatagattatggaatatcatgtcgttcctgagtctctaaattgagtttgtagctgctacccaccacattttccatcttttgttagaagcctttgaagctgctgcagaatagtgtcgaaggaaattatccattggtctgcagtggataaccttgtcttccttgacccaagagaagaattcccaccatataggcataatcttatcacatttgaaaaaaaggtgaggtgcagattcaggttgactgtggcagaaagggcaaaggtcattttcaacctgactttgtctcttgaccaggttatccttggtagggagtctatcccaaagcaacctccaagcgaaagaaagagccctaggaggaatttttagcttccagagttgctggaacccctcgaactgaccttgatcatccaactgagattgaagaacttggtaagtagatttagttgtgaactctccattagcttcagctctccaagtccaggtgtccttcaggtagatatttagactccaagcatggatttgatcaatgaatttagacgctaactgtagctcattatcgaagagatttcttctccaagacaagttccagacccaaccattctcagtccaagatcccatctcagccaccctgaaattactttgggaagaaactctaaatagctcaggaaattgatctttaagagggattccctcatcaccccaaggatcttcccaaaagagaaattgatcacctctacccaacttccaacagatttgattagcagcagcagacatactctgatgttgagtagtggcccttaagtcagcccaccaagaagaaaatgaatgctttggaggtccccggcccaatcccctccagccattgtatttagataccagaattctgttccagagttgatcagcttggtggaacaacaaccatttccatttgaaaaggagggctttattgagggttttaatatctttaatccccagacctcccttatctttaggagtgcagcaaagactccaagatatccaagcaatcttcctcccttctggattacctccccaaaggaattgcctttgaatgacagagatcctattaataacagctgaggggaccctgaaaaaggacataaaaaacagaggtaatgctgttagaacagcattaataagagtgattcttccagccatagaaatattcctctggttccatttgctcagctttgcctcaatcttgttaataattggatttcaaaccacccttcttcttggattaacaccaataggaatccctaagtaacagaaaggaagctgtaacatagcacagttaagataagcagcagcagaattgcaccacccatcagcttgacctatggcaccaaactgactttttgagaaattaattctcaaaccagataccatctcaaaacttctgagaatgaccttcacagccctgacattctccatggaagcttctccaaagaacaccgtatcatcagcgtactgcagtatatccacaggaaccttgttcttccccaccaggaagcttttgaagcagttttgagctactgcttgcctcattatccctgtcaggccttcagccactaaatcaaagagtaaaggagccaaggggtctccttgtctcagccctctttgaggtatgaactttgaagtagggcttccattaatgagaatagagatggaagctgaagagaggcatgtctttatctaatccatctctcatgaaaccccattctcttcaacatataaatgagaaattgccacgaaacagaatcataagccttctcaaagtccaccttaaaaaccatacaagacttcttggatcttcgagcctcctcaatcacctcattagccaccaatactccatgaagcaaatgtctgccttttataaatgctgtctgcctttcatctacaagataaggcatgacctttctcagccgattagccagcactttagctagaattttatagatgcagcctatgagagatataggtctgaaataattgatagcttggggatctttcagcttaggaatgagagcgataaaggaggaattgctgcctttggggaaggaggcattaacaaagaactcatcaagaaacctaagaaaatcaggtttgagctgttgccaaaactgcttgataaaagtgaaattaaacccgtcaggcccattgccacagctccacacagctcgagtaatctcctcttcagaaaaaggctctaccattctgtccctttgagaagcattcagtacactgaattgaactccatctaagttaggtctttgcagctggggttcatggaatctgttttgaaagtgctgtaagatctcagccttgaccaagagagggtcttcaacccatgaaccatcaatcatcaaacccctaattgcatttctcctcctgctgtaattgattagtttgtggaaatatgagctgctgctgtccccttctttaacccatctacttctagctttctgtctcaagatggactcatggagattagccttctcccaaagcttagattgaacttccctcagctgtttgatttgttgctccgaaggttgagaaggcatagagttttccagctcattcatatgctgctggagctgctttatttgagtgcaaatgtctgctgagttctccttactccacaatttcagcctttgtttaaggttcttaagcttgttctttaagacaagacccccccatcccatgggtcgataaacagaccaacaatctttgactacttgattgtactcctttatctgcaaccagccatcaaaaaccttgaaaggcttggggccccagttagaaatcttcgatttgaggataatagggcaatggtcagaatagttcctctcaaggttatgttgagagctatcaggccatagttcaagccacccatctgaaaccaacactctatcaagcttgcttttacaagttccattaggcctcacccaagtaaaaggcttacccaggcaagggacatcctccacctccatatcagcaagccattcattaaagtcttgaatgatttgagaatctgaagtagtgttgttagttccctgtctttctagagggtgcctaatacagttaaagtcaccagccaaacaccaacaggagtcttggaattgtaattttctggagctaagattctgccaaagctgtctcttcccagcatgatcacaaggggcatatatattaatgactgcaactctttgcatttgaggtagccatattccacccagcataatgaagtctttatctgaaatccttaaatcaacatggaatttgttgttgtcccaaatacataacagaccccctgcagcatttaaggcaggctgccattcccagtctaaatcagattgcccccataggaattgacacgaagctttgtctaacacatcctttttagtttcttgcagacacagaagatctatgttatatttatccaccaaattcctaatagaagcccatttaaggcctctacctagccccctaatgttgtaggtcaagatattcatctctgaatatatgtatttctcatcttcaaagcttctttcctgtcccgagactccatagctgagaaagagtgtataccttcagaatctagttcatggttcaggcccatggacttcgcaagaatccattgctgcttggcctcttcgcagtcttcaagatgatttccttctttgttaatagtcccctcaacaacctgtaacttagtggtattttggccttcagaagaagcatcatttaagccacccataatcttatcggtaatcaaagtgcttagaacagatggaggtgatgagtataactcacatggatttcaagtattttgtgatgaagaggggataattcatgaagtgacatctccctatacacctcagcataatggtattgctgagaaaagaaacagaaccattctgaacatggccaggaacatgatgaaagggaagaaaatgcctcattactttttgggagaggcaacttctactgctgtgtatattctgaacaggtgtcccactaagagattgcagggatacacacctgaagaagcatggtcagaaaagaagcctagtgtgagtcatttcagaatatttggttcactgtgttttaagcatgtgtctgagcagaacaaaaagaaacttgatgacaaggctgaaccaatgatacacattggatatcatccaactggtgcctacaagctgtatgatcctagaatgaggaaggttgtgattagcagagatgtcttgatagatgaaacaaagggctggaattggaaaataaatattgttgacaatggtgaaagaaaggtgattgtgaaccttgaagacaaacaaagtgaagaggatgtaccatcatgtggagagcaactcagaaggtcacaaagagagagacaaataccacaaacactcagagaatatgaattgtatcctgatacagcaatcactgcataaggggattttgtgcactttgctctacttgctgaatcagaaccaatgagtcatgatgaagcctcacaaagttcacattggagagcagctatgaaagaagaattgagatcaattgagaagaattagacttgggagttagtccttttacctcaaggaaaaagaccaattgatgtgaagtgggtctataagactaaagtaaagcctaatggagatgtgttcaagtataaggcaagattagtagcaatgagatttttgcaaaaacatggcttggattataatgaggtgttcgctccagttgcaagacttgaaactgttaagctcattgtggcagcggcttgcaacaaaaactggtctctctatatcaactagatgtgaagtcagcatttttgaatgggccacttgaagaagaagtctacataactcaaccacctggttatgtagttgcaggacaagaggataaagtctataagttgaataaggcactatatggcctcaaacaggctcttagagcctggaatatgaaagttgatagcttcctagtccagcagaatttcaccaagtgcactactgagcatggagtttatgtcagaaacacagattctggtgagtttttgataatatgtctctatgtagatgatttgctagtgactgacagtagtaaagaagatataagagtgttcaaaggaagaataatggatgaatttgagatgtctgatcttggtgaactatcatacttcctgggtattgaatttgtttctaccagtaaagggattttcatgcatcaaaagaagtatgcagaagacatcctaaagaggttcaatatgatggattgcaattctgttatcacaccaactgaaagtggaattaagctgcaaatagatggggatgagaaagaagttgatcctaccttgtacaaacaaattgtaggctcattgaggtacctatgtaacaccatacctgatattgtctattgtgatgggttgataagcaggtttatggagaaaccaaagacacctcacttcctggcagcaaagaggattccgaggtatgtgaaaggaacattggatcttggcattttatatccttacaatcagaagaatattaaaggagaagtgtttgattatagtgattcagattggtgtggtgataaggatgataggaaaagctactgggtatgttttcaaatttggaatatcaccaatctctttgctcaaagaagcagagtgtagttgctttgtcaacatgtgaagcagaatatattgctgctgctatggggcagcctgtcaagctctatggctggaagctttagtggaagaactaaacttgagaaattgcagtcctatgaggttgttgatggataacaaatcagcaattgatttaggtaagcatcctgtggcacatggcaggagtaaatatattgaaatcaagtttcattttctgcgtgatcaagtgagtaaggagaagcttgaattgaagttttgtaggtctgaagatcaagttgcagacatactaactaagccattgaagtctatcaagttcaaggaattgagagacaagttaggagtgacatccttgacaaatttaaattaaggagggatgttgatgtatgttgtaattcagttagttagtagttaggagttagttagtttgacagctatgaaggttgttgtagttacatgtgcagtgtgtataaaaataataatgatcatgaatgagaaaagatgagagtacaaaagttttaattcagaattctaaatttcctctattttctcaatcaattctttcatcttctcttattctctaacatagagtgagtgagtacatagtgtgagtatgtgtgaagaattttacttactccaacaataacttgatcatatcatattaataaacaaagaaaataagaaattgtggcacttatgttttttcaggtcagtgggaagaacacag

SEQ ID NO: 3509 - DNA, 5675 bp, Glycine max
  Intron number 5 from transcript Glyma17g33800.1 (locus Gly ma17g33800) derived from phytozome v7.0 (chr-ID Gm17; pos 37739057 to 37744731)
catcagactgggtctcatccttggcacctgctcaggtttgatttgtgtttttaatacattaattgcatgtgatatttgttctagatcttgtaatagttgagtcctcttcgaataatagctaaaagttagacacactatcttgctgggtcaatggtttttttttttttttttacacagcaaaaatcgatattgtattagaaataagattcagtactaggtctactgaaatacatagcaagaaaatacaaaggcattgatgagccaaacccaactagaaaagaccatacaaggtttattttgacttagcttcagttataacctcgttagcaatcagcacaccatggaggatgtgtctccccttcataaaagttgtttgcctttcatcaatgagatgaggcaacacaagggccagccttttagccagaactttggccacgattttatggacacaacctatgagagagatgggtctataatcattaagagattgagggtcattgagcttgggaataagggctaggaacgatgcattgcttccttttgggaaagtgccattgatgtaaaactcatccatgaacctaataaaatcaggtttcaaaatctcccaaaattgcttgatgaaattgaaatttaagccatccggaccaggacttttgtccccaccacaatcccacacagctgatttaatctccaattcagaaaatctagctacaagactttccttctctctttggccaagagaaggaaaatgaaccagggttggtctattaaagttctcctcagaaaatctgaccttgaaataatttagagctgcatttttaacactgttaggctcatgaacccacacacgatctatgagcagaccttggatagcattgtgtctccttctatgattaatcaatctatgaaaatagttagagttgttgtccccttcttttaaccacttcactctggccttttgtctcagcatagattcaaatgcataagctgcattctagagctgatcttgaagtgatttcttaagcttcacttcatcttgacttttctagcattgataccagcctccaaagcattcaactccctctttaaattctggacttttctagcattgatatcaccattggataaactccactgccttatgcaatctttaatgacctttaatttctacttcagaacaaaacccccccatccagtggggtgataattgccccatttgtgttccaccaatttctggaaaccgttatccttcaaccaccaatccatgattttgaaaggtttaggcccccaatcaatgattctagacttcaaaaggataggacaatgattagagaagtccctttccaacacaaattgggtagtgtccggccattgggacaaccattcatcagataaaagaaacctgtccaatttgctcatagcactaccattaggtctacaccaagtgaattttctcccaataaacctaacctcctctaaagccatatctgaaatccaggaattaaattcagatatggtagaggagctacccactgtctgagatgaactcaatctctcatcttggtgtcttatagaattgaaatcacccaagatacaccacaggccttcatgataagttgttttcagctgcaggagctcatcccactactctctcttcccttgtaaatcacagggagcataaacattagtgataaagaccctcttgttctctttagtccgcataccttccaacattatgaatcctctccccactaccctcctttctactacaaaagagtcattattccaaatacacaaaagaccaccagctgcattagatgaaggtacactctcccaagtgacactgctatcaccccacagatactgacataactttttatctatggactcctttttagtttcttgaatgcaaaggatgtcaattttgttggccaaggtcagcttcctgatggctgaccacttgactccactacccagccctctagagttgtaggacaaaatattcatgagtcattttgttcctttcccatcacagctgctgatgctgatggtttgtctctctgatccatttcattcatcatctttaccatgttgattttgttctctgcaaaggacactcccaagtctctggctaatccccaatgaacatcctcctcagcccccatatttactttattgaagctgcttgaaaggataggactgtgttgaagctggacctgttttggagtcattgtgcctgtgtctgatccatgaagaacagcaccagccctgtggtctatgaaattatccccgaagtccaatttccttggcttgacctcatccctactctcatgtaaatttgggtctaaatttgtttgggccatggaaagccctgctacagcctcctttctcctgacatagactttcaaagcagagtaatttttctcaccctttgtaattgggccgttggtatccaagcccatattctgatccatcccatcctccaccaaactctgatatttctttcctgagtcccttttggttgtacccataaggtttgaaacctggttgaccactgaatgggtctcgagactattgtctgcaggttcatcctgcatagcccaaaggttactccctttttctgagacagcttcccccctttctgcaacccctttttctttaaatctctcctgctgttggctagggcagatatccctagggtcagccattccttttccatgcaagtccaggcataggggaccgttgcaagcctcctgacacaagccatcaggtgtcaggcctacaggagcagacggaaacacgcaatagtggcgagacgaaatgtcatcgcctgtcggggaccggggactccttatccatgcgccagaggttgatagcattggccctctgtcgtcgacggctctccacctggccgggcatggaccaatgggtggagtatccgccaacagtgttgtaggagaggcggttggtcaatcctccgacggggacgcaggtgtttggctcttcgtccgattcctccagggctgtagtgaacgacgattgcgggaatctctcggcttccgccaaactcgaccttcttccccatccgaacgacatctcctccctcatttccaattggtgttgtgttccgtccactatggctatcaccgatcaagctatgtttggtttctccgtcgtgcgaactaacacccgcgacatctacccgcgatctatcctccgtcacttcgtcgagctcgataagctctccacagcccgataccatggtcgcaaaatgctctacatcccatgccttcaagggtacgccccaaatgtagatccaagttaggcgatatgaaggcttcatctctggcgaccatctctagagtgaaatgaaaggggtccctccgcttacttgttctcgatgattaatcttgtgtgctttgtcctcatccatctcgtggaaaatgaccatatcatcgccccaatatgtcattttcacctccattccaaccaccctctcaaacattcctttgttttttaaacgacccacccatacattgtctaaccattttgttttctcctttgctgtctaaataattattggcactactttagcttctgagacatccttcccaattgttggcacattagactccttcccaattgttggcacattagactccttcccttccttcatttggttgtgcttcaccacttccacatacgattttagcctggtagatgggatatttttgtgcctcatttgttcggactccatagattccatgaatttggtccctgctctgttatatgctcttgcttgagtcgtgacttccttgttgccttcccctctggaattttggtttgttgacgaacagcttcataccctctatgtatatgttattatcaagtcgtctctccaatctatcttcatcctctacccctttgaaacgaacaaaaccatatttgtggccttgtttgttcttcgttttaggtatgaatacctcccacacctttttccattcctggaatatcttccagagatctttttcacatacgtaatctgggaaatgagagaaatagaaggaagttatgttcggtctactccttcatgttgatgatctgtgcattcctctggttgtgtcttgatgagagtcgttctgtctgtattgtcccgctccatgtgcaatgtttgcctctgctcgagccttcctcctgccacccacttgaatccattgtccctcctaatgtttggtgtcattacccctttgattatcttcctctttgtagttatctctttcagcattcgtatatttccttctcccccttcctccctcactctgtctgtgtctgtccctaatattgtctctccctctctgctgatctctgtatcttgggcggcctctctccctctcagtctctctcccactctctctcactctctctgtctctctgtatttctctctctctctctgtctctcatttctctctctctgtctctctgtatttcattagaattctctcttggagtagttaatgtatgaaagctaccattttggtgtttattaggagcccatttctttcttgctgggccaatggtattaggacaaaaaccttgtggttatattctcccaggttgcagctacatgctttataagtctgaatttaatttgataaataatcatcatattgtcattatctcatcttgtaaaattgatggtgtacaatgtttttaaattatgtgcaaaataatcaattttggcattctgaagatgttctttaatgatgaattccatatcacaaagcttttggtattgacaacctgaagttcaagtggggattctattctattaatccttatttcttgtaaagctgtagcacccttttctttgtttattttcatattcttcccatgatgaagtcaataatctgtaattttgattttagcgctgcagcttacaactattattgctactgctgcttacaacctgtaaatatagtccctttcatacctttcaattctataagatggaactagtcttcttgtccttgtattttctctatacttaggtctcaaatttagattcctcgtcttcctacccactgcattgaatggttagagtttgggctacaatacttttagttttagagtcataaaagaaaattaacaatgatttatgttgcgagactgtacatttgaaattgcatgcctattgataatacaaatttaatcatttttcctttattgaactgcaactggcatcagaggtggcaaaagaatgcttgcaagtcattctatgatattgatattgtagtatatatagaaggtccatagttatacaatgtgtaaaagcaacatacatagtataataaagaggtagtgcaaagctgttagattctagtcaaaacacgaaacatgcgctttaaatttgctttgtaatgtaaacaagatagtgcaaaaggttgattttgaaaataaatcttgaactgatttttagaaagaaaaaaaaaaagaaggatctataactggttgatgtgtctcctaattttagtcaatttaaagatctgatgattagttgtcattttcatgattacgataccataatgcctttagttcccttgctctatatgctcataaccttacttttttcttatcttcaggaggtggagttttcaggtggcggtgtaaatttggg

SEQ ID NO: 3510 - DNA, 3995 bp, Glycine max
  Intron number 2 from transcript Glyma10g03460.1 (locus Gly ma10g03460) derived from phytozome v7.0 (chr-ID Gm10; pos 2512830 to 2516824 reverse strand)
gctggtgtttttcaggctgccttgggtctgtttaggtaaattcttaatgaatcacattaatcatatactctttttttatcatacattaatgatgtactctaatgtcactttctattccggaaactcatatttattgtaatcttggatttaaacaatttttaaatgaaataatagcatttttattataaactatttatttaatttttacgatggtaaatataattgaaaacatataaagtgtatcacgtgtccttaacccatgcatctagctagttcatatatacaacaactagtatttttttattggatgaagatataaaataatagaaacaataataataactgctgtttaaaaaaaacaataataatattcctacatctaattcctttttcccacatctccttccacagttccacttccatttttttcatattttatttatttatttttcttttacttttaattttaattttgctcctcttttcttcccatctttctctaattttcacctccatacacacaattttggagcatatgctgacaaaaaacaattttggagcacatgagtttattaatagtacgaagctcacacggatgctcttgctgtcaataataactgttaaagtttgaagtataatattggaagaattatgttatctataaaatatgctttataatattattttcttttatcaatggattcgtccctaggcatattagtattatatatttttatatcaaattcaggaatctgcccaaacagcatctataatagacgtactacgtagtactaaaatttacacgaccagaaagatgtttatttttccgatataatttttcccacggaaaatattccgtcgaaaattttgaatttttccatgaaatttaccaaagaaaaattgtccataaaaaatgattgaaaaacgaatggattttacccacgaccaattattacgtggaggccagggagtggaaagtttgggtttttatgcgcttttgatcatgtgaatttttgtggttaggcagtttttgggcatgctgtagctaccttaattgtcatttctcctagcatgagacatattcacttgcttcaaaagaaaaaaatgattgggagacatctacctatgtcaagctatgtattattgtgtaaactgaatttttaggcaacttatacatgttaatggagtataaaaaaatgtagttatatagagtattttcaataaagaatttagattttaatcttaaggtctcatattagaatggaaaaaatctcgagagtgatataatattgaggaatctataaaaaaaaatagttagatatcaaaataagattgatcttcctattttggagaatgtttaaattccaaaacccatttggtcggcaagttgcaatcaccttctttttgattggtagtatagttgccctttggttaggtattggagcaacgttgagaaaaccctaactttaggttttttttaacttataaaatcgattcaattttgaaataaaataaaacagactgtcatgtgtactatgtatctagggaaaattcattttgaaaaaccctaaagtgtgagatgcattttatatgatatagataaaattaacaactatacatatgacaattgaatcaaattgatttttattattatcaagatctacttaccttaacaagtttgtgtttgatccttataaaaatcttggaatgtcacagcctctcgtgtttctaaacttcgtttcttattgtaaaataaaaaataactattttgattttacatgatcaacaatagtaatgtattagaaaaattgattcatctttattttatttattgcgatgaatttggcttttgtaagtcaaatgtctaatcttgtcaattgtcataaagaagatgactatctaaagagatgctaaaaatggtatgttatgctccatcaataaaaacttttatagggcatgtttggataaatttatccataagtactcggtaggaaatgaagataagaagacaaaaataaaatgagtttcttttaagttaaaattagtttatacataagttaattaaaaatattcttttagagaaactatataaaatttatccaaacatacccatatttattatttgcaggaattgacatgtaaagaatgacttaggtaagaaatccaaaaaatatgataaagcaaaagagactaagagagtttggagtttgtcccatgaagactaagaaataattttaaaaaaactttataaaagaaaagaaaaaatataataaagataaagtccaataatacatacatccaatgcactcaacttcaaccatactaagatctaaaggaatttcttcaaaaaaaatgcatgactaaccttagactcaaaaaaatgcatgactaacggtaaagaatctaagtccatctttttaactttactcatttaactactaaatttttcattctcaaaagaaaaccatgactttgatgtgggtgaggtttgggctttgttatttgcacctcttcttgtcttttcccactcccattttttttatttcctattgtacatctttttcacacttccactccctctctagatctggattgtctcccatccaaaataattgaagagtttccaattagaaaaggcagaccattggatcaaatgtgtggctgagattaagtttgagaaaaaaatggaaaaaaaaatggaaagaaaaatagaaaaaaatataatgaagaaacaaaaaaaatatacataatgacaacaaaaacaatacgtagataataaattaaaatgtagaatttatattagttttctattagaatttctattttattgatttgttacaaaatatttatatcaattaaaatgtagataataaatttgttataatggattcaactattaatatactagtaaattagaataaaaatattagaattatttaataataaaaatatttataaaaattgttgagggtttttttattgtagttgcttgaaattatgtattctaaatatattaagtatatttctgattgtgattatgttatttatatttcatgctttgttcatttagaaagtcaaacattatatatgtatgccattttatttccacctaaagtatgataagaattcttgctactaacaatagaaatcattgtaagattatgtatgactaaatattcatgtccctatttttttcttaaatatacataatatgaacaatattctttggaattgtcattggatgtatgatagatattatagtggtaggagtggtttgaaagagtcttgctactaacttaatgatttatttatctatgttttggatttatcaattttactatttcttaattataagtatgtattaaattcaaatttttatggtaaataataaaattcataacataattgctaaattgtcaatcataaatgataaaaaacaaaaacaattaaaataataaattatttataaaattaaattttctgacagatttttcgtcaaaaaatttggacggaaaaatccataagaaataattcatgggaaattttcatggaaaatgaaaatttccgatgaaaaatcagtcggataatccgtggcaaaattccgacagacatttccaacggaaactttccgtcgaaaattttccatgaaaaatttgtgacaaaattctgacggacatttctcacggaaatttttcgtcggaatataaaaggtccgtcgattaaaatttcctacgatcattttttcaatgaatttttgttcgtcagaaattcctcagaaatttacagttagcgacgaaattttaacctttccgacagattttggccgtcggaaaaatactttttttttcggtagtgttatcaacacatctaaaattgttttctttatttaaattttaatgttaatgaacacaaaaatatatatattaattaatatcacgcacaattaacgcatgatgatgattgcaggttggggttaatcgtggattttctttcac

SEQ ID NO: 3511 - DNA, 3485 bp, Glycine max
  Intron number 2 from transcript Glyma04g28760.1 (locus Gly ma04g28760) derived from phytozome v7.0 (chr-ID Gm04; pos 32932844 to 32936328 reverse strand)
caattaggtataaggtatgcgattcaaatcctttatttatgtaattgattattgaatgagtgaattggaaaaggcaattgcaattttttgtaatttgattgggggcagtttagtctcaaaaagctatgctgattatgactagggttttagttgacgaagaatttgggggaaaaagttaattttgtttcgcatgagtgaaatcatattggggtgggtttagatttcggaagctgaagaatcacaaggagatcaattgtatttctgattttaaaattaaaatctatcttaaccctaatgcttcagtaagtggaaattaatgtaatatgaaactgttaatttttggattttgcaacttggttagtttagtgtctgatgatttagtgaacaggtctgattaggagtttaactggttgggatcaaagaaaaaaaaaggaggagaaagaatatctaggctttgaatttttcttcttagacatcggatgtctcaacatcttactgattaggggttctatggaagaaaacagagattggttgattctttgatagctggatacataaatggaactagtcaatgttgggactgagaagtccacaactggacttagttaaatatcctgccactaattaacgcgaaagaaagaccaaatgagtgaaacaaactaagtgaaagccttcaaacaaaaccaaatcatataactatcctagctaactctccatcttccttttcatttttaattatacatgtgatcccatctccctttataattaccatgatctcaaacaacactcccccctaccaaaatttgaccttgtcatcaagatgaaattcagcagcctatcctatcaaaagaagccacaccatctcctccttcgaaatcttccttcagtaacgttttcaaacagatgatctaagctatatcactcctaagaacaaagccccttcttgatgttcaactgtatttcttcatcaaaatatctcttaaaacttccttggtttgtcaaagtaccatttggttctgccagttgctgaatccatcaccgacccttcttttgggttggttcctgcaggtttcccagaaacagattcatatgttgttttgtatgatgtgtaacttctatatgtggccctccttcactgcctgaaaatctcctctcgtttaatatccacttactatcatctttctacggggcataattcatcatctttggtattccactaggcaccttccaattcacccttgacttcttccttcaacccattcaggaaataccctaagatattcaggacctgtaccattcaaggggctttggtagagctcacattgctccttctatccttccttgagagaagttgtgaggcccattgtcatagggaaaatgtaaagcttagcaagttatttgagaaggtgaatataccttttctgaaagataaaatttatcttgttttgggatctctttataaagaaataaagtgcttacatcgattcaacttattacttttttgagaggttcattatcataagaaaaatgtaaaggcttaacaagttgttttgagaaggtgaatatacaatcttgattctcagcttagatcttttgtcatgatgtaaaaatttactttcgtttgactctctttctctcgctcacacatgcataatgtcccaatgtcgaattgtttgtgttttgtctagcgtccttgttcttcatctttgcctaacaacatgattctgaggttgttagcatccaattactaggtatagtcccatattggaagtatgtgattctagtgcgggttttatagggccttgagcgttcttcattattctctctcttttaccagttggttctgtcacagacttccttcttttttttttttttttgctcagcacagacttccctcttggcattgatgtacagggtgtatgcatccctatgtttgaaacagcacccttcgatcttgcatttcactaagttagtgtgtagggaatatgatttatgcctttgttcctattaaaaggattggaggcttagtgaatgctgtcaacaacagtgcccttctaggttgaggaattttgcaattgtgatatagagctgggtcaagttgtgttgggcatggagcatccttgtagcattgacccaaggcccaatttcccactaaaagaaccaattgcctgcgtgagtatgagtatgaccacctgaatagaatagccccatcttcctcttattgagtgcccaattgtcagggatttcattggtgttgaacatcctcattttgcatgctattccttttcaatgctcctaggcagctcaattgcccgcattattcaataatgttggtgtgttctgattcttgtcataatgtcctcttttaatcccccaagttaataacccagaacctagtcttttggcaactccatgatttggctatcaagattcaagattttaaaacttctcacataatcctccatacttccatcttattgtaagatagccaaactttctaatggactcccctcattgcatcctccaaaatgccttaacagatctgccgctggttctacccaaatgagcttcaaatattgcttccgaagaaattggaaccaatgaatagtgtgttccccctacttacaaattaaggttaggtgcaccttcacccatgagcatgtgtgccgcacctcgaaaaagttttcgtctcttgctatccatcccactggatagtccccatcaaagacaatgagagttctactttttttattgctaattgatggctctcttaattttctcataatgatatcctcccttgggccttgcatctcttaaatctgatttacatgtttatttggtaaaaaatgaagataaaaattttgtttttgattctcatacattacaagatgtattcagttaaacaagtcattttttattactttatcatcttaattccaatctggaagaaaatactaggataacatatcatttccaatttgtaggtagatgagtacatacaattctgatatttgaaagtatgttatgaattaatcttttaggctccttagtccttttcaggtatgtatctaatcttcaaactttgagtactggtcaatcatatgcatgttctggagatataaggttgacctagtggttggaaagggggggcttgagaagggggagttgtaagttcgaatccctggactaacatttctaactaaactaataaactaacatttgacaataaaaataaaataaaatcatatgcatgttccagccacgaggtttttaaaggatactatacattgcacttgtctacattggcagtatatatacactcaatcatttctctggttttctgtggaagtgcaatggcatttctttattcattcctagggcattactctactgaataatgatgtagcttcctttgtttagttactcagctatgacgttgaaaccttgcaggttcctggactcctcaagataaggcatatagggca

SEQ ID NO: 3512 - DNA, 9410 bp, Glycine max
  Intron number 7 from transcript Glyma04g38320.1 (locus Gly ma04g38320) derived from phytozome v7.0 (chr-ID Gm04; pos 44708709 to 44718118 reverse strand)
cagccagcagagtcccagactgtccctgaatctaggtgacttttgcttttcagttttagtgtactcgtgattgttgagtttctgttattgattcagaatgtgaaaagttggttacaacagtttggatctctctatacatagagatatcaacagaaaactaactacagcagttaatcaatcatggttaactgttaactaaccaaacagaagtgacagctgtacaaacacagatgtgcaaaccaaaatacaaagagaagagtaagatactctaatacccccccacaagttcaaggtgggtgattctgaacagaggaagaagaatcacacactttgagcttggatctctactaaaaattggtaacagagagggccttggtaaggatatcagcatactgcagatgagctggaacatacacaacctgaagcagcttgttaagcaccttttccctgacaaagaacatgctccatatgcttagtccttgcatgcagaaccggcttgtgagcaagggaaactgtacttttgttatcacaatggataacaggaactgtgtgctgaacctgaagttcagataaaagatattggagccaagatacttcagcagtaaccaatgcaagactcctatattcagcttaagtgctggaccgagccacaacagtttgcttcttggaccaccaagaaattagattagaaccaaagaaaacaccagcttcagaagtggatcttctgtcatcagggttagcagcccaatctgcatcacagtaagctgtgatgaagaaaggtttaggaacagactgaatgtggagaccccaagtaagagtaccctttagataccttaaaattcgtttgactgctacccaatgctcctcacaaggatgagtcgtaaattggcaccctttgttgacagaaaaactgatttcaggtctggttattgtggcatattgaagggcaccaaccacagatctgtacagaaaaggatcagacagtgattcttaaccagcttttgtaagtttacaaccagtaaccataggagaggaaataggcttagcttctgtcatattggttttggttaggagatcccagacatatttgccttgagtaagaatgagtgacccatcaggttgatgcttaatttcaataccaagaagataatccaatgaaccaagatccttcaaggagaaaacactattgagtttgcaaactaagctctgcagcaaagtaggattaccaccggtgatgattatgtcatcaacatagatccacatgtagacagttgtggaacctttggaatagacaaataatgagggatcacatttgctagagctgaaaccaaacttcaagagtgtctcctttagcctatcaaaccaagccctaggtgcttgtttaaggccataaattgccttgttaagcttacaagccattgacttacttgaagcctcaaaaccaggaggctgctgcatatagacctcttcctccaagacaccattaagaaaggcattgttgacatcaagttgctgaattggccagtgatagttgacagccaaggagagaagaagtcacacaataataggcttgattactggggaaaaaatatcagtataatcagtgccatactgttggtggaaatctttggccaccaatatggccacctactgtcggtgatacatgaacaaaagatgaatattgtgctacaaactgaaacagaatggaaggtgggttgtggggataaattcagattttgggaggataggtgggtaggaggaggggaagcattaatgaggaaatatcccaggctgtatcaagtctcctgccaacaacaaagactcattcagcaaatggggagacaaaccgaaacagtttgggaatggaatcttgagtggagaagatccctatttgacaatgaagtcgatgcggctgtcagatttatggatgaaatatcacagataccaatccaaaatcagatcacagatcgctggatatggaaaccagaaactagcggacagtattctacaagaagtgcataccacctgctgcatgaagcaacagtaggggacaacctggatgaggcattagaggatctatggaagctaaaaatcccagcaaaagctctaatttttgcatggagactaaagaaagacagattaccaaccaaagctaatctgagaaggagacaaatccagctgaataatacaatatgtcctttttgcagaagtaaggaggaggaagcctctcacctgttttttgattgcccaaagacacagcccttatggtgggaatccctctcctggattcaaaccatgggagctttttctgttaatccaagacaacatttcatgcagcacacaattggcataaatggaggaaagcagtattctagatggaagtgttggtgggtggcccttggtctatttggcagcacagaaatcgaaatgttttcctagatgagccttttaatggaagcaagctgctggaagacgcaatatttctagtctggtcatggcttagagggtttgagaaatattttgttgactcatataactactggtctagtaatctaccagtagctttttgtatataggatagaaatgatgggtattacacggtagtaatatatcaggtctgcaatctggatcatcacactagtggatccagcagcatacccagcactgatattgtatttatagtacctcgggtactttcaaacatttataatatattatattttggctgataaaaaaaaaaattcttgagacctaaactgaagcttgtttttggtgtaaggtcttaagagaggaaagtgtgcacaaccaaacaccccaagaaagttataatccagtttttgattaaacaacttctcattaggaatttcagaattaatagaagaactacggagtcagtttatgagataaacacttgttaggaaagcttgatcccaataggtgagtggcaaagaatccttagctactagagttaacctcaactctactatgtgtctatgcttcctttccaccaccccattatggtgatgaatgtgaggacaaatgatctgatgaagaatgcccaattgttggagaaaatcagtaaacggacgaaatcccccccccccccccaatcagattgaacagatttaattgaacaattaaaactgtttttcagccatggccttaaactgtttgaaaacatttaaggtttgagtcttagattttaggagaaatgtccatgtatacctagtgcaagtatcaatagaagttacataataggtataactagtagaggaaacaaaaggtgctggaccccacaaatcactgaaaattaattcaagaggtgtagaataagaagtagaagataagggagagtgtatttgttgtgctttgccaagacaacaggaattgcaaaaatcaagctcatttttattattgaaagaaatattacacaaacgcattacaagtttttgggtagccacaattgggtgccctagtctagagtgccaagtgttggttgagacagtatttacaaaagcagaattaacaggaaaatgagtttttacaatggaagacaacaaatcagactttgaggtagacttggtaaatgagcttgaagaggtagaatttgacagtagcttggttaatgtgtacaagccattggatccaagatgtcctttgagaagaatctcattggatccctgagatttaacacggcacacattagggtgaaattcaagggaaactgaattatcccttgtaaattgactaaaacttggaagatttttagaaatggttggaacatgcaatattctattgagaactaaatcagtagaatgattataaggaagatgaaccaatagatttgatgggcagaccttgaccattgcctacaatcacttgatcgggaccctcaagtgaagaacactgctgaacgttctcaacattggcagtaacatgatgaaaggcacccaagttgggataccaaatgttggatgggtcagaagttgaaccaacagtcatagcttgaggactgtgattctgtttggtagtgaaatttgtcatttgttgagaggagaccatagccatctgagtaggaaccatttgttgcatgactggttgttgcatgaaggccctgctggagtgaaaaaattagcaaagggatgttgcaactgattaccaaaaggagaagcagcaaaagtctgaggaaacatcatgcagtaaggagatgcagtagttgagggcttgtgccaacaatcagcagccacatgtccaaacttctggcagatatagcactgcaaagaactatgaccggcacgtcctccacggcctctgccaccagatttgccactattatgaccagcattctgattctgaccagaatcagtttgtgaagtgttggaattctgctgaacatagttggcagtagcagatgctgaagtgttggttttgtattgtgcagaggatggcataacagaggaagaggtcacattaaccaaagctgccttcccagacacaatcatgagagattgagctcatcccagacagtgggtaactcctctagcattgctgaatttaactcttggatttcagatatggccttagaggaggttaggtctattggtagaaagttcacttggtacagacctaatgggagtgtcatgagcaagctggacaggtttttcttatctgataactggctggctcaatggcctgataccacccagtttgtgatggataggaatttttcagaccactgccctatccttttgagatctaaaatcattgaccgggggcctaagccattcaagatcatgaactggtggatgaaggataagggattccagaatatggtggctctcaagtagaacaattatcaccctaatggttggggaggttacgccctcaagcaaaagttgaagttcattaaagcttgcataaggcagtggagcttatccaatggagttatcaatgctaagaaaattcaggatttaaagagggagttgaatgctttggaggctggtattaatgatagaaccttgtctcaagctgaagtggagcacaagaaatcccttcaggagcagctttggtatgcagctaatgcctacgaatccatgttgaggcaaaaggccagagtgaaatggttaaaggaaggggatagaaattctgcttatttccataaaatgattaatcacagaaggaggcacaatgctattcaaggattgatcattgatggggtgtgggtccatgaccctagtagtgttaaaaatgaggcttttaatcattttaaagacagattctctgagcagaatcttaatagaccaaccctggatggtgttcagctaccttcccttggtcaaggagagaaagaaagccttgtggctagattcattaaagcagaaattacctcaggtgtgtgggactgtggtggagacaaaagtcctggcccggatggccttaatttcaactttatcaagcagttttggaagattttgaagcctgattttattaggttcttggatgagttctatattaatggcactttcccaaaaggaagcaatgcctctttcatagcccttatcccaaagctcaatgatccccaatctcttaatgactataggcccatctctcttataggatgtgtctataaagttgtgtccaagctcctggctaataggttggccctcgttttacttcacctcattgatgaaaggcaaacaacttttatgaaaggaagacatattctgcatggagtgatgattgctaatgaggttatagctgaagctaaatcaaaaaataaaccatgcatgtttttcaaggtggactttgaaaaagcttatgattcggtctcttggggatttcttaattatatgatgatgaggatggacttttgtgaaagatggagaaagtggatacatggatgtctttctagtgcatcaatatccattttaatcaatggcagtcccactaggagtttgtccccgagagaggcttaaggcaaggagatccccttgctcctttccttttcaacttagtagcagaaggtcttacaggattgatgaggacagccatatctaagaacttgttcagcagctatcaagtgggaagtctgaaggaggatgtcaatattctacaatatgcagatgacactttgttttttggaaatgcaaatttggccaatgttagagtcttaaagtctattctgagatgttatgagctggtttcaggcctcaagatcaattatgctaaaagtcagttcggttgtttgggcaaatcagagggttggtgtagagatgcagctcattttcttaactgcagccagctggttattcctttctctcatcttggaattccagtggagtcaagccataaaagctggagtgtttagcagcctatcatcaacaagtttgagaccaagctgacaacttggaagcatagatgtctctcgatgggtggtagaataaccctcatcaattctgttttaacaactttgcccatctacttgctgtctttttacagattccccaaaaaagtagttcataaaatagtatctattcagagaaactttctttggggaggtgacaatgagacaaccaagatcccttgggtcaaatgggatacagtttgccttcctaagatcagaggggggttaggaattaaagacttgaataagtttaatgaggccttgcttggcaaatggggttgggagttggcgaataatcagcaccagctttgggcaagaatcttattgtccaaatatggaggatggaacgccttactctatggcagaaacagtgcagacttttctccttggtggaaggatttaaaatctgtcttccagcagcagcaccacaatagtttgatcagtaacttgaggtggcaggtgggtaatggggccaaaatcaagttttggaaggataagtggaggggggatgacttaaacctccaagacaaatatcctgctctgtaccaagtgagtcatcagcaggactctactatcagcctaatggatcattttgatgacaatagatgggattggaagatacattggaggagaaatttctttgatcatgaaatcgatatggtggcagctttcatggatgagattgatggagttcagatccacctttctagtatggactatcttacttggagggctgatcctagtgggtcttattccacaaagtcagcatacaacctcttgatggatgatggcagttctaataatgaagacagtgcttccaggattatgtggagtctgaaaattcctccaagagcaagtgctttctcttggagacttttcaaaaacagattgcctactaaggctaatctgagaaggaggcaggtggatctaccttctcatagatgccctttatgtgatgttgaggaggaaagtgttggtcacgtcatgttctcttgcacaagaactaggagtctttggtgggaggttttgagctgggttagtagagtgggccctttcccattgaccctaaaaatcatttcatacaattctctcattggaacagcaaaagctatatagacaggagatgggaagtgctttggatagctctatccatgactatttggaagcatagaaattcagtggtttttaataaccagattttcaaccccgaaaaagtcatggatgaagctttattccacacttggtcatggttaaaatgtatggacaaagatttccatattcatttcaaccaatggtctactaacttgaaggaggagctgtcttagggggttgtttcctttttggtttcagcgaatgtgcttatgtaacttttggatgggttaggcaatttttgccttgtatatttttatcctctcttcagtacacctagtactgaattatatataatactatctgatttttgctgtgcaaaaaaaaaccaaagctgccttctttcgatacctctcaattcgtgcctcatgaccaatcagtaaagtttcaatttcatcaacagtaaggggttcagcatggttattaatgaaggaaatatacgactcataggtttcaggcaaaccttcaacaatgacagcaatgtgttcatgcactgaaatgggatcaccaatagcattaaatgaatccactagatcttggaccgctgaaagaaatttagagactgtgcggccttcaagagtaagttgatgaagctgagtgtggaggtgattacactccacattcatgtgagtgtgaaagtgattattgattttgtcctgcagaagccatcaagacttgcatttgacaaatattcgaagaataggtgctgaaattgtgaaatgcaaccaggaaagcaataattgattctgttgatcccaaagtctgaacacttcagtgactctgccagcatttccatctttaatggtgtcaaacctttgcggaatctgaacctcatgaataaaatgaagcaaattataaccatgaattataggttccacctgtgacttccaaaacagataatttgtcgaatcaagcttttcagtaatgatgtgatttagattggtgttcactggagcaggatgcacaggtggcgcagcaccgctgtgtggtggattggggtcaccaccaccaccaccactagtaacaggtgtagccatgagtgaacgaataaaaacagccaaacaccacacgcggaaacagaaaatacaatcgcacaagcaaagaacagaatcgcaaagcaggaaaaacgaaccaaacagaatcggattcaatgcagaaacatcttgtgatgaacaatgattgtaaggaaaaactcaatcgcaccacaaaaattgggaaaaacagattgaatcgagcaaaaggcccagaaaaatcaactcagtagagtgaaaggctcggaaagaaacgaatcgagcaaagctcggaaaaagagaaaatatcagagattcttcttctagattgaaacctgaagctctatgataccatgttgagtttctgttattgattcggaatgtgaaaaattagttacaacagtttggatctctctatatatagagatcaacagaaaactaactacagcagttaatccatcatggttaactgtgaactaaccaaacagaagtgacagctgtacaaacactgctgtgcaaaccaaaatacaaagagaagagtaagatactctaatagtgattgacaggatctctagaaaccctttgctagacaactctaatctaaatgattttattatggtaagaagaattatttgctttggttagaggatggcaactgggataataagatttagccaaatacaatttgttttttatcaaatgaaatgaatgatgagagacagtttcaaaatctattttagggttgatttttttttcttaatttcctttataagttcattctgaaattatttgttcaaatcttcattttcatctaattgtatcttgcagcattattcaaaaggctagca

SEQ ID NO: 3513 - DNA, 3473 bp, Glycine max
  Intron number 6 from transcript Glyma05g27640.1 (locus Gly ma05g27640) derived from phytozome v7.0 (chr-ID Gm05; pos 33544108 to 33547580 reverse strand)
agggaaatccggactgcaattgtgaatagagtctggtaagaaatatttctaatttgtaaggcacagctctgctaagataaatttctgttattctagcccagaataaccccactcttgccttgttatatatctattactattactgttacaatttactttgaactagttgtttgataagctaataatcgagtgattattcatggatgtaaaagcacatgcaagatttggtgggcaagaacattttttgaaatgctagaagtatgcatattgtaaggaagacaaatgacgaatatgcacaattgtttaactatatgtaatttatatgatgatatgaatttacaggtgtagggtaatttttaaaaaaaaaattacagaaattgagagattttgaaaatattacatattatgggtaaatcgtgttttagaacataacttaaattatgttttaaaacacgatcttatagctgtaatttttttaaaaaaatactgaagttgtgatttaaaatatgattctaagtattttatattaaaaaaaaatgctaaagtggtactttgaaacacaatttcaaatttctaagtccactcccacgtaaatttagtgaaagttcaaggacaaaattaattatgtagacagactgattcgcaagtttttccttttcaatatgtaaaatatttgtataccatcacaggttgtgtcctagtttggcttcttttggagagtataacattgacaatgaatctagacttgtatttgttcaaacacatttctattttttacaacctctttcacctacccatttttttaaggatacaaatcatccaccttttttatccctttcacttaacccttattaattattttcacgcaaggacgaaaagttacgtctattttgacgagtgatgttgacttttataggaacttgctccctaattttatggcttcaacgtaaactatttctctttagagaataataatatatagacacgattattcatcaaatatcttattaatatttattattttattttaactctccttattatactatattattacttattatactactaatgcaagttgagtctggtaaacgaaattaatatctcgtaatggagaaattattagataatcttaaataatcataattcctactaatttttatataacatttaataagtattgttaattttttattataaattgtaaaatttgaatgtattatataaacatcgattgagacaatgaccatagatcaagtggtcgttcgagaataatttttcatcacagtatgacaaaactaaacttaatgaggtgttgatatttaatgtggaaattgatatttgttttttatgcattccaaagaaaaacaaacaaaaacaaacaccaactacaacgttcgaaactactcccacgaaattagcaaggagattgcttctttttgtttttaggttgcttcttaatttcaaatagttgacattgtactccatcgaatattaatcatcggattcaaatttaaattatctgatgaaaagttgtaacaaatttaattgtactaactgtttagaatttgcaaagaagtcaaacacctgtagattcaaaaaaaaaaaagtcaaaccctagctgattttgagaagcaatcttgacgtttaaaatccattgaaagagaagaagggggatagggaaatataattgatattcagcaaaaaaaaaaaagggaaatataattgacatttgttcgcacttcacgcacgcccaaaaaaattgcaatgtgcttcccttttcttcttccaagctttttacctccagttgagagttttgatccctgaaatggggaaaatgatgattggggtttgtagtacaatttgtttgattatgctaaggaagtggaaaaccaaatgatgattggttttggtataaattttttggcactgccttttccaaatgaatgaacctctatgcagaatcggaaatagcttcccagagttcaattacttgtgtccagatttaactagttaaaccaataatttaaactcagcaggatggatatcaacataagataccgacttgcacgaaggtctcaaatctagtcacttatgatgccaaaaaagtatttgacttgcaggatctattttaacttgcagatctatttgcaaagtacatgaaaattgaataacatgtgtaattgaaaattttaatatcaaattcatttacggttgttaataaaattaattttttacgctattatcaccattttgaccatttttgggttaaaaatcagttgaattttatagttttcatctaataagataaatttaaggtcttaaattgatcacaaaaattataaaatcatgcctcctaataaataaaaaaggatgactatttcaaaagggccaacttggcccataaaaaataaagaatcaaaataatttttttaataagatgaaggaataaaataaatcttaaaaataaaataaaacacttagtataatttatgctagttttttttttaaaatatcctcattttagggaatcattttccgtctcttttatttttaaagtattaaactttcaaaaggtaaaagatgaactccaaactcacatacataaaaaaaatgggatttttactaaaagatgtaatttcttttttatttttccatttaagggtcgactttatttttccgcacttcacaattgttttgctttcaatttttttaaaaaaattataaatgattttatttatttaattatttgaatattattttatttaatatattttatatatttaaaatttagataattttttaataatagtattgaatttcatttattttataaatgaaataaaaaactaacataatgttatttcatatattttttgaatattttttattttaaatacttaaattttaaaaaattaaaattttaaaataaatattaaaatatttcattactaatattaacttatactttatgaaaaatattatttattttatataaagaaatttactattaacaatatctaataatttaataataaaaatagttaaattaaaaataacataatacattaatataaaatgaataatataaattaaagaaaaacataaaaaatagaaattatattatatcaatttaataattaaaattattaaataaacaaaaattatttacaatttttttaaaaaaattgaaagcaaaacaaaataaaataaaaataaataaataaattctaaaagaaaaaactttaaagataaaaaaaactacgtataagattaaaaaaacatatacataggacttaaaagttataagtgagaagttatgaagttatggttcaaaatgggcaaccaataactttacattatctcaatccctacccctctctgtctctctctctctctctgctttgttcgcaggtattttctcttgttcattttcagggctttgtttggccaagggtatttcatcggatcta

SEQ ID NO: 3514 - DNA, 2082 bp, Glycine max
  Intron number 3 from transcript Glyma08g03260.1 (locus Gly ma08g03260) derived from phytozome v7.0 (chr-ID Gm08; pos 2304371 to 2306452)
tgtccaagccaaaaacagtgagttctatttctatactttcttaatttattgtattcaagcattttacactatatcagatctgattttctatactttaatttattgtattcaaacattttatactatatcagatctgatatctaagtaaataatttacctgatctccagagaccgatttaggagggggcaagcagggacctgagcccctccccagagatggttcatttatttgttaagtatgaaatataattgtgtaactttatatagtgttgcacaatagttcttaaaattgcatattgtcttgcgacacttctaaaatttctggatcccgatcaattgtctagaataacttaaaaataattatatagaatattaatcatcaaacactaaaacaaccataaatttagaacataaattaatatcctgctgtattttttcttacatgaaaatgttaagaattcaaagctcttttgataaaaaaaattcatttctctcgtaatgaacataagttatctttcccacatatataaaatatatattttatatagatattatattattattattatgtatcattgttataggatttgatgactttcaattattaatatataaaattattttgtttttttagattgtgagaccatattaatgtgaattttatttatccttattgtgcataaggaagtctacctcaatagttaatgatatgtgtgtgaatcataaactcacttatactgtttcatttttaagaataaaaaatttgtttgttattatgctcataagatcatattcttctttcaaaaaaattagtagaatttttaataaacaatatttaaatgactgtaaaatgaaaaaaggaaattcaagcctccgttcaatggactgctggattcgtccttgctgatctcataagatggttaaattttattaaatatctttgtaaaaataaacataatgtaaacctttttcctagatgaaaagtttagttggatgtaacaatcagtggttcagaaaaggacatatataatacagttctgacttaggagctaaggaagtcatgtggtcctatttaccgtgtttctcttgttattctttaattaattttcgccaaatttctgtcattaacaaaaaataaagtgttaaggaaatattttgctgacacttttctttggtgaaacggagatgaaacctacagttaaaaaaaaactttaaatatctatttcattttcatcacatctatcatttttttctccttttctctttccacctcaattcacctcgttttggaatggtcattagtaagtggtcactagtttatatacgtttctactttccacatccttttctttgtagtttttctaattgtaatttgttttaaaatataaactattatccaatttgaactaataaaaactttataagattagtttagtttttggagaatactgacggtgtaaggaaaattgtatgtataatttttaaggtacataggcgtttaagacaatattaatgagtaaactctagtgttttttttttcttcttgtacacaatgacgtttgaatttatgtaaaatacttaaattcccaccctagtaagctgaatctatatttgggttagtttagcttgaattattaaaaagctttaccaaacttcaaccaacttaatcaaaattttaattttgcccttttaaaataaactggagcctatgtatgcaagaaaaatcatatatatctataattgtccaaatgaaagagagtggagaatttacaagcaaaaacaaatttgctttgaacccactagggtaggcctagtggtggaaagttggagttagatacatgacatttaggttcaattctcattataaaaaaagaaggaagaagcaaatttgagttaatgatatccgtgttgttatatttttcttccaacaatattcaagtttcgaaagctttatcatttgtgataaataaacacgtacattatttgagagctatggttatacgtacatgaaagtgactaccaaattatcaatgatggtgctgtgcagacgactacctaagccaagagtgcagccaaacattc

SEQ ID NO: 3515 - DNA, 5252 bp, Glycine max
  Intron number 1 from transcript Glyma09g15550.1 (locus Gly ma09g15550) derived from phytozome v7.0 (chr-ID Gm09; pos 18234177 to 18239428)
aaggttaagaatcaaactgatcaaggagtattcaggtatgctaattccttcatattaattgaaagtcctttcattctttttgcttggacctgcatttcacatttctggtcattaatggatctatttgcatacaattgaagacttcatttcatttcgtctttcttgcatatacatgttaattgattcccatggtggaagatttacacacctcttatatattcttgcgtgctcaaattgatatatgtaattaagcgttttatgaataattagatgcctagactcacattccttaatttgttcttcatttttcttctttttagtctatattatttaacttcccataccaaatatatgcctgacgcgctcagaaaataaaaaagataagtggaaattaatggtaaggagtaaagtattgcataggataaagatgcatgcttttgctctttccacgccatttaattaattccgtattttaattaatcatgccattaggaaaattatatatattaaataaaaaacatgtcgttgttttactttgttacgtaaaaaagtttaaaactatttcgacttttgtaactcaacatcagccgacacttaatggctaaattattagtcacacccctaaagttagcttcatgcaacttgcatgccacgtagcttccatgacatctaactctgtagtcacttattcgtaagttataaacacactttttattataatttttatgaaaaccaattatactagtattaatataaagtttttcttttacaatattattcaattataaattattatacataatatatttattaatttttaataataaattttataaattctaatttttaattaagtgcaaaacttttacgatttatattcattaaatttatattttattttttacatattaacatattcataatcatttaaaaaggaccgtaaaagtaaaaattattataccctaacaatttaccacaagcactgaagcacatattatcagaactaacaaataatagagtatttaaaattattaaactatcagtaaaactaagctcatattttaaattcaatattatttaagaaataattactacttttttttaaaaggttttataaaaatgctgacaaaaataaattattattttcttaaaataaattaaattaaacacacaataaaaatatttaagaaaaaattatcaacaaagttaagtttaataaaagaaataatagcaccatatttaaagtttaactatattattttgtcaccccatattgatataaatattcactggctttaatgatctaattacttatagtttgatctccatttcaaattaattcttttattcaaaaaaatgaatttaaaactgtacttaagaaatctagactcaattcaactataaagtttgtttaactattttaaacaagattatatatcttgtaaatgatgtaatgttttcatttaataaggaattgacaccttatgctttaaactagtttttaataataaaaaaaaattgtttgcctttcaaaacaaatgtggaaattggtttctatacatggaaattaaatttggatgccacagctaagtgtgacatggttcacgattgtatttgatgtacaaagtacaatatccacgcacttattggccttgtatggattagattgggggacctaccaataagtaaatgacaacaaaatcttgttccacttctttgggcaatgtacgtcttcctctctctagaacacaatatctttaactatgattttttttcctctctaattttttggatagaaaatttttttgatacactttttttctctaatttaataatagtttaaaatatgatgcttatttttcattagtttattgatttaatttattttttattaatattttaaaattaattatacatcattgataaattttattttcgtaaactttgatttcaattatgcatttcattttttttatagtttaaagtatttaattttatttcaataattgatttctttggttttaattaatttttgataaaatatccttgtaagaaactatagaaggtgtggtatatctactaattatttaatttaatagttttaagtaaatttgctaaattaaacccgaaatttacaagaattatatatttcatttaattttttttatgttattaaatatatacttgatgtaatcttttataatagtctaacaattttaaatggataattcaacaagtttcaatattttattttaaagtggtaaaactattcatgacaaacacgaaaatttagttaattaaaaaagtacatcattttctttgctactttatgttttgctgcgaataatttttttactatcttatccatagctaaagaactgattttaattgcctatagtggagaaatagtgatcaacaatatgctgaattaatagtatacttttagtttgtcatgtactcatgcgtgcattttggtgcgggcacatacaactatattcaagggtaattagttatataggttcattatcctaataactcaatcttatcttttactctttttttgggtggaataattcctcattctttatcaattctgcttacttattgctagcttataagcaaataaatactatgatgaattttattttattttttggtacatattaggattaatttccatgtacacattagtgctagccttatgtagcaacaaaaaaacaatagatagccagattcattaatgccaatagaatttttaatacttggatctggattttcacccgactgtttgacacaatgaattaacgtgaaataaaaaaaaaaacccatgtccctttgttgggggttttacaacataggaacccattttattgagtttctaaaggaccctaattaaaatgttagatttgttgcttgaataactggagggggaggggaactagtaagggatcactctagattaattatattatgtggtgtataaataaatcctcaatttatcttggaaggacttctgtttctttttttcttacagaagaaaaaattggttatctggagtaatgttaattacgataaggctcccaatgtacataacaagaaaaatagctcgatttcaaatatatacgtacatgaagagatagagataaattatcattttgaatatatcatacttttttatgctacataatacaattaaaactatctgtcatttttattgaagatgtgacgcggttccatttctttctctttttaattgatgcatatattttatgagttcacataataatttaaaaatacaactttacatgtagattctagttcaccccaaattccaatcaccaaagtgtgtaagctttcttttttattttaattgaaatatgcattagagaagattcagattccttgcctatatgtatacttttcttgcttcatataaaaatttcaacatgttcaattgtcattcatgttgttaaataaaacagaactatcaaaataggatgcaataataattgttctatgtatgtggacttttcaataattactggatttttatatgaatgtggacccgcatgtagggagaaaattggctttcatgatttattcacatcctacttaattaatttgtattgggaatatggttaaaaaaacatgcatttggattattgtttttaaatttaattttagaagtttttagtttgataaaattagttttaattagaagtgagttaattgaaattaaataatttatgatttaaaaataattttgtaataaaatttaatgtaaaattccccatccatagcaagaattacttctttcgtttccaatctaacataagtttggttcaacaatcaaatatgattctttttttatgataaaataatgttaattagaagaagacttcgaacttgagttttaacaacgtaagaaccataatgcgtatccactatgcaaatacacattagttatgcagcaagattcctacggaggctttttttgtctatatttctattttcttcaacttgtttagttctcttttttaaataataaaaaaaaaactgagagaatcctgcaattcgttaagcatttgtttacgtcactcgatgcttcacctttcgtgtccattcttgacgtgaacaaaaaattaaataaatcattactttatcatcaagatcaggttcatgactcaagttaattatgtggtcatcaattctcgtaccatcaatattttaagctttgatcactgatattatgctctctataatccggtttatgacaccctttatctatatcagggagatggtacagtttctttttctttcttctttttttttttcttgaatatatgtaacttccatgtttgttaacattttcagtgatcaactctcttcacaaatatctgaactctattaatttaatcaatatttgggattacgcagtaaattaattcattggtagagtagagttgcaaatttagcgcatataatcttgcttgtttagcaaaaaaaatattgtataaagagggacataataagctaagtgtaaaaattaaaatagaaagcatttatctttccttgatttgcatgaggtccatactctatagagtagtaccccccagcaatgtaagttctctattctaaagatccttttatagtttgcatgctggatttcaagaatcatgatatttcaagaatcatgatataaaataaaataaaaacaatacacattcttgtttagtataaagttcaattgatataacttttctgttatgtagctatcgggggtttaattaactagggacggttgttgcactatcatttgtcacattcttccaagttctgcctacgcatcttttaacctttttgcatctgatggttaattaagttaaaattaggcagggttactttatgagaaaatgacgttaaaacacatctgaggaaggctcaaattagaatcgtgacgaaacccataattatgccactattgtccattactttttcaacactacatgatttctgcaacactttaattaacatttggcttttgcatatctacaatcactataaataggtttcactgatcttatagtgatctttcaatgctagaaaagtagcacattattatatccgcatggtgatcaatatcaaacaagcttatttttttattttgatggtacaaaacattgaatgttgttatcaaactcaaaaattggtactcttcatgattgagttgtcattttactatttaggatatc

SEQ ID NO: 3516 - DNA, 3504 bp, Glycine max
  Intron number 1 from transcript Glyma20g02850.1 (locus Gly ma20g02850) derived from phytozome v7.0 (chr-ID Gm20; pos 2500725 to 2504228)
cttcaggttcattattaattaattattcctcttatttgtgcatttcttgttactaattattggagatagtcagaatagatataatattcaaaattttcactgttttaacctgtttatataagattatttttagaccacaagatttgaacacaatttgcataataaaaataaataaatttagtctttctttatataaaacattttcatattcagaaacaagaatatggatacgatggtaaagaagactaattttcctgagatttatgctaggttgggccagggggaaatactaatattacacaccttggagacattaaattaaataccacatatgattgatgtgatcatatgtaatacatgtgaggaaatataaataaataaatatatatatatatatatatatatatatattatttttttcctccaaagagcactaactccattaggtacttataacttgtaaggctgttaattactgcacattgagaagtcactttcttaacgaacttattatgggtatgttctttataaagataagaaagaagagatcaacatccttgcagactagtgcgacgctttccttgaccataaagtgaatctttcacacattaaggtttaaacatgcttcattttcaatttctttttttttttctaaaagaaggaaaaaactgcaaatcgcaacttcaaattatattgctttttttttgttactttaaacgaatctaaatctatatggtagtcaatttgtatatgatatgtttctttatcttcaaccagtttcatggggtcttatatagaactgcagcgcatatacatataaattttatatgaatatctgcacgtagaaaacactttataagcttcaccaagtaggacgttccatctcaaattttgtggccactttgaagaaaatgataaaattatttggatttaaacgcccgttcaagaaaatgataaaattttttgtaagtgattaacatttttggaggtaatcaaaggggatgttaaaaatgtaatataaaaaaagattagtttaacagacatgaaatatcaatgcgtaaaagtttttatattgttttttgaaataaatttttttatattgttaatcaataaaaaattacaagttccatttaattactcaagtttttaaaatagtttattcatcatactataatatatcaaaataatttgactgatcatatttaatagtagaattttctctcctaattataattattttttgtcaatccataaaatttgaattcaacactttacttaagaaaattaattaaattaattttaatttcactaggaccaatcacatataaaaaaatagacaaacttacccttcatgagaatatgtactagaattaatggtagtataaagttaatataatctaattaaaaaagtattgaagtactatactataatatagaattattcgtatatgttcgtatatgaatttaagcttttgagacaagtgattgtgaaaaaaccgcatcatcccgcttgatattttccaagtagcccttgaaaaattagaaaaggtggagaagattaggcattcggcgccttcaaacctcacatgttcacgtcctaatctctttgtctgcttttccatttccttcatatttcaatattaggtcagtctcatcttttggtctgccatgtgttccgtaaaaaataaaaaagaataagacaaatgagaaaaaaaataattatttgaaaaaagttgatgcgtggcattatttttattttattttttgagtaattaaattgtatgatctctttctacatcgtatcttgggcgacccaatgggagcttctaaacgtggttttggcacgaaaaagtcagaatcgagcacaaagcgcaacttaacaagcaacgtacgtgattaattgtgtgaaaccacatttaagaatccaaattcaaactcatcatcttcaccttcctttgtcataaaaataagaaatgattgaagtaacatcctgcttctgtaccacgtgaagctgtttttgacagtcaattttctttcaagtatatatatagaataaaactacttatttcgttgtcaaacatgcaatattttaagttaacgtactctttaatatagtatttttttttagtgataaaaataatttattaacttatttaaaataatggccaaaaaattaaaaaatatattctttattatataatataccatctctttttcgtagtcttatatataaaggggattcttttaccggcttataaaaattaaagaaatagttaagttagttagtaacattagctttatcaaaatttatatatttctttaaattacttttaaaatattataaacctttttctgttaatttttatgcctcttcacttaagtaaccactttattgtattttataaataaatgaaagagacaaatttgagcagtgatttttccttgtcctaataaaaaagagaaataatcaaagaaatgaatttaatgtatttattgtttatttttagaaaataaatattaagtaactaagtacactttttgttaaaaattttaatacagtagataatttgaagagtatgtatcttaaaaacaatttattataatcattaaaaaaataaataataaaaataaaaaataactctaaaacaattacttttttttcaatgtaagttcatttctcctctttatatgtaaaagagagagaacggaaggggaagaagaaaacatacatggtgtaatataatatgaagaaaaaaagaaagagttctgttcaaatagagaaatgggaggaaaaagtaagagtgttgttgaagcatacaaatgatacaagtactgttattataaaagtaactaagaaagtgacatcaaggttatcagaatatttaatttttatctttaatttttttaaggaaacatttttttcattaatccttaactcataattgtttctacacctttattaaattatatgataaatttattaatttttaaaataatatcttaaaagccgtattgattatgatttttgattagtaagcaatataatatactgcgtagaaatcaaatccatgttatatttatatgtaaaataagagagtataattcaattagttgaatatgtgtctaaattgttgatttgtacatgtctttgattcctatgtatgactcttaagaaaattaccggcatattatcaagctagctgtaaagttgtgccttggtgacttgttggtcatgggttcgaatccggaaacagcctctttgcatatgcaagggtaaggctgcgtacaacatccctcccccataccttcgcatagcgaagagccttcgggcaatggggtacgaagttttttatattatcaagctagcttaattgattaagcagatttgtgagtcgttgtaaatattttgacacctattttggattccaacagataaaaaaaaaacagcatattttactaattacatgtcctatttacaggacttaccagagcatcagcgaggag

SEQ ID NO: 3517 - DNA, 4173 bp, Glycine max
  Intron number 2 from transcript Glyma15g11850.1 (locus Gly ma15g11850) derived from phytozome v7.0 (chr-ID Gm15; pos 8727978 to 8732150 reverse strand)
gttcaaaaatcttacaatttcttccaccgactttggtgatgaccctcttcctctctctatcttctcaaaatattctgcatatttaaaaatataaaggtttaactaacaattttttgggtgttatattcgtgctattcttcttgtgaggattaaagttccattaaaggaatattatgccggatcaccaaaatgaaacttccaatctaattggaaaacaataactaagaaactgtcaaagctttattattttttttaccaacgttaaatgcttggtatttgatgtttgagtaattgactagccatgcatgcctatatttcaaggaagtgtgattttgttaggattgaaaggtgctgaaagttgatgaagcaccactttttcttttcaactttaaaaatctatatgaatcattgggctatacgctctcttttgaacgatatattttattattctggtagctagtctttgaatgtgagcgtttcaaatactagcaatgggtgaccttgttcaaagcgtggctttgtctgtcaaagtgtagatggtggtatggtacatacctgcttcctcttctcggtgttagtgcattgaatgaactgttttggtatctttctaattcgtcatttcgtgtatgcatgatattgacatatatccagctgttttttttttgggggggaaatataagactttagtcacattcttgtctatctatttcgccaatatttgaactttaccgggattctaaggtttggctggttttgcttcctttatattgttaaagattattatacttgaaatgaacagaaagatggatggaagtgtcgaaggcagcttgctggtaaatttaggtctggtaaataacctaggaattagggtttcttctgcagtggtgcccaggagtggtaattgcggggttgggagttggctagatactctcattggaaatgtaataatatgcagacgaaaaagtgggcagaaaagagctgaagttctttggggataagtgctgaatttttaaattttccagagtgaatttctaaaactagcaaaaaacatactacaataattcttgcaattatatatatatatatatatatatatatatatatatatatatatatatatatatatacacacacacacactagcggaagccttttattccttttaattatacccgtgcctctacctaagttttaaatactattatatagacatctataacagtggatgaggttgaaaattttaatatccattttgttttcttagggcaatggttaattttaggcttttcgtgaaaattatgggaatatatatttgtattttttggtagggagggggagatgtatttgcactaggagtattaaggaaattatattttctgacattttcattttttagtcttgattcttaaatcataatggttggcaacaattttaatataaaataaatagttattaattttatttcttaatttttattttatcttggataataagaaaatgaagggtaacaagtttgatctgaatttttctcttcgttgtcattttaatgtatgggtcagtaaatgaatttgctaaatcattgattcaactcaattcaacttggtatcatttgcaatggaaaagataacttgaaagaactctttggcgagatgtttttcactgttgagaatggtgagaaaacatattggataaaatagattgagagtggaactcgtggaaaagattttctaccatcagtagagaaaacggggtagaagagagaaaattaatcgaatgacaaatacccttatcctaattaaattttgggataacagccattttagtcctataactttcagttaacttcaaattagtccttgaatgtagaaaatccccttttttaactcctaaaactatgaaatgcttagctgaatgactttttgatagtttatggacttaaggtggctatttactctatattgactttttttttattagaactaatctaaagttgatgggaagttaaaggattaaagtggctatttactttatgttttggtatgttgttaataggctttaaatgttactcaacatgattacaatttcttacttttctctctattttttccccattcaaactagagaaaaaaaaatatttttctctttattttcctgtcttttacatttgttttctctctgtatcgaaattccaaatgatgcggttattatttattatggtaataggtccttgtagtaagggaaaccttttacgattgatcggtggtaagtggaattttgatcctccctgtcccaaattcctaattaaaagtagaaattgaacacaccaaggagtgtctctgtgcatcttttaattcgtatcaagccattgggctttttcttaaagggtttggttagtcttaaagagtttaagcgctgttaggattgttggtccttagcaacaatgatgaattcaaaattttcagttgtgtcgccctatttgttttcttaaaaaatatttgtgtaatttcaaaagtgtgactatgcatattaattgctttttttcagaaaggttcttgtctctacaagtgcagatgcatttggcacacttgttcttagaattatgaccatactgttgcggtactaatttctttgcacgtcttaaactggaaatggatgcacacactgttatatcaacacaatactgattgttcattgaaatctacaattgaatgacagtcataaatattagtcaaactttactgctgttgatgactatgaatgaaaatgattaaaatcttatttcctgttgctctggacataatcctgaccaagttttagtgaatcactgttttctaccttccacttattgatgcaaattgtttacaagattcaattcgagttgagaaaactaatttaatagtgtcgatcaagatctttatgttcttgttccctttatgtgttggtttttcaattatggaagtctccttgtatatcttttgtgtaatgcgtcgttctgcccaaaaagactgttcagggtggtggatatctcccttggtatattatacccagaaaaaaatctcccttagtatttttttctctctacttatttattatgcatatgtttaatatggaaatcactctattaatgttgtttgctccttgatattttaattgtagtctatatttttataccacaaaatggcaatgcattttctacttgataaataatgatcatgagagttctggaagcctttgattttgtgtgtataagctattcttacacctcgatcttttcttcgttacaacttttgtctccccctggttttaatttctgcataggaataagctctatataggcttgactagggtctatgcatgtatattgataaagtagcgcttcataatttgtttatttattttgttggtaaaaagtacttcataagttacatattagagaagtatacattcacgaggagtatactttttcgtccctaactttgtctggtctgaagaaaaagggagcgtccattatctgagttttgatccatggaataatgttttacattggcgcgcggctctttatcctatgcaccaattcaagtgcaaactttcatgggtgaaatcaattattttctaatgattgcaagttgtacttgtagttattctttccttaaatcattttaaattctcctacaatattcctcttagtaggttatattatattttatttgctaaatattaagattatattatatgatataatattaaattaaccatccatcttggtgctaccaagatttctctttaacaataatttagagactcggatttttatattgatttaagaattgactggattgttatttactgcttggaatttgttttattttggttgaacttaagtatctccagcccaatgcattcaaatcctattgagtagcttaccttttttaatagatgtcattttttaatacatgtttaaagtagtataattatttgtcaatcatatcacaacatgtttatgttgatatatgcttcttttttacttataatgagatattaatgataaaacttactatattgaatcaagcgttttcttttctaagatatgtatactatcctattagtatctaatcttatcataattgagttgattcatatgatgatcagcttgcaacgagggtgctgagagga

SEQ ID NO: 3518 - DNA, 399 bp, Glycine max
  Intron number 1 from transcript Glyma17g10060.1 (locus Gly ma17g10060) derived from phytozome v7.0 (chr-ID Gm17; pos 7534367 to 7534765 reverse strand)
agagacaaagttcgcaatatgtacgtaaattaatattaaaccttcttcaaagctgttcattattgtttccaatttcgaagtctctcacatttcaattttccttcgatttcgatttatccctttctcagcaatttttagctcgtgcatctaaatttcggatttcttagcataatccaaggtgtataaaacataaacatattgtttgttttatatattctgcaacttcaattcttgaattatactgattatgagtcatgtagaagatgcaatgaaggtggtaagaattgccataacctttgaagtaggcttagtagtgttttcttccgtggcatttggcaacatatacttattaatgttgttggtttatggtactcctgttttgtaggttttaccacgcat

SEQ ID NO: 3519 - DNA, 915 bp, Glycine max
  Intron number 4 from transcript Glyma05g07730.1 (locus Gly ma05g07730) derived from phytozome v7.0 (chr-ID Gm05; pos 7706662 to 7707576 reverse strand)
gggtatgctctaaatactgttttattttctgaaagtagagggaagcaaggcttgctctctttttatgccggagtgttcaacctaatacaattttgtgtaggggtgtaagtggtccaggttgggttgagttttgtctattttttcaacccttaattggattgggtttccctttttttattttgtcaacccaatctaatccaatccaattaaaattggattggattggtggttggaccattaaaaacatgttacatctttaagtcttaagaaaaaaattaaaaatcctcaaagtaaaaaataataagaatattttttgacaggataataagaatattttaaaaatcaatatttataaaacattgtactgttcatatgataaacataaaaaaaacataaatatgtactcacactatcattcacaaaacaatgttattattttaaaataaacaaaaaaagataaactcaaataatgtattatcttaagataaacaatatattaccttaagaatgaggtatgcttagtttaggatttctacatgagtaattttaattgtatgagggttgggttgggttttggtcggtccccagctccaaacccattagccaatccaattttaatcaggttcattaaactaaaaccaatcaaatccaataacccaatccaaccctcaaaaatctaattgaattggattggattgggcagattcacagattgcgtccaatccgcttacactcataattttgtgtacacataattgaaatcactttaataatcacagagttattaccttttccctctttgtcaagtcattatcttttgaaattatccttgtcctagtctattataataacttgattatagtagttctatatgttgtgttcttatgaatcagttcatgttgcacaggttcctga

SEQ ID NO: 3520 - DNA, 1066 bp, Glycine max
  Intron number 4 from transcript Glyma13g32710.1 (locus Gly ma13g32710) derived from phytozome v7.0 (chr-ID Gm13; pos 34787436 to 34788501)
aggattgatctggtcatagcatctcctttattgaggtatcaatacctgtgtgcttctttagtgactcaaatgctttatatggattgagaaactgtttgtctctatttcttgcatgagtacttaattctaaaatcttgtacagaataactgctgaagatcaggaaatcattcttttcccactttcacaaatttccaatatcaagtagatttggcatgctttttctttcttttacttgtgattggctttgaccttcttcaagttttctgtgaacttttttgtgtttggaaacactgctagtttgcaatggctgataaaggtatcctatgtttatgtttgttgtctcttctttctgcaacatgatcagcttttaccgattgatgaatgtgatagactatggtagtgtgtctgattactatgaagcaacatcagatgggcaatctttaatttgcacattttgaacattggtgtgacttaatcatgtaaataaaacatgtgcagcaactcagcaagtccatggatctggtatattatctttcaggtaaaaaatattgcttaaaaatataattgctagctaataaaatggaaaatatttttgtcttggaaacaattcaattcaaaagagtgttctctatgtatgagctatgttggtccgatggtaaattaatgttaccaggatttagattatcaaatctgtgaacccagttgtaagttgtaaatcattaaaatgctagcttaaagtctctccctgctcatggttcatgggggcaatgtgggtctctttagtatcaaatcaaaactatatgcacactgaaaattatttggattagtgacgcttcatttattcaagtctatctatttactgcactaacttgttcctgttacgtagtgtcttcatgaatgaggttgcattaattgaaaaaagctgagttgggagggttttgcaagttatccatattctgggtttatgtagtttatattggaatgtgtttcttatgaattgtttgaaataacttacaacgaaaggttttaggactctacaaactgctgttggggtgtttggaggtg

SEQ ID NO: 3521 - DNA, 1461 bp, Glycine max
  Intron number 10 from transcript Glyma19g41130.2 (locus Gl yma19g41130) derived from phytozome v7.0 (chr-ID Gm19; pos 47454751 to 47456211)
aggcaactgtttgtggctaccccaactactatagagtaagcctatgggcattgcctacaattttttgggtccttttttgtaattattttgttttttgttctattattttttcaaagtttgctttagttgtttagaaagtggagatgatgacaaacagtgttttacattgtcaatttgtctatcttctaataggccaaaatatcatctactcatcataaccaaagaaagaagagggaaaattatgatgtaggaaatcttcatgaacataaatacagtttaggaagtaatcaataatggttaaatccatgtccaaatagtggttaataccttagagtgtgttttttttccaattcccactttccaatgcaccttcagcaccaatccatctcttgcagtgaattggctttgaatatgacccaacagggtttcaaacacacccttaacagttaacaaaatattaactagaaatctcaacaatggtaaattacttcctagggaatttgtttgtttggatttcctcaattcgatttatcccaacaaaaacaacaatctagcctgatttcattaactggagtttaacatgattggtttagccgtgtttctataaaaggttcctctgcttttaataagcacttttgatcagacataccccgaggcacatctcaacttctaccctcccgtttggatattatatgttgtgtgacatcagtatcgatccaatttagtagaatagacccctaaatctctgaagctctcagttttgagcacttcttcatgctcagttcttactgtctgatcatcttcactcttttgttgattgaacataaactccatatattctggatttgaaataatcatttggtctaccaaagcatttctccacaattagcatttaccaaaacaatatcattagtaaaaagcatgcaccagttcccttcatctcaactgtgtttaatctaatcagttttccattatgaacgcaaaaaaggtatgggattaaggtctgactggagcaaatctatttgtactggaactcttcactgacacagttgatgcccgaacacttttcatctcatccatatccttcaccctctcctccaagtaatagcaataataataataataagacaaatcaattcatttatttgttttactgactatcttctgtgtttgcattgctttgtggtatgagcgtaggacactttcattcattttcaaatctttactatgatatttaaagtttaagcaattaataatatgctaaacatattaaaggaactaatctcaatggtccaactatcccaagcttataaattgttaggtgaagatttaaaatggtttttgattagtatctgctgcggccataattcgtaatcattttatctttagtcctttactaattactaatatatgttttgattttcagaattgtttttgtcgacgctggggttgctcaaattg

SEQ ID NO: 3522 - DNA, 1642 bp, Glycine max
  Intron number 13 from transcript Glyma08g08740.1 (locus Gl yma08g08740) derived from phytozome v7.0 (chr-ID Gm08; pos 6255041 to 6256682)
ttctactgggttccagtcccgtgccacacattcaggtcgtattttctttccttgtggctgaaatttataggtattatattgttttaagaaaggagacagatcaaacaatgccaactcacatgcaatataggtggaatttattctcaacaaaaaaagaaaatagattttacaataggcatatgtttcagtgaaatgaaataatctcagttgacccagtgttggggaaacaaaacaaaaaggagagacaggtagcaatgttattcatatttttattgtttggcttatatcttagataagtcctaatactgtcttagaatttggaattaaagcctaactcaacctcacaaaattggtttgtaaggcgaggactgcctaagttttataaagactacattggttataactctaggtaatgtaaaatctccatgaaatgcattactatttattattccaatggatgtacctaaaagatattttataattgcagattaatttgtattactctgtgttctgaagattagacttgctagtccgaccggataaccaatgaaccagtttagtttggtccaaataaactacaattccgaacttgagaaaaattggtcaaaggactggaaaaccagcaaaaaaattgttcacagtgggccaatgaaaaatggttaatatgagattgttttgatttttttcttaaaaaatgaaagataaattttaagtatttgtcatttatttttctagatgtaaattttttattgttaatggacattattgtgtattattgaaacttagacctaagtattatgatatatttgacttagacttttgtcagtactgtgaatgttaacaacctataaaatggtgttttatttttaaacgtaagtgttataaagttatgatattatgtttctttagtattaatttatggattatttaattattattactttattaataccgattagactatgattgaaaccttgagctagtgccttgaccacggtttaattcatgacatacagcagataaaatgatctatttgcttttcatcctctaatatttataatattgatacagtacaattcatacactgaatgcttaattaaattgaccatgtcatcaagctaatgccaatgtcgcatataccaatttttatgaattttttgcatcagatgtcattgggattgccatttcttctggaataactctgtaactatatctaatatcaaatcatgggataggattatatatgacagaatataattaaatgtgaagttggaaatcatcatgttgcaacccattcctacagtttcgaatttggcatacattgacctgtactgtgatctaagtcgtagcatacttggatcataaacatacataacttaggcttgaatggttttagagagaacttacttataacactcatatatgttgttattgattaatgtgggtgagagaaagccaaattatttgaaaaggaagattattgaattctttttttaagaaaataagttttagatataggctgttaaggttgaaatttaatttttctttgacatgctaattcattcccctattttttgtcaactgattgccacttttctcttctctagaaagaatttgagggaattgccaaccactttcagaa

SEQ ID NO: 3523 - DNA, 1630 bp, Glycine max
  Intron number 7 from transcript Glyma04g37460.1 (locus Gly ma04g37460) derived from phytozome v7.0 (chr-ID Gm04; pos 43852149 to 43853778)
ctcctggggaagcatctacagagacacctgccaaggtattttgtcatgactatatactgactttattcgggcttgctgttatctgttatgtgctaacctttttcaagttacatgtttttcaattcttagaattttaagaatgtaagtttaggtctaattcaacctcaaaagttagctcaagggttgagggttttatttttagccgatgtgggacttgggttttttccaacacaccccctcacacccagcacttcttgggcttggtgcgtgaacaacagtggtgggtgacccttttttttattaatgttgaatatgggacttgggtttttcctaatacacccccttacgtccagcactttttggactttttggtgtgtgaataacaatggtgggtgaccctttggattaatcttgaatatgctttgataccatcttagaattttaagaatgtgagtttaggtctaactcaatcctaaaagttagcttaaggggtgagggttgtccctcacttatatattttaacttggctttatttttagccaatgtgagacttgggtttttcccaacatcaatgatttaatatctttctaattgtgattgtctgtctagagtttgacttaatagggctataatttgacattttcactgttagttgtctcatcctgtccctataattggcatttgaatatattctgtgattgtggaggctatcatggaatagaaatgtcgtgtatgtcatcctaaagcaataactgtgcatatgttggttgatgatgccattcagcctaaatgttatatccattttgccattgatcaatacttgccttttacctaggttgcacttttttggctgacacttgcaatattttttttttttgtaaaggttaacaatcagaaaatttcattaatgctccattaaatctaattgttgattctattatatttcattttatttttcctagcaaatgcaccaaagtttatttttgatttttttgaagtagtttgagatttaaattatgaacttcctggggttgttaaggcattatgcttgtggttcagtgactttagttcattctatttgttagggaggtggagttttatctagtttcaaactgtaaggtgaagctgttgttacctgttacagttaatagatatttttcaaataggttttctccagttccaggtgctttgtggttgctgttagtgtagactgctagaattgggaatgtagtgactcaagtattaataattgtcattcggttctttttgctgagttgatctcttggcctaaatggcaattttgaatttagataagcaatccttggaccttgattacctgttaagtttctgtattctgtcaactgtgaatgagaagatgcattctcagattttcatctggatattatattctatccttggattgactgcaattagaatcatcaacaacatatttcgttattctattttatctttttattttccatagatgatttgggttgcaaatttgcttgttacttcatgagtgtaacaaatgatatgcctcaaatatgttcttattatttttaatcacgtttatatattttgtcttactctagaagcaaaaacaaacttcccaatctgggaaaaagca

SEQ ID NO: 3524 - DNA, 6153 bp, Glycine max
  Intron number 3 from transcript Glyma03g25770.1 (locus Gly ma03g25770) derived from phytozome v7.0 (chr-ID Gm03; pos 33037655 to 33043807 reverse strand)
ggtcagaaagttgtcaagaatagccttcacccaaggtaatatatatataatccttgaaccttaattaccccttgctttcttaattatatagttttgctcagttttgcaagttctttgaataaatttgaagatcatacatctaagaggatgcaagttgcttatgaagtttcataaaacttaatagtttttatgcagtttcattgttagaataattcatgtggctatatattcttgaataaaaatcgatcgttgcttatataaataattataattcttaatagttacaagacaattgtaaaacttattttaagtttttaataagaattgcaaataccggagaaaatacttgttgagactttaaatttcatgtggcattataggacattaatttcaaaagtgagttaggaacttcactaattaatactcctattttagcatgtaataaaaatatatttattcatctaattaatgaagcgttttcttccttattttagcatttaaaaatatcattgtcaaattcacataaatatatgattgagtgcactggctacatcataggcattagccggagaaattaaggtaagatgtcttttttgggaaaaatacatgtgtcggtggtggaactaccaaatgaatctaaattcacagacaaaccaagtgtagttatcctaggttttgtctcaaattttaattaaggattgaaaacagtcaacagagagagggagagagagggagagagaatcttagctaaaactgaaggaatgattcaagatgttactttcaatggacttgtgagtagagaagattgatggtacagactgaaatataggctttttcttcaggtaattaaaaatattaatttttttgtgaagtaaaaagaaaaaagatatattcgtgagaatatttagtggattattattattagagttttgacaatagtgtacactatagggtcccctctttcgtcctctgttcccaaaccatccaacggtcatgctatattttcatctgaccaacttcttccacccatggtatccatcactaaaaaggcttcacttgcacctaaagtttttcattgtaactactttaaaatttacctaatttttccaatccaatttctctcatggctaaaatttgaaagaaaatcccatgctgttttttgcatcaaatgtacctccgtgttataatgatttctttcacactagctgttttccttctttttgtttttgccttaattatcatattacaatttaccttcatatttgattaatttataaactcacagtcatattactcccctacatactagtctatttcattttatcactcacgcagtgatttatatcattactgttaattaggatgtcgtaattagcaaaaccagatattaagataccagcccgtttagcctacaataattgacaaagaaacccttgttatgatgataagtttatagtcaaaagacatacattattacaaaatttaatcatttttaaaatagagaaaacttttacatggccgtaattaaaagtatctgttaccattttaattatatatatatatatatatatatatagcttgtttgtcttccaattcatgaggtcctaaacacatgttcgtgtagcaacttgctttgcagtgggtccaacatgtatctaaacacattaatgatatgtttagatgagagaaagataatagagaaaagatataacaagaataatgatgcattttttatttagttgaagaaaaatactacttttaaaataaaatacaaaatcttttttcatttttctttaattcaaatttcaaaatttctttctctcctcattttctttcctctaaagttagaaggtaatagtacccatgatcaaagatacaaaagagctgtgaaaaaaatatttcatcctctacttttatgtaaaacaaaaaacagataaatatgataaaattttagataattaattttttgggtgtataacatgggtatattttctcagtcgatagactaaaactaatctgttttgaagggtaaagatggacaaagttttttttttctttcaaaaaatttaaatcttcaagaattgaacatggtgtggtgacaaagatctttaaaaggctacaacaatctctcacacgcatatatatattaaaataatttttttggtaaaaatattttaagacttgtatatcatattaacctttaagatgtacccaaaaaaaatattaatctttgaagaatcaagtgtagaatttactctttaaaataaaactcttttaatttacctcttttgagttgaagcataatggcagaatttagctttagaagaaacaaaatagcaagcagaagtaaagaaaaaattaagaaaaagttgtggaggtgtgtgaatgaattaaatgaagtccgtgtaaagagattcagagtttgatactagatgtttagacgttaattaatagaattgtgcatgcatggatcgatattatgatatgtttgctagagccaagaggggaattattaatgaataagctacatacactatcatcaaatccaagtatatagcagatttgttgatttttatttgaaagcattcggtttgaagatagaaattgaagaagaacatttaatgaaaatactagaaatattgaagaggcacatgcctcttttgatatttgtatttgatgaaaaattgaagagactagaaattgaagaggcatatgcctagctcttcagatattcctcttttgatatttgcatttaatgaaaaatccgcacatatctaccttaaaagtaatgaacattcggtttgaaggtagaaatttgaagggaaaaaaaaaacagaaaatcattaaatacaaatatcaaaagaggcatacgtgcagatttttcatacgcaatacatatataatgttaagatgttaacctgtcaacctatagatgcttgtttgatgattttcacgtataatttaaaaaccaaatttcagtaaactataacctaagatacatacatacatataaatagataatatatatatatatatatacaccaacacgacctatttttcaacgaatttgtgacgataatgaagtaaaaagtggcaattagttagtatattaatttgtagcaccaccttaatataatttccaatcggttcttttgagagcttaaagcatattatctttaaggggaaaaattatctttacggaggagttaggataggaaacatgataaataaaacaaatactagtatttgatgaaaaccaaagttacttagactgaaggtaactaataatttcgagaaagaaaaacgcggtggcaacaaacagatcactaaacccaaaacatatatattatgtgtatgctaatgttgcgtgcatggaagaaagttctatagttttattggacttatactttatgaaccaaagcaaaatggggttaaagtggtatatccgttattacaaacccaagcaagaaagtggtggtaatttgcttcggttgcagaccatcattacaaaattgtacttaaaggtatgtacttagaagtggaattaggaagatgaaaaagttatttttggaatggtcacttcaggaacataggaacttattaagaacattaacgggccaggtgtttgaaaagtttaaaaaatgacagtgggacttgtctgaatcttaacaagtgtattttaacaaccgaaaacttcccgaaaagatgcagtaccaaacttggattaaagaaagaaagaaaaaaaaaacatactgaaattaataagaaaatacaaataataaagtaagataagctagtatgtcgtaaaaaggaatacttgtctgattatgttcataacaaaaataaaagcatactacgtatttaaattttgttttgtctattagttaatttagataacattactacgtgaatatacatatcacatgattttaggaatttgtttagagtgtgttttataacagtattgattacgaagcaaaaattaaataaatttagataaatataaattatttcgtacatcaaaaacataaaaatatttgataggagatataaatacttgtccgagaagatggtgtatgactctgaatgtaaaatctttttatacaaatatttaaataacatttaatcatttactcttatctcaaaaaaattaatcatatactcatatcagttttttttttttttttgaagaaatactgatatcagtttgatcattcaaaaaattatattaattaaaaaaaaagttaatcaaccctatttacttcactctcctttatttaccttactctcttatctcaaaatcaacttttcatttttttttcgacctccctcctatctcaaaactctaaccatccacacaaataataaataaaagaaactctaatcatccgtccacccttttcgctccactcccctatctcaaactccaatctcttttttattttttttcagtcaactcctccatctcacccccccatttcaagtgtgggagtggggtggatttgggtgtagttactccaacactgattaggaaagggttcagtgaagctatatataagtgatgtgatttatatatctaaatatctttaagattttaggtggagatggatgtagtacgtgttcaatttcttgataacctttgttatcattccattaacatttctgagtgctccttgttactcccccaacaagtggtaatagggcctggtatgagggggagcaagagcaaagttaattaataaggttggtcaagtgacttgtctcgttgatgaattagaaatcaaggggaagattgttgaaaaatctagggttagtagcaaaaggactcaatgaaagatatgtaacccatttacctaggattttataaaacattttttagcaagttaaaaaatcataattttttttatgttattcttcatttattgcaagttgaataactaattttataaagcatttcaaattcattaaactaactaatgaattataaatgttttataattaaaattagttattcaaattgctaataaatgaggaataacataaaacaaattatgatttgttataaaaatcattttttatttgtaaacaaaattataaatttatctaattttgttttattcgtttattttaatagttttgaattcttatattttttttaaaaaagaatattttaataaaataattagtgtgaatagtataatattggaagagagaataaatgagaaactttattcaaatattgaggttaaaaatggaaaaataataataaattataagatcatatcctactttaaatacaagtagtactatttaaaaaaaaaactataaattcataagacaaatttgtttattaaattgtcagtcattttaatcaaataaacttataaattatttgaataaattataaactagttaaaatgattagctaactagctagctaaataaattatacattacatgcaacgttcagtcattaatatatcacattgttttttattatagcgtatatgtgtctctgggcaaagaatatttaacaatgatttattttttattgttaaacattaaggagaaagcatacagaataatagacgtgaaatatattgtagatacttaacgtacaggttgtggattgtttttgtttgttttttattttcacaattgtagcataattcaataaataatactatggtataattattaaaaagatttaactcaattggttgaataagatatatatacgaattatataaatcttcttatatcgtgtttaatttctactaaaaaaaatgcaagtataatcaaagaatgaaaggcatgctatatattcttttgtattggtttttagttgttattaaaacatatgtttagatactttaacaactatactgtgagattatatgtgacataacatgtctatatgtaaatcatgttattaataagtaataataggaatcattttcaaaagttttaaaaatcataaaaaaataaaacaaacaactttttttaggaaattaaaatcaaatttaatcacatttgcatagagtaaattcatattttaccctaattttgaatgtttcatgcttttccaattgacatctcaattgtgtgatatgagcagaagctactaccgctgtacccataacaactgtaggg

SEQ ID NO: 3525 - DNA, 3569 bp, Glycine max
  Intron number 3 from transcript Glyma08g40730.1 (locus Gly ma08g40730) derived from phytozome v7.0 (chr-ID Gm08; pos 40510430 to 40513998)
acatctacctgataagtgcagtcattgaattcctggtacgcaccccatacactactaatttctctctctctctgattaattactttgtgaatataagactaattaatttaggttctcccattaacttttcaatatatatttttattattggtaaatattagtttattaaaatattagttttgttaatagagagaattaaatccacaatttttttcttttattttcttttaatcagccaacttatcttatatctcttgacttttgacactttacaatatgatttaacacaattattgatgatgataccttaattttgaatttgtttattacccttttgctattgttgtgtgattgttgattaggaagagagagagagagaggggggacagatagaagagattgagtttggattagtattgggttccttaaagagcaagcgtctttcaaagccatgattgtgtgtcttggccagcagaatctgagtcaaattgcaagttgcagagtgcaaaaaccacaacttgcaagatgggggctgcatcaaatgatgcagccaaatccctataatagaattgaaaagatgtcaatgattaattttattttaaaaattaattaattaattaaaaaataaaaaataacgaaaaaaaactgtattatctaaccctttgattcgctttctttttgctgcattcgttcgcgcacttgggtcatagaaaaacctcatgaattgcatgagcgaacgcccactaagataccagtctaagtcaagaatcatattttaaggcagcaaatggaaaagaaaaagagggggaaaaaaaggaaagaaaagaaaagcatgtaggtaactttatctctctcctcacattggtacaacgctaaccttgaacttcaaaatgtgtaagagatctacttgctagtggtggctatgaaagacaaacagtaccagaaaaaaaaaaagtggcttgtgacacatacgagtggatgagacaaaataacaataatgttggtgggggagttttgttttgttaattttttatttagtttttggaaaaatgttaaatgaaaagtttttataattttcaatgcaacactaataattaaatttttttatttattgattcctaattaactagtttttttggtactggttagcaattttttttttcttttgtttattatatatttatatatttattattattggtgtcctaaaaaaattaaattcagaagaaaattaatttagtttaagagataaagtgggacccagctatttatattcatcattcatgcaacgtatatttaattttctttgagaatgcctaggacccctatgtttttgtgccactgccacatgttggataaatatagatttcgttcagtcaagtctgaacatggaaagtaacatctgttgtcgttttggctttctaaaaaacacatgcccttctctgcacgccatcatcagctccttctactaataaccgagtacactttttgcttaccaatttcccccattcctaatagttttatttaatactagtatttaataatgtgtagattattccatttttttcacaaacttacctataatttacccaaaataaacacaactaaaatctttagaggaattatattaatctgcgcaattgtgtgcttatttattgaatagtgaaattaaaaattgcttggtcacaaaatggaattgtactcacactatctctatgatcttgagtatattttgtaacattagttgattaatgaatattgtttcgttcacgtcactttaaatttatactttcttacatttcatatcacgtcactttaaatttatactttcttacatttcatatcacgtcactaaaatagagagaaagcaaagcggttgttttctagtgaatatataaaatgaattgtaataaaatttgatgttgaaaagtcagttactttattttgaatagatattattcgattctgttatttattgctagattatagtcagtatgccacatgtcaaggcttatctaacatctaacatggaatacgaagtcaaatcctttgtaatttcaaaagaaattgtaagatgggatgtgtagttattataaggtctaactttaattaagtatattaattaattcatttaatacttttaatatttatgttatttaaattttttattaatatttaagacttgtggatgtggggtcagacattaggtaaatgaaattaacagtaatcacaataagtgtacgaattaactgatgtggatttatttcatttcaatcaaagttctgaagtttgaattttaagtatctagttatattaaatacttgtaagaaaaattgtacagcatataataattttatatttaaaataattgtttcccatgatagttgtagttcaaactaaaaaagatatttgtaatcaaacaacttaaacccggcctaggctataagtaacccctaaaaaagtttcatgaaaccaaaggaagtgcatggatgtcattttgatagtcacattctcgaaataacaccattctaggataatatggaagatatacaccttactattttaaaacgccaaaatctcaaattgacgtatcatcaggatctgtagtaggatctgtagttgatagagtaatacaacaggtcattgtctatggtatacagtccagggactgaagtggggatgtgcacatggcctaggcccacttacgtggctctttttcatcaatagatggtgacatttccttatttggtcacattttagaaatggtacacgttgtactctttatgtgtatgatatatatttcactagctgactttcataatttcatgttcatatgtgcattgagaacaataataatatgtatccatgcaataaattcatagaatatgaatagaaataggtttacggaataaggcttgtcttctcgaaggtagtgagttttttattgagagaagaatgcagtgaattatgatttgatattttattgagaggagtgtttatatttaatatatttttaattgtttttcaaatagaattgtctctttaaagagaatatttttttgtcttgttcaaaaatcacaatatctttcaatttaataaatcaaaagttaattttactaattatatgtagttagttcaattttttttacatataataaaaattaaacatgaatttttttactgaataaatctttcatacatatgtgagcatatacatacttaggaataaaaaatttatataataatattttttgctataatataattttaaatgtacaaaatttatctgaaaatacaattttgtctataggtgcattgcgcgccatttaattcattcaaacccagatgatatttatttgttaaagttttttattctaccacagattgggccccagggcttagcaattacagtagcatattagaaactaaaataaacaaactgaaaagaatgtacaacattcttattctacatatcactttgcacaattactgttcatgactaagggaataaaaacttctgtgtgcactatgcagggattgattgttctcactgcacaagctcgtgtgcc

SEQ ID NO: 3526 - DNA, 881 bp, Glycine max
  Intron number 2 from transcript Glyma15g09440.2 (locus Gly ma15g09440) derived from phytozome v7.0 (chr-ID Gm15; pos 6749853 to 6750733)
atatttggcccgtgctatagatctatatctggagtgtaagttctaatccaattattaatgctgtgaaattaatttttattgttgcttattataattattaaaggttaatgaactaatgagtcccatgagtgatagactttctcagaatataaattccaatatcaatcaagatggttttgaaagcagtttgactcttgtggatttacaatgaaactttcttaacaataaatttttagctgcataagctaaataaaatttaaatacaaactcaacccaaacagaaatgtaaaagaataataaataagataaataaaagaaaaggttttttgaaagtttgatgaatactgtttttgacggcagtctgcttccttatagatatttatttaagtcattcaaatctgtcttttttgaaaaattattttacccaaatcggcacaggctcatggtggcaattttgtaatattcagatggaaaatgctgatttgcacggaaaggattttgtgaaagttgtaagaatttatatgatttgtttgatacatgtaatgattgtaggtagttacttccactcctttggtttctttaccaccccatgcattgtcatgcgttcaacaaattttcttgatctaaatggcattaatctactcagattatatgtagctgcaagaagagatagcttgacaccacaataaaactaactatgtaattaccaaaattaaaggaaattgaggtagtaaactgggacattgaccccagacacgacgatttctggataagtatgacaactgatattgtagttttatggcataatatataatctataatttacccatctgttgtattaaccagacaaaccacctatcgaagacctacagtatttcttg

SEQ ID NO: 3527 - DNA, 6278 bp, Glycine max
  Intron number 1 from transcript Glyma13g09020.1 (locus Gly ma13g09020) derived from phytozome v7.0 (chr-ID Gm13; pos 10010222 to 10016499)
attggagggtacatcctttgtggtacaagtacagggtacatctacttgggttgttgactgagaacaagagagggtacatctcttgtggatcagttctagtggagggtacatccactaggttgttcaaagagaacaagggagggtacattccttgtggatcttttcttataaaaggatttttacaaggttgaaaagaaatctcaaggaccgcaggtcgcttggggactggatgtaggcacgggttgttgtcgaaccagtataaaactcttgtgtttgtcttcttcttccctacactctttatttttcgctgtgcactttaattattgtttttacttttggtaatattaagaaggatagatttttaattagtaaaggttcgttaataattaattcaaccttcctttttaattattccgaggccacttgatccaacatttggctttttgatattgccaaagggagagagaacttaagggtagagtttatcatgaacttgggcataaatttaggggagtaagggttgtgagaacacattatcaattgcatattgtttatcttgatttcagattattgtcatcatcaaaagggggagagatagataaaagataagagagtaagggaaattatctattctttatgagacaactttttatatatgaaatctatgaaatcttcaactgtctcatataagcaatcattgcaaaaccaagggggagtaaactatatacaaataaatattttttgttgctcctaacctacaggtggttgtcatcataaaaaaaaaggagaatataaatcatgcaggttttaatgatgtcaaaaagaatttgcttgatatcatcaaaaagggggagaatatgaatcatgcatgttttgatgatgtcgaaaagaaatcacttgataatgattgtcatcatcaaaaagggggagaatgtgaatgtatgtatacatgattatgatgatgccaaagaagaaccaaacaaggctgcttcaaaggataagcattgcttcaagattaatacaagattgcttcaacaaacaaagtcttgcttcaagatttctttaagatcaagcctttgcctcaaaacaaagtgtttccaagacatgcaaggctctggtaatcgattaccaggcaatgtaattgattactagaagaaaagtttgaaaaatagttgttaaaaagggttttgaatttgaattttgaacctgtaatcgattaccagatgtttgcaatcgattaccagcaacgaaactcttgaaattcaaattcaaaagtcatgacccttcaaaatataactgtgtaatcgattaccagaaacctataatcgattactagtgaagaatttcagaaaaagtttttcgaaaagacacatctcttcaaaaaattttgaaaaggcatgaagggcctatatatatctgtgtgtctaacttcaaaaagcaagagagattttccaagagaacttcattgccaaatgctctctcaacaactcttaggcaaacacttgaaaatctattaagagttcatggaacttcaattgtaatatccttctcttaaagagagaattcttcttcttaaccaaagaggttgattaagggaccgagggtctcttaagttgtaaggattcctgaacacaagggatgagttgtccctgtgtggttcagactttgtagaaggattttacaaagagaatggaaaatctcaagtgggttgcttgaggactggacgtaggcacggggagtggccgaaccagtataaatcgagtttgcatttctctcttcccttatctcatttattattgcaatcaattttgtcttgcatgtttaaagaacattattgaattgattgttgctgcttcttctgcattttgatcctatcatttagaagggggttaaaagtttgttagtgaaaattaatttaccccttcttaagataactgaggtcatttgtctaacaggtttgttattgatgattgaaattgtcaatgatgttgttgttgtattgatttgaatttttgggaaaagtcttaattatagaggagaatctgcccaaaattttatatttgttcttttgtttacttctttattaaattttaaatgggcataagagtttgttttgaatactatagttttcctctttaatttagaatttttcttaaaaatatgagtctcgtggtattatagattgttgttgtatgaggtttatgttgcttgaagacctagggaatgtgaatctgagcatgaatatatatgtatgtatgtggaatgtgattgcttgtgatgttgatgatgtatgttgtgtatgtacatgggaggtgtggagaccatgttcgatatccctagagggggaaatagtgttttaaagagttttaagcatacctggagagagaaggggatggcttagaatctttaattatccatggtcaatgcattgacgatgcttatgtttcatacttcatattgcatagaaatagtacaaactttgtcagtaagtactcgtagtttttcatgaggaaaaatacttgtacttgggggcatgtcactcggtttggaacttccttgagactcaggttgatcaccatggggggggggggagtttcctatgcatgacagggtgacatcgacacttgctgcctagttttcctaagtgagagtgtcatgtggacatgcttaggctatttccaaataaatggtaccacattgtattttagagttaagttaggtacatgcatcattctgagcatatatgatttgaattatggaaaagttgatgactagtttgttaagtgtacgttgaatcgatgggttattaagaacgattgtgttcattgttattgttttcttgttaatcattgtcttttggagtttgctgatcttttataataaactcacctttgcaatttttataccgtgtgattggtgcctatgatgatcttgaacttttattcgtgggagcagatgagcagcagtaggtgacttagagggaagtcttttgttggagccgcaaagctgacatgataacattggaatttattttggaggagatttgttttttgttatgaactcttccttagttggttccttgaatctttttgattgggcatgtaagtcccaagtttagatatatgtaaaaaaaatatgaattatgttctgacatttgatagatgtgtagtggtgtataatatatatatatatatatatatatataagtacgtatttgttcacgtgtgtttgtgagttgcttgatgaatgtacatcacaaaaaatttaccatcgttttcactatcaaattaatggagctttcacttaaaaattgaaatgtcacattttatagtaagtaatatcgtattgacaaggcgggtcgttacaccaatggtctagtatcattgaaatactacatgatataataaaacataagttaataatacataatatcgattataacaaaatgaaatacatttgaattaagcaattaccgtttctcaattattcttgaaactttctaagattgtagttgacatccagtgcatgacgtaatacccacactcaatgcttcctttttgtctattacactaaatatattatgaaatttagatattcaatgttaagtacaaattagtctacacagtattaaaatataactagaagcattgtttaaatgacttcctttaacaacaatccacctagcagtagccttggatttattttgtggagtatcatcatatcctttcaaagcgttattcaatacaaacatatacagatgtgtattatacaattaaaatattgatatgttcccgactaatgctaatgtaaatgtattagaaaatataactgacttgttaataattcatttcaagtagttgtctggcctattatgcaacaaacaaaaccagatgaaaatattttccttcacctccacttcttcaatcaccagcggcttcccagcatcccatgcaatcgcagctatactccattacacaatccaatcagtaataatataacgttcttgttaactagtgtacttacaacactgattaaagaattaaaagaagatttaaatgaaaatcatatgaaagcatattttaaaatcatataggagtatatttctacatattctaataaacaacttttcattgcccttaggaaattgattaacatttaacgtaatactaatacattatcgcaaagaaaaaaaatgcaaaaagaaaaaaagaaaagagaatgataccatcttactaatcagagtgtccttacaacactggttaaagaattagaagaagaaaaaattaattgagaatcataagcatattttttaaaatcatatgggatcgtatttttaagtattccaataaaaaaaacttttcgttgtccttactaggatattggttaacatttaaggtaatattaataatacattatcacacagaagaaaaatgcaaaaagaaaaaaagaaaagaaaatgatgatgttaatgagaatgatgaagtaagagatgggtgacctttgcacttgatggtctggccaacggtactagacatggtgatgtttttacttagaaacgaagatgaatgaaatgaaacgaatgattatgagtgagttttttttttgtgaggaaagcgtgggtttgaggagggtacttgtgggtaagagagggaagaaggaaaatgcggaaaggtgagccagaaaaccacgttggtcgtggtatttattgcacgttactcgccaaccttgaaacgaatggtcgttgctcgctttttctgtgttctgtttataggaccttctacgattctgcctgtggttttaggtctctgcctaccgtgccgcgcttttggattctctgcccctcgccccgtaactttgaccgagataaaatggaaatagagaaattgtatttgtaatccttttttattcttaataataaaaaaataaccactgcttttataatttttcttaaaaaaattaaatatgttttcatatacgtaatatattcattttttttagttaactacttaatttttattttattttaccatgtgatattttcaaaaaaaaattccatttaatatcattgtgttaagtaatgatctaataatacataatagagtatttcatcatgaattaagtgatgtgatgtgctagttaaataaaatgtcacatcatcacttaatagatttaaactaacaataaattctaaatgaaattttaaaaaatgtgagggagtaaagtaaaatataatatatatatatatatatatatatatatatatataatattaggtaataaattaaaaaatatatattacaggtatgaaaatatatttaaataaaaaaataataaaaatattttttttactccatagttaacaaattgatcattttaattagatatctaaattattattttataattgagaccttttaacttgtatttatttttaattagataatttcatttaactgatttgtgtgaggttttcattaaggttgttctaaagtgaaacctaaaaaaacttgtgatgaaatactaaatgctaagtctggacggtctactacctattggacaatcaatcattattcttttattttgaaggttgtaaaggtataaattattgatggactaatgaactattcttaagtgaacataacctactacataaggaacacacttgctattattttttatattcaagctcttatttgtgcacgtccaatcacaagtggaaactgctttactaaagattgtatctagcatccaaattcgctattaattagctagcacccactcttgtgaaaacctgtatttatacactgttatttttatttgcatccaatggacttaaatcacttaaatgtttaagtataagtcacatccaacattgtaatgaaaatcaatgttaactaaaagggaagtgcacaaacttagctttcataattttatttttgtctctctttatttgaattgttaacattttgaatttaaggaagaataaaatagaagaaaatagaagcaattaaaaggaatattcttcacagggcgctttcgtcgtagaagagaagcacgtgtagttgtatgcactaacgttccttccaattagagtgtgacacattacactgcttccaactgtgagacatcgatcatatcgtggagacaacactaatcttgtaacagatccttctctaaagggcaaattgccctaataggggttattttacaaacaaattcccagaatggtgctgttttgaaagtatttccgggatggtgtctttttttacgtgggagga

SEQ ID NO: 3528 - DNA, 1521 bp, Glycine max
  Intron number 1 from transcript Glyma19g05580.1 (locus Gly ma19g05580) derived from phytozome v7.0 (chr-ID Gm19; pos 6109337 to 6110857)
ttagcaaatcgcttccaccatcctctgtaagtgcttcttaacgttaattaattggccaggttccaaacagcttcgagtcatttttctttttctttgaatcatgcgtctttctttgaaactcacctggtagatgggttatatatatatgaaattgttttttttttatttttatttttatatatttatggaaaaatatagttcgaaactaccaagagggctagcggttgaacaggatgcgttgtaaactcaaattttacggataaaaaaaatattattacatgcatgtttactgttaggattaatattcaaatgacatgtaaattgaactttgtaatattttttgtaaattaaaaaataattacaaattatgtgaagattgatcacttcatgatcctaagccatatcaataatttctcgtcatccttttctttttttatatgcttaattttacattcacggtaaaaaatttgcaagaatttgacagttttttgggaaatataaagaggataaaaataggaaaaatatttaatgaagacccactattaacacttaggtgataggaagagagatataaaaaaacaaaaaaatattgttagaatgtttaaaatgagagaatatccatatatcactctactttaaaaataatgtcgtgaaacagaatctctttatttaattgtataattatcaaacgatagtctttttgacttttgatactctttattttgtagtatttgttttgattttttatatatatctttactttcttttaatgccatttataaaatgaaatgtaacgggggaaaagtgtgtgtgacactcatttttcttttctccccacttttccatttgttgaaaagagttgctttacactaatgcatcaataaattcgcattattaatgttatataagaagaggcagagtaaacatggtttgtgtgtgtggtcctcttgcaatcgaatacgtacggtgcggcgtgtgttattgttttctgtgattgaatgtacaagtggctatcatgcataaataagtgtcagcatatcagcattatagtataacaacctgagatgccagttattagttaaggtcatgcttgacttttttttttttttaaagatgattgatttggtatgtgggtcccactcacaaaaaggacaatgggattggcgatttgggatcgttgtttctgcacatgaacggtgatccactctcttgccatgaaaattgaaaacaagtgtttagattgggagaaaaagatcgatgatgccatatatatgtcatgccacagtgctagaaaatgataatgaactagtgtttattatcattttctactctaatcactaatgtttgtagttgttttattgtcaattttctctagcattgtgttagtaggccatgtggttcaagtgtttattagtatttttcttctgcttttctttgtgacttgtattgttgaagttatggaggaatgatttaattttttatgtgataggtgagctttgtcattgtgaaaatcactgcaat

SEQ ID NO: 3529 - DNA, 783 bp, Glycine max
  Intron number 1 from transcript Glyma15g12780.1 (locus Gly ma15g12780) derived from phytozome v7.0 (chr-ID Gm15; pos 9449872 to 9450654)
ctcgtaattgggtcgaccgggtatatcattttatgtatccttattttttttttaatttaaaaaaaatcatttttttcttctaatcgaagtagtcgaggatggggaaaagctgtgtcattaatattgcaaacaaacaaaaacgagagagaaagaggttgtaacatcttttcgtagatttggtttaattggtattagaatgtctgtgtcattgaccatagatcaactgcgtatcagcttaattagtggtctcgagttcaagctcggatatacaaatgcttacgaccacaggggttctattcggctcgagcagaattacctttaacacacctggtaacaaaaaaaaaaaaagtgcgacatgggattaattttgaggttattgtgatgctggaaagttcaaggaaggacaaaatgtgatgttggaaagttttaggaaggaggctaaggagcttaatcatagcggttgttacttcggtatcagccaaaataacaaccgtaggtttctttgggggcttttgtttccgtaaaattctatctttatatttatggtaatcgtcctagcgtacaaaaaaaaaaagaagaaaaaatctcagattcagtaaaatttaagttacggcaatgattaaagaaattttgtttgtcgtggaatatttaagttataccattacttgttgtgtctgttactgtatatttgatgccatgcacatatgttgccatttcattgaaatatatgcatatgtattttgttctgttacttactttgtcatgtactttaatttattgcag

SEQ ID NO: 3530 - DNA, 1793 bp, Glycine max
  Intron number 5 from transcript Glyma20g21510.2 (locus Gly ma20g21510) derived from phytozome v7.0 (chr-ID Gm20; pos 30852097 to 30853889)
ggttagttttatttttgttcactcatcccacttttgggtgttgatactatcatactcttctcatttttgaaatggtctgtcaaatttttcttgggagttcatttgtagtttttttttttgtcacattctaaaagctttaaattttgaatatgtcgacacaagtttagcacgagtttgatgagttatttgtacaatcataactgtgattgaacctacattgttctgttgagtgtatgaccctgagctaaaattaagatgaactcaagcttcaactagttgagtattctgttgatgtggaaatacatgaaaacgaagtatatggtatggtgatgagaaatggttagggagataataatataaacccaacagggacagatggccgagtgttcgtgttttctttaattattattttttaaataaagctttaatttagttctacaaaggttctttataaattttgataactaatttagtttttcaaagctttactatgtctctaaattagtttctccaaaaagaacaagaggactaaataataagaataaaatatctttgtagtccttgtatttatagttaaaaattgtactagtttccatactttgataaatttggtctttgaattttagaaaaaaaaaatggtttttgtccctcattataggttttcaccatgaagagggatgaaaatcactttttgtaaagtttaggaatcagattaattatttaagagattaatttaggaaatgataacatgtaattttaaaaatattaaaatatatttgttgcccctataaaattaccataatttgaaattagtctctgcaagaaatggtctcttcttcattcctgtaaaactataatatgctttgtttttactcgacgataggtgcagttataatctaatctaacctaagtgtaagatgcttgcgtcttaaggagtggacacctgacctgtgcctctccatatgatcccaaacctcctttttccctgtatctcgatcattcactaaccctctcacaaaactcgaccatctcaacttatgcaacttgttctctccctcagactcatcaaccttcttcgatctcttccctagagagagatctagaatttccttttctccttcttctatgtgcactgcgtgtctgagaagcctcttagtcggagcaacttgatgaagggttgtcgttgctgtcatggaattttcggctgccatgtccacaccctgcatggtgacagcgtgctgggcctagacaacttcaatagctactatgacccctgcctgaaatatgcccgctagacaatgctctttgacttccatcacccttgccatttcccttcccaaggtttgtttctttccctccatccatttgtctttcgcatggatctgtttcttcccttttagttttcaattttcacctttcaattttggttttttcttcaatttgaatgggggtgttcttcgtttttggtttttgttgttgggtagctggatttcaattcagtcgttgttggatttcaatttatttcactgggtgtgagaaatttgattttttttcttctttttgctagctttttaagttcatgtggtttggattttttgtttatttgatgtttctttaggttttgttcaatctctgggtcgtctataatggattgatttgggtgttgtttatgagatggatgtgttttcttgctttattttgaagtaaagaacaaatttgattagtttaaatggctacatcatgagtcattgtgtccaggtgatctggagcttttggaggagcttcagtggtta

SEQ ID NO: 3531 - DNA, 1324 bp, Glycine max
  Intron number 9 from transcript Glyma17g15510.1 (locus Gly ma17g15510) derived from phytozome v7.0 (chr-ID Gm17; pos 12242037 to 12243360)
gaagctcatattcatcttgatcttcattctcttaggtatttataatgtatttataatgttaatacaatctctattatgcctttatttcctgggtgttgtgtttttaaattctgaccccccttatgactatcttctcaagaccatgccatgggctttggcattgtgtattagtgaccttgtaaactccatttttgatcccttcatgtaaaagtactaagaatatatacggacaatcaatttacaagcatttttctgacatggaattctttattatgagtaaattactccaactcccttctattttgcacttcttacttgaagacccctctatttctaaaacttatataaaacactttctattttataaatatgccacacctaaacctcaaacctttgtttttgaataaaattgaccaaaaataccgttattgcagactgagtcattacaataagcccatccttatttcttgaacattatgccatcccccttctattttacaaaaccatcacaattaaatccttatatatagttaaaatttagaatatttaaatttaaatactttaatgattacaatttcaacataacattagagtaatataaaagaataaacaataaaataaattatagactcatatctttgaaatactaaatttattttaaaattgttgtagcaaaaaactattttttcatccttaaaagattatttttaataaattagttttattctatccttttgttaatttcttaattcacgtgattaagtttttatagcaataaatttgaaataattcttgttattttgaagatacaaaattatgatttgttttattgtttgttttgttctctgatgttattttaaattttttatcacttaagtatttactaattttaatttttactttatagtagatggatttaattgtaatatacttatcaaatagaggagggggtttgtgtaatgtgtcaaaatataagggtattcatgccaatttaatacaaaaaataaaggttggtacagtggggtattatgtgttgcgtacttacaaaaataggagggatatttggtagattttagaaatacaaggggtcttgtgtaagaattgcaaatagaagggaggttagaatatttttctttattattcacactttttttgtcgtctaatcataggatggggtctagaattcaaggcattttgaaaggaaatgttaactttcatattctattgactataaatgttttttaaattacagtttttaatgtgatcatgtcatgtgctgtgatatacaggagaaagcattctgaattgaaaggagaactttcaa

SEQ ID NO: 3532 - DNA, 9447 bp, Glycine max
  Intron number 5 from transcript Glyma08g38070.1 (locus Gly ma08g38070) derived from phytozome v7.0 (chr-ID Gm08; pos 36922229 to 36931675 reverse strand)
cgaatattcatttttttgtctactaagggttcaacgtgggccatgggacccatatatgttacaattaccataaaggttcaaagagcaaaccaaatggtgtggaatagtaagccccggttgggcaccatagttgaaggtattgagccacaaggcagttggtggggttttgactcactctggttggacctctgtggtggaggttgtttagaatgaaaaacctctagtgttgttaatgtttcttgcagaccacggattgaactcaagggtgttggaagtgaagaagatggggtattcaattcctaaggacgaacgagatggatcattcacgagtgatgcggtcgctaacttaataaggttggttatggttgaggaagaaggaaggatttacagggaaaaggttaaaaaggtgaaggatttatgtctgagtactgttagacaagaaaaatatatcaacaaattacaacacttctaggcatggcaacgggaagaaacggggacgggtaatgcatttcccaccccgccctgcccccgctagaattgattaaaattttaaaaaaaaaagaaaaaatatcgtaactttttggaaaaaatgggaaaaaaaaatggggctaaaaagcaattacgtagcaaaaaaaaaacaataacaaagctaaattcaaaatatgggatcattatcataatttaaaaaattactaaaacaaatcaatcaattcaattaaaatcataaaatttgggtattgcatgaggaattaaggacatgcatatttatttccccccaaaatacagtaccatctaaatatatgttgtcccaacaaaaagtagcatatgattatgtttagcaaaaaaagagatactaatatactatgttggttgtccttcaacatgtttcattctgtttaacatatgattctgttcagccgtcacgccctttaccccacacatatatgtactaataataaaagaaataagaaatcataattaatttaaagttcttaaagcacatttaaataaaatcatttcaaaagggtaaaaggctcacattcatttcattattaccagataaacttgtcagaaacatttttttttgctcaaaacatcatgtaattaaacaaaactcgtgccccattgtcacatcctatcaaagcattgtgtcctgacttttttcagcacaaggttccttaaagcaattcacctagtcatctgctcccacgaacacaaagttcgagatcatcacaagatccaaacacaaacaacacacatggagtgagttatcacattcctaactaatggagagaaacaagacaacatgtgggtataaatatcatataaacaaaataaaatttacttaaacatagctcatgtcatttcaccactttgttgcacaacaccacacgtctcgtccgttttcacaacattcacgtactcaatgatcaaaacacaatatcactaaatcaatcaatattgataaatacacacgtgttatacaacagatacactaagacttaatcctatatgcaatgtggtaccatgtcagtgaaaacctcgttgagcgcctaggagtacatgacaagacaaaccacacactagcaagtcaggtcactctcactaggtaaaatcatagggaaaccagtcagggtcacgctgttttgtgaaaatactccaaccatatgggatcaacataggcttaaaggagcactcaaaccgggtatatttacccctaaggcctacactcagaagagttcgttagggcctctccctcctgattcaggcccaacctagaaaacattttagcacacagactttatctatgaactgtacaaaacacacgacacctcaattgttctaaaaatattttatctcgtcgcacttgtgattaaacttgtcaggtccccacagtggtttccatcacaatactcgtcgtgcattaactgatcgcccttaaagggtcttatagtcatgtgattgtataattcatactacataactcaatgcacacaacatctcaatgcacatatatattacaagtcaatacatactcaatttatcacatacactcagtctcaatcacaatggtgtgatcccaatttaacatgttatcacacctcatgaatcatatacactttacctatgaactatgcaatacacacgacttttcaattgttttcaaaataattttatctcatcacacttgtgattaaactcgtcgggtccgtacagtggatctcatcacaatactcgtcacgcaaaaacttgtcgcccttaaagggtcttacaattgtattattgcacagttcataactcacaactcaatacacacatctcaatacacatgtatttcaccattcatcacaggttcaatttatcacctactcacaagagtataaaaaaatgaaaacaccaagagtaccctattttatcaaccaatttgcatcaggacatcaatattgtatttataatcataaaggaaaaattacaatttaataaacatcccaaaataaacccaatttaatcctccaaggatccgtacacatgtgtattgtgacaacaatagcggcatctctagaggtttcctgaaattcctccagtttttcctctgactgctctgatagggttcccaaacgttagagagatggagaagggattgaagcctccattccactatctatgtgtgatgagtatttctccctcaatagaccttattttgcaaatctcaacagtgaatatgctcataaatgaatcacaatcctcatatcaaaatttcacgacaatccaacggttaacgaatccaggatcgtatttttactgagatggttttgggtttctgtggaaaaagaaaaagctacgatgcaaagggtatttctctcatgtcagacatgtattcataattcccaatggtgagaatgttcaaaaatgcgttttgaacctggtgctcaaatttcatgacgatccaacggtgaatgagtccgagatcgccctttttctgagacaggtttggtggtatgcggaaaaagatagggtttttagaggtggagaagggaaaacgaaattgaaagaaagagcaggcataggaagtatcgtcaaaaattgacctaagatgtctctatttatagctatgatactcacaacctattattaactttatttatttatttttattattttataaaaagaaactctattttcttccctatcaaatgaataaataaaatactctttttattttctttcaaaccattattttaattaataaatttatttctgcttatttatttaattattaaaaacctcatcattttcattcattattttttttaactaaaaaaatttatatacgaaaaatggaatgttaaatcagcaacttaaacatgtttcattctttcaaattacataataaaaaaagaaacaacttaaattgttcaacaaataaatgttaatcattcctccaaattagtgacaccagcacccatcatttcacctgcataaaagaaataaaaattagaacaaaagcttatattatataataacaaaaaatgaaatttagaacattatttaccttcatctgaaaccatttcattcattacagtagcacatttagcaacaactttatagttcatagaacctataaaaatacattacaagtattagttcctgaataaacacaaatatcaatttaacaacatatacgaataaaactttaccagtattttcagcactccacaaccaacttctagtgcacattaaagcccctaaagtagaccattgaagtcgactatgatgtgggcttaatatttgaccaccattgctaaatgtggattctgaagctacgatagataccggaatagctaatatatcattagcaattgcttgaagtgttggatacttaacaccattaaacttccaccacatcaaaatatcaaagtcaacagctcttggtataccctcttcttctaaataatggtctaactctgatttaacataagaacttctagccccttttttcccttataataaatatatcatacacaaataatgcattaccaacaacttcactactagtaacatcaccaacattactaccaaaagagtctttgttcattttcatttggtaataagaaactaagtcataacacaattgttgaatgcacctcacttgagtaaaagaatcatgttcatacaatttttcataataatactcaagcaactccatcttgtacctaggatctaaaatagtggtaactcccatcacattatgaatcacaccccaatatttatcaaatttgatcatcatatttttttgccatttattgaatcattgggttaggagagttaatccattgtttgattgccaacttaatctcacatatatttggaaaatacaatttagcagttggatgtttagtagaagaaaataatttagtgatagtattaaacaacttcaatatcccacaaacatcctttgcaaattgccattgtaaagtacttggcaaacaagtatattgagactctcgctactttaattgacaaaatacatcctcatatcgtatggcaatttcaagaattttataagttgagttccatctagttggatagtctaatgccaaattcttagtgtaagggattctcaactgtttagccatttcctcaaatttttccttcctcttaggtgttgctgtccaatatgccatactatcccaaatattttctacaccttctttcaccacttccaacccatcttttactatcaaattaatgatgtgagcacaacaacgcatgtgaagtaaagacccatccctaagaaaactacctaagtgcaatttatccttaattttattaatcatagcatcatttgtggtacaattatctagggtgatagttgacagttttgtgtcaatattccaatccatcaaacagtcagtcaacacattgcaaagtctatcacttgtatgaggagcaagaacataaatgaacctaacataaaaatagacatataatataaaaacaaccaaaaaaagagatagaatataatcatattcaatcattttataaaataaaaggcctaataatataaaaagttcaaatcattttattacctcaaaatctgactttgtaagttccaacaaccatcaacgtaatgagctgtaatagccatataccccctcttctgactcgttgaagtccacatgtctgatgtaatggccactcttccatcaagactatccaacaacttcaaagttgtagctcgttcattctcatagattttcattatctccttcttaattgtgtttctagtaggaacctaaaaaatatcactattttattttataatataccagctgaaaaagagacacttcatgtctttatctttattaaaaatagttaaagaaaatagtgataacagttattttttttggaaaaatggtagtagttacatataacatatgaaaagttcatgaaagaaataaaaatagttatatatattaaaggataatttaaaaataaaaaatacattcatcaaaggaaataattacatttattaatagttataaatcaataaatgtatctataatatattttttgcgtacttgaaaaatggtttttgttagcgaacctgaaacacaggttggagggcagtagagtatctcctaaaacctaggtgatccataattgatagtggatactcatgcataataatttctttttctagctcttcccttgcacattttgcatcataagttcccatacccaactcttgctttccttccacgaccttaggtgtaagaaatgtttggcccttcatccctctcataaaaatcttgtactaaacacaaatctcattatgctgccacaaatgcttggttccattttttgattttccaccaaaaagtttcttacaatacttgcattcagccttatccaaaccattgactttaatttttttaaaatgctgccaaatcttacttttcagcctacatatttctccttgcgcctccgcattattaacttcatcttcatgaggtgaaggagtatgatcaacattaataggtgaaggagaaggtgcaagatcaacttgaataggtgaaggagtttgatcaattggtgaaggtggaggaggctcattaattggtgatggaatagggtaaattccttcgggtgaaaaactaatatcttccattactttcctggaaagaaaaaaaacactaatatcataaaatgtttttcccaaacaagttgtatgataaatgctgaaagtagaatgataaacaagtagattttttaattatacactagaattaagctccattttttatttttttaaattataatgaaaatcaatcaatgaaaaaatctgaattaagctcctctctttgtaaaatcaacatggcagtaaactatatgcagtaaactaaattaaacatcactatatgcagtaatatttctagctaatgttccagattactgaataatggctcttgtatcttgataatgatgattagttttatctagttttattctaagcaagtatatctttgctaatttctaaaaaaatttatcattgtataaacacttttcttggctatagtacaaatttaacaaataatgaaatttattagtcaatacataattacttctattgtttgtgactacttgcataacattttgtattcttcaaactacttaaaaaagttgtgcaaaggcaaatattatgagtgaatgaatgaatgaaagaacaccatttttgtacttccttttaagctagcaaaatagaaaagaaaaacatgcatcatagaacataaaataagaattatttcttctgaaaagaagttccatataagagccattaactttcagtattttcaagcctacaaggatatggtctaacactaattgcacaggggagatcaatgtgtcttccaaacataaataaataccaaggttacttctattttctgcttaatgtttctcagtatcacttttagtaaaaaaattaacattgcaaaactcaattgctttacaatcacatcaaaatttgcattttttatacaaaatatgtgacaccctctaccccgacatatatatataaataaataaaatatataaaaatatcggtaaataaattcacgtgggtaaaaggttcatattcacttcattattatcaattaaaacttattagaaacatattcggctcaaaataaggccgtcaaaaattacaaaaatattttgtaaaattagtgaggtaaaataaaatagacaaacatcatacaattaatataaaaacttatgccccaatgtcacatcctatcagagcattgtatcccgacgaccttcagcataaggttccttgaagcaattcacctagtcatttgctcccccgaacacaaagttcaagatcatcacaggatccaaactcaaacagcacacagggagtgagttatcacattcctaactaatggagagaaacaagataacatgtaggtataaatatcatataaacaaaataaaacttacttaaacataactcacgtcattttgcatcgaaacatcagttggtccatcaatcatagtcaaatcacgattaaaagcatataaacaaaattaaatttcataaaacaacccaaaattggtcttttaaggatcccgacacatgttcctaatccccaagcatgagtaactcatctcttacctcgatgtagttgttcaaatgttctctgttaggaatggtgacatttttggtgctctctagagctcatccttcgattgctcttttagggttcatgtgtgtcaaagaaaaagagaacaaaaaatgttttgtaaaaattgttcttggttaaaagtttttttatatagcgagggaactgatgatctaatttttaattttatttattttttatttaaataaaaaatcaaaaggcattgctgttacattatgcattactctttatacacaatatttataccatatgtttaagccgctattggtcaaacatgctgacagtttgctcacttctgttttgatagatcatagattgttttgtgcctagaaattctagttgtgctaatggaaaatatatcaataatatgatagaacattttttaaaagtaaattgtttatcatatcaatttaaaaataagatcacttaagcagaattacaaggactgttacataaatcttaacggcgtttcatggagccacttggtggagtcttatcattcatatattaatattgatatttattcatgctattatgctcataaatacgtgtccttgggaagagttgtctataccaaattacttaaggtcttcaacttcaccccttcatacgtggagccacttggtggagtcttaccattcatatattattattattgctattttttagtatatatacttttagtttataactatttactttttgtgatgagtttataatttctttacacattaagtgtaaaaaacaatgttatctttcggttagtctacaaaccaacctagttttgtttattataattactatatgaatattatatttaaaagtattaatttataataattaattgagttaataatccaaatgaaatggtagtatgcattttttgttggttatgatttgagtgcattgaatggaaaaaaaaacatgttttctaagatggttttgttaaaaaccgtcttagaaagtggatttctaagatgatttaaaaactatcgtgaaaagtaatgactttacacgacagtggcttcaaagtgttgactttcttcataacctacttagaaattatattttctagtagtgactaataataatacggtgatgaggaagaaggtgcaaatacattaaatgcaaaagcaaaaaccttagaagagggggagagtaagccgactcctaacgttgatggattggagtttgtggtgagggactcggaatttacatggacgtggaaagcaatacctatcaaaaatggattaggcttgtgttggtctacataaaaatggtaatctccaaccaaaagatcaagacaaggccctttgtgatagaagaacataattaacacttgaagaatttgaggtggtagcatgtacgggggtccaacaaggttttgagcaacttagtggtgaggtgaaggatacgattgttagtgtgctaggcctcttacattagaaaaactagaaggcctaattacattagcaaaccattgaagtgttggagaacatttaccataaatcggttctctcggtgggtccgttggtcatcactaggtttgagggcgacaaggataatgcgacatggtagtggatgaaggaatggttagacaatcaagaatgtcgcagtgtgttgtatgtggtgtttggaagcaaagcgaaacaaagtcaagattaagtcacagaaatagctctaggtttcgagaaatcaaaacttccatttttttggtactaagggttcgacgtggacc

SEQ ID NO: 3533 - DNA, 1002 bp, Glycine max
  Intron number 3 from transcript Glyma15g38480.1 (locus Gly ma15g38480) derived from phytozome v7.0 (chr-ID Gm15; pos 44908958 to 44909959)
ttggggatatcttggaggtaaaataatccatattcattgtgtttaacttaatattatttgtagtttttcttttttaaatttagaaattcttccaattttttttaaaaaaaaattggacttttatatattaaaaattttgattttttttaaaaaaaagtgttttttaaatttaatattatgttgggcacttgtagtagagagaatataagttcaaaaaagttagatcaagactaccttacgtgggcacttgtagtagtagagagaatataatttcaagaggcctttacaaaaatttttggaagggcatatttttaatataacttattgttttagcttttaaaactgtaaaatcttttatatattaaattttagagaaaaaagattcctgtttttttagaataaatacttaaagtaaatactatttgctttatcaaaaaaaatactaataactatattaagcaataacgagaagaaaatcatattattatttcttgccgatggaaattcatagttattatgcatgggataaaattgatttggtaagttatagcaataatttaaagatgagtttgtgaagggataacacttgttatattgacaatgaatttgttttaaagttacttaaaaaattaaaaaaaacgatatatattacctaaatattaatctaaagttaatattaatgatgtaatttttgggaggggtttaagtgacatattcttattcacattctagcttgtaattctacttgttcaatagcatgtgatataaacattccattttattataagcaaacaatgtgcgaactaaattttggtcacttagtttatcaatagatcatgtaaaagattaagtaaattcaaaatccaagggcaaaataattttttatttatattcttagaaatgatttcttttcatctttttacttttctatgtggtttatcccaaatgacatttacttttaatttttcttgttggtatgttttgcatggaagattaatacta

SEQ ID NO: 3534 - DNA, 2683 bp, Glycine max
  Intron number 2 from transcript Glyma15g41870.1 (locus Gly ma15g41870) derived from phytozome v7.0 (chr-ID Gm15; pos 49082178 to 49084860 reverse strand)
gtgggttcaagaacccatttagcctcacttttcaggtatgatttcatgtttatatttgaagatttgtttttgttttaatgcattgggacataaggaaaaccaaaagtgcagtctttcttttggtgtgttgaaaaaaaatatacagtttcaattctgaagtattaaacttggactattaccaaagctacctagattttctatgcatcaggggaaattattgaacctgataaaatccactcatggaccaaatgtactttatcaaggtcatttttgttgctaaaaatactttctttccctatatacttgctgaataatggagcaaaataaaaagagacatttttttgtctgatctcaaccattttgttagtgtttaactagatttgttgcatcttctctgagttagtgagttactactattgccatcttgaatattggatgtcctttcactgtgtgtatttggattggtggtagcaagattgattttgaatgaaattgattttagagaattgattatggtcagaattgataatgaaatgatgccattcttgtttggataacatatatcaaaaaagtgattttttaagagaatattgtttggatactttgaatcaaaattgattttgagggtttaatgaccaaaatgggtttggttgtctatgtacactcttctattataattagttatatattacatatataattaaaattaaatacacataattaaatttaagacaatatgtttaaaatatgctatcttttgcaatagatccacattccttataaaacattaaaattggataaaatagataacaaaaatattaacttaacataagcatcaaagtataaacaatattaggggtatgggtgagagggtaaattttttgtcaaagaggataaacaatcttttcttttcttttttaatatttttttggtttcatttttttaatatgatttatcacactattatgggtatgagtgtgaggataaattagacaacatgcattcaaaattaaataaatataccaagacttttaattatatatttttaatcaataaataataaacatacaaatgagggcattgatatgagggtaaattagacaaaagctacctagaattgattttggtagaagtagaagctacttctacttcaactccaccatggtttttttcaccatgattgattctacaaagttaaccaagcatgcaaatttttggtcaaaatcaagtttgacccacgtaattgatccatgtcgtagagattcgacaaagttttacgttggctgtcgaaagcctaacacaaccctctccttttatccgggcttgggaccggctaagaatagcaaagctaacctaggcaggattatgtgaatcatcgcattcaagcaggatggatgaaatggagaaaagcatcgggggtgttatgaggatgttgcggtggatgtgtggtaagactcgacaggataaaattagaaatgaagctattagagagagggttggagtagcgcctattgtagagaagatggtggaaaatagacttaggtggtttgggcatgtagagagaagaccggtagactctgtagtgaggagagtagaccagatggagagaaggcaaacaattcgaggcagaggaagacccaaaaagactataagagaggttatcaaaaaggatctcgaacttaatgatttggatagaagtatggtacttgatagaacattatggcggaagttgatccatgtagccgaccccacctagtgggataaggcgttgttgttgttgttgttgttgttgtatcaagtttgacccacctcaccatgctccaccatgattttgaatgcaatccaaacacacattgtgtagttccagctttatttcatctcaagtagttggagctaccaaataccactagtcatggggttatacagaagtcgtctttcagagtatgatccattacatagatgcaattttcaaatatcacaatcaaaaggatgatctaagagccttgaggcagttatcttgttgaaagtttaaccaaacctttgtgtgactgtgtctgtgtataagatcaatctcttgccatcattattagtttctttttctgcattttctcccacttaaaaaaatgaaatattaagtgggaagcatttgacatccttcttccaaagctagagtaaagtgccatgcttaatgcggattttgttttattttttattacaagaaataatttgtctgatatgtattttctttaagactctgaaaccttctgtgaatatatatgactgagtggctaagttggtttcaattgatatgaacctctgttttccatatgacatttcccatgcatgatttgcactaaaagtattgtgatcactggcatcatatgtttttcaacgtttgtagtttatttattcaagagatttatccctagtatatcttaactgcttgtatgtgattgctgatgttcatgtagtaaggtatgatgtgaacattggagttaactttggatttatgagcatcaagtaggtcatttttattcgtttgatattaattttattttatttgttcatattttaatatatggaacccttaattgattagccattaatatgtctatattgttaaatttcatacgcatctttttctgcagccaataggtttggggaaaattgcaaagtttattaa

SEQ ID NO: 3535 - DNA, 1738 bp, Glycine max
  Intron number 12 from transcript Glyma10g24540.1 (locus Gl yma10g24540) derived from phytozome v7.0 (chr-ID Gm10; pos 31974448 to 31976185)
aggtactttctagaagcattagagaaacttttatattgttattgttagaatatatggaaatatccaaaaatgtcttatgatatcatagattatcctctaagaatagttaccatatttctttatcttatcacaatttgtttctataattagttagaattatgattggtataaacaagggttagtgctctaggttttataaacacaaagtgcatcgtcacattgtaatacattttatttaatctataactattaataaaagcaattaccccttttggtgtacacatttcttattcctaaattatccttcaatatatatcactgtttttatttctttcataaaccttcaaaatgtaactgctgtcactttccctaaaaaaaactgctaccactactttttcaactttttttttttaaataaagatagaggcatgaagtgtctcgctttcaactagtaacaataataacaattctgtctttttcattctacttcatctcttttcctccctctatatctaaaatcacatattttcaactggtaattgttaatgtttctaaatacatcttcctatcttgcttactttgaatctttctaaatacaaagaaatttagtaggtgtgcaagtatgaatctaagatttataattcagcctttcaatatgtttatctaataactatatgtaagaaagagatgaatgagttgattcttattatcctacttgaaggatatgcctatcaagagcaaaggcattcatttatcctaataggtgttctctgttctctatctttatttcaataattggtaaaagtgagtatggctcccctttgacactggtggtgatcagtctgggtggattgaatccaactgtttgttcaaataattctttacgttcaattcactcactgttttatgctattttactatgcgtattttcaattgaattgaactcagcaactccccattagtgaagtatttttttattgtttttttatcttcttgtatttgtatctctcctttttcttgatacgtagtaaattcttttgttttgccaaaaacacaaaagaaatcatattaatatgaaatgtgtttcagtagttattgtcaatagtgagatttcataaattgatggagaatagtgttattacaactttctcttcaactattgcgtattatgtttcatatcatgtcttacattcgattactcaaggtatttgatactttttagtttttaattcataagatgttgtattattgaaagctttatgtgcaaaatagtggtgttggtataaatgcatacatgtagtacttacaaccatatcaatttaaaatttcttggctgatctggtgacaattttagccctagtatgtttcatagtgtgtactatagtcttattgtcataaggaaacgaattgaaaataaatgaaacaagaaaacttgggggattatttttgttcttgattcctgataggttcttcaacaagtggctacatcatacacctacatggattcagtggttcttggaaaaaagaaaaacactagaatacattaaatatgtaaatatttttaagatatttaattggattatgtaaattttatagtgaaatctaagtatggctgttgcaaatatgtttcatagtatgtactatagtattcctcgcttctgttcaattgtggagtttgtggtttctaaatatttgaccaacattattgctggtggaatgcagattgttaagggcattg

SEQ ID NO: 3536 - DNA, 6891 bp, Glycine max
  Intron number 3 from transcript Glyma09g40230.1 (locus Gly ma09g40230) derived from phytozome v7.0 (chr-ID Gm09; pos 45184928 to 45191818)
aatttgcaagctcaaggtatgtttataatatatggatcctcataacatttctttttctgttacaaattgttgctttgtgtgattgcgctgcatatgctaaatataatagtacttttttttttctcttcatgcaaaggttcctttcaattttttagcaagtaaatttcatttagatatatgtacgtgttattaattacaccatatacggactcaacagtactaaagatcttcatcataatctcagaagtgtaatgagatacggggagagttatttgatttttttctctattttttaatcctaaccttaaaagtactgttgggtatgaatagtacctaaggagtctaatttgaagccttttctttcttttttcttttggtgctttgaggagttgagcaattcagtttagagtaagactttgattttacattcaagtgttgaagtgatttacgaaaacacttgaaatcttgaatatttgatgacattaaatggcttaattagttgctaatctcaatggtgttttaatttttatttttgattataagctacaaattttattgatgtaaagagctaataatcttaagcacaagttgtgccaaatactagagatacaaatcaccaaagcgttttaattaattacatgtgcattgaagctaattccacctttctttaactatgcttaaacttgacttttggatttgaataccaattgtttaaaatttcagaatacttacactttgtgcagtgggtgggagtaaggtagcgtctgtcaaagtttttaaactttcctctataggaatctttccatacctcattttccacttacatctttctttaccacttttttcatttctcgtacgttagatctctcgttacattaacatggtggttgcatactttcatagtggtgtcaaaatatcattattgtttcctccattatttcatttttgtaattgaataaaagggcgaacttatagtataaagaggaaaaattctgaaagttgatgtacttgtttccttcaataatggaaaaggagccatcatcacatgcatggaggttatagagcactgtatcatatgtactaaaatactgacatctaatttcgtgagagacacataatagagagagaaaggactctatataatgacttgcactacataactatgattatatggctccaatattatctttctccatcaataaattaatattatttttgggttgaagaaatgagtctcatgattcaaacttgtaatatgactcaacaaagtgaaccaactttgttcaactgatatagtttgtcaaaagaaaaggaaaaataaaactccatcagcgaggagcttgtgaagttccatgaaataatgtacggtgtatcaccacagttttcaaaacaactaaaggcacactaacctcctcacgaggttgtttatgttttcattattattattaaaatagtaagaacttctagattatatatagttgaaactgcaaactgttgttatttaattaggtttggttgtctgatgcatttgtttaataaccatagttatatatagtcattagtaactaagtatgatgtgtgagtggtttctcaaaaacataatttgaaaaccatacttatctgtacgtgtactttccctttcccttttctctttcttgttgagttgcataaaaggtacaattgaaaatattttattaggaattaaaaatacatcaaagtcttatcctattaaatgaggttgactaaaatatattattgatgaagttatggaacatgtagttaaaattgcaatgtagcattgtatgtttgtaggattatttcaaccatatgatcattgaatgactgaggcatgatatgctactatttttgctttaaagttgcactgttttcagggtaactgcaacttatcagaagctctcttaagttttgtagtaaaagaaattaaattatatacattaatatatttcttctatccttcctatgatttttatttctggcttaaagcgattattgttttaaatgtcgttaatatcaacttgcatgtttttttgtgcatgattccctcaacaacaaaaaaacttccacagataaagggctaaaatgtggtaatatatcttattacatgtatgtggctcttgttgagtcattgtgctggtgaacctacttccttttgatcttcaacaagttgaaaagagaatatttataataattaaaatacataaagaaaataaattacacataatccttgcccccttagagaaaggaaggtaagctagtagggtttattttaagattaatagttgatagacatatgatgaagctcatatttttctccaaagaaaaagctaaaagttaatttattcaagctctaagactagatgtcatataaatatttttgtttgcttttcttggcttctcatgtgattcacagttcaaatgtactaattcagattaagattgaacactgaattgtatttccaataatgtcttttagccttttttttggaagaaataatgtcttttagctaaacaacttttaaactaagctgtgtaataaattattttttttctataactttccacatttggcctatatatatttgctattaagtcataactctgctcggcttgcattactagtttgtactttgtagcaaagtagtgtatatttttcattttgatcgaattgatttaaaagatttaacttggaagagttgatgtgaaaatgatgattctgcctttaaaaatgatatttcataatttagttttgtttaaatgattcgcaggatcacttttgatatatataaattttattcgtttataaaagttactccttttttaactttttcaaaatttactttctagctagtacattgtgttgctaaacaataaacatgtaggtttcctctcacgtgaactgtcaaacggcattcctttcaacaacaccactagatattaaacaatttcttagcagtctcattcttttatataatcgagacaagtgttttttttttccttctttctttagtgtaagggcttagcagcttgttggttggctgcttgtgacaattattttgtgctatatggaggcaagaaaattgcacacaattattattactattattattttaaataaaaccttatattgttagttgtaagtgaaattaaagtgtattaatctgagttgtgccacaacagcattaagacaaataatttgaacgtcgaattactgatcaaggcttggcatgtgaaactggcccttcgaattaattcaaccaagctagggttttgactgtgattactatcttttgtgccagtttttcatgcaacttctgtgacctttttcttcttgtgtgctactgccacctgatgagtttgagctgaattatgagaatttgcaactattcacttctgtttgctttgaattacaatttgagaatatatataattttttaaagtaaaaggatattattaacgctgaaggcaagggctattctaatcatacgtaatacaactagctttagacaagttcggaatctgtcaatgtagttctaattaaggactgattaatatatccgtggagactaatactcttatctcactaattaaatgaaatcgaatatatgaatcgtacaatgacattagtctcaactaaaaaccaaatttttgaagatattgttcatcataaaatccccttttaataattctgtgtactgtccttcttaatctctttttataggactaaaacataccatctaatctcttgaccggtgcctccaatagctttctttgcatgcgacaaaatcaccttaactgatttcctttagtattttgctcagtatgtgtctcacttatatcttttccattgcaatctttctgtattccatcaattttttttccttttatctcgacacatttactttaacatattcatttatgctattctcacattttccccttattctccctttaaaattcagcattcacttgtagagtatagttggctgcatcctttgagtttgatagggtatttagcagtctcaaataaccgtgatacctttctccattttaactaccctaacttgtatacaatgtgtggcatttaattcattttcccattattttgtaatagtgattctagatagttgaactcagaaacctattgtatgacatcttcaatttttatttccaagtcattgttctctttgttctttcttggtaaaattgtaatgcatatgctttgccttactcctattcaggtgaaaatcctttgcttccaattataatttatcaacatgcctacatagaactcttaacaaaccaaccaaaataaatttccaaaaacttatatagtaacttgtaacaagctaggtggaattaatttttgttttccttttgctaaaaaaaatctcattaataagtacaaaggatgtttgtacccttttacaccatatatcaaatatcaaaatttcagccttcctatctattagaaaagaatgcatacggtggaattatattgaatccaagttgtggcacattaggcgtgtttacaaatactagcttaatttcatgtatcaagctttggcttggtatacggttcttctaaacaatagtcggtgtcagattgacttcaacgaagtattcaacacttaattatgattgggtagggttttggttgtgaagctagtcggatataattatggggtgaaaattctaaacaatagtcaataatttgaaaaaatcttgttcaaatttttggataatttgtttattggatattgcttcctataacgtgaaagtgcaaaattaattttaagcgttgatgcaaaaaattatcgattggtatttcaacacatttataaaaaaattatgtacatttaaaatcaatagttgatttttatataaattccaaaatgaattattttacctttaaagtgaattgtttacttcagaggaattggatccgtgttcagtgctcattttctatgtacttttgtgcatgtgtgccacagctttggaatatgagctgaatatttacaaattgtaagttgtcacctcagtttgatttaaagtataaccagatttcttattttaaaaaatataatcagatatgaacctgcatgttgtacgggtatctaatttttttagagaaaaaatcgatcatactataagatatatatatttttaagataaatcttttaaataattatttaatcaacgtgtaattacgaagatatgaatgatgtagtatttaataatttgaagccaacaaaaagaaagagaatttatttaactaatttatttatccaaaaaatgtgaaataaagagatatttcaaaacctcaggagtcagggctattcatgtcttatttttaaagagtttcgtgtttttttatttctttaatttcaatatttaaatatttccacaacatccactttatggtaatgtttttctcatgtcaaattcctctgtcacacatttgctttcagattcaatataagcactgtctatcctatacatattaaagaactatcctttttttttttccccaatccaattgcttcttactattatgcaataattttgaaacacaaattacaaacttaaaagagaaaacatttgaaatgatgacatgaacttctatatagttcaagtcagcttgcactcaggtttgagttataactttgaataacttcaacacattattaaatatacatattttcttatggagaggaaaaacacaatatgattagaaagaacgcacaaatattgtatagtatagtatgaaggagatacacctaaatccaatctttgtaaaaaaaaaaaaaaaactccaaatttatagactatatttagccttttcaagtcgcttttacaattgaggttcttaagagacaaaacaaagcattttacctggtttattaaatagtgatatatgtataaggaaaaattaactaaaaatggtaacttggaactcaaggcattggctttgttatctaagaatgtaacaaaaatagttgaaatatggtcatctaatgtctcgtgacttggaaaaaaaaaatccaagctcccaagtcctacattgactagagatagtatcaagatatagtatataagatgaggataaccctcaccttttgagttagtttttgggattgagttaagaccagattaatttctgtaaaaaaaatatatttttgtaacctgccgcatccccaaatcaaagcccagaaatagtttgttataattgcttaaaataaggtttgaatggttataataattgtgaagttagatggtaaaagtaaggaaatgtgctattttcaccatttctttacacaatattaaaaacatgaaacaatataaaaataaattgacatttttataattatgaacaaaaatatacaaactaaaattaactaataaacgtcagttgaatataggtaaagaagtgccatattggaaaaaaaaatttgacaaagtgttgatccatataggggaggactccctataacctaggctaacctaaccgaaagtctagaataaataatatatccaaaaaatgaggaggaaattagaacatacattagagttataccattagttaaatttcatcaagataaagtattatcaagttaagcaaggtaataacttatgactttactagtatcaatggatatcactcccgctcaaaatagaaaacttcctctcccattttcaatttctcaaagatagtagttaattgtttttcgtgcaagaaactttggaagacactgattatatatatatgttctatgtctcttttctgatgtttaagcaaattctggttacttacatatttttcttgaccatggatcgatctgtttatagtaatattgagtttcatgaaacagc

SEQ ID NO: 3537 - DNA, 297 bp, Glycine max
  Intron number 5 from transcript Glyma10g30100.1 (locus Gly ma10g30100) derived from phytozome v7.0 (chr-ID Gm10; pos 38829576 to 38829872 reverse strand)
ttccccccctgttaatagaaacttgcttaatgcttttgtctcaagttggttttttatcggcaaatgttagtagttaacatgttatggtagtggggggattcgaacccaagacctccttatcactctatcccttatgcccctccccccaaccaccagaccaccttataactcccctcaagttgacttcttaattctcaggatttgaacttacgtttatgatcattagatcatgatgtttacaattccattatgatgactttttcatggtgtttataatcatgcacagatcattagatc

SEQ ID NO: 3538 - DNA, 808 bp, Glycine max
  Intron number 1 from transcript Glyma17g16350.2 (locus Gly ma17g16350) derived from phytozome v7.0 (chr-ID Gm17; pos 12999362 to 13000169)
tcactcaccttgctgctttgatttggatcttgaaggtgaaatagtagtataaatgactttttgagcattcttttctttctgggtcgtttctcaaatgatattttcatgctgctgttgcttctttttttttgtcaacgtataagcattttatttggttgtgttattgttattatcatctttattatcattgctaaagtagttggatttagtttgcaacctttcagcttgatttgttcatcgtttgagcttgttcacatttgcactgaaaagattcaattttcatgagcttttctttttggtggatgcaattttagatcttcagctgatccagctaaaacagttgagatttggggttgggggagtgttgtgccatgcaatacaattatactaatgagattgtttgaaagtgggtattggattctatgaagatcagacaatgtgacaccaaaaactctgtttttaaaagtttctttttcttcgtgtaaaatcattatcaaatcacatgttagtgttagatccgcttgcatgttcgtgagaagaaaaaataaaacaaagttcggatgaaactatggttgaaagagagttaagctcgtttattataaggtcttctcctgctagaaattgtgcccccaaactaccttatagattctaaatcagtactagtacctttttttgttaacatataataaattctgtgtacttagataattattactactttattaattttggtagtttgcttgattttgagcctcattagtttcagtgtacactgccataggtttgagagggtactgccatccaatta

SEQ ID NO: 3539 - DNA, 2210 bp, Glycine max
  Intron number 6 from transcript Glyma02g40390.1 (locus Gly ma02g40390) derived from phytozome v7.0 (chr-ID Gm02; pos 45652528 to 45654737)
agttactcacacttggggattagaatgaacatgtgtagggatccctagatgatcaatttttgggttattttggggtgtttatgaatttaattatgttttcatgtttaatcgcggattgagtgtgtttgatgaaccaattggtgttctgttgcgagtttgttgtagaattgatgtgttctgttgcaagtttgttgtaggattgatgtgtttctgtgttaggtgtgtaccttaggaattagaattctttataattagcataaaaattgtgtggtggtgattttgtttataccagatatgttggcctttcaatcttgttcttgtgctaatgtatattgtgtccaaataattatttttacaccgcagtgtatacgtgtacatatatattgatactattttttttacaaactgtatattttatttcacgtgggtgatttcttatcatgaaattcataggtgtagggattgttggataattgaattggctaaaatcatttaaagaaattaactaaagttgtattcacattgtaattaggcattttcttgatgttggcaacttagttgaaatatatttaaaatataggtatacatgttgttcatagaaatcaatatgagtatatattttattgttatatataatttgtatttacttaataatatatttgatattattgtgattactttatattaatatatatttaatactttttatatgttatatataatatgtacgtttacgtttacgttaatatatattttgttatatattttgaatataatatacttatatatatattttacgtgtattttatagttacttgtttataagccatgaagttaaatattgtatgttattattattatgatacattgttatctaattgttgagtatattttataattagttagagtgtgaaatgttaaactgtagacatgaaacatggttgtgaatgagtgtgtgattgatatttgtagtgatattacttgtcatgtgagttatgagttatacagtaacccgaccagtgtgtaccttgagagaacttttatgtgcagtgttaaagaaaattgtaggattcctagttaggatcctgaagggttaaactatagcacaatttgttaaatatgtttgaaatataagagtaaggtcgtgggtatgatataactcataaacagtgtctgcgtgcaaataaaaaaaaatattttaggggttggacctgaatcaggaaggtgaggtccaaacggattcttcggagtctaggccttgggggtaaagatactcggtttgagtgctcctttaagcccatgttgatcccatgtggttggggcattctcgcaaaacagagtaaccctgactggtcaccttatgatgttacttagtgagagtgatcgagtatacccattgtgtggtgtgctttgtcatgtactcctaagcgccccagtgttgtttttcactgacatggtaccacattgcatataggcttgagtcttagtataattgttgcataacgcttgtgtttgaatttcattgagttaacaattgtggttgatgttattttatggagtgtgtaaacttgaatgggtgtgaataatgtgtgcgattttgtgcagtaatgttatttatataaattcagctttaagtattatatgtttcacatgctctgatgttttattatatacgaatgtgataactcactctcggtgtgtgtttgtgtttgggctgattgccactttgtttcaggtgagccttcatatgatgagtcacatgctagagatggagagacttagtctgtgatagggattatgatttactgaatgatataattgtgttatacttttctactttagtttctttttattatttatttagagtggacgaccttgttttgagccgggataatcttatcttttattaaaaaaaataatattctattatgttttcactaagtggatgtgaacctttatccttttgaattgattaaattaaatgtgtttaaaaagaaaaaaattattaattaattttgcatgtttttttccttcttttattattatgtgtttataatcttttaattaaattttgtatgatttatttaattagttagttataattgtaagggtagagggtgtcacacttctaacaactcgaagtagagaagtatgtacttctatgcaatgacaaagtataattgagctcaatctcttaactggcgaagaag

SEQ ID NO: 3540 - DNA, 845 bp, Glycine max
  Intron number 1 from transcript Glyma20g33330.1 (locus Gly ma20g33330) derived from phytozome v7.0 (chr-ID Gm20; pos 41927873 to 41928717)
cgctgcatcgcctcctccgaaaccgccttcgctaggtatatctgatccgatccgatctgttttctctctccttcgtttcgcttaaactcgctctctccttcgcacagtaatgtaggttaggggactgtatgtcggtgacgctattccgcggtcaacgcctttcattcccaaccctaattcttaacactggagcttcaatgctgtttctcgctagatttagattcattttcttttcctgttatgaaaataataaagtaggagtgttattctgtcctgtttcgtgtgtggatgtgatttttcgtggtttacgctgtttatttgaagttctgctgtaattgaatgattgcaatttattatgatttcggagtgaagtaattgtgccggctttattcttttcttcggttttttaatttttgtagataccaagcaacgcagagggaatacttttttaagactgttactttcctgcttagtaaaatatgtatgaaatatgtgtatactctgcatctgttctgttttgtaggtacaaaagtatattcactgaaaaattacctttgcctataaaaaaatgtatattcacagaaaaaatataatggtttgacttttaaaatgcttatgtgaatttatgtaattaaaattgttccaacaagtgaaacttcaatgctagactgatttttgtttttttactctcattttctaatatttgaattttaaactttttcctaattgcgtctattatactttgatttgtaattatataaaagttttaacttaattctttgttattaattttgtgtttgcttctatcagattctgaggagaagccaacatatattaggtttcta

SEQ ID NO: 3541 - DNA, 3846 bp, Glycine max
  Intron number 7 from transcript Glyma01g37140.1 (locus Gly ma01g37140) derived from phytozome v7.0 (chr-ID Gm01; pos 49543855 to 49547700 reverse strand)
ggaaattcagtactttcaaacgaacaattcctcaggttacttgggatcaatttattgttcatgttatgtctaacaattgcctcagtataattgtgtatctgttgtttgattattatggatgattggtgataacctttctttggggctgggcatggtcatttttttggagtacatcacatttttaaatacatttcattaagtgattggctttacttgagatttgaatttttgtgtgtatttcacactttttaatctacttttcattgctgtctattaaatatatatataggatacaaaagggagggagacagctgtttacacttacacaatacagctgtctcctcaataaagctgactaacaaaacagccacaatacacaaaactgctaaaactttaacactccccctcaagctggagcatataaatcatatgcaccaagcttggaacatatagactgaatcctagttcctcttaaggacttagttaaaatatttgttggttggtaattagaattgatgaactcagtgacaatctccttggacaatagtttctctcgaataaaatgacaatcaatctctatgtgcttagtcctctcacagaagactggatttgaggcaatgtgaagagctgattatcacagtacaacttcatttgcaccacttcacaaaatctaaactcttggagaaattgtttaatccacataagtttgcatgtaaccatagccatagatcaatattcatcctctgcactggatcgagcaacaacagtttgtttcttgctcttccaagagataacatttcccccaataaaaacacaatatcctgaggtagatctcctgtctatgggacttccagcctaaaagctcgagtctgggtaccaccagacaccttatggtttatacaaaaataaacattaatggatttcaaacataagataaatacaattttcataatatttaactcaagctagcataaacatttaacatgcgagttttgataagagtgaagtagctgattgtttcatttagtagcaaaccaaatatcttagcaacaaaacttggtgtttttgcttggatgatttgtactcacgttttttttgtttttgctcagtatatatatatgaggagtaccagaggtactttagatacataatgagattaggtagacagctgattcctttgggtggactatgattctatgaaatctgacaagggaccgagctatccactctaaaaatgttacaaatgtcctgcacctagtatccttttctaattacaaaaaccttctcttagattagtggaccattggttatagtgcagtgcaaaatctttctccatagatttaaaccatgtccagattagaagtactgcattatctaacaacttgcttccattgaaggtttcatttaagaaaactatcctatttctttgctgccagatggtccatgttaaagctacccaccaacacttccatcttgtggattttatcccatcaacaatcccactgccatgctgcagaaaatgatccctcggattttgcgggaatgcgcccactatgttcacccaagacaatgactcccaccataaagggaggattttgctgcaattgaagaataaatgggctgcatcctcctccttattgctgcaaaatggacacagcatgtcatttacttccacttgtctccttctcaaatttgacttcgttggtaatcgatctctaattagcctccatgcaaacactgctgatttggctgggatcctaagtttccatagttccacaaaagctccatcctggatctctaatacgctctttttgttgaataattcccacttggatcaggtttccaaacccaagaatctactctgtttggttggattgctgtctgtgctgcctcccctagaaatccaacagccattgcaacttcattatcgaataaaggtctcctccaaatatagttccattcccagcctgcgtctgtgtggctccccatctgcttgatgaactgctgttgttggcatgaaatttgatacaatctaggatattttgctatgttgtacccatgagcactcaacggttacctgttaatacctgtactggtattgcgtatgttgtacccatgaacactcaatagttacctgttaatacttgtactggatatgtacctggtataggtatgacaaccatttaggagtacccaggcgtcataaaatgttcttaatagaattaacatcaatgacatgacatgctacaaaagcacagaccactcactgctgatgtcctaatatgtttgtgatgtgcttgtgcttattcagaaatggagacacttttttttttgcatgttcagctgcaaattttcttgtaaataagctttttaggttttatgatgcgaattaactcttccctaactatctggttcagtttctccttattaaatttagagattttggtttttgcggagaatctaagatctaagattctggggtagggctttgcctttgtagttctctagtgttgttggctggaaaggaatgctagaactttcaagggaacttaatatttgggacagggttgtttctttttagcatgctttgttacgtgacttagtttcgtggtttctagattatcttcttcctttgtcgtcttttctttattacgtaatgaatatctttttagaaaaaaaattctaactccaaggttccaaataaactttgaagtacatgaagttagcacaagtatttaaagaaggcacaagatttgaatggagtatcaataggggatcagaagctgttgtgatttgtgctaggtgattgtggttagtgcacaatgagggtgtgctgtaataacctgtcctggtggcggtggggcttaaaacatatcggttagtgggaattggttaacaggaggagaggtgaggggaaggtaggcaaactgtgagttaggtaggtatgggaagtaactctctctcgaggtgcttgtggtgtttgagtattcccttttcgttttgtcttttatttttcactgtccatgtcaaattctcatctgcaatgaacccaaccctaagcctgagatttcatggagatgagaaaacagagaatagagaaaaagaaagaacatttctgtgatgtaaattgaatgacaaacagaaaaaaaaggagacaattctccttccaaaggtctcccacttcccccttttacaactaagctattgattggttcctaaatgctaacaattcataatgaattcacttttacagtttattcccttcctactgttcctgcccctacaactctaactgtctaactaattctgtaactgttcttaaccacctaattaaatcttgtgacttttcttagcagctttgcctaatcatcttttattcttctgtcttgtggcctatcaacatgttttctgatatcagccacggagaagggattttagctgttttctatcaatacaagtacactctgctttttgggttcctatcattatgtctatctataagtttttatatctcacctgatgttggtttgaagttgttctgaaaacatttcctctgtacaatcaatatatacacaactgaggcagcttctgacaagggacctctttgcttttgtttttaggatatctgatggagagtcaggttaccacctgagctttttgctcaggtggctgatcaattgcctataattagtcttgcaatgtctacaatatattgtgcttcacttttattaatgtaaatctacaggttattgcgttgccacatttcttcataacctattagtaatataatttattgctattatttttatagctcttggaggaaggtgaggaaggaaaggatcgtgc

SEQ ID NO: 3542 - DNA, 7095 bp, Glycine max
  Intron number 4 from transcript Glyma15g09910.1 (locus Gly ma15g09910) derived from phytozome v7.0 (chr-ID Gm15; pos 7145966 to 7153060)
ctaagttcccccgaggagcaccacttttgttcctggtaagacaaaaagaaactcccttcatctttttttattttgtttggctttttatgctagccttgtcattttctattgtttatgttcggtatatggttactttgctgtcattttttttcctgatactgtttacacttggtacatagttgagactttaatcgttttatacagccggttttacattgtcaattaagtaaagttattattaatatgatttttaaaacagtttttgcataagtcaataaatttatcatgtataatagtttataattggataataatgtaaactgtgttttatactttacgtatatttttttgctaggatcttgttaatcagggctcttaggacaggttaaggaactaaaagaaaaaaacatttattgtaaaaatcataagagagcgtaaaaaaagttatgagtagtgtaattttatgcatttcaataaaaattattttctgtttattttattaaccaatgtcctaaggatattgattaacatttgttatttttttataattagtttgctatcagtttcccccttaccctttgataggcttgtgctttgcccttgctaaaccttaggaggatattaaatacaaaatgtgtgtgggagagagagagtgcgtgtttagttatttatttattgaatttgaaagaggatggtcatggattgatgtgtagagtgagtgcattgtgcaataccacgagccgcttgctttcttggtaagcataaacaagttgggcactgagcatagttttatgggatgctatctgtttattttgtcttatagttgggtcaggctgcatggattggcgtgagtagggtttccactggttgtctccttttttgttctctccttgcccttggttccctttctctctggcatcggtgagtccctgccaagtgtaagcttttcttgtggcaaacacacaccatgtgtaggtttatgacttttgtgtgtgccaatgccaaaaccaaaatactagtatatggctttaagatcccaattcaatatatttccactccccaacctgcacatgacatgacatgattctaatcggcgcattgtcagcttctgtgaggcaggccaactagtataatttataattaagcatagttggttggttacttggaattggataacaaaaccacatttaggacctttttcatgttctcaaaggtgcatgcacgttgcacaacttgactcttccaaccataaaaccaaccggattctcatactttatgtacacactacaatatacttaattactagttataaactaaaatgaaaaaggtagtaatataatagtatatgtcacatttagattttgttttttaaggataattacactaacttttttttaaaaaaatgtaaatgctaataacacgctgatatacatccctttttattgaaaaactattttcttcttgagtagtcggtgtatgattaacgtataaatttaaaataggtgaggtatatgtaattttttaaaggcagcatgtattaacgtgtataaataattctaatacttgtataagataagacagataactgtattttttttgggtacaagtgtgtaaataatgctaactttaagaaaaagcgatgcaaatatctaggtgacatatctatgaatgttataaaatgtgtccttacccgaatatatatatatatatatatattatttatttatttttatgttaaatttcatatgttcctgttagcattcatttgaacagaaagaacacatcattattagtcagtgaatgattcaactttaaaaaaaggtacaaaggtaaaatcaaatgaaaagaatattacataaaatttgattagaattgtactactaatagtagaatcattttttaatgatatttacactatactaacttctaaagaagtcagtattaatttcatatgcttcctttttattgaaaaattatacgtacctaacctgcactttcctttttttttatttttaaaagtattatgtgtattgtccacacataaaatagataaagtgtatatgattattttaaaacaaataatatatatcaactagccttttaaaaaaattatatgatttttaaaagactttttgatatatagatgtactgtaatttttaattgcaattataattaacgctatctttaaggaaagtcaagtcaatggaattaattatctacataatggattatatatatccaaagtatctcaataaaaatcgaggggcgtggatggggtagagaaaagacaaataaacactggagaaggggaataatattttttttttttctgcaaaagaaggggaattatattagtgaacattgcttattttttggtagtacgaaagggcaataggaaatgcgcctagtacgttgttagcataaatcttttgtttcagacagattgctagcttcccaggaaattttctgtcaaccttagcacatgatgagaagttgagaacatgtttttaacgatatctttcttttctcaacaataacaaaaactttacatgatatcattgtacacggttaaaaaccaaaattttaagaatattatttattatgagatctcccttgatgacttcctccaaagttctttcggtttccttttcctcctttttctcaggactataaattatgcaattaactctcttgacttagcttctttgtacgtgttcaagtgtttgtaatatgaggggtaaaacaccaaagtgatctccatcaatgtgactcaagcaaatcatacaagtgaacttgaaatcacatttaaccctaaatcttacacacttgctcactataatgatctctcccttagtgtgagtagaaccagagcttagtcattctgctattccttacttctctattaatgagccacgggcaaatcacaaaagtgaacttgacatttgacaccacacttaatccaaaacattaaggtattattaggtttgtgggtccttatacatttgcttgacttgtctattcctattcaatgtgtgtcttctttctcacacttgcactcgttctaacagagagaacactacatttgggtgagggtactcaagattgttcagatgagactaaacttacaaagatgtaggatgaagtcgaactcagtttactaatcactaaagctaatcttaggttagatataacaagtacatgagtggggatagaaacttgttttttgaaatggaggaaaacaatgtacaattcacctctacgcactatttggtttaaaggagcagagggaggattaatttactactatatattcttacaatagatagataaagtcatttggttggatttccaacttcatatatatatgaaagaacatttttgttggaagagattagtctcttaaatagatcttaatacttagagaaattagtctctaactctccaataggatatactccgagttcactaaaaaataaagtcatttaagaataatttaatcaccatagtataatattttccctcccatccaaatctctcctagtatgggagtcaaggtaaaaatgggcaggaagggattttggctccctctcttccttttaaattttgaaccaacaaattacttttaaaagaatccttccctcctcttctctattccttttgtatctaaaacactatgttagggtgtgtttgatgcacattgaggaatgaggaacaatacaagcataatgtgagaagttgggttacaacttgtttcagcgtaatatgtagcggctaatgcacaaacatataagtaatcttagaggcaaaagttagaattgattttgaaaagaattgaacttggagttggttcacttcaaggtactgactcttatatacagatcatcttcttaatctactatattggtcgaaatcattgtataggcatgaccataagcattttttatagcattcattttagtggtacgttactccttataagatagtaagatgtatttaggttggagcatcccttgtgttcttttattgattttttactatcattgtataggcatataactttttaaaaaaaaaaagtgaaatatacctatttttttttacccaactgacatctgcctcatgcttggaagtgaggtaaaacaaatgtatgatggaatttgaagtcttaaaagtttaaaagttggaaagtcacatttcaaaatttaaggacagagaaattgctatgacttggacttgggatatttacctaccccacctcaagtatgtgagttaggcctagatggtaggattgaagtgttacacagattagtcttcgataaatgaagcaattaaattctgaaaagcctcaaatattgttaacaaatatactagtatttaagatgttggggattttgggttatggagaagccagtgttggaaaagggcagaaaatttattgatcggggcaagaaagtggttcaggagtagcaactgaaataaaagaaatggtgaagattgcattttttaagtaaaaaaattggtgaaaggaaatgaaaggcttggtgctgagtggattcagaatttcactttatagatgtaagaagataaaagtggattcaaactgaaaaataggaatttgcaaccaaaaagtcagttttcctagtactagaagaagtgaattcctaaccattttaaattataaaatgaagagaaacgaaagtcaatagatgcaaaatatagacagatgaagagagaaggataagggaatagaagtaatttaagagaacctttaaatattcatataaatcaaactaattcgttttatgtgttttttaattattatttttttttgtttcaagacacttgttattatttggtatgtttgtattagggtttttatttttattttttgtttcaattggaatagattttggctctaattttaaaaattattcaattaaaactaaactgaacttacatatacattcataatctttttttttttttactattcatatttatatgcttgttgtttcatattttttttaaattgtcatataaattataaatattattaaaaagtacatttgagtataaatatattttttaatgaacatttaagtgaaaagtacatttgtttaaacatatataactctaacttgtccgaccataaatcttcattgatataagttgaaacgtgaataagaatgtcaaattgcataatttttctttcaattggtttagattttaaatgggttttaccattttaattgatttgggggtggggggatataatactatgaatttattttactatatttattattatatatttcaagatttatttattgctttaaaaaaactaacatacaaaaaatgatcaaatctgaatttaaaatgataaagtttgatgtgattggatcagttatgtcttctaagtattgaacatttccaaataaaattggtaggaaatattagtttctttttttttaaaaccctaattaaatctttgccttttgtttatgctgattaggtgcataattgtagtcagtgctccaagttaacctagcaaccccctatgtattaaaatgaatatcagggggacttatcctgtaatacatgaaattcttgcatgaaaagaccaaaatatatagttacagtacaaaggagagagaaatgaaaaaaaaaaatgatgtactacaagcatagatatgaaatttagttctaacctcaagtagtcagtaggttgtttagaatgaccaacttcaattggaccaagggtgggctctaatagttggttgaaaataaatgaaaggattgtttgtcgagaagattttagtagtttaaaagattgttaagggagtgggaaaaaatgaattttttatggaggtttgtatgtatatgcggttgtttccattttaatttactttaggataaaacttgtatcaaaatttttatgtctgtaccatgctgttctcaaattaaacaatggtatgtggatttatctcttaacataaatagcttccattaataatatgtagttcaattggaaaatgtaataattgcttgatttgagaatttgatgactaggatataaagaatttcatctaagtttttcccttagtttaatggcatctggttcattctaaataaaatagatagcaaaattaagatgagagttcaacattaatccatatttgtatgactcagaaaacaagtatctatggtagggcaagatctaattaatatagtgaaagtttacaattaagatattcattcatagacaagggttagaaaagaaactacaaacacaaacacctgatcattttaacttgttcgacataacataagatataaggcataaataggattcacttcttgcctttactcaaaaaattctagctcaatggcttgcctgatgctttggttcaaatgcttcttttggtattaggtcgtcgtagctacttctcccatatcataatgaatgatacggtagattaaatgttgttaggttgagaatgctttactgatcatatacatttctgaattctgataaacagatttacacattactaatcatccttttttcaatgaaagtattttcttttgttgtggctagttctcttctatggagtaatttgatcatgaggagttaaattagacttgatgaaaagcttattttattaagaagcgtattatatatgactcatctagggttggaatttcaacacttctgcctactttttaatttttatccacctctatgggcatgcatatcttccatactgtaaacatttgtttagcctgaagtgtaaacaaatatctctatatgcatgaatttggacaaccgattgaagtcactcttattatagatctcttatacactctttagctacatatattatcacataccttattctgaggacattatgctttatttgttaattactgatgttaatagccaaaaatttcttgtgcagtgtggttagcctttgtctacactacttctctccttttcataatcgtcttgaaatttctcaatttttttttcatatatagggttactaatatttcttttttcaggaattgtggtctttgtttttttagtagctgcaagc

SEQ ID NO: 3543 - DNA, 754 bp, Glycine max
  Intron number 6 from transcript Glyma06g12970.2 (locus Gly ma06g12970) derived from phytozome v7.0 (chr-ID Gm06; pos 10119087 to 10119840)
acttcttaattctcgtatgttcagttaatttaaggatttttttatctcttcaatcttcatgtgctttgaaacttattatcttatagaactgcaaatttaacaggacattctaggtatatcatttggcatttgcttttctatgaaaatcctagtgaatcgtctcattctgaaaattgaaatgtagcctccagagtttatttttatagatttgattcaataaggctcatgcaaaaattgaatcaagcaagttgataaaatcataaaatatagaataggggaaaatttcaccactgagaattctgttgcaagcaatttgtcaccactcatcagttgtgctggtaaagttagaccaagcagtttaagaaaaacctgtttcaataacttctgtatttttttacatatgagcattttttttaattttttttgtgtgcttccaatggacaatggttataatcacatatattttattcttctgtatggatctatatttgagttgtcaccaatcttgagttgacatcaattcttatattatatgcatgctatactctgtacggttttttcaaacggtagtctagataagcaggtagatatgagattaaaagtaattcatttgtggttgtagttgcttaacatgcttggggctcataactatgttagtatgttctgtatgttgtggcttcttttgagtggataataaggttcaagagtataaggttgattgctcaccttcaaaagttatggtgacaggataatc

SEQ ID NO: 3544 - DNA, 2023 bp, Glycine max
  Intron number 18 from transcript Glyma08g24630.1 (locus Gl yma08g24630) derived from phytozome v7.0 (chr-ID Gm08; pos 18776878 to 18778900 reverse strand)
gggatccttttcttttgccccaagacaagagggatgtaagtcatctcattacctcttggtgcacagttgaatctaatctatatatatatatatatattgaatagaaacttgtgcttcaatattttttgtcttttttgtaaatatttcatgaaccaactattaagctgttagttagaggctatgaagcacaaacacatcggctgaaggatgtgttagggtgtccgacacatttccaacaccgacttgcagtggacatgtttttacagtgtccattttttattttggctttgacactgctcggttgtatctttttttaaaaaaaataatcaacctaaagattaaattaacattagcaagctgtttctttttttctttttaatgactgtttgtcttagtatttttttgtaatactctttattaaagaacttaacaatttgttttagatttttttttggtaaagagataaagttcttgcattgtggaatatgactcttgggaccttttttgtgaggcttattatcatatgaaaattataaagcttaacaacttgtattaagattaatatgtaaatgttaattatcaatttaaatttttgtcatgttgatctcacacacacgcacacatacatatatatgacgtgtcccaatgtcggagtccgtgcttcataggttagatttttttttatcaacaaagataaattttatatatattcaagtaatagaggtacaaaggttacataggtaagatcgtccaagcaaatggttccaagatcagacttaatacagtctggataggaaccagaagctgactacaaatgatattttgaactccatattcaaatgatatcctagacaaagcattctctaaggttagaggaccattgattataatgggttacaaaagcttcataggttagatgaagatacaagacaagtgattttaaactatatctataaaatatttatatgatattttaaattattattctcttgaatgtaatttaaaatcctttaatggagaatggctaatctcatctttaacatgatggctacaacagttgcatcattagatctgtaaaaacagtactgatgtgatgtgaagataccgagttttgttaataaataaattaataaaatatcttctcatcctgctgtgaagaatccttaggccttcttatgaatacaatctttcttttcatacagtgatcagaaactggtacaagaataccgtttaattggaaagcaatcctcattgattattgtaaaatgtcttcacaccttgttcactgatttcctactgttgctactgatattaatgtaatatcattataaataatgatttgtgcaaaataaatactacaaagaaacactgcaaaaaaggaaatgtctgagactcacagacactgcagactcttcgaggactctgttacctcctttccaattcacgctcaaaccttcttccattctctctaacaatctgctttctgctccccacctgcctcgtgtgcaggatcttacaatgcaattccccaggatgattattgatcacattcccttcattgttgacaggagcctccaatccccactaccctttcccttctttttgttccacatcttagtgaccagtggctgcctaacatacttggtaactaactatgaaatgtgcttcttactgatgttggactaaatgtgaaatttcagtttagaacttgtaacccatttacttcatcagttgggtgtgcataagtcaatttgggtcagatatcatctcgtggtatctgatattgtaattcccatgttctataatggcaataatttgatatgatggtggaccattaaagattaactagtctttgaaccttttcgttttgtgttatctgccaattgcttttcttattgtcacaaatttttgcttggaccaagaattgataaaaaattaagtttacaccgttgaagataactaactataacttatgcctttgttttcagttagcagggacagcgaagtctaggttttctgctaa

SEQ ID NO: 3545 - DNA, 4421 bp, Glycine max
  Intron number 1 from transcript Glyma15g15930.1 (locus Gly ma15g15930) derived from phytozome v7.0 (chr-ID Gm15; pos 12267946 to 12272366)
ctcactgtgataagctgcataactttgcagtcgtggcatgaaggtaactttttttgtctgttcttttttctttttgtgcagggtattctagaattggtttgtttttttagttgattgcagtgtgtgtttgcttttttactgttttttgttggatggtgattgttttgaagtaaaagtagttatgatatatcctttttctcgcttgtcatgttgctgcttgaaagattaattgggagtgtgaggtgagttttctaaggatgagataagagaactagccttggtgattgctatccaggatttccagatttattctgtactcatttttggggtgtgttcaacttctttgcttgttcatgtggctattaaattgcactgaatatttaaaactctaattaggttgtatgctagtgaagtggtcatcacatttagctttaaagactggagttcatttgataatctaggtttgttaagatgcatcgtgcaaatgagttttcttaatctcatatgtctgcaactatggcgttcttcaataaggtctagtttgcttatctaaaatttagttaacaagagtaatgcctagtcctctagtttgctttttgttaggatattagaaactgtcacaattcgtttgaataggaaatgaaatttagaggaaagagaaagaaattgaaagggattttaagtggaaaaatgtgttgtttggattgatggaattaaggaaggaatgaaataagctaatttattatcggttgtttggttatattgaaaagtgaaggaaacaaataagaaataaatagaaaaagaatatttcaccctttttaaaaaggttaagtaagaagtgtcttcaaccaaaacaaagtagatgtattcagcaataaggaacagaacaagaaatctccagacacagttttacaaccaaagagaggacgaccatatcttctagcaattaagcagtcaatgcgtagctgcatttgcatacaccagaagaaagcacatacaaaacccaaccaatctgattatttacaagtatctagagtatctatgatgagtatttcagacttagttgggagctacagattacaaaactatcaattcttcaaaagcaacacaagtgaatcagaagcaacaaactcaacattttcaatctgtgcatgcaacaattcaagacaggtatcaaactatcaatccaaaacgaaataaaaaatgggcacccaaagctgcaaagaacaaatagaaaacatccaagccatccatgcaatagctcaacccgggttatcaatcaaaatccaaaattcttaatattagaaaactggattcaacacaaaagttcttgattaataaaagctgacaccaaaggcaacaaaaagggaacattttcaagctgttcatacaagaattcaacatgggtagggtatcacattaaacaattgggcaccctacaaaaaaggctatttttaaaataaaaagacatagaaaacaatgcaaaagaactaccttacggtcaacaagttttattttcatatgttcctgaagtggcacaattaaagcaaatataatcccccctacctgttgtgtatgagcagaggcccaagatccccgaaactgtgtatgtgggagagccctcttccttctgtgattcttatcaatatcccccaacggaagaggaggtggaatatgatagtatgaggttgccagagatttagcttctttttcagaggggttctaattctggtgcccaaattaacaaagtgttgtgtttggttggatggaggtgtttggaggagaaggggaaattttttcaatttgagtaaacattctccttatgtggggggattttataatggaagacataaaaggagattattatgtaacctttaattcaatcattccttattcatttataattactatgagtatgaacattttaaaattctctcaatttaggaatggaaattatccctcctgaccacttgtttctaacacttctgtccaaacataccattagtgttttagggtcttgtgacattagcagtcttacttgcctacattcacacatgaccaggatagagtcataatggtgttagtggtttgtacttagtaaattttattattttacacaatttctaaacacattttgtttcaataaagtgttaaagcattaccatccttcatggcctaagctcattactattctgcattgagttttaaaaaatctttgactcttttcccatgtgtccatgagtctttcatgttggctgtgcacattagtgactttcttcacttttccactgtgtttttcctctgctagtggtttctgtctttggctcttcaccttctttgttggtcaccaattgacacactaaccttctttgttggtcaccaatagaagtctcagcagaaaatctcagccatgaacctcccttgtctggttgcccttttgccatgctctggtacatggaggagcataagcctctcctttccgggtgatcaacacagtcagacaccttactccagatgtttcaggcaagtccctggccatagtttccagtttcagtcactcctttgtcatccttggaactgtttgactgtgtctccaccacaattcccctgtttggttttgtttcttctctggttggccttgttcctatgcgagatttctctgctcatctatctttggctcaatttttctctttggctaatgtgtgcctattatggggctgtttcctttcctgtttcttcatggtcactgtgttcttacctcttggccttgttttgttgttgtgttctcttctagccagaagttgtgatcaagttggctcaagttaagtcggatatgatttttaactctagaagtcgactgctcatgcatggctcagtatcgtttcatccatctattttttttcctggttgtgcatcattgcagacatcattttttgccatgcagcctctttagtattgcttaaattgcttctgctgttatctcttcatctgtcatttattgcttctctagtattgtttaaatgtgcttttatcttacaagctgctagcttagtaggtttcaggtggagtccttgaggggtaatactagattaggcttaaatgagcttgctttttttccagttgtactaaactagtacatgacctagatgaataatataaatagattttaggggttgcatctgatgcacaatttctctcaaaaagtttgttttgacacttctgttttcgttggtatttagtaatgatttatttggtgtcaagtataaggaaaagaagaggaagtgcttaagtggagattaaaagaaaaaaagaggggaatagttgtgattcttgtttcaggattgattggtttgatgttatacagacttaaaatggttcaaacattatttatttgataagcaaataaaaatgaaaaataattattatatggcatcaatgtttctttacaatttggttcttttgctagtgtgttgatatatgtttaaatagtgatgatatttatgttaagttcgataatgtaaaagggtaaagtcagaatgagaacgtggctacatcaagaggataaaatccctccgtccaaatccatccatggcatgatgctttgaaatctttaggtacaacggaagtgggaggatttttacacttcattggtttcatcccttgccttctcccctaatctctgatatcaagcataccacgaatcttttccctttttgggaactttgttttccctttataatttttattttctcttagtgttttgagtactagtcattccaattctacttcactactgtcctatgcttttgttttataatcatagtttgtagttctttgactagccatgaattgcaattctcattcctgcaccctctcaacaaaagtaacaagaatgaataaaaatcctcaaatcatattttaataagagtctttgatgcatagttcaggatcattttattacttttagtactttttgctgtactttttctcagttcttatgtccttcccttgcagcaaaagtgcctacatggaatttttttctccttggcttaaggaagtcttgtatcagttgctgagttttgttgcacattttagtcttcaggatatctaatatatccatgggagtggctcttattacaggctgtatgctaactgagtagctggcagtctaatgctgtacacttgctgtgagaagtcttggataaatatgcttaaaaatgtttctgttattgtttgagggatatatggatgggattatctattatgctatacaagattataattgatgcacagaacatggcagcaaataattactcaagtcagagtcacaagtatcagcagttgggcatttgaatacaagcccatgatccgagttttctatattactctagggtaacacgttatgtgtagttgttgtaggc

SEQ ID NO: 3546 - DNA, 2868 bp, Glycine max
  Intron number 3 from transcript Glyma17g03560.1 (locus Gly ma17g03560) derived from phytozome v7.0 (chr-ID Gm17; pos 2375135 to 2378002 reverse strand)
gagtagacatacttactggttttggaactattctggtaatgtggcatattgcttgtgagaattctatggtattataaatgctcagatattagtattgttgaatgtgtgtgcagttttgtgtatggtcactattgtatttcagctttattcagaggacatctgtaccttgtcattgtgagcaacggttcctctctctctcttttgtactctatatatatgtttaatagaaagcaatcaaatgtgtgtgtgtgatattttccacacaaattcaaacttcaagttggcatcagagtgggttctccggctgccgtccaccgccgtctccgaccaccaaattctccggtgagactagggttgggtgtgcctcgaggagcgcgactcacccctgcaagtcgcgtggccagaagatcagccacaagcacacgtcatctctggcgcgtgaaggccacacgccgcctgcccgccgtcagaatctcgccggaccaactccagtcgcttcgtcggccagttctgagtacggttcagcctttggttttccgtgttgaccacttggaatgtgtcagcctcgcgtttcctcgtttttctctatttgggtttcgtttttttgatcagaaatgacttcttccggccctgtgttctccttttctggaacccctactatcattactgcaaaactcaactggaaaaactacctatcttggtctgcttaagtggagttgtggtttcttggccaagaatatcatgaccatttggaaaaaggagttggtgctgtcccaaatgacaagaaagctgagtgggaaaaacttgattttcaactgtgtgctgtgctatggcaatctattgagccaaatgttttggaaatccttagatcattcaaaacatgttgctctttttggaagaaggcccaagacatatttgccaacgacattcaaagcttgttggatgcaacccagaaagttgctgctttcaaacaaactagccatgatatgattgcacatgtaggtaaagctcgagcggaagtggaagagctgaaaaggtttcttgtggctgattcgttggaggaagtaaataggaagctgaacaagttttacatggttcttattttgagaagtttacactcagattttgatcatgtgcgtgatcatgttcttgctggtgaccaagttccgtcaatggactctctcattactagactccttcgtgtgccccatgtgttgaaagatgaaaacttagctgaagtcgtggaaatatcagccatggctccatctcgtggaagaggaggaggtcgcaacaatagaggaggccgtggtggaaggagtgaatgtcctcaatgcacctattgcaagaggatgggtcacacaagaaaactgttactccttacatggctctttcctgacaaagtagtccatgtctctaaagcagaaaaatcagagtttaagttctctgatgaggagtaccaagaatatttgcggcttaaatctgaaaaatccagcaaccaaacacaatcttcctccgtaccatgtgtttcaacagcatgtatctctcaatctatggaaggtcctagtccttggatacttgatttaggtgcctctgaccatatctctggtaataaatcatccttttcatccatgtcttttccaaaaactcctcactttattactgtagctaatgggcccaaagttgcatcttaaggaattggtcaagtttctttgtctccctcattaaagttgaactttgtattatttattcctcattgtccctacaacctaatctctttaagtcagctaactcgttcgttaaatttctcagtaatctttcatgttaattcttttgttattcaggagcatggtacgggttgtctgattggagaaggacgtgaatcatgaagactctactacttagaatccagctttcatgtgtcctgttttgcaactttaaaacccaagcttttgcatgatcgtctgggtcatccaagtctaccaaggttgaaaatgatggttcctagtctttagaatcttcaaatcttagaatgtgagtcttgtcaactacgaaaacatgttagatcatcatttcctcaaactacacaaagatgtaactcggctttctctaccattcattttgatatttggagaccaagtcgtgtcacatcttttgattttagatattttgtaacatttattgataaattctccagatgtactttttatttaatgaaagaaagatctgaacttttgcctatattcatatctttctttaatgaaattaagaaccaatttgaaaaaactattaagattttcagaagtaataatgctaaagagtatttttctcatgacttatcctcatttttatcctcaaaaggtattttacatcagtccacatgtcctcatacaccacaacaaaatggcatagcagagagaaagaatcgtcatctccttgaaactgcacgttccctaatgttaaactccaatggtcactattgtatttcagctttattcaaaggacatctgtaccttgtcattgtgaacagctgtccctctctctctcttttgtactctatatatatgtttaatagaaagcaatcaaatgtgtgtgtgtgatattttcctcacaaattcaaacttcaagtagtatgatcactcgctttgtgtttgaaatgtttgaaactagaaaattatttggatgaaattgatttagaaatcaaattcctttttttttacattccaaacaaactattagggaattgagctacttgtttattagtcaagctataatgaaaaggcaaaaagaaaattttgacattttggtttgctgctttatttatcaatctgtgcagggtcctcaaaaggtgaaagttggctcttcagacaa

SEQ ID NO: 3547 - DNA, 332 bp, Glycine max
  Intron number 1 from transcript Glyma01g00920.1 (locus Gly ma01g00920) derived from phytozome v7.0 (chr-ID Gm01; pos 576598 to 576929)
gctccgtctgggctcagagttcttccttccctcaggtctgacttcacattattttcatatgcaatcatgtcaaaaacctctttctttgaatggaattcaattgaggataataatgtgagaatgtttttggttttttatcggttaattgttagtgttattaatttttgttagtagaatgatttgaatttatgatttctctcttttttttaaaaaaattagacccatcttatatctcgaagaattgtttgtatatactgattagtcatgagttacgtgttgctttcatgtgaatgtgagatttgtgttttgtgtttattttcagattaagtctg

SEQ ID NO: 3548 - DNA, 902 bp, Glycine max
  Intron number 10 from transcript Glyma06g00290.2 (locus Gl yma06g00290) derived from phytozome v7.0 (chr-ID Gm06; pos 98302 to 99203 reverse strand)
agttactctcgatctgaatcaatttgtctattgtagtaagtacacactaagctaccttatgtaattaattatccttcgttaaatgacctatcagagttagctaccaactaattttggttagtttgaaaatatttatcttaatggggttgcattttgctgtgttggcgaaaataatcaattttctttattttaaaaaaatctttgcacaattcataagagtgtgcttcttggcaattatgaagtaattgcaacgttcataatatttaaataattattatgttttagtatattaattactctgtcgggtataattcaactggactttggtggttgagcagtcctgcgtctgagacgcacttagtttctagtagctgggttctaatcacggcggatgcattttttatttcattaataaggaaggcctattcttggaatataaaagtgtttgctccgctactattctgcttaaatctggcatgatgaactctggtgatatggactagctccaatgccgacgtgaactgaaggacgaatagtttttacaagagaaccccaaagtgataatttacttggaaactaatatcaagttggccatttacccaattacccacttccattttataacccgaacatcatgcaggctgctttaggattttgaggggtggaagtagaaagtaatgcatttatttttgttctagagatgtactccatctgtccgtgctattgggctgctcctgctgtatttcctcaacctcaaccaattttgtctctgcagccattggatataagcaatttagatttgcatttgatttggcatattgatactatattaactcaatatattaatttctgtttctttctcttttctctttttcaacttgtccagctgccaattgcagaat

SEQ ID NO: 3549 - DNA, 1398 bp, Glycine max
  Intron number 4 from transcript Glyma18g51410.1 (locus Gly ma18g51410) derived from phytozome v7.0 (chr-ID Gm18; pos 60305150 to 60306547 reverse strand)
gttcttgctggcatctcattgggtcttcgtggaatgtaagtttattatttccttaatcttaattctacagtgtagtactgaggttattatagttattttcctcaaatttaaagtttgtataaaaatattccccttttctgtacagtttttttattactttttcttttggggatcagtaagttgcattgcatatcagggaacttttcagcttaccttatattttttttttcttatattggatgcatcctagatttccatactttctcatcatgattggtacttaccataaatttttagctgaataaatttccttttcatgataaaacatgttattgagagttgcaaaagtgacttaaggatcgggaaaatgctatttgtagtaactaagttactgtccttgatctggagaaattgcaaaggaatagataaagctattttcctctttctaatttgtcagcatgataagaaccttgggagaaacacatcacaaaagttagttgatgtagttggaaagcctaaggccttaaaatcctcacactagaatcccatactttcaatgtgaaactcaagtcccatgccttgcaattagatcctaatatcccaaccatgctctacatccctaatgcccatgcaggttggctgtgcactagtcctaggtgaacactgcaatctaacgtcaccaaccatgccatttgtttgcaattgagagacctggtgaaaagatttgatatcaattgataagaacctttggggaaccatgtcacaaaagctagttattgtagctggactgctggagagcccaaggccatataataaacccatacttatcaatgaaatcccatactttcaatgtgagactatcccattctttgcaatttgatcctaacacagtgctttgctatgaagtttatttgctctgtgatgaagagttgtaaatcatttgtaaaaaggatttgtgcttctctgtgtggtggactggtggtggcaaggcaaatacaaatggttatttaccttgtgctataaaaaacatgctactgtatatattaacaaagttgaacaatggcacctccctttttgtatgggtgtttataatgagtcttcttttaaaaaaattcaattatttttttcttgtgtttacaactaaaatatatgaaacctaattggaagtcagacaagtaatgatcttatacgttagaagattgctagtttcattttcatgattgttattttgataattccatagcttaactttgggaagtttcactaagaattgagtttgatttatagttctcatttttgttccatctccacatgcattctagtttgtcatatttcttatgcatgctgtatttgttgtgggcaggtttagtcctgaagctttgaactggttgtttatta

SEQ ID NO: 3550 - DNA, 1915 bp, Glycine max
  Intron number 2 from transcript Glyma13g17990.1 (locus Gly ma13g17990) derived from phytozome v7.0 (chr-ID Gm13; pos 21657365 to 21659279)
aggtactgtcatgctctgttcatattcatctctgacttaccatttttatttttattatattaaaaaactactatctgaaatctcaagttttttgcacactcgcacgacgcacctaatcttagtgaaattcatttatggactggatttttattgtcctccgttactgttagatctggcatgtatgatgtacccactgcaattataatttgctcgttacgaagaaaaaaaaattcagtttttttaaacgtggtcaaacatgtcaaactcaaacacattaaaactgcatagcaatgttatgttatttaaatttaaatagaaacataataatctccaaaattaatgaactttgtgaagtagatgacatggcagtatcatggagagaaaaaaataattataatcgactgactaatagtacctgctaggctgctattattgtttaaattctcttaataaaaaaattcagtggttcaaaaaattaaaattcaaaccatacaaaattttaaaaactaaaaaaatttaattaaacaaaaatactaaattaaaatgaaatattgatcaaggaaatttaattcgattggttaagtaaggcgtgtgaagtgttttcgtgcctgtttttgattcttaaaataaaaaaattgaaatattcaacattgtgactaaaaattttacaataacttttttcctcaagcattttatcaacatttctttctcctcgatctctgtaatatttaatgctctgcacatacgatacagcaaactctacgttattagtatacagtacgttttatgtggacaaacgtccacttcgaataaattactgagtttagctgagttcatggaagtggtgttgaaccgagtcagaacaccaactcatcctcagattctgatgtcacattgattaattaaatgacacagacggtggttggacctcaaacacttttattttatttgactatattgatgatatgtgacattgagcccatgagggagattgatacatagtgtgaggatatgcaagaggtcaatttttcatattaaaaattctggagcaagttgttaacaccaataaaatcataccacgtgagcaatgtagatacctgttttgcttatcaaactttggattgcacctttggacttatggttacttagttagcattttatttagcacctagcagttacttgtttagctcaaagtaacaatttacgggttaaattatattcacgttttttttttagatttatttgatatcttttcatatctttattgtcaatataactacaaaaagtaaagaacacaataatatattatacagtgttgtgttttatatgaattgaaattaggtagagagaagaagaagaagaaaaaagttgtggacgagaaatttgttaaacttttgtcctaatttctatgtattcttgcgtgtattgcacctgatgatcatcttatccaatgaaggcggtgactgaatgattaacatgtggcacaggtgctttatttggatttcagtccattacattccaattgtgaaaatgcccagaataaaaacatactatttttaaaaaatcttggatgagatgagaacctggttaaccactgtcatgactcatgagcacacattatattcaaatccggtggtcccaccatatacatatagtgtatgaatgcaattggtttggcacacagttgactgtaaatttttttccctgtgtttattgcttctgctgctctggatagaaatatgttatcggtcggtccctttgcacattaaagtaatctactgcgttttatttatctattaatttatttgttagagtaatctattgcgtctgcaacatgcaactttatcattgatgcttctgattatgattaataactataattatgcaggtcttggctagcaaaacaaaaatttat

SEQ ID NO: 3551 - DNA, 782 bp, Glycine max
  Intron number 1 from transcript Glyma18g51980.1 (locus Gly ma18g51980) derived from phytozome v7.0 (chr-ID Gm18; pos 60722364 to 60723145 reverse strand)
gcgttcctcggacacgtcggcagcaagacctcttgtgagtactactctcctatcgataatttgttgatttagttttgtcaacttcgttgagattgcgcgcgcgtgagagagagtttgtttaggttgagctagcggtttttgaggttgtgagatctgtgtgtgttgtagtgtttgagacttcgaatgatttggattttgttgttgtgttgcataatttgatttctgtgctgtaaaccttgttttgtttggaactggagtcggtgcagtcgatttttcatgcatttacatagtcattgaatgatttggatttgttattgtgttgtctgatttgattgctattttgtaagccttgatttgtttggaactgtattctgtgcattcaatttttttcatgcattcaggcagttgttgcatttgtaactgactattggatgaagattggacgactcggattttgaatgtgtattttatggtctggtttatcaaaataaagcatgagtcatccgatcttcattcaacggatctgagtagatgaatgtgtgaatgcgtggaaaattgtcttagatgtctttatttgtgatttacatggtgtctgatgtgtttaagcacattttgtgaggtagaatgttgttttgtgagagttgatttatcggagacatgtgaataggatttattgtttgtgttgtgggagttgcgtgtggtgcagcggttgatttagttttgctttaaatttggacaactgtgtggtgttattgttcttataatgctggtgtcaggtggtt

SEQ ID NO: 3552 - DNA, 3960 bp, Glycine max
  Intron number 2 from transcript Glyma11g27000.1 (locus Gly ma11g27000) derived from phytozome v7.0 (chr-ID Gm11; pos 26580801 to 26584760 reverse strand)
gaaaagaagcaggtcattgagcttaattaattcctccttacgccttttattcactttgtgttaggtctatgttttgctttcatttatatgattcaaagtaaagtgagatgattgagtaaacttacttctgattagggtaatcttctaaaagttaatttagtacacacacacacacaaggcaaaaattttgtcacaaggcaaaaattttgtctctttaaaaaataatctaaaaaatacttgctaatatatttaataaagagtctcacttaaaaaataccaagataaatcatcataattgaaatgataaataaaaaactgttaatcctaatctatctaaattcttccccttccttcttggtcatcgtcattgaaaaatgcaacttctaattcttgttcatcaagggataaattagcaacttcaagaattctattatcattaagtgattcaaactcatctcctataatgtcccacattttagtttctccttgatgatattgtgggaaatttcttgaaagaagacgaagattactatgaacaaagactggatcctctgcctaatgaggtgtcatcttatttcttttgattgaatgaatgaaagagtaagtactttagtttctttcacaacatgatgatgaacaaggttgccctaataacttaagagcaatcttttgaagtgtaggtgcatgagcaccatgaattagtcaccaagactttgcctccattagaccttctcttctcttcgtaccccattacccagaggctcttcgctatgcgaaggtatgggggagggatattgtacgcagccttacccttgcatatgcaaagaggctgtttccggattcgaacccatgaccaacaagtcaccaaggcacaactttaccgctgctccagggctcgtcctccattagacctctatcccttaaaaagtcaatatcatcaaagcttctcttccaccaaaaaagtttgcaaactctacattcacttgccttctttcattatcatcatcaaaataccttttgaagcatttcaatctttcatgagtaagttctccatcttggtgtggaggaattctatttgaatcttcacttagccattcatgactataatatctataataaaaaaaatgattataaattaatataacatatagaaatgtatgaaaaaaatagacttcataaatgaaagaatataatgtatcaccatggattcaaagaatgagctaaacaatgaagatgtgagctactcttaatccaacggtcaattaatattttatgtactaccttataaaaggtagattcttcaccttctccctttctttcatgtcgatatatgaccttcacattttcaatcattgagttccacatttcatacaccaaatgaagacaaactacatccgtatctgtttttctaagaatatcatagataggagtagtgaaagaaagtatataatcaaccttgtcccaccaaatgtcatccaatgctgtctctttcacaaattttgccttgttaatatcatctgccttataagaagaccattgctcactaataaccatctattgaagtcattttttcaaatgtttaaacctctttagcatcactatggtggaagcaaatcttgtgggagcaagagctagcaacttcaatgtgttgaatgaattgaacattgatagtctcatagaatgacccatgataaaatttctaacatacatggcaacgttagtcatctgtgtgatccaacaacattattcataaatctcattatttttttctgtgttcttggctgcgcatatatttttcaatgcaagatttaaggtgtgcacaacacaaggatagatggaagaaaactcaacctctatgatcaaacctgctgccttacatacaggtgcattatccgtaagtaacaatttatactccattcgagtgaccaacctctataattacatccctcatttgttcagctatgaaatccctatcttttacctcataagaacaatctaaggcctttgaaaacatcggtccactcttggtcatagactcacagccatgaaattgataagaggtcttctctgaggatcactccacccatcatttacaatactcacacctttttctttacatgtattttttattggttgtaataggttctctacatgtcttctttcatttgcaagtaaggttgttctcaacttattgtaacctggaggttgatacccaggtatacaattattgttggcagcaaaagagaatgccttcctatagtgaggattccttgctaaatgaaatgctaatcctgaagaataaaacattctggcaatttcataatcaagggtctctctagcttgcatattaaaaaaaccttcaagagtctttatcttttttggatcaacattggttgtctcttggttagacatcggaggtaaagagacatgttttttctttgacctctctattcttaatgtagtctcattatccatctttgtaagttccgtagggtttgaaggagttatcttctgacaacttctaactcctttttttgtaatttttagcaagtgtgtccttactctagtgtaagacccattaaaaactatttcacagaaattgcatctaacttcaaaatttccacagcctccacttagacctttaatctttgaaacataattccataaaggtttggtgtcttcaccttgttctttaacttgattagaaatatccatctctacgattaatcaatataaaaaaataaaaaataagaacacaatgaccaatttaaaaataataaaaaaaactatgaatggttaactgttatatttaaaaactactatcaaattaggatataaaattaaaattcagaaaatattaaatgtattagtaggtaagaaagtaaagaaaaaaaatattaaactaaaaattcttacgagtctacgaaagatgaagaaaaaattataaatattggaaagtaaagaaaaagtttcaaaggtgcaaaccttacaaagttacaatgcacccagttagaaccaaaacagtaagtcagaggtcagcaatcacaaacgcatcaaacagcaagtcagagtcagcaaccgtaaatgctacaaaagtcataaactgaacaaatggcgggagcaacaaactcaaaccaataacaaatagacatgaacgggggaaccaataacaaatggcgacacgtgtctagtgcatgtccgtgccgtcagcgtatcggaaacggggacattgctatttggggccatgtcggtgcttcacacgcgtgacatgtttttttccttatatttcggtggaggctactttgtaccaatatcatggtcaacaaaaaaaaagagggagtgatgttttctttcacataaattgtttcccatgaccaagtattaaactcatttaaccaacaatccacctatggtagcaggaatagtttgagtcataatagctaaaatattcgtttcaaaagtttgatatttggttcatggaagtgatttgggattgttgtgatgtgagtggaagtgtgtgtgtgtgagtagattctttcttattaatgaattaatgaatccttatagcaatcctaaattatcagaattccctatttccctgtatctgtacaaattttaggtagaatctaggttgaacttatctctgatgggaagttggtaggggagcgacattgccattttgttagaggtgtagtttattttttgtgcttgatcaagtatcctgttttcatatgtaaagctgtaagattaaccctcaggctggggatggtggtttggtaaaaccctcccagaatggctactaaaattacaagtaaaattcacctagggtcaatagtccacttctactatagttgatagatgagtctttgtttcattactccttttacctggaattttgggtatcaaaatttgacctttggtatttttgctgtgataattgactttccaggtcgtattgtg

SEQ ID NO: 3553 - DNA, 596 bp, Glycine max
  Intron number 5 from transcript Glyma10g37110.1 (locus Gly ma10g37110) derived from phytozome v7.0 (chr-ID Gm10; pos 45157302 to 45157897 reverse strand)
gaggcctatatcttgatgtaaaaacacctactttttgtctttgtagttatcattttacttgtgctatgcttcttgtatcatgatgtatagagattagagactgagaaagatgatagatcttactcttgagccggtaggggtgttttttttatcattttcattaaaataaatgttttggatgaatcgtgatagggagaactcattggttttttgcttcataagaagagtaataattctttcctctgaggaggaaagctaatctttattttatggattagcccttatcctggaagtatttattctgcagttttttaaaacaaagtgccactcactcatgctctttggacacaatttaggattagttgattgtggtatttgccaactttaattttactatggtgatgttatttatttggatttggaaattatggactgaaatataataagttttccaatatttctctatttctcctcatgctttgctattacgctgcataatagtttcaatgataaaatacatggacaattgcatgtaatgctttctggctcaatcactttcaggacagtagagacttgacatcaaatagtcctagtga

SEQ ID NO: 3554 - DNA, 2076 bp, Glycine max
  Intron number 1 from transcript Glyma06g22130.1 (locus Gly ma06g22130) derived from phytozome v7.0 (chr-ID Gm06; pos 18875507 to 18877582)
cataaattttaactttttttttaattttggttcttgtaagttttttttattttatttttagttcttctaaatttgtgtttttcagttttggtttctataagaccttttcttatttatttttcgtccatataagtttccatatttttaattttagcttttttaagatttcaatttttttcatttttagtcccataagtttgtgttcacatggatcaaaactggaaaaaaaacacataactacatagactaaaaatgaaaaaaaaaagtcttaccatatcaaattaaaaaaatacaaacttacaagaactaaaaataaaaaaaaaaccaaaatttaaaaaaatataaacttatatagggattaaaaatatttttaaccaaataataaatattataaattaatgagataatttcattttttttcttgtgaggttaaaaatgaattttaatagaaaaggaaaatggctagtacacgttactttatttactaaaaaataattaagtaaaaaaatgaaacgatgataataattttagaaaaaatataaatcattagtaataaatttaatattattacttaaattaattaattttcttaatattgaagtactttaataatgtctatgcaactattgggtagacagtttttgtgcataaaaaaacgaaacaaaaactgaataaatggaaaacagatgcagaaggactaaacaattattttagatattatattagtcatgaaacggagaaaatgtcaaacaattttttataatgtaagtctttcaatttaattatttctttatttaatggctataacttaattgataatatatattaagtttgtaaaagaaaatttgagtttaattttaataaaataaacttttggagagaagcaataagttttaattgtttagaatgagaattagtctcataattgatacaaagagtcaaagcttatagacacagtcataccaaggaattcaagaccatacttagaatgattacaaaaatttaattacttttttatcattttagttattaaatatatgttaatattataattgtaatcacaagttattttgaattttgtactaatatgattattgatataactttcaaatttttcaaagtctaaaatgagacaacattttataatcttaaagactaaaatagtaatttatttcttttaaaaatgataaccaaagagaaaaacatagatgacacttttaatttttatatgagtaaattacattcttaaagatggtataacatttttcaaataattaaaagatggtattaatataatatatagtgaggtgtgagtgtatatattttcaaaaacttaatgagattaatataaaaataaaaaaaggaaaatttttatgtaattctacaaaatcttagaaataactaatgtctctttattatgattcttaccacacacactctctcaatttttcaagaatcaaggcatatgccaatatgaacgagactccactggaccctataaaaactggagagagagagagaagaaaaataaaaaaataaataaaaagcatagaaatttctctgcagaaaaggaaaaacatttattatattttccgtgtgatatgttattagcgaccagtgctttttttttttttttttttccttttctgtcgtgaaaacattgtaggttgtgttgtattgtatccgttctgcggagataaagctgtagcgggtctcatttcttgtgtttggaggtacccaacttgcgagattccatcatttttcatgtcttagatttcatttcacaagagtgagcaattaattcccaacaaagaaaactttatttttctttttcttctccaatgccagaaaattaaagggtcgtgttcgtttgttgttgtagtaaactgtgtgggcgttatcttcgatttttttttccgctcaaaagggtagcgtttgttggtgtaataataaactgtgattgttgtctctagcatttgaagttccgagaaagttgcgaatttccctttttttgatttcctcttggtgtgggtattctaaggttcttatttagttattcttgtgtgttttcaagtg

SEQ ID NO: 3555 - DNA, 5590 bp, Glycine max
  Intron number 18 from transcript Glyma12g35110.1 (locus Gl yma12g35110) derived from phytozome v7.0 (chr-ID Gm12; pos 38263730 to 38269319 reverse strand)
acttgagtcagaattcccttcaatcaattccagtggtaacatttgtttttggtagaaaacagggattaagcatgtgtaactgcttgtttatttatatcccaagttatgataatatccttgaattgatattgtttagacaatgactgtaacttattatagtattgtaaagagacctgcagttattcaacttcagtctcagttagttttaactaggatagttagattgttagttagttaacagctgctcagttatgacagctgttaattagttgtgacagctgatctaatatcagttctgtctataaatacaaagatctatattcaagtcaagtggttgatgaaaactcactttcactttctcagatttcttttctctttaggttctcaaaatatcttctcttagaattctgttatggtatctggtgcttggtaagatcaacaatggttgctcaaaacaactcgttcattacttcttcttttcctaatttcatttctcacaagctcgatgatttgaccttcctgctatggcgccaacaggttgaacctattatcaaatctcatcgacttcagcgttttgtggcaaatccacaaattcccctgcaatttctcactgaagcagatcacacagttggaataaaaaatcctgcatatgaagcttgggaacagcaggatcaagttctcctcacatggcttcaatcgatgctttcatcattgattttatcttgtgttctcagatgcgttcattcctatgaagtatgggaaaggattcacaattattttctcaagcaaacaagagtcacggtgcgtcaattgcgcacagaattaagagttacgatactcagaggaaaattgatgcgagaatttttgcttcaaatcaaacagatctctgactctcttgcctcagttggaagtcctatcatgcttcaggagcatgtcgattcaatacttgaaggactcccacctgattatgactcagttatttctgtcattgaaagcaagttcgaacctctaccaattgcggaggtagaagcacttcttttagctcacgaagcgcgtctgaacaagtttcacaaataaacgcttgctgattctccttcaattaactacacacaagtaaaccctaagtctttctcgtcgcatggcttcgatagctacatggtgccaaacaagaactttcaacaatcggaacctgaaagtttctcccattatcagggtggttctagccgtagtgatggttttaaccgcagcagtggccgttgcagtggcggccaaggccatggtggtgggcggttcgctaatttccaatgtcaagtgtgctgaaatatggccacactgcatcagtttgtcatgatcgctatgaccagcactatcaaccaagttcaactttggttcttcattaccttactagtcagaattcttcttagaattattcaagtcagtcgcagaacaacttcaattctggctatggacagaataacactagttcagggcagaactatgctgcttctcgcccttctaatttggaataggtgtacaaccgtcgacaactatcaaaatcctcccagtgctatcctgattcgggtgcttctttccatgttactggagaatctcagaatatccagcaaatagaaccttttgaaggccctgaccagattttcattggcaatgctcaaggtctgccaattacttcctctagattttctacttttatttttcctaataattccaaagtgtctttgtctctcaatcatcttttacatgtgccttgcatcactaaaaatcttattcgtgccagtaaatttgctagggacaatggtgtttactttgagtttcattctaattattgtgctgtgaaatcccaggttaccaatgaggtcttgcttcaaggcagtgttggtcctgatggtctctacagtttctccaacattcagtttcagaactcttcttcttgttctgcctcttgttgtcttttcttagaatgtgggtttgggcctaactcgacccacattctaagatggtatcagaacctattctagatccatgcaaagggtcactcatcatttatccatgcatcaagtccaaaagtgttgggtatgatggggtgtattgggaaaaactcaagttccacattggctagagataaggtcaagatagagtatataagtgaggggcaaccttcatcctatgagctagcttttggagttgagttaggcccaaacccccattctgagatctttctagttctgaaaattcaactgtaaatccattgcaatttaacaccaaaattaaaagcctacaaactgactggggaggggattttgcattgttgaacttggtctcactttgttgcatcatgcttctttacctctgaaattttgggattttgcatttacaactgcggtttatctcatcaataaactacccacagcctctttaaatttctctattccatatcatgttctgtttaacaaattctctgactataacttcctcaaaacttttggatgtgcttgttttcccttgctcagaccctataacagtcacaaattggacttcagatctcaagaatgccttttcttgggttattcaacttctcataaaggctataagtgtctttctccttccggcagactattcatatccaaagatgtcctttttaatgagtccaagtttccttatgctgaactgtttgaatccacttgttctcttagtcagtctttgtcatcccctacttctttcaattttccctcaatacctattatacctaatgttcagaataatattcagaactcctctacttctcatcctcacacaaatgcttcttctgcatctcatcatttacccaactcaccctctgatcagtctcctcctgatcaatcttcctcttcctctgatcagtctcttactactcattctcagcatgttcagtcagctcatctttctgctgactttgcagtctctgttgacacccctgtttctgcttctcctagccctgtattgagaagaatccaaatcccacattggctacagatagtgccaagatatagtatataagtggggggcaaccctcaccctttgagctagtttttggtgttgagttaggtccaaacccacattataagaacctgtatcctcctctgtggacactgcatcttctccctcccaaaccagcaaatattcatccaatgcaaaccagatcaaaatctggtatacatcaacccagaattcatcctacacttcttctagctcactgtgaaccaaccagtgtgaagcaagcattgactgatcctaattggaaattagctatgcaacaagaatatgatgctcttatgaagaatactacttgagacttagtgcctctcccacctgataggaaggcaatgggcggaaaaagggtttttcaactgaaagaaaatgctgatggtttaataaacaagtttaaggctcgatttgttgcaaaggggttcaaccaagttcaaggatttgatttttctcctgtggtgaagcctgtcaccatcagacttatccttaccttggctgttattaatcagtggaaactatttcagttagatgttaacaatgcctttctgaatgggcttctcaatgagagtgtctacatgtctcaacctccaggttttaaagactctaattcttcattggtctggagactgaatagggctttgtatggtctcaagcaagctcctagggaatggtttgagaggctgcagtttactcttattcagtttggttttgtagctagtaaacatgatccttctttgttcatctacgcagcctcagtttatcttttggtctatgtggatgacattattatctccggcagctccattcaattgattcaacagctcacctctcaacttaatgcaaagttttctctcaaacaacttggtcaacttgattattttgttgggattgaagtcaagactttatctgatagttctctattacttacacagagcaaatatattagagatctcttacagaaaactaatatgacacaggcacaagttatttcttcccctacgacttcaagctgcaagctcactacaacaggctcagatttgtttactgatcctaccatgtatcgttcagtggtaggtgccttgcagtacttgactataactagaccagtgataagctttgctgtaaacaaagtctgccaattcatgccaaatcctttggatactcattgggctgcagtgaaaataattctacggtatttaaaaggcatggttctttatggtcttcatttacgacctgcagctttgggtcaaccttactctattagagctctttgtgatgctgattggcatcagacactgatgatagatgttctacttctggtgcgcagctatatactttggtcctaatctcatatcctggtggtctcccaagcagaaagttgttgcaagatccagcacagaggccgagtacagaagtctagctgaaaccaccgcagaaatttcttggatcaagaccttgttaactgaattaggagtaccattcataactcctgtgatattgtgataatcaaagcaccttggcactcactcataatccagtacttcatgcaagaacaaagcatatgaagattgatatcttttttgttcatgaaaatgtgctcaccaagcaattgattgttcatcgtattcctgctcttgatcaatgggcagatgcactcagcaaacctctctctccagccagatttgtttttcttcgaggcaaactcaatgtaattgagactttgtcaaagtctcaaccaccttgagtttgagggggggtattagagtattgtaaagagacctgtagttattcaactgcagtctcagttagttttaactaagatagttagattgttaattagttaacagcttttcagttatgacagctgttagttgtgacagctgatctaatatcagttctgtctataaatacaaagatgtatactcaagtcaagtggttgaagaaaactcactttcactttctcagatttctttcctctttaggttctgaaaatatcttctcttagaatcctgttatagcttagggtccagcaacttgtatgtatgcctcttgaattctgatcatataaaagttcatattggcttgaaagtaactttttagtgtccacttattttcctctcaaccttgaaaagccgcttgccattttgttggtatttttcatgtcaaaatgctgttcttattttctattatagataatgtatttttacagtagcaagttcataaaattggatttttgtctactatagactgatgattgaagagaaatgttacagttcaatatttacctctggtgaattccttatcatacccccgtaaattattagtgatcagagagcagactaacttacatgaatagtttgacctctaaaggttgagtcatatagatgcagacacacatgcaaactcagctcctaaaacttgtctaatagacactcacactacgaactatttaataaatgctaaattttttttttttttttttttcatttgcttacctatgaacttgttttcaggggttaaaagatctcacttctctcaaggaactcga

SEQ ID NO: 3556 - DNA, 3805 bp, Glycine max
  Intron number 3 from transcript Glyma14g00230.1 (locus Gly ma14g00230) derived from phytozome v7.0 (chr-ID Gm14; pos 17024 to 20828)
cttcaaacatatttgaaaggtatcttgcttttgtaatattctgttgcttttataccttggtagtggtcagttttcaagaacaaacatgggctaatattttaaaaagcaaaggtgataaataaacttgtttgccaaaaaaaaatgatgaataaccttgttaatgcaaaatcattggattttttttttaatttattgatagaaaaaaaggatgccttctagggtggtggatagtggttgactaactttatcctggaattgtatgaaatttagatttagatttggcttttgttgcggaggttttgggtgtgttggtgccaaattaggattgttgaaatactttgttaaggatttggaagattagaattagttctgttagtaataaagtataaaggaggagggttgtgcacttgtgctaggccctcgacaactaacataaagttagtcaattggaaatatcacactgtgtgactcgagtatagtgtcaaatgaggtatagtcgttgcattgatgcctgaatgtagtgttaaatgagtaagagtcctcacattttcctggatgagtgtgtgtgaagaagctagtttagaggtgcttggttaggtttcctggatattggataccataaaggggggttagggattaaagacttgatcaaatttaatgaggctttgcttggcaaatgggggtgggagctggctaataatcagaaccagccttgggcaagaattttattgtctaaatatggtggatggaaggatttgatctctggaagaaacaacagtattttctctcattggtggaaagatctaaaggttgtctttcagcagcaggacaacaatagcattagtaataacctgaagtggagggtgggttgtggtgtcaaaatcagggtttggaaggacaagtggttgagggataatttaactctccaagacaaatatctgactctgtatcaaatgagtagacaacagacttctacaatcaacttaattgggaatttgttgaggatagatgggaatggaagctaaactggaggagaaacttttttgaccatgaaattgacatggtagcagctttcttggctgagattgagaatatccacatccaacagtccagcagggattttctaatatggaaggctgaccctagtggtatttattccacaaagtcagcttataaactcttgcaggaagctgatagtgatgctattgaggacagtgcatcgaagatcatttggaatctgaaaattcctccaagagcaattgctttctcatggagattattcaaaaacaggttacctactagggctaatctgagaaggagacaggtggatgccttcctatagctgtcctttatgtgaatcggaagaggaaactgccagccatgttatgttcacttgcaccaaaactacgattctttggtgggaggctatgagatgggttaatagagtgagtcctctccccatagagccaaagaatcactttctccaattctctcactggaataggcaaagcacagacaagagatgggaggttttatggataactttgtccttgactatttggaatcatagaaacaacttggttttcaataaccagattttcaaccctgacaaagtcatggatgaagccttatccatacttggtcctggttaaagtgtttggagaagggcttccaaactcattttaacatttggtcaactaacttgaaagatgaactctcttagagggatttgacctatcttgtcagctgtattgtatttatcttttatagttgggtttggcttttcattgcctatgttttatttataatacaatatagatttttgctgtgcaaaaaaaaaaaacacaatatgtacctacaagagatcaaatgggttagagaaaaaaaaaaaaaagaagctaaggagctagataccacaggatttaaactttaatacatgagaaaaattagaggaataaatggaaggctattattgtagacaaggatttcaatgatagcgtggtggatttaaaaagaattggggacaaaatcttagccgtaaaattagttgtggcataagagatcatcaatatcatcagtgcttatacaccacaagtaggattggaggtactcgtgaaagaaaagtcttgggaagatatggaggggttggtacaaggccttccataagaggaaaagattttcttaggcaaggatctaagtggatatgttggtcgtgagtcaagtcaattttcaggagctcatattggtttgggttttggaggactaaatgaggaaggacaaactatttttgatttctctacgacttataagttgctcataccactcctctcattctctgtgataataccagcactgtctctcttgctcacaaccctgttcttcattctcgaactaaacatatggagcttgatcggttctttgttgggaagaaggtcatcaccaaacagattgatgtttttcatgtgcctgcagcacatcaacttgctgatattctgaccaaggccctctctcctgcttcatttgtttcattcagatccaagctcagagtagttcaaagaatttcttccaatccctggtgagcttgcaggggggtataagagtattacattactcaatgtatttttgctttatttcagtaagctgttagtctaactactatggttagtagttagtttgtgattagaggttattagtgtgtaacagctggtgacagttgtatcaactaacttaggttagttgacggttaggttgttagttgttagatcatctatataatctataactgtaatcagttgtgacttgggttgaataacatttgatttctcaatctcattctcttctcttttctcatattctctcaactctattaatttggaatgagacgtctaagaagatttggaagcttgctgatagcaagaaggaggtgcatatagtaaacatgcccaaaaggaaaaacatagcaccagcatacctaaaggatttcgtgtgatgcgctgagctggccattcccttagctttgtctgccattagtgccgtagattcctttctgttaggattatgctagcagaagatgacaaattctgttattcttcataccactatatatatgatgaatgtaataaggcaagacatgaatgaaattaccttttctctcaattgtttccctcttctcttgaattcttcggaggattctggccctcgaagcccagagctgctatcacttgcctgagtagtcctgagtgaattaaaaggttttggaccaagataaagagtgctggtggcagaatgaaagttttcaagactaggtaagaaacaaaagagtttgctttaaaactttacatgggtgcaataatgcagaaaattggacatggtatcaaaatactagaaatgagataagaaaaactgagtaaaacatgatctaaagctttaaaaggtttttgtgcaaggcggtgtcttagaggtgtaatataaaactatttatttgtctaaaccttaacagcttaagcttttggaattgttagtttgtaactagttctgataaaagatttagttatttggagtagaacgtcatgttggaggccataccttgggttttagggttataactgtttccttgcttctttattgagtcgtttgcttatatggtgtacttggagcactgtctgcttccaagagttaacgcttattcaaggtctgcagtacatatctagtgacagattttttatttacttatgtttgtttgattttgcatcttgttttagtatttaaactcttataattccatcagatatttgcaggattgtca

SEQ ID NO: 3557 - DNA, 1184 bp, Glycine max
  Intron number 8 from transcript Glyma02g40490.1 (locus Gly ma02g40490) derived from phytozome v7.0 (chr-ID Gm02; pos 45758270 to 45759453 reverse strand)
acaagtacctaaagagtaagttattgattattcttctcaaattgggtgtgcaaactgcaaaatgacactagttattttgtatgttctaattgcacatttattgttctaggaatgaaaatatcttgctatcaagcaataattagatctctcccgctaacaaaaaaactaacaaactaacaattcatgttttccgaaaaaaagagaggcaataattagatactagtatctgtagattctgtacaatttggtttatcttctaaaataaattttagtaatgctgtgttggctatttttgtcttatgagaaataggtattagtttttttttattgtgtcttcaattttcttgtgttagtaagttgaatttcactgttaggaaaaatgcaagtcctacattggctagcgatagtgccaagatagagtatataagtagggggtaaccctcaccttataagtcggttttgtagggttgagttaggccctaacccaaattataagatttgctatatatgcattgccttcaaataattttccttctggtgaagataaattagttagtcagttaaaaaaatacattctgaaaccaagctttacttattgtctggtctcatttttggcatgcataggtgaattcactgtgttcatggcttcatgtgtgttacattttcttttaatgaaatttgggacttaattttggataagaagcatataatgtatttaagacttaaatttgttgattgaattggaggaaaggaagggcaacactttttatggtactcatccaatggattttggagggtttttgctgttgggcatgtggagagattaactagctttgcttatttctatcacagaagtaggcttgttcatgcaaaacaccaagatgcattgatgggttatgaaattaaagataaatattaaatatatgctagttgcaaccacatattatgcggtggtgttctgaattgcagcagcttctgtgttattcctttgcttctctgttaatgaggatttcttttattccttttattcattttacgatttcttcttaattcttatctttaatgccttatcagaaaaacggaaaatattggcagcttctctaatttattatgctttctcttaattctttttcaaaattgatgttgcttgttctgctgtggcttgtaatatcattgtttagggt

SEQ ID NO: 3558 - DNA, 3469 bp, Glycine max
  Intron number 11 from transcript Glyma06g22870.1 (locus Gl yma06g22870) derived from phytozome v7.0 (chr-ID Gm06; pos 19759533 to 19763001 reverse strand)
gctgagctccttgctgctgaacaacgtcctttcaggtaatattatttcttgatttccttgtgtagagattctagtagataaggagagaatattaggccgtgaaaactgtaatgtgccatttgatatctcaccagttaggcactcaatctttaagaagcgaagatgttacatatactttcttagtagtttccatcttaaattatttaaagaaaaaaattacatcttaaaaagttaacatcttgaaattagtctgtacacagttatactgatggactggggctgcatagttgtcctattgttcttagttgctatagtgttttgctatttgcttttatacattacctttatttttggtgaattaaaaaatgataataaggataggttacttcaattctaccaactagtgcaccagtcacatacctgggaccccaaaaggcattttcactcaggaattttctgcatggaggcttacttaacaggtctctaggtgttagggatctccctttgggagtgatgatcaccgagcaagattactaacgaagggataattcaaaccttacacttggggagtgggacatcctctatcccatacatatatgtactaataataaaaggaaaaaaattataattaattaaaagtttttaaaacatatttaaataaaattatttcaaaaggataaaaggttcacattcacttttttcgcatcataataaaatttgtccaaataaataataaaatcatctcggctcaaacaaaaccgaccaagacttcatgcaattaatatagaaacttatatttcattatcacatcctatttgagcattgtgttcccgcgtcttctagcatgaggttcttcataaccattcacctaatcatctgctctcacgaacacaaagttcaagataatcacaagatccaaacaaaaataacacacggggagtgagttatcacattcctaactaatacagagaaacgagacaactagatatacatatcatgtaaatgagatacaacttacctaaacatagctcacttaattctaccactttgtcatgtaacatcataatacaacacgtctcattcattttcatatcattcacgtactcaaagatcaaaatataatatcactaaatcaatcaatatcaataaatacataagcattatgcaatagatacactaagactcaagcctatatgcaatgtggtaccatgtcaatgaaaaatcactctggggcgtttaggagtacataaaaagtcacactacacaatgggtatgtcaaatcactctcactaagtaaaatcataaggtgaccagtcaggatcaatccgttttgtgagaatgctccaaccatatgggattaacataggcttaaaggagcactcaaatcgagtgtctttacccccaaggcctaaactccgaagaatccgttagggtctcaccttcctgattcaggtccaacccctaaaataattctttttacacacgaacactgctcatgaattatacaatacccatgaccttacactcatgtttcaacacgtttaacacattgcgctacaatttaacattggttcctaacaaggaaacctatatttttcctttaacactgtgcataaataattttctcaaggtaaacactggttaggttattgtataattcacaactcacaacacaggtattgtcacatcaagtgttaaacacacttattcgcaaccaaatctcatgtccacaatttcacatctcataatgtcacaatccaccattacatgtttacgtgcatttcgcaaattaacacatgttcaactttgtacttctactcaatctccataacaatattataatttcaaagcaatatgttatctcacaattcgtcacatttaatttatcacttatacacaatttcaatcataacttcatgatcccaatataactatttattacgttaatcctattgaaaacacaaacaaattatacaaaaatgtttctcaatccacggggagtaaaacccctcaaacaatttcacagaagaattttaatacaataaacattttaaaataaacctcaatttaatcctctaaggatccctacacatgatcattctaacccctaattgtgataaactcatcccttacttctaagtgggctcacgtgtgtttcactagcgatagcggcatctctaacggttctctgacattcctcaagcttttcctctggttgttctgataaagttttcaaacgttaaagagaagagaaaagattgaaatttttattccactgtttgcgtgcaatgagtatttctccctccccatacattattttgcaaatcccaatggtgaagatatgaggaaatgaattgcgaacctgatgtccaaatttcacaacaatccaacagttaacaagttcgggattgtagttttactgggacagaatttgggtctctgtggaaaaagagaaagctacaatacagagggagtttctctcagctctgacattttttcgtaaattccaacggttagaatgtttggaaatgagttccgaacctggtgctcaaatttcacaacgatccaacggttaacgagttcgagatcatcattttactgatataggtttgagtgtgtgcgaaaaaaagataggattttggaaggagaaaggaaaacgaaactgagaggaagagaaaccacaaagactaccgtcagtctgaaaaatgacctaacatatctctatctgtttttttttttactttccttcaaaccattattttaataaatttatttctccttatttatttaattacaaaaatctcatcattttttctaaaattctatttattttaaatgaaaaacctttttaatttgatttacgaaaaataggatgtaacatggagtgcaaaatctcatctataaactttgagctagttcagccagcctcaattggcttttttgcattcaccaaaaaaatccccctttttttggggagagggtcctatcatgagaagcattagttggaccccattttggtttgaatttataattcttcactccaattattaggaatgtttactctgccaagaagttggctgtgatagactttagataatatctggcatgggttgccaagtaatgtatgtagttgacacttgacagtagcaacaattgtagggttccctttctatgatctctgaaaagaaggatcaaagcatccctgaaagttccttcatatttgagaccaattattgcaaggaaagtccacactgaacaatgaacaatctcactatctttcaccatccaagcactacaagatataacctaaggaggcagcgtttctgcctccatttatgatttaaatttttgctttccattaaatcttttattgatggcctttacatggttgttatttttctattgtatcagaagagaaaagacggacaaatataacctttttcgattttcttgttttggtacagaccag

SEQ ID NO: 3559 - DNA, 1372 bp, Glycine max
  Intron number 4 from transcript Glyma05g30710.1 (locus Gly ma05g30710) derived from phytozome v7.0 (chr-ID Gm05; pos 36014520 to 36015891)
caggcagaggcgtcgaacaggaatttgtggcacaggtatgttattcattaccaatatttgttgacacgttttctatatttggaggatgtgaccaaaaagaaattttcagttgtgcccaagtattcttagagtttaatgtttttaaattttgatttattattttttttaagtccaactttgattgtgcaatgatgaattgcggagttgaaaatttgcgtttcatgaagcccacttgttttggtgtgaaaaattaattcttgcacttttcaatgaaaaacacatgtcccaatgtaaatttatgacagattaatttggacacacatcctaattatgttcattgattcaaattaattttatcaagatcaattccactcaacattaaaacaaatgggctctaaatacatttagctagtagctggttgctagtggtcatgaaccaactatctcaaaagctttagatattgggtggaagcaaatgaatgattttatatatctaatgtgtcccctcatgaaagaaccctttgggcctatagtgtggatagcgtgcaggctcaccaataggaatctcagggagaagagctgaatgatcacatgaatagcagtagttattggtttgttgtgactgagtccagttagtcgtttggatggttagaacggctgctaatgctacccgctgagatgttatgttcgtgtgtataaatatgcataaggcaagctaatgcattcttttcataatgaccaataagaatagttcatgaggccgtggctggagtgaaagtcctcttcctctagattctcctattcctccattcattgtcccttttctgcatgtcatgtctctgatacctaagagctatcacttgtcctaccttgagctgaaatttatttagaagaatggggactacaaaaatcaaactctagattctgtttccgtaaacactttagtacaccacgtcatgagctaattatcccaagaatttaagtaatcagtttggtttgggaaaatgttttctgctttttacttttgattataagaatgttaccttattttcactttgttttctgatttctcaaaccaaacagcttctcagtttttagttgaaagctggttttatatctactactaatgacatcctttttccatgaattccgttactgcaatcccttggctctctagcattatcatctcactgaaaaaaaaaaattgctgtaactacagcaagttgatattttaagttgagatcatagaaagccacccgttggtggattttttgtcaatgctattgtatgttttcatcgaattttcctagtgataattgctgtctgcaaatctgcagttgtcagcacttaagcaggaatttgaagaggcaaa

SEQ ID NO: 3560 - DNA, 2623 bp, Glycine max
  Intron number 9 from transcript Glyma01g41540.1 (locus Gly ma01g41540) derived from phytozome v7.0 (chr-ID Gm01; pos 53013035 to 53015657)
aagttttatattttgtttgtcgtattcttaatagagtaccttataaaaaaaaattaaaaaaatctttatgagctatggagaaaaagagaactaaatctgaaatatcttaaagtgtgggggtgtctagtaaaggttaatatccctattaataagaaaaggaaagttgaaaaaaaaaattaattatattttgttggatattttttacataatactacttatagattcttagttattaattcagaagtatctgaaatttctaatggtactattatggagtctagagatgtgactttctttgaaaatattttttcttgaaaaataaattgttaaatctttgtatggtttgaaacaagctccaaagcattgacacaaaagtttgattaagttattcttttgtatgattttcaaattaatgatagtgataaatgtgtgtatgtgaaacaatttaataataatgaacgtgtcattttatgtttgtatctggataacatattgatatttggtagtaaatgaatttcataaatgatgtgaagtttttttttgtctagaaattttaatatgaaagaccttggttgtgtagatgtgattttgggtattaagcttatagaaaaaaaaaatgatggtatgattttttatccaatcttattatgttgaaaagctatatattaaagaagtttaattattttgatgtgaaacatgtttctactccttatgactcatccatcaagttaaagaaaaatttgagtaaaggattttcttcacatattctcaaagtatcggttctttattgcatttgacaaacttctctaggcttgtctgatattgcatatgcagttggtagattggaaagtaattgagagatttaatgatacaaacttgaagttcttattttgatgaaataaaattgacaagtggttatgtctttgctttagatggttgtgtagtatcatgaaaatctactagacaaattattatttcacatgaaagcaaaaattattgctttagatactgctactagtgaggctgagtttcttaaaaatttgttatgtgatctaccattgttgaataagcctataccttcaattccaatgcattgtgatagtcaagttgctatatctaaagttactagcaaaaattttaatgaaaaaaggagacacttaagagtgagacataagtctatcagaaatttgatttctcatggtgtcatttctcttgactttgtcaggtcagaaaataatattgcggatccgcttacaaaagggttgacgcgtcaacaagtacttgagtcgtcgaggggaatgagattaaagcccattatttagttacaacaatggacacccgtctccgtgtgattggtgatcccatgaatggagttcaacgggtaacaacaaaattgtttgttgactaaagtacaccaaaatgaaatttgacggagctgttccgtttctcattcctatgacgaggtgtattataaattgtggcaatattaaggttgaggtatttatatatgtgtatttttgatgaaaaaaaaatacctcttaatgaatccgatgacaattattgtaggggtgagggtcacaactcactctttgaggattcacctagtgagtgtggtggtggggccgccactgtgagatatgggctaatctctaagtgacactcacgaaacaagatacaagcgcaaggccgtgtaacgcgctaccactgattagaacctaattgaacaccaatattgtaggagttgtgtactaaagtccggttaaagaatatgtagttcaagacaatcaagtcactacatttttctcggatggaagttcataaacactaggtataagactcaaacccggaaggttccttataccgaaatacaatatcacatgctctttctcttatatttttatctttcagaaaatatattttaaaattttaaattatgtgggggaatgttgataaatatttgtgttttaatttaaaatttataaatatatattaattctattttataaaataaaatatttattttagatttttttaagattttgttttaatgagtcaaactagtttgttagatttgttttgacaactgtaggttggttttccaacggtcatatttctaacggtcatattttgttgttgcaaaatgcctatatatatatatctctttcctcttttctagagatatagactgagagctctggtttctttctgccaacaatttatctctttcttttcctatacaaaacttaatttttgtgagagcaagagcattggtgttcataaggttcggggatcctttcgctgcacacgatcggaaccaacgggttgtcgtatcttgggagaggagcgcaatcagaatttcttacccgtgcagtgggggcgttttctctctaaggatagcgtttacgcgcttcaacccaggctatatctttcttcccttaatttaattctttcttgtgcttattgtatgttataatgaattattcgtgcgttgtcaattaaatttattttgctactgttattttgttatttaattcaagactgtgcatcttcttcatatttattttccttcatttttattttattttccaacagttaagacccctgtcagctgagaccattgttg

SEQ ID NO: 3561 - DNA, 2764 bp, Glycine max
  Intron number 4 from transcript Glyma04g02410.1 (locus Gly ma04g02410) derived from phytozome v7.0 (chr-ID Gm04; pos 1675139 to 1677902)
gggttcctattactctgattgcaagcttcccaagggtaagttaattgtgcttgatcaagtaatattttaaacattttttctgccaagtctgagtatgtgaaacagtgtatgatatatgtaattgattgtatggtttaatgattttaaccatatactgatcgtttgtctgctgtggatatttttaatagatttttattttccattaaggaatttttcctttcatggttgatgctaatgtttgttacctcagaagcagttgttgtagttgaaactgaagataaaatataacagaataatagatctggaaaaagaatggatttacttggtgcttatgaggaaacattctatttttcttatgttagattgcctagcttttttggaatatatttggtatccttgttatgctgctttttaatacctttatgattaagctctaagctctgcgtttcaccagcaaagatcccttcctggggggtttaatattttcaaaaattatttcatgaatgtcaaagcaacctgctgccacaaaaacgttgttttttgcttgaaataatatttaacatgcagtgtcatctgtataaaatgatggaaggaactggttaggaacagctatgggttttacagaactttggatatggttttaaaatgtgttctacttccaagtcatttttttttaatgttactcccacaattttattgttcttttaattgaaattttcattttcaatatagacaatgctactggtatggatattagaaagaacaagtcttaatatagtccaacaataatatgtgcttttctacaattggactatgctatctataatgatctatggtgtggactggactagaatgagatttatctgtttcattcattccattttagtttaaataatccaaacaatgacaacttatgccattccattctatgcctggtcctaatattgcaggaaaatttcttaaggtattaagaaaccaaattccatccaaaagcatacaaatgtgtctcatctcattcattttttatattgtttttacacttccagacttacacttatccttacaaatatttcatcttctaataaacagctgtttgcttgaatgtatcaatgaattattatttgttcatttatgcccatatgtcaacctcctctttctacctcattgtgctgtgtgttattcttggcaaaactcacctttggtagctttatagtaaatggtaaattttatcaagagcaaattacatttgcacccaagttttttttcaaattgcacacaacactgccctttatttttattcctacactatatccccttaatgtttgaaaacattaaacatacacccccttatatattacactaacccccctaaaccccttataaaggaggttgttgtaaacaataatttaggagggtattgtgtgcaattcgaaaaaacctcggggtgtttatgttattagatcttttatcaatctattgtttgattgatagttttcatggagtagatgaagtctataattcaattcagaaactcattgaggagagggggagaggtctctttgtatatttcttacgccttgtgtcaatgaatcttgtcccaaacatgccttccatgtgcatgtgtgcacacaccagtgtaatcattacctgatcgcggagaatcacgaaaagctgaaaatccgctatagaatatagcggatacgtcgcggtcaaatagtggaagccgcatagcggttgaaatagaatatatataacaattaaatatgtataaaaaagaatcctatatgcaaaaaaaagaagctggataaacattaacataatattatctcaaaagttaaattgttcaagacaatatatgttcattctcctctgccccttccccaataaaataaaaaaatgctataaacagctgaatgctaattagctaaacaagccctagtgaggcacataatcagaataagctaaaagctaatttagctgaacaagtccgataaagaaaacatctattcattctgctctgcccctgccccagcatcaagaaaacagaggaagaagaagaaaaaagaagttaaaatgctggacgaagaagaagaaagaaaaaacagaggaagaagaagaaagaagtattaaacaaaataaagaattgttaccttacctgtaaaaaaagaggctggacgaagaaggctatgtggtgactaagaatcagaggaaatgagaagttctagaatgcactggaaaaaatttacgtgaagttgaagtagaactgaagttaaaatgctactgttgtcccaagtccataagtaaaaggtaaaaataattgagtaaaaagtaaaatgagttttaacttttaacaaagtcaataagtaaggctactgttgggcccttgtgtgcattctgctagcccaaaacaacagccgcgacccaacttggttccgtgacgcgtaaggtgctggcaaattcgattatcgtggagtccgtgacgccatcacgattccgttttctccaaaacccactatgctatagcgtgatagcgccgctatttgacaacactggcacacacagagagggagggggtacctttggtgaacatgcacaagattttgggtattaagattaatatatatgttttggagtgatccttgacccttatgttgctaatagttaggttatgatttgattaaactttcataaaatgataagtattctaggtttgttttatctttttgcaggttagaagtttgacaagcaacattaagttgatatt

SEQ ID NO: 3562 - DNA, 2780 bp, Glycine max
  Intron number 4 from transcript Glyma16g10680.1 (locus Gly ma16g10680) derived from phytozome v7.0 (chr-ID Gm16; pos 10895958 to 10898737)
ttcgcttgtgttttcttgatatacttcgttcaaaggtattgaattcaacacatgttttctttcaattcttttaaacccacaaaattagcattctattgttatgttgttgttgttgttattattattatatcatccgaatataaatatagtttgatccttttcggtattttattttccgaagaatcagaactatatttccaaattgtttttcaatgaaaatatccacttcttggtagtaaaatttgaattgtttttgcataaattcacttagaagcacacacacatcatgacacatgttttctttcaattcttttaaatccacaaaattagcattctgttgttatgttgttgttgttgttattattattatatcatctgaatataaatatagtttgatccttttgtgtattttattttccgaagaatcagaactatatttccaaattgtttttcaatgaaaatatccacttcttggtagtaaaatttgaattgtttttgcataaattcacttagaagcacacactcatcatgagacatgagaagatagattaacattagaaaagtgcctacttgatgagttgatggtatcaaatatcaaatttttgctattaggcaacataaatattttatgctgatttgtttcattgataaatgattgtaaagtagtttacttactagtaagctgaggaaagaatacatagaacttgttaatgtttccaattagatgcattaattgttgatctcctgtatgctcttatcatatgcattttaaatgttagatattattattatatgtagtatgtttttcgtcttctttcttgagaagacatgaaagggtttaaaacttaaaagataaaacccaccaactgatcacttcaagaatgtgaagtcaacctcacttcatgccttggtccgagtaatactcatgacatacatcatagtaggaaaatatctggtcttccttgaggccagacatggctcccagtggctctccaataatgtattttagacctgctaagttccttcagccccaatcttctttacactcatctttttttaataataaaaaaaaatgactatctcctcctgaagttatgtcatttgaaagtatcttgcaaaatcattagatactaatcataaagctgtcaactatctactactcactcgttatctttcagtcaagcctttaggaatttaaaatccaaatggatataggacagtgtaagtgataggctgtgatgtgtgacacttaagccaaaatataactaagttccgtaattatatatagtataaggatataggctattctttctagaacacattgaatttctaatctgattaaaaggcagttaggcatttttttgggggtggggggtggggtgggggggtgttcaaatcaagaaaacaaaacagcaatcctaggcattcaagttcatgtgacaaaatttattgttgttattatagtattagcatgttttgtagttaattttgaatttccgccaagtgatcatccacaattcaatcaacaaagcaagaatcataatcgcaatcctaaatcaatttaattaacctagattaccaatctattaacctagcctcaattagatttcagattaatcaatcctagtttctattatttcaattataaaattaatgtctaaacccaatcaggcttaggtcaaatattcataattcatgtttgcaagagaaatccataaaagaagaaaaggatgagaaaatttgtacaaaacaaagattaagcatacaaactcaatgcctaaccacaatccctgaatcctttatattgataaggtctttattctttcatgatattgagaattaccattggaaaagctttaagagtgcagaaatacaacaacactgaaatcttgaagaagaatcttggatctgtcaaaaaccctaaacaataaattcaaaagtgtatcaatttgtattctaaattccctatattactgttgctgtgtttttcacaatccctaatataaacctagtcctaactatgacctacgaaataagcttccatggtgtgctcatatgccttgattgggcttaaaataagtgagatatgtttaaaacagtgagggtatgttcaatatgtgtggcagcacctctgctcaaacttaaaggctaaatttaacctctggaaagcccgaattttgcctatttaacatttcacaacttgtatatctctttttcatctatcttggcatataaagaacacacatatcaaatctacaactgttatggctaaaacactgtactaatgtcaatatacaattgccgaaaaattgcttcaaacccaattcatcccaataattaaaatagtgctaagatcacttaattaaaacccacaacgtcattaataaggcaattataggggtaattgatgttttaaaaacagtaattatcaatgtggtataataattaagcatcttgttataacattgttaaagcatctacattagggtagtggaataatggagtgcgagcttattaaatgttattttcttcacaattctctttctttaaattagaaaatacaatttaaattctgtacaaaacttttggctgttgaaacgctcatatatactaaagatatgcttacccaattatttgtactgttatttgtgcacatcttgcactgtatggaatactaactcattttttttacatccatttattaaaatagtttgacttctacaatgttaattccatttttaccaggttagttgggtaaagaaggtcaatttgatatttct

SEQ ID NO: 3563 - DNA, 2406 bp, Glycine max
  Intron number 4 from transcript Glyma12g31800.1 (locus Gly ma12g31800) derived from phytozome v7.0 (chr-ID Gm12; pos 35352279 to 35354684 reverse strand)
atacacagcctagaaatcatccaaccataattaaggtacatcaaatactactgcagtttaaattcatacttatgcaagattaagaaattttcgcgaaagaataatactctttccattctaaactgtatgatgttttagaaaaacaaattgtttcattatagatgtgattttgtaaaatcaatattatattaaatatttaaaaaaaaactaaattaaaagagtaatatataaaaagaataaatgagtagttattaattaaaaaagtaaaaaatatatttaaaagttactgttttatatgaaatttaacatatatttttttaatatacgtatcaaaatcttaatcctcatataatataaagcaaaggaattggtaatatatatatatatatatatatatatatatatatatatatatatatatatatatacacactacaaataattaaagaaaatatctccttttatagatgggcttcaaaaatttccttgctaacgaagaaaaattagtgcatgttttatttgcatcagaaaaagatgtggtgcatattaatataaatccaacagataaaaaaaaaagtaaaaatcatgtaatctgatgataaaattattttatctcaaacataattttgcaattacacatgcgttctggaaggagctatttaatgtaatctgagagcagcgcttacaacccagagacggaggatgaaacgtgtcgttgagcattagctccaatcctttgcgcattaatattgagaatttgtttcaatattcatatgaataaatagccaatgccgagtggcaataattattcccctgggttggatccattgcaaagtaccgaaccaaacatctccaacatttggccaaatatggttaaattgaatatttaatttgctttaaaattttactaagttgagttgagtcggatttatgattaaaattaaatcaatccgatcataaataaacagattaagtatgattaatcatgttaaaaaaattaaaattattttttattttgtaaaattaattttttttaaataataatttatttttatctaaaattttataaatatataatgactaaatatccaagaccaaatgttaacagtattttattaataaaataaattatttcaatgttaatacaatatttatattttagataaaaataaaataatattttattaacacgaaaaatatataaatacaattaagacaaaaataaaataataactacaaaaagaaaaagtgatgaatgttttaatttaataatttaatacactattagcaaaaaattatggtattttgtatttaataatttgatttatatataataaatttaattaaatgtcacacgtcatgtcaggtcaaatcatgaattcaaaaacaaaaaaaaaaaaaactccttatctaactcatacaataaattagttagatttaattctaactctaaaaaattgtgaacgaaattaattagattaatttgatttgtgaattattcatatccaagttatcaaactttaaaatttatataaacttataagaattacttcgtaataaaaaataattagatatatataaataatatactaattaatcattttaatattataataaaaaaaattaaatcacaaattccataattataaaataattaagtctaataatatatccttactaaataatttcaaactggcatcaaataaaacaaataataaattcacatgcacaaaaacaaaacataaattcttaaaatataagagttaaataacttaaaaggacaaatatctcttgaataatctataaaataacttaaatagataaaatataatgcattacaagaacattttaggttaaatttcttaatccagtaaactgagacttaagctcgagagtttagtatctaccgagtctcctgtaagcctatcggaaacgtacgtgcctgtgaactctcggaaaaatttacgacttatctttaagagtttgatactctcatgccgcccatggacattcctatctccaaaacatatgagaagagaacaaaccccagtatcgttacgcatgttccctttacgggtatttttttcttgcacctcacaaattttctgcagcattctttatactttagaaaggcttatacagaatataaaattatattctagattaatcttcgtaactgtaaatggaatgacactttacacagaaagactattagaataatagttgatatttgaatattttaaatctaaaagaagaaaagaaataaatcacacttgaataccattatctctttatataatgcttaatctgaaccaacataaattaattaataaaggattttttttttcttgaaagggaatacatacaacttaaaaacaaatattttccctcttgttggtaggtaat

SEQ ID NO: 3564 - DNA, 7109 bp, Glycine max
  Intron number 3 from transcript Glyma08g37630.1 (locus Gly ma08g37630) derived from phytozome v7.0 (chr-ID Gm08; pos 36405541 to 36412649)
ggtaagcaattatcttcctcccctgggcatggtgtcagtgaacattgttttcttatcattatattgttcctctgttcatggttttctaaccctgttttatatatctggtatatgattcctaatatttaagtttaactagtttcagagaatgggaacatatcttgtcatttgttgagtattgactggttttaattttttttgctcagcaaaaataacatattatattaaagatgagtaccagaggtactagaaaatacaataggaaacccaatgtacagatagatcgggacaaacaagatacagcagctagaatagcccaaactactgagaaagaccagggccttcaactattctcaaatggctgtcctaagaaaaacatctttgagatttgaggaccattgattgaaatgtaaagagaaattttcttcaaaacatctgagccatgaccataacatgaacactgcatcatccattaatttctggccatcaaagaccgcattggagaaaataatactgttcctctgcttccaaatcgagtaagtgagagcaaaccaccaccactgccttctttttccttgcatccctgcaggaactacacaaatatgctgcataaaatgctgatctggattataagggaaaacgcccatcatatttacccatgactgcgactcccaccataaaggattaattttactgcagtggaagaataagtggcctgcagtctcttcccctaatctgcagaaaggacacaattgctcttgtaactcaacccgcttctttttcagattatctttagttggcaatttgtcttgaatcaacctccacgcgaagatagccactttcagagggaccctaagcttccacaactccttgaactttccatcctgaccatcttccactgtgacatgatgaattgccttgtaagcgctcttagttgaataacagccactaggctccgccgcccacttccaatgatcatttacttccggtctgattatgatcccttccagctgctggaggaaagcatccgccatacctatctcgctatcaaacaaaagtctcctccacttaaaattccactcccaccccccttctttcacagcacctatttgatgaatgaattgatgttgttgatctgatacggtgtacaatctaggatatatctcagccaagcttttatctcctcctatccacctatcctcccaaaacttaaacttatccccacttccgaccctccatagaatcaacctgttcagctggtgatcttgatttagactttgattgactatctttagatccctccaccataatgattcagtgttgtccctcgaagctccatcaagactcctccaacctccgtacttcgattcaaggactctagaccaagtctcctcctgattctgaaacatctcccatttccactttcctaatagagatgcattgaacgatacaatatccttgactcccaacccacctagctccttaggcttacaaaccttttcccacttgatccacggaattttattttgatccgctgcaccaccccacaagaaattcctttgtaacctggttagcttactaaccaccttcctcgggaccctgaaaaaagataaaaagtaaattggaatagatgttagcacggaatttatgagaatcactctccccccgaaagacaagtgtgtctccatctcgctaattttctctcacacttcgagattaagggttcccaagtctgacatcttctaggattagcaccaataggtattccaaggtatgagaaaggaaaagacatcaacccacaattgagataactggatgcatcataagtccactgctcagacaccccaaaggccccacaactactcttggcgaaatttatctttaaccccgatgccatctcgaaagctctgagaattgctttgatagttcttacattcgctaaggttgcttctcccaaaaatatcgtgtcatctgcatactgaagaagactaacctccaccttctttgtgcccactaagaaacccttgtacaatcctccctcaattgctttggtcattaggcaactcaaaccttcggcaacaatgttgaacaaaaagggtgataacgggtcaccctgtctaaggcctttctgaggatagaactccttcgtagggcttccgttgatcaggactgagatggaagctgatttaagacatccctgaatccaccgaatccacttcggatcaaaacccattctcctcatcatgtaaatcagaaaatcccaagacactgagtcatacgccttctcatagtccactttgaaaaccatgcaaggtttttggcttcttttggcttcttttggcttcttcaactacctcgttagcaatcaccacactatgaagcatgtgtctaccttgaatgaaagctgattggcactcactaattatgaggggtaacgttctcttcaatctgttagccaacaccttagcaaggatcttgtatgtgcaaccaatgagagaaataggtctatattcattcaagccttgagggtccggcaccttcgggattaaagctatgaatggtgcgttcaaacccctcggaaagactccattaacataaaattcatcaaagaatcgaagaaaatctggtttgatgacttcccaaaactgcttaatgaatttgaaattgaacccatctggccctggacttttgtcactaccacagctccacacagcccttcttatctcctcttcctgaaagcgctccagtagcatggcattctgctgtgaatcaatggttctgaaactgatcccgttcagagttggtctatgaaaatttgtttcctgaaacctccgagaaaaaaatcttctaacctcctctttgacttcagccggttcctccttccaaaccccatcaaccagcaatccatttaaactattggatcgcctcctggagtttatcaacaaatgaaaataccgcgaattacagtcaccctccttaatccatctggatcttgccttctgccgtaacagcgactcatgagtttgggctgcctcccaaacctgctgctgcaaattctttttaagtgtccgctcattatcatccaatggtctatctgctgagtcctcttctattttgtttaattcttcctctaacctcttgaagcggctgaaagtgtctccaaaatgatctttattccactcctttatcttctatttgagagctttgagtttgtttttcagaacataacccccccatccactttgattgttggatgaccagaattcgggcaccatcttcttaaaggatacttcagataaccaacagtccaataatctgaacggttttggaccctaatcattggttttggatctaaatagaatgggacaatgatccgagaaatttctggctagcggtgtttggattgatccaggccatttggagagccattctggggaaacaaaggctctatccaacttgcttttcgctgacccattaggtctgaaccaagtaaatctctttcccacccatggcgcttcttctaattccagctcctcaatccagctattaaaatcccttatgcttccatccaccagccccctctgcgaagaccccactctttctccatttgtcctgatgttgttaaagtcccctataatacaccaatatccatttggattctggtttttcagctgagaaactttatcccataacaccttcttgtcttgcaggttacaaggggagtagatattcacaacatgcactgctatggattctttgccccactttcctgtcaaaagaatgaagcctgttccaacagatttactctccaccttaagagagttttgattccaaatacaaaggataccaccagctgaatttactgatggtacctcctcccagcagaaatcaacatctccccaaagagccctgcacatactcttattaatactttccttttttgtttcttgaagacataaaaggtcaatatgatgctcctttaccattcttctgattgcttgccatttaacccccctccccagcccccttacattatacgaaatgatattcatagagactttccccttccacccaagctagctgcctcttttccgtctctctcttccatttctttcaattgtttcatataatctctttgagaagcatctgttgtcaatcccaattctttaatcattctccataagctttcttctggaaggtccaaattttgctcccgaatctggttttgctgcctattttgagctaaagaaacttctgattgtatatgggggttagctgatccatgtccttcattatcctgctggtacggtccactctgaacatgctctgggcttagagcagtttggttcgagtcagcctcacctatatgggcttcagctctcttcaactttcttttacgggaatacataagcaatggggttaaaagaggtgttgcttttaaaactgggcctttattgggggtggagcatatattagggggggtgttaatagtctggcccgaacccagcaggcccaacttctccttttcacatgtctttggtgaggagagttcaaaatctgctttttcttcctcgtacgccattccaccaacgtttcttgtctgctccttcataccattttcatgcaagttgcccatgtcgtcagagctgacatcccccccaaggtcttcttcttcccctaattctgtcttcccttcttcctgcatctctgaatgctccctgtcattggtctggaggcatttaacgcctgtcagagcttggttcgcttgtttcacgacccatcggacaatagctttgtcctttgggtcattgccattcgtcgtcccagtcgccgtgccgtttcgagactcatcccccaagaccaccgccgatcctcctgacctctcgtcgccaccgtccctgtcctccgccgcacccatcatcaccgtctgggatgagactcccttttgggtttttgatggcgcgacgtcacttggtcttctgcacttatcttcctcggccatcaacgctccctccgacgccgcctcctccgtatctactgccatgaaggtctctccctccttttcttcctctattgactggttttaattggttgttgaatgttgatgaactgcattttctttgtagttatacatttcaaacctgtagaaggttactctcattcatcattctgttaaattggtgatgttgtcatctgttggcattaacagtcacatggaataaatttacaacttcattttctcctcaatgagaacttcctcctgtttcctaataatttatgttttataatgtaatcatcaaataaatttgtcttgtattaccatttggcttgagaactatgttcaaattataaggattcgggtagaggaagaggaaaagagagataaaagagactgaataatatccccttgggtatactgatgtggtacatagttaatcgtgcactatggcacctctatcacaagagagagcattgaatcaccaccctaggctgctaccaatttttagattgcgtcatatttttcatgtctcagctgctgtggtgctgtaaattaagtgattttgtggcattcacagttgcaaaggagaaaggatttaaaaaggaacccgagagagagagagagatgttgtgtacgttaggaaaacttagtgatggagtccaacttcagttgtcccttcatcatgcatatatatatatatatatataaatattatattctttctaaattcttagaagaaaacatctttttttgggatccccgtattctgaatttaaataccagaataggctataattaggaaatgcctttcgaaaaggaactaaggagttctacagggacattacatataacaccaacgagctttgatgctagtcattcgttgctgtggcaagataaaacaaggagctcaataataaaagactgttagataacccatagtggaataattagttggttagttagttcagagttgagagaattagaaaaataaggcatgttttctataaataagaaagagattgcatgttttaggagagaactcaagaaatatttagcaatcccattctttcaaggagatgatgcttaccaatggtactaacaataggaggttaggaaacctaagctctcatgggaaagttttcaaagggctttactcaagcatttccagcctgaatatgacccaggcctgcatagtttgggttcaaaaaaaggaactggtatcaagggagcatgaaaacagaagaggaaacaaaggtacttggatacaagaatacaaagaatgaaaagaaggttcttcagtgccagaaaatccaagagaagatgtaatcttgaatgatggggtaggaattgatctagagaaacaaaggtaagtgattgatcagacctataggaaaaacgaccattgtgggtggctccataaaagagcatttatggaaggaacaagtggcagccgaagaggttaggggttcaacgatcaaacaatcaacaatcataagtgatagacaagacttgggttcttccagggagggagatgggtcatcgatagtggaagtgttctaaagctcatgaatcataactaagcttccccccactctgccagtttactcaatgagtagttgaaacaattccaatgaaagatgaggattgctgtcctgtgaccccaaggcagaagcatgactcatgagggaatgacaacaaatggaggatggtgatcccaaaatgttgagtcaaatgacaatggcaacattggaatctaaataagaaaagatgatcaatttcaagaccaaatagatcagactctcagcccacttgcagaggcaatgatgctctgtttcgaggctaaaaataacacagaaaacaaagcattggaagagttggaagcaccaagttgattgagtttaacttgggaggacttgaggctattttcaagctgctgtgttagggattatcttggtcacaagctattcaccttaatttttttaaatattctaacacattgtatatcctcattaatcttttagaaaattataatatatcatcttcaaatattagaaatcaaaattcttttaaaattttcatacaaaattaaaactgttgcatgtgtgacagg

SEQ ID NO: 3565 - DNA, 6489 bp, Glycine max
  Intron number 1 from transcript Glyma01g23390.1 (locus Gly ma01g23390) derived from phytozome v7.0 (chr-ID Gm01; pos 30121895 to 30128383 reverse strand)
caagctggtggagggtaagtacagaatatatattctccttggatctagaaattatctaatatgtttggtagacaaatttgattgacctactgacacaggctatttttaaaatattgctgattttcaagtaaagtgcccacaacctgcattcaaatttctagatgcttcaactaggaaaagttatcaatgtcccactgggaattgtccgcccaacatccacttggacagctaattgcttttaagacaatttcaattagacatttcaaaaacctcagacattattaactacttatgagaaatatttaaccattagtgctgcatgtacagattgataattgtatacaatctcatccatttactttatccgcttgtgtggtaaagttaactaccattagacattttaataacttcatgacatttttaaccacttgtgaggcatatttaaccataagtgccacaagtactgattgataattatatacacaatttcaattagacatttcaaaaacctcagacattattaactacttatgagaaatatttaaccattagtgctgcatgtacagattgataattgtatacaatgtcatccatttactttatccgcttgtgtggtaaagttaactaccattagacattttaataacttcatgacatttttaaccacttgtgaggcatatttaaccataagtgccacaagtactgattgataattatatacacatttatttcctcttagtcacctatgagacaaagttaaccaccattagacgtttcaataacctcatgacactattaatcacttctgaaacatatttaaccattagtgctacaagtactgatcaacataatgggtatggtcaacataatgggatgacaatggcggcacgatgagtggagcgaaggagtaaaaattggagggatgcatcaaatgtttactctttctacttcacaagttttctggaagatatgggggaaaaagatttgtcgtttgagttcaagaaataggacggcgtcagggaggtattcattgcaaagaatagaaacaggagcggctgaagatacggttttgtgcaattcaaaggggttgatgactttaggaaactcgagagacaattggataacttgattctcggcggactgaaactacatgcgaatcttccgaaacatggaagggagtggaagctgatagagaaaaccaacaagatcagcacaaggggctggtcagaggcagggagataacagaacaaacaacaatgaatggaggaccttagaaacaacatccccaacggaagacagtacctattttgtatgcgaaagtggttgcgacaggcagcaaaactacggtgaagaggtggttactgagatatgtgcaagcaatgagaatgacatcccacttgtcaatttagttaactataccaatggaaaagaggacatggttcagcaatgcttgggtaggtaaattgaggaatctggcgatatttgatagactagaagaagaactcatgtgagatggaggtgaggacattaagtcaaagtaccttggtggcgacatggtgttactcatgtgcctcattgatactagagcagaagaaatatgtagggaagaattcgaaaacggactgcctatgttccgtacattggagaaatagagcctaagcatgaggtttggattttggttggtttggattctgggctggggaatcccattacatgcataggatttggagaacatccaaaagattgtgacgggttgaagtggtggatattgatgacaatgttgaaggccttcaatgcttggatagggcacgagtgctcatcaaaacatcatggtaccttacaatcaatcacaccgtaactgcgtccattaacggggacgattacgtgatcaacattgtagaggagacgtgctacaacccctgcaggtgtaaatgcaacagtgggagcctgatagggtcctcagaggaaatattttctgatgagagcgaagtggggctgaccttatcgttggaggacgcgtcgtcccatgacgagtctctggcgatagccatgctagcggatgcagatggagatgagcagaacagaagtggtggggagcagtagttgtccgctggtctatatatcacgtcagtacctatgacgtagggaatgcttttgacagaagacaaagacctacctaggtgcgacaagctgttgataaggtcaggaaggacaaaggaggaagctatcaggcatggcttttgaagagaagaacgaaaacaacaagaatggaaacaatggggaagaaaggggcccacatctgactcagttttgaattaaaggagatggaggcatgtgattatccagaagaagaggaagcaaacaactcactttcaggtcccattaaaaacaattctgttgaaagacaaggaggggaacataagctattaggccctaaagtaaatgggcctgaccctatatggaaggtatactcaagaaataggtggtgtaaaaaggaattgagacctaatgaaacagttgggcccaaagactgacaaaagagatagtcaaacaacaatgtaggaaaggagcccaacagtggcccaaacaatcattagacttctccaacaatgataaggggtagtaggctgaagaaaattgctggatgggaggaaaagcgctgtgaaaattatgttacagtggcatcaaaattagtttgaagtcctaaaacctgtgagctggtaaaagaagcaacaattaattgggacatggcaaaaaatttgggagtaaattgtagtaaccaggaaggaacaatggtatgcaaactagttagtatggatgaaagggataagggagaggctcataggatgggaaataatgaaagtgattgatgaagatcataacatacaatataaaggggctcgggaggggattaatgtgggcttcaattagaaaattggtgaaaaaagaacaagtagatatgctatgcctacaagagactaaggaagtgatagataaggatgtatgccaagctttgtggggtgattccgatgtcagttgagaattgcagctagcatgtaatagtgttggaggaatattgtgcctttggagtgaggaaacatttaaactggagaagaagttgattggatgtggtttcatttaccttgaaggaatatgggttactgattgtggaaaagtgataatagtgaacatatactcgccatgtgatgcagctttgaataagaaatttatgggaataagttagacaaataaggaatgcaaacttgggaggcctatgatgcatattagtggattttaataaaatttgaagaacatcagaaagagtaggtatatgtcaaagggtgcaagttgagagcattatgaaggaatttaatggatggattgcagacctagaggttgaggatgtgccttgtgcgggacgaaaattcatcaggtacagaccaatgggacaactaaaagtagattggacaaaattcttgtatccgcagaatggcttgccaaatgacaaggaagcacttagtttatcatggattgcaatttcttagaccattgcccaattctcttgagatccacaattgttgataggggcctgaagtcgtttcgggttctggattgttggtttgaggataaatctttcaggaaggtagtccgtgactgttggacaactaactctgtaaatggttttgtgggtttttttgttaaaggaaaagatcaagggattaaagctgacgttaaaagcatggaataagacttaatttggtgatatttggcagaaattaagaagagcagaactggagctgaacaagctggaaaaagaaggggatgatagacaactgaatgaacaagaaaaaaattgcgaaagctactacaggaggaattgtgggtagcagcacacttaaatgaatccattttgaggcaaaaggcaaggttagatggatcaaagaaggggattacaattctcagttcttccacttgattgtaaattggaaatgtagaatacaatatggttagaggagtgcttgttgatgggtgctggatagaagagtcatgcagagtcaaagaggaaattagacagtttttcaagaggagattgagtgggagaggcctagactagctggggtcagatttcagtccattggccagcaagataatgttctcctggtggcgcgttttgaagagaaagaagtgaaggctgtagtgtgggattgtggcagtgcgaaaagctctggactggatggactaaatttcaagtttatcaaggaattccgggacgttatcaaaacagatttgctctttttttggatgaattctatatcaatggagtatttcagaaaggaaacaatgcatcattctaagctttgatccctaaggtccatgatccccagagcctcaatgaatacagacctatttcattaataggatgcatgtataaaattgtggctaaactgttatctagaaggctgaagaaggtgctgccaaccattatagatgaacgccaaactgccttcatagagggtagaaatatgctgtacaacgtggttatagccaatgaagtggtcgaagaagcaaaaagatgtaataaaagctgcctagtgttcaaagttgattacgaaaaggtgtatgacttagtatgttgggactttctgttgtatatgatgaggcggatgggtttttgtaccaaatggattagatggattcaaggttgcctaaaatcaacttctattttcatattggttaatgggagcccaagagcagagttcactcctcaaagaggactcaggcaagatgacccactagtcccattctcgtttaatattgtagcggagggcttaactggtctgatgagagaagcccgagagaagaatttgtttgaaggttttacagtaggaagaaacgtggaaatcggtgtattacagtatgcagacgatactgttttctttgggacaacaatgatgacaaatgtaagagcaatcaaggtgatgttgaggagctttgagttggtatcgggataaaaaataaacttttccaaaagcagttttggggctattcggatgcctgagcaatggatgaacaatgctgtcagctatttaaattgcaaaatgttgttcagtaccctttccttatttgggtgtccctattggggcactcccaagacgtagtgagatatgggatccaatagtcaagaaatgtgagagaaaattgtcaaaactgaagaaggtggtggttaggttggtgaggctgcggcagtggttcttgtggggaggcactcggatcagaaaaagattgcatgggtgaattggggttcagtctgtctatcaaaggaaaaaggtggcttggacatcaaggatttggtgaaattcaactatgcactgcttggaaaatggtgctggaatttgtttcatcaccaaggagcattgtggccacaagttttggaatccaactatggagggtggaggaatttggatgtgacaagaaggaccaacagagagtccctctggtggcgggacctaagcttcatctataatttgcccgaggagggaagctggtttaaaagcgggacaaaatgaaaaattgggtgtggatcaaaggtgctgttctgggtaacatcaatatatccaccagcaaggggcgacatcaggtgcaggttgggaatgactattccagtggaggagattctttttggagggtgaaatagacatgactgcaaaatttatgaaggatatagaaggtctgatcgtacaactgcagcgactagacacctggaattgggagggagattcaagcgggggatatacagtggggaatgcttatatgctgcttgatagggattcgacaaatgaaaatcaggatggagtgtttactgcactatggaagtttaaaatcccaagtaaagcctcattctttgcttggagattaaccctggaaggactgccaacaaagagtaacttaagaagcaggaatgtggaaatcaacaacgtccaatgaccattctgcagaaatcatgacaaagatgcatgccacccatttttcagctgtgttagaatcatgctgctgaggtgggaatcaatgtctgggtaaatgaacttaatattatatataatattaatcatacttttgctaataaaaaacaaattactcttccatgtccttctgctcccacattttctcgttccctcccaaaccccttgccatgtaagcatggttgttatggctcaattttgttttttctgctccctgttcctcttttagatttattcttcctgtatatctcattgaaagcttcaatcatgctctgttaatctttgacatgaagtgcatgccattgattccagaaaaatgtgacatgaatggcatattttacttatgcagttatgcatcgattattctgtgagatttttgtttttgttttctccccgtttcatttctaagttttgagcatgttaatttttggcagataagagaagctactctttttgccttatcgtctct

SEQ ID NO: 3566 - DNA, 5360 bp, Glycine max
  Intron number 16 from transcript Glyma15g41690.1 (locus Gl yma15g41690) derived from phytozome v7.0 (chr-ID Gm15; pos 48881990 to 48887349)
cgcatatcaaggtaaaccttttacgatgttatctagttttctgatttgcgtctctcataagacttttaagttttgacctgtaactttgacatgatagtttaattaatttctagactaactgatattaataactatactgtctatacttcacagcttggttatgttatattgcgttgtaagttggaagttgatgctgcacattaaatttggtgtccatgcattatattagtgaattcaaacttcaaaatacgattaatatgattgttattggaaattcaaaggttgtttttgaatatgcccagctgccaatattgttataaatctaagtgtagatatatatatagagtgaaagtgtgttctaatattctggaatgagagaatacttttcattacattgattaacagaagtgaacactatttatatgagagtaggatgcttgcagtggaagcccagttgtttgatacagctgtcaacaagcttaacagaattcaaacagaatcctaatgagctctaaagcactaaactaactactctaacatggatgttgtgtgctgtgtttctgtttttaaatagtactaaatggaaaagttgctaataagaggtgacacccatgcgaattatcagcatagacatattggaatgggggttgtcaggtccatattataatggcgatgctgaaaattggagaaaagttttgtaagataatcagagattcagaataagagagactatgtaaaaatttcccccagctagatgcttgtgaaatattgacagcatattctgtcactgtcattcttgcattccttaatcaaactccagtcagtcacctagaatctcttcccaattaaccacccttgattttggggtaataaacacttccttaattgttttctaattcttggcagatcaattatggtttctctgtcactacagattaatttatagactgtcttttctgtgtttttaagataataaactggaggcaaattgggttatgcattattggagtgctgtaaaggatctgcagttagtcaactgcagtcctaggtagttagtttacccgagttaagtttgctcagttagttagagttagttagctgtcctaactaactagcctataaatatagaactgtaagcagtgaatcttgtggtttatgaaactagttttctccccttgatcatttctctgttatcttttctattatggtatccagagcctagttcgatcgaagtgatcaacaatggcagaatcaaacaaatattttccctcctcatctgcatccctttcttcctcttctgctttccccaattcgattggtgaaaagcttgatgattccaattttctgttatggcgacagcagattgaaccggtgatcaaatcacaccggtttcaatgttttgttgcaaatcctgtgatccctctgcgattcctcaaggatgtccatcgcaaaattggaaaagaaaatctggcgtatgaggtgtgggagcaataggatcaagttcttctcacatgactgcaatcgacgctctcaaagtcgattttgtcgtgctgcttggggatcatacattcatatcaagtctgggagaagatttgtgaatatttcaacaaacaaacatgagttcaagcaaggcaactgcgcactgagttgcgttctacgatgctgaaggataaatcggtgcgtgtgtttcttctcaaagttcaagagatcgctgattctcttgcttcagttggaagtctgatatctcctcaagagcatatgactgcttgaatgtcttccccgcggttatagttctgtcatttctgtaattgaaagcaagtttgagccgcttccaatcacaaaagttgaggctcttctcttagctcatgaagctcgacttcacaagtttgatgaggtttcagattagggtttggttgaaaattctgatcataccaatagtgttaatgagaagcagtatgtccatacttgaagcaaacttgacactgaaagtttgcaaagcgaccaccgtgaccgcgtgcaccactgtgattgtatctaccgccatggccaaaaccaccacgaggtgcaaaattttccggttctgactgctgaaacttattttaagcagaatgcgtatcagctccgtacgtatgagtcagattgacagacggtggatctggcaactcatcaaacttgcgaagctgagcttcatgagctaagagaagcgcctcaacctctgcaattggaagaggttctaatttactctcattgatagagatgaccaaactgtaacctcaaggaaggccttcgatcaaagcatccacattttcttgaggagagatcggacttccaactgaagctagagtattcaagatctcctgaactttgagaagaaaagcacgcatcgatcgatccttcagcaaggtggattgcaactcagaatgcagttgccatgcttgagctctggtttgtttgttgaagtacttgtgaatcttgtcccatacttgatacgtttggatacttaccaaacatcacaacaaaatcgacttcgagagcgtcaattgcagccacgcgagaaggatttgatcatgttgctcccatatctcatatgccggattctcatttccgatttcacgatcagcatccgagagaaactgcggcggaatcacaggattcacgacgaaacattgaagccggtgtgatttgatcaccagatcaatctgctgtcgccacagcagaaaattggagtcatcaagtttctcactaatcgaattagggaatgtggaagaggaggtaaagagattgtgtgattctgtcattgctgatcacttggatcgaactaagctctgataccataacaaaaaagataacagaaaaatcagtttcattaacccaatgattcaatgcttacaaccctgtatttatagactagttagttaggacctctaactaactgagtaacttactcttaactaactaagcaaacctaactcatgttagactaactacccaggactgcagtagagtaactgcaggtcctttaatatactccaataagtggctaagggtttccatcaagttcagggttttgacttcaatgaaacattttctccagtcataaaacctgtcactattagactaatcattactctagcattaactcatcattgggatctctttcaattagatgtcagcaatgcttttctcaatggtactcttgaagaatttgtctatatgtcacagccacctggttttgaaaactcaattgctctctggtacataactaaagaaggctctttatgagctcaaacaagcccctagacagtggtttgacaaacttcagtctattcttctgcagtacagtttcacagcaagcgtgatccttccttgtttgtttttaaagctcaacatcaaactgttcatcttctggtatatgttgatgacataataattactggtagctcttctgtgctgattcagaaactcacttctagactcaattccagctttgctcttagcaacttggaaaattggactattttttgggaattgaggtcaaaactctgcctgataactctcttgttctcactcagagcaagtatgtcatagaccttcttcagaagactaaaatgacagaagttcagcctatttcatcacccatgacaactacctgcaagttgtccaagtctggttctgacttattttctgatcctaccctttataggtcaattgtgggtgtcttacagtacactacgattactcgaccagaaataagctttgcagttaacaaggtctgccaattcatgtctaatcctctggacactcactggacagcagtcaagagaattctaagatagctaaaagggaccccctctcatggacttcaacttagaccagctatatcagatcaacccattcctcttggaggtctttgaaatgctgattgggcctcagatgttgatgacagaaggtcaacatccggagctgcagtctatttaggacccaatcttatttcctggtggtctagaaaacaacaagtggtagccaggtcaagtactgaagctgaatactgaagtttagcacaagtaacagcagagattttatggattcaaactatcttgtctgagttaggtgtttctttcaaaacaccagtggtgttttgtgataaccaaagtgctgtagcactggctcacaatccggtgcttcatacaaagacaaaacacatggaaattgatgttttctttgtcagagaaagagttctaactaagcagttgattgttcatcatattcctggtcttgatcaatgggttcatgcttcaaccaaacccctctctccaaccaggtttcagtttctaaaaggcaaactcaatgtgattgatacttctcccaagtctaaccaccttgagtttaaagggggggtattggagtgttgtaaaggatttgcagttattcaactgcagtcttaggtagttagtttacctgagttaagtttgcttagttagttagtgttagctgctcagttagttaaagttagttagctgtcctaactaactagtctataaatatagaactgtaagcattgaatctttgggttaatgaaactaattttctccccttgatcatttctctgttatcttttctattatgcatgtgcttttatatacaatagcaaaaggataggcactaacatgcttctctattcacattttttacttttttaaatttaatttattgcgtatgtaattaatacagttttttttgttatcaatattaactgatgtgacagttgagaattgaaacaaaatagagacaatttgcagtaacagttaaaggttataaaggttttgaaaaagtggagaccaaacatcatagagagggtgtcaggagcttgaatgggagagtggggagttgtaaatgaagcagttgaaggataaaattggaagtaaaatgtgtaaaaccaaaaaggcatattggctttataattgttatagatgaggctagtctctacaaagtacaaactgtgtttgagtttggtagaaacacaactatgcaaaactgttaaatcttttcaccgcattttcattatatcttctgtaaagctagtcttcaactgtctttgctgatatgagtattcaaaccaatgtagcttatatagtttatagtgctgtgttgcatcctatattctatatttgaaaaaaaattgctatggatttattccactttgccttgttatcatcaaatggaattttgttgttaattttcacttgctagacttttttcttttctttctttctttctttcattcttgttttttgttaactcacctatatgatttgtcttaactagagaggaagcatttggacctgttgcaccccttttga

SEQ ID NO: 3567 - DNA, 758 bp, Glycine max
  Intron number 4 from transcript Glyma03g00740.1 (locus Gly ma03g00740) derived from phytozome v7.0 (chr-ID Gm03; pos 447159 to 447916)
cttcctccatctctaagccctctgcaggtatgtctattgaaatcttatttggaattctgatgtgcttgttttttccaaaatcaagtaaccaagttctactttaattcttgggtaaatgaattcatatgaattatttaaaatttgtattttctataatataaatgtcagaaatttatgaaccttatctgaaatacagttgatctaaattatgaatttggatcaatcaacatcaaagcctttaattcaaccacccttcttttgagaatcagatggtgcaagggaaattctgataatatactcaagcatgtgataggatattattgctggatttggtttacaattactgcatacttgcagtgtcttgtatgtttgctgtaaggcataggtgggcagttgatatgtctttgaaatttgatgatgtatttggttgaatcataaatggaaaattttgcatggaaaaagaaaactttgagatttgatagactattctctccattttataattttgtttactcaaacatctgatttgttgggattttggttgttttgttgagcatctgtagtctttttaactgatgattgttttggtgtttgtttgtttgctgttgtctttaagaatattattatatgctatatattgccacttattgtttataacttctgactgcctgcttttcttgtttatagatatttgtagttatttcacacgtatttcttttttaggaagacaggctaagaaacctacggcaacggcttga

SEQ ID NO: 3568 - DNA, 8358 bp, Glycine max
  Intron number 10 from transcript Glyma03g00630.1 (locus Gl yma03g00630) derived from phytozome v7.0 (chr-ID Gm03; pos 351571 to 359928 reverse strand)
aagattgtgacaagtttaactacaaaggtacgattttccttgtttttgacatatttttttatagcatattgagttaattagttatcatatttcatttattgatatattaatttcgtttttccaggaaattatcttaagttttatgatgccataagacgtgtttatccagatattcaaattatttcaaactgtgatggctctgaaaaccctttagatcatccggctgatctttacgattttcatgtaacatttccaagatatatagttccaaaaaatgttaattttcctatgttagtttgatcaattgaatgttatccttgttaatatatatttttctatactagatttatacaaatgctgaggacatgttttcgaagtctactaagttcgataatgtatcacgatatggtccaaaggtttgattaattaattttttgattaaaatatttatatggagtatgcataattgttttgtactcagataaatgcctaacatcttctttacaggcgtttgtgagtgagtatgctgtttggcaggacgatgccggaaatggaacacttttggctgccgtggctgaagctgcattccttattggactagaaaagaataggttggattaattttttttatggataattattaactttttattaacagaaaatgttaaaatcataatcattttctttctgtttctccttttacaatccaatatcaacccatcaaccttataactcttgttggttaattaacttttaactatagttttattccttaaattttatgaattagttggtgttaccttgagttaaacagcattacttgtgtttttaattatcggttttttcttacagtgatatcgtctccatggtcagctatgcaccgctctttgtaaacgcaaatgatagaaagtaattctcctatgctttggtctagcctaaaaaaatgatcatttgttgttgtcttaggttaatttcatcattattattagtattataccttattttatgatatgaatagattgagatggtttgaaatctattactatatatatatacatataggtggacgccggatgcaattgcatttgactcttatcggcactatgaaactcccagttattgggtgcaatgtctttttattccttcgagtggagcaactttgcttaattcaacactcctcagttcttctaataaatcccttgctgcttctgcaattgagtacacaaaccctgcaaataagaagaattacctgagaataaaggtaattgattctcttaaaatttcattaacaatgaatttaaaataaatttaacttaaagatagatatataggtactaagctaaactcaccttttgaattaattaacatatataacaggtggtaaactttggagatcatacagagaaccttagaatttttgtaaatggattggattcaaaagtgcaacaatctggatcaacaaagatagtgctcacagcgcctaatgtaagagaagagaattctttctcagaaccaaagaaggtaaaatgatctaatttataattatacataggctggatagatacatctatagaaagatcttatgctaatttgtttttggttcattttaaatgcagattgtgccacaacacacttcacttgaggctgcaagtgaagacatgaatgttatactttctccttactcagttacatcatttgatctattaattaagtagataatggaggaatgtttttttcaatcaatggggatattagaactctagtgacttgtgtatataatcttttttcaagaaataaactccttctctcttgatgctaatagtctttgcctccctttttattcacttactattgatatcaatttgaatgtgtaaatgaaaataccacgaggtggagattattaaagacaaataactgtttcgaaaggtttaaaagagattgacaaaaaaaaaaaaaaaacaaaagacgacatccatcaaattttaatactgtatattaatctgttgcaatagtaattgaaaaccaactacaaagaaaaaatctatgattcttaagaactaatgtttttaagatattgattaataaattaaaagataaaatatttattgcaaaaatcatatataagaaagaataaaatattcaacatttactttatctacagataatataaaattaaaccaataattgatcgatgtaatagtaatgaggtggttgtcagtattaaattgtaaagaatttgaatattcataagcatttaggatatgtttggtttaagaagaaaagtgaaagaagagaatatgaaaagaatgaaaagcactagaaactactatttaggttttttgcctgtagaggaaaaaataaaagaaaaagaaaattataacttttttcattttcatggttggttgtgtagaaagtttaaaaaaaagtcgtgtacgtgacataaatacccttatataatcttaggaaaataatatgtttgaaagatttttttcttataaaaaatattttacttttttctttcactgtaaaagaatattcttttattaaatatagaaaatgacagttctataaattgttctaccataataatataattaatctttctctgctcttaattgtttcttaaattattaattttttagttaaaaatgttatgttgttcaatttttttaaaaactagaggattaatttgttaacatgtataccctctcccctcgccaccaaagtaccaaccaataggtaaaagtgtgccaaacaatctattaggaacctaccacttgacccatataatttaaaaactagaaaactggatacaatcttacaaacaactagaattaactattcacattataaaaacatgatcatctacacattgcagaagtaataaggactcaactaaagaaaagttaccctgcgaataacatcaatggcatctttttcagcttttccacgcctaaccgtttctttacatgcatcctgttctagttgatcacggagaccatcatccattaattcctccatcataaagctcaaactgaagtaagacaccttagtagtttctgaaagaggaaaaagtatgcataccagtgcattaggaaatgattaattaatgaagaagatcctcattaatcaaatttggggtcaatgagaaaactgaaggggggaagcaggagccttcaagttaaaatcccttctgaagaagaaacagattcaagactcctcctatgcccatcgatagtccttactctaggaaacaactcttgtgctggatcagttagttttaccctagcacaatagattgggatctcaaggttttttttttttgtttctttgttaggaaggagaattgaacctagctatcaccttttcttccagtagcaagagtttgaacaaaaaaattgggagagccaaaaataagattttaataaaataatttattcataatttttctattttataattttgtataaattttgagcattttttagtttttgtaaaaaaaatcttaaaataacttattatgtaataattttctactaaattacttgacccatcataccaaaatccgaccaaaatatttttttatagaaaaagtaaagtcgagaagctgagaactaagaagaaaaagaatgagagaataaactatcaatttcatttttaaagtattattttctttcttaaatagcctctaaagtaaacaagtcatatgagtaattattagaaatcatactaaatagtgttgaaaagtccttcaaagtaatttgtaaacattagtaaaatatattgacataggaatgaaattgatgaatattcacatataagtccatgtagccacatatggccgtgaaaatggttgatcaatccacccatagtctcacatataatcaataacgaacatactaaactcatctgaataaccattcaaactcatcagccatcactcagaagcactcgtgaaccaagttaaccaaccacacacacccatcagtccctcaacatcaaatcatctacctcattttctattcaccacccgtgatccagtgaaacatactcatatattaaatagtacgttttcgaaaagtttggggggtcatggctcccccctatttctgaaaagttccgttcctgttttctttcttcccttttcctttttatcacccaaccaatctttctttgttagattggggtctcaagttaggcgaatgcccaacttcagagtttgtcattaatttgctgcaccaaattaaggagatgcaacttctacattccctctacccaaaactgcaatccttgagttgatatagtacttatatcagtaccaaagaaaaatcaagacacaactatatagctttctctaaaattacatttatctccgtgtgacaccatcccttgtacttcagaaatcatctctattcataacacaacataccttgtgtgtatgaggtagctttttttgtagtataattaaggtgccacattgttgataaccttggccgaaacccttgacaatgacaaaccttgatttctttaatttgagtttagtggacagttataacgtggtgttcttgcaaggaagctttagtgacatgtataagaaacaataaaatatgtgaaagaaaaagcaaatgggaaggagatgaatacagaaactagaattttaatgatgacaaaccattaaaaaacaaatctcacgttatactaaggattactttaaatgttcttaattagccaggactatttaaatttggaagcatgaagaaagaagcatatgtggcctacataaatacttttttgaacaactgttttttttttgccaataaaattataagttgttgccatgtcatcctttttgttatcaacttttatttatttcaatttaaaccttaactaatcttaatttagaattataattatcttaatttattattttaagtacatttcaattctctgaaccctattttcctttccctcttcaattcccactgtgtaagttctcttccacctagcaagccgagcgcatcactatttgtcatctatatatatattttgtcattctaatttcgtttatacaatataatggaacatctcccctcaatattagagggattttcaacatatatgtataacaacataaaatgtatccccctcaatgtaaccttagttaataacagtggaggaacatataacaataaaggaattttcggcactttatatagccgtccaagaggcaccctttgtaaccataataacaagtcatcctataataaaatgaagcctccatgatgcgcatcttgtatctcaccaatgcaccagaaacatgccatgcaaataaggaaactgatctgattgaagtttaaaataacaaagtgatgacatgataacaacttaataattactagtgttggtttaaaaatcaactgttccaaaactcctaaaatttgaaggagtttggtagaatttctcattaaacccttgcagccaacaccaccagattatctcccaatcattcctgtaaagaagttaatcaccaatgcagtattttattttatttttgactgccaccaatctagttatatacttatatctaccaaaacaacagaaatagaagtgtttttttatgtaacgtttttaatattaattataagagtttaactaaaatatttatttaacataatttaaattagaatcagtaattttaaatttcaaaccggaacagaaagttgagagattctttgaagcagacttgaaatcaaaatagttgagatatcataaacagaaaagctaaattatcttaactaatttgttattttaatttctaaactagttattttacctgtaatctcctattttcctctataaataagagagaaatggaatcattcggagcagaatgcaaacaacaatgtctctttctattaagattttttttcttctttacttgagctgcctcacagtttcctgctttgcagagcaaacttcaaccttgattgtagatgctaaaggatctgtgagaaaaattccagatactttctttggagcattttttgaggttatagagtaactttttttgtttgatagattttaaaataatatgatattttagagtcggtgaaaattctagagtgtgttatagtgcaaatgaagcaattgttcaatcttttgcaggagatcaatcatgcaggagctgggggattgtgggctgagctggtgcggaatagaggtcatttatgtgttcttaaaattatctttcatgtttggttttacacatgcaaatgctcaatgcatgagttcttaaaattttcttactttcctttactaaaaaaaaaatcactttgatcaggttttgaagctggaggccccaacgttccctcagatatttatccctggtcaattattggagatgattcaaccatactcgtctcaactgatcgtagctcttgctttgagagaaataaaatcgcattgcgtatgaacgttctttgtaatcaatctaatccttgccccgctggtggtgttggcatctcaaatcctggtttctggggcatggttagtaatctcactattttttttaaagagcaatatatgaattatttctgatcatttctaaattttctttttgttatcagaatattgagaaagggcagaagtacaaagcagtcttctatgtcaaagcacgtggtggacttgatctagacgtttcgtttgttggatctgagagaggtgaaaagttggcttcacaaaactttaggtaagtttttcaattcaattaattagaacatatatcctttagagactacattgtatttacaaaactaatcgattagtaattattggtcaatcttggtagagctcccggacataatatttcaatgtggacaaagatggagactatattggaagccaatgatacaaatcgtaatgcaagtcttcaaataacaacaagcaatacaggagttgtatggttagaccaagtgtctgttatgcccttagacacatttaaggtatatatatatatatgatcgttgacaattcattttttttctcaatttcttttctaataatcgtttcacttaattaatcttctcttggcacagggtcatggttatcgaaaggacctttttcaaatggtggcagacttgaaaccaaaatttttcagattccctggtacgttaaaattctatgcttctaaagctaggtttaatttgatttacatttataacatttttttattaaaggagatttataacattctattctattctattttacgagacttgttaattgttgtatgttttttagctccattccactctaaagagtttttttttatttttttttttagaatttgattatgcaaacattaaatatcttctcttagacctaatatattatgtgtacataggtggctgttatgttgaaggaaattatctaagaaatgcatttaggtggaaagacacggttggaccatgggaggagagaccaggacactttaatgatgtatggaattattggactgacgatggatttggtttttttgagggactccaagtaggttttccttttatataaataacaaataacaaataaactcatatgggtatttaattatttttcctattgaatttaaaaactgatccttttgtttctcgtgcagttcgctgaggatgttggtgcattgccagcatgggtgtttaacaatggtatagcttgttatcttaatagtagagaatttatattctacaaaaaagatttcctgtaacaattttttcaaagtaattcttttattagaagccatggtccgttgaaaaaatatactagctaccataaatccttctgataacagttattaaaatttttatttagcttgtctttctaattaatcaaatatttcgtttaggtctcagccttaaggacgaagttaatacatctgccatagcaccttttatccaagtataatttcttccatcttgttttcatttttttaattcgtatttctgaattttaatagttattaaaaaatctatatcttttcgttaattaataggaagctctagatggaatcgagtttgctagaggttctcccaaatcacaatggggatctcttagggcttccatgggacatcctgagccatttgacttgagaattgttgccattggaaatgaagagtgtggcatgtctaagtatcaaggtatgctttctttatttgattttttttctctcgtaaatatatatatttttaggctgcttaaaacaataatgtttggtagaagaattaataatgaattagtatcattattttattttggtatttttgttgtccagcaaactatctcaaatttcacacagccataaaacaa

SEQ ID NO: 3569 - DNA, 4279 bp, Glycine max
  Intron number 3 from transcript Glyma03g00280.1 (locus Gly ma03g00280) derived from phytozome v7.0 (chr-ID Gm03; pos 96606 to 100884 reverse strand)
tatttaacacaggtaccacctaaccttttactcaaatgtcttggtggaaatcataaagcaaaccctaagtctataaaatgtgtgttagaaactacataataataaatctgttccagtatgcaatatgctttgattcattgtaactttggaaatgaagttagaattttgattcattgcaacttaggaaattaaattggaactgttagcctaattattctttcttgcaagttgcatgttctgtttattttaattttattttctgtgattattctgtatatgtgttcccaaggatgagtgtgttttgggcaatttcactcaagtattctctcaaatagtcaaatgttctttccttccttaaaatcttaagtacgtgtatacagggacataaggagagacatcggaaaattatggtagatttaaaaagtgtgaataaaatgtcttagacttgtagagtggcttctataaagagaaatgtaaaaggctaaacctatttggaaaagcaatttcctctttaagctgactggagattgttttataacttgtgttttttagttttttctgtagttagtgtctagacaagtatcgaactgtatgtaaaactctctgcttttacccatgttgaaattacagggtatttggtattgagagacgaagaaagataaaagagaatgaaacacaaattatactcataatcctaaataattagtgaaacaatatatatatatatatatatatatatatatatatatatatatatatatatatatatatatgatatttagtcctaggagataatgcagaagtagggaaataatcctagaggataatctaatacataatgagattttcttatattctaacacttccccttccgctaaaagtttactaaactgtaagcttgttacgaataaattcttttaataaacgacatcaaactatacaattacaatttgagactgtttaatagaggaactagggtgattctttggtagtattgcagggccagccaaccaagctttatgtctttgggaaaaccacgagaacaggctaatatctttgggaaagccatgtggcctactgatacttgtggtaaagttgtgtgttaggatacaaggagaaagaagagttagttaagatagttggactattaatgaattagttaattagagggttttattagatataaataggggaagaaggttaggaaattttctcttctattttctgttcttttcttatatttagtaaaattctttcttttcttcatcatttcaattctgttcctaacattgtgaggctagactgattaatcagggaaagcaatgtagctaggctcatgtctctaggaaagtggttgggctagattatatctaatcttacagtgcatgatttgaaccaaagaaggcggatctgagtagttgaggttatgagtcaacaagaagagagagaaaatgaatcaaatagtgatgtaaaacactggaaaaagtcatgtgtcttttaatcgaggtggattgccctactaagtacccccatttattccacttagtcatcccttcattgtacttgcttttgcagcaattttaatttgagagtgtttatttatatggatttccagctagcatggtgattagcagatacaaggtttttctaaggcacttttggaccgaattattcaagaaagcaggaatcaaaatcaactttagttcagcctgcaacccaaagtctgatgggcaagtagagatgattaacaaatgtttggagacctagttcaagtgtttaatagggcacaagcctagacaatatcctcactggttaagctaggcaaggttttgctacaatatcaaataccacagctccaatgtatttgctacaataccaaatacagtctgacgctctgcatggctggaatcccctacccttgcttaagggaactatagttccgtcctatgtggaggaagtcaaccaaatcacactagaaagttatgttattagcagttgcaagctattcttatgaaggcccgaaattgcgtggctcaagctgatcaagtccatggggtgctgcattatcaagttggacaatgtgtctttctcaaactccaaccatgtagactacaagctctagccaaaaaaataaatgagaaactgaatccatgattctatgccctatttcaggtggtgagaagggtgagataggctgcctgctaattgctctgtccatcttatatttcatgtttcattgctcaagtgagccatctctccccaagtaacactataacctctacctcatgtggtcttgcttcatatgaggatggcagaccatagagggcaatacacggcgcatactgcttataatctaatgagggggacagaagttgacgggatacaggatgaggccttcgaggagctgtggaaactaaaagtgccagctaaatatgcagtatttgcttggagactactcaggaataggttgcttactaaagtaaatttgcataggagacaaatagaggtcatggataggagttgtccattttgcatgaatacacaagaggatgtaggacacttgttctttcattgcaggaaaatcatccccatctggtgggaatcattatcatgggtgaacatctctacagctttctcgaatgacccaaagcaacatttcctccaacatgggttgataatggctggggggatacgaaccactagatggaaatgttggtggctggcagtaacttggagtatttggcagaagaggaataagattatattctccaatgactccttcgacgctaacaaagtgattgatgacgcagcattcctattgtggacatggctatccaatttggagaaggacttctcactacatttcaatcagtggtctagtaacattagagaagggtttttgtattaataatgaagagacacttacattagtatcaattcctattctgatgtagcctgcatggttccctcatagactctatttagtctgttttggaaccatttgcacggccatctacatatatgtattttagtaccgctggtactctttatcaatatataaatacttatctttgctgataaaaaagaaatgaggatttggaactaaaggtgcaatcaacaaataggcttgtccccatatcagtgttgttaaatagcggccatggcgaaatggcatggcagtttttttgggggtggggtggggggtgctgtaggacgcacacccacatacttacccgctggccatttgagtactcttatccattacccacacaaaactatgaaaaataatgaataaaaaagttttgattaaaaaaacaactataattcaaattcaaataaaatacatttgaaagaacttttatgaaacagtacgagcataattataaaatattacaaatattgcaataaatttttgcaataacaaatttattaacttccaagtcctgagctagtactcttcaaaatttgttaaaagatagtacattacactaattagttgtgattgtaaagttaataagccaaacttaaaacacagcaaatgcttatttgacttcatcttcaaaattagagtcttactacaaaaggttgcttatcacgtgaaaatagtgctttggtccgttaatacctactgaaactagaacatgaaaagaaaattaatgattagacctaacacaagtctaattgaataaagagattagtgcaacatttattatattccttttcatcttcaaactatataacaaataaaggtatctaggtttccataaatttcattgttttaatttattttttatgtgtgagagagtatggggtaggggatactaagatacttacatccatttccgttgaaatttgggggtaattaccctatctgtcatgggtaatttttgtgggtatcttttgggatttgggtccgttatccattgccatctctacctggacttcaagaactcttgtgaacatcaaggagtcttttgcaaaattttaacttagggacaaggtgaaacttttttttttggaggggtagtactattagacccccaattaggaaactcaaaaatgtatatcattaaccttatttatactaatcccaaatcataatcctaacataattaggaaacaaatcatgagataataaggaaatattggaaccaatccttggagataatacggaaactaatcttaagattttaatatataagtgagataatattgtatattgttcatatattctaatgcacctctttcttttttaactcaacaaaatttatatgcagtt

SEQ ID NO: 3570 - DNA, 2246 bp, Glycine max
  Intron number 2 from transcript Glyma12g07130.1 (locus Gly ma12g07130) derived from phytozome v7.0 (chr-ID Gm12; pos 4875121 to 4877366 reverse strand)
gctaagaattccaaattcgttaaggcgcacaaaaggtaaaccctatgtgggtgtatttttcatttttagttttcgctgtttgatagtatttgatatgagagtgtttgtattggttccgattgttgaaaattgaggcggtggagcttgtagatttgtcttgtgtagtttctgaattttcatgtattggaaaatgatgagttctctttgatattttgttgtacgtaataaaatgatacttcgttattgttgaaaattcactgagttttttcaacaataacccctctcctcagttctctcaatttattcaatatgtactgtttacactgtgaatgctggatagatatcctaacagaattctgtctacattgcatatccttattcctaacagaattgataaccagcaattacatccctaactattctctaaatctagttggtttcttaactccctgcctttctatggtcttagcaattgaaacttcttcctcagtttgttgttgagcccaactatggtagcatcttggtctgggttgatgctcatatcaatgttcctcccttacacttcaacattgtcctcaaggttgagatcaggataagtagtaccaatggtatcttcatcttctcatgtagcttctttgaactttgaagcacaatgtttgcggtgctgtaatactggttaatgcatgcaaactcatctgcaatttttttttttggtgccaaatctggaccaatttcctccaactcctggcaagtaacaggttgcctctcaagctaatgcactataaacaacatgcacctttttcatggtaaaaacgcaagcctttttcacacattgcttgaatctcagcctgtgtcaatctctgaatagtttgcttgggttggctaggtgtgttggaaatgtgtgtgttgtgcgtagtcagcgtagaggataaatggtctccaattgtagtcacaggtttagtgacagtaaaatcgggtggagtaggtagaataggtggatatggtgaaactagcttcggtggattgctaatctgttgtaatttaacttcctgaaatttggctgaagccatggctttggttagtggtaggttgaaaggaggcaagtggcaacctactgcttttaaaaattcagaaagtcttaacattttgtcgtcattctcaatgtggggaatctgccattagcatccttcaccagaaaagcagaagaaacacttggatttcttcgttgttgttcaagattggcattccttgtagtaatgttgagcacaagctgatccaaccactcaagaactcctgtcatacttgatcccagatccgatcaaacttgtggcaatccctcctgtagttgattgatggtcttctcttgctgatccaattgatcatccacagaataaaagacaaatgaaagatatgaaaattcacttatttattccaataatccctctcctctcaagtctccatcctatttatactgtttagcgtttacactgcataccctataacagaattggcatccaacaattacatacctaaatattctcgaaatgttctggatggagaaaataacttttgagttgatggaagcaaattgttaatacttggcacctttggattatcacaaatgaaacttgcgtaaaagtcaaataatgataatcatttggcttgaattgaggaattatgagtaataactcattattgtcttcaattttacattttattttattactatacctgattgtttgtatgctttatctgcttatcacatgttcttaggcatgcatctaaatttatggattctgataataggacattgtgttgttaatatttattccaggtgatttctgaatcgtgacatctgcctggctttgcactttatgttaggtttgtcaagattactttgcttgtcttgattttatggattgtaataacagaagagagatgctctagatagtctctttaagtctgtatcccatgttcttattttcagttttggttgtttacctaaatctggttgaaaaaaaaccacaatagttaataatttctgatttgagttatttccttcatttttaatacttatcctttagtttctcgtgttatgcatccaccataatcttggggacaatgtatgtctttaatggtgtacctttgccttgctgatgtttgttaatattcagtacaactcaatgacattcatgaggaccttagttcacactaagctgattttttcagagtgaaaaaccttccta

SEQ ID NO: 3571 - DNA, 1135 bp, Glycine max
  Intron number 5 from transcript Glyma02g38160.2 (locus Gly ma02g38160) derived from phytozome v7.0 (chr-ID Gm02; pos 43479836 to 43480970)
gggaggttagtatttgtttgtttggttgtgactttctttttatggttcagatttgttgctacttgcatgaaagctactgagcatagctaatatattattggagatcacgtaggttgtattgtaggtgcttggtagatgtcttagaacaggacacagggttttactttacgtttcatgcattttaaaagcataacatgagattacaaaatggtatatcctggttctgctaaaaggggaggaaccaaggaaaacagaacagaaccttgttgtttgcgtaccaaatgttcccagtcccagagagcatattctgatatattaatcatttactgtgttcaaatgaacattttaagtggtttgagtttcttttgtggtaataaaacagccatctattattgcagtaaaatattcaacacaaattcattgatgttttattccttgttttcttctttcatttccttttatttgtttttttgtctctctttgtacgttgtatatcgcctcatgggatgagataatgcttttgttgttgttgtcatctctctatatattgtatactatcatgaccgatgtttacttcattttgtagcttgctgattgaaggttgagaattttgtttgttgcattatatatatatatatatatatatatatatatatatatatattatatgtatataatgcaacaaacatatagaaaactggtgttaatcactctttccagtattcaattttatatctgatcctagaaatttgtatatcaagtgataatctttgagaagttttgaatatattggaggattatcttaaaatcattttttattggacacgtcatgtacttaacatatagaaaactgtttggagtaaaaagaaaaatataatttcttttgtgatagaaatttactaatattactggagaatctatagaattctcctgctttggaattttaatgcatcttattttttagcatgttaccttgttggataaatagtttgttatttttttggtgaactggtgttattcttttgttggatcgttcatatgtcttttctattattttcctccacaacttgggggaacaaaattttgagaatgtgctttcttggagaatcttatgttctctgctttttgacagtca

SEQ ID NO: 3572 - DNA, 2817 bp, Glycine max
  Intron number 2 from transcript Glyma08g11810.1 (locus Gly ma08g11810) derived from phytozome v7.0 (chr-ID Gm08; pos 8602389 to 8605205 reverse strand)
gatcttgtgtttacccttcttctgcaaggtatggcctttttctctgttcctaatattatactgtatcatattattattaaagtaatgttctaattattctctaaaatctattgaatatcttaactcttgtgtaataacaagtctttcttataaaaagcgtgacaaaaaatgtgtttctaatacgcttattattttactgagtgtggcttgtagagtgcatttaccattggtgaaagtgaaacctattgtgtttcttgatggtgaagtaaatggattctcattctcagcatttatttttatttttatttttacctttctttctcttttgtaccttttcttttgtctggtttatatggcgtccctaatacgaatatacgatagagacggcatggaaccccgaagaatggtggagaggatgttgtttgtaagaaagagagagaatgtttgtttgaatggtttatgacgcttgtcactgtgcatggatgtgggtaacgtaattttcctccatttctgctgaaactttgttttatcttctgcacttacccaagttttttttactttaccgtttttgagtaaaaaaagtttggatttttcagaaataaaagatataatcacagttaagtgtataaatatgccttgtttgtgtgcctccttcaatcaattttacagatgatgccatatattataatatcaaatttgaagctaaaattaatttgaagttagttaataccaaaatcaatttcttatgctaccaagtgtgtttggatggatgttaaagatattcttataaccttttttgggcataaaaaatgtgcgtatatccttttatacggcatcaaatcgaataaaaacaaaagaatccactctcagtagcttccatatgaacatggatccaattaaatttcaaaattggaaccaaacactcaatttgtgttctcaaaatcgaataaaaacaaaggaatctactctcagtagcttccatatgaacatggatccaattaaatttcaaaattggaaccaaacacgcaatttgtgttctctgtgtctgattcttcgttcttcgaagttcaaattttcaaaatcttgggttgcacaattttggttgagtggtactagtactatttgactgacacattgtgtgctctctcccagagtgtgttggttactttttctacactctacactttgcgattagaccgttggatgagtcttctgcgtggcccacttcatccaacggctcaggttcaccttaatcgtacgttgttgatcttcacacactcgtgaatcatacaacattattatgtgcgatattttttgcttgatagcatggtaaagtgactctgggaatctgatgcaactgtgtagtgtagcagtaattgatgcagacgtttatgtaagctgttgttttctttaccattaataaataataatctgcggaaaatgccatacccagcaccttgttcagatgttctttctcaatcctgaaattgacccatccatgatcctatccacatttccatataaatatgagcattgttagatgcgcacatttcatcaatgggtgaaatattctcatccatcaattcatccatattacaactttctttcatttgtccattcatctaattcttgtttctgaggctttttgtctttgtagcaagttatagcatccatttgcatgtgatggtgaggtgggaaagaaaagctataattgactttttacttcatctagggtagtagtgtagttcatggagacacaattcgaaaaaaatcgaatctttatttggtataattcattgtagaaacaccaactttaatttatgttaaagagtaattggtacatatttggtcagcactcagtgtatttcacacatcgagacatatatttgaatatagaaaactgtgattgagattaatttacattacttttttttacgtgattaaaaagtatatgtaaattaatctcaatcacgtaaaatttagcccatcaaaattttactcgatgttttctaaaaagaaagaaagacaaagaagaagatacaaggtacatagtagaaggatttgacatgactctttttttagtatcttattgaagatatggttttggtagtactgtagtagggtaacttacattacatgaaaggaatttttagatggataattacaattaggtactcagtaaaaatgattggttactggctgaattgagctaaataatcaccttaaatgtttatttgatttgcaagtgtacttaattaatgtgctaaaaaagagctgcacctagacataacccatgcctgttgtacacaacaatggagggctccgatcacataataaagatgctagttgtgatcaaatcattacttggaatgtgtttgaccccttttgatctattatgactcggcatgtaagaaaattgctgatagagaccagggacaatgatggggccatagtagtcgagttctaggcttattctgccctcccacgtgtcatgatgaacctttatgcgtgagtgcttttgatcagttgagggatcacacccacatggttattacaatatagtacaactttttcttcaccatggaggtgtatcgtgcaattgaagaacaagaaaggacaattttattttatttttaaatataagtttttcagtggaagacactagtttttgggaactgatttttgtgttaagccatgggaatgcttttcattgataacttaaattatagttagtactttatggagtctaaaagttaacaatttgatctcttatcatgttcagtgctgctggaggaccaaatacaccaaccacaacac

SEQ ID NO: 3573 - DNA, 4815 bp, Glycine max
  Intron number 4 from transcript Glyma11g16460.1 (locus Gly ma11g16460) derived from phytozome v7.0 (chr-ID Gm11; pos 12327237 to 12332051)
agaccatatcagctgctgatcttgaggtgtgtaggtaacaattattttttttgagttttttatgtcaattattgaattcattgggttgcatgcatcatatttattctacttctaagttctatcaattagtttcttggcctgttgtccgaaaatatggaggaccttatggtttgagcatcctagctgtgcttcaagagaagaaggtatagatctgtcagcttgtgacgggagaaaggaattattttaacagaatatctattctcactattcatatattcccttcattaatgtatcaattaaattatctatgtgtggtttcatctaaaaatcataagcatgttagtacatttatgttttagatttgccacttgctttacccttagttaatagtcacaaacagattttcttaccgtaaacatagtactactttctcctttatcattgactgtgataacagagcaaggaaggataagagtgtgtttgcttaaggaaatcaaattaaaaggataaataggcatgaaaatacataatttaaagagagtatgggaaggggatttggcttgactaattctttggactatggtttgtgaaccattggctgaagttagcaaaagcccctagtctagacgagaggaaaaggatctattaccaaacatactatcaaaagcccctagtctagaatccaaggtctaagagaactctaggaaaaaatatcaggttactgatttgagctacaaaagtgacaggtgtagtggactacatttctgctttgtgtttgagatattcattattcccagaggcccatgggaaaccttgtcaattgagttagacggggtcacgtgaacagcattcacagttttagcttgttggttggccttggttctgcattggtcctttgtgtgaccaaatatcttgccatgactcataagtgtgatgtggacaggaattgtttccaccacaacctcctccctgttcaccgtggttgctggaccaagaaaccattttagacatgtcaacaggttcaaggtagaacaaacatttgctggttggagatatgcgatagttgctttcagacaagactgtttgatgaaaataaaaggctgtagtgaaaatccaatagttaagttttgggggcagattatcaaggacaaagactgaccatgaagacatgtttggcatattgattatttgtttgcatcatctaggggtttaagcgggtgcgagtcacttgcgaacccgaattgacccaaaccaaccctaacaatttgggttgggtaatttttgtgtttgggtccgactcgaatcgaaccgatcaaacccgttgagttttgggttgagtcacgggttttaatatttgaacctattgacccgttaatttatatttaattataattattaatatatgtaatatataatatatatttttaaattttaaaaaaataaattctattgactattgattatatagacttatcgacctaaattgagtaagtatcaatacatccttaaccttcaggattaaagcgacaagggttttattgattgaagtcacttcgaggggcttctaaaattatttcgaatttatttacaaagagtatgcctcataatgtcccattggttttggtagaaaaaagtgtttgaaactcatcctcattatgcttgttgaaatttcttattttgaatatgatatgcttaattttccatccccgatgaatagatagataaataagagtcagtgaagtagagtgaggtgtgatgacatcacaaaattttctttttaataaaaaatctaacaagaatcagttgtgtctaattcatttaataaaaattttagcttataaaaaatattgtgttttaaaaaagaatagataaacttaaatgttttgacttgttgacccaacccaacccaaaccatttacaaacaggttggtttgggtttcattttttcttagaaaattgacccaaaccaacccgtttaaatttgatttggttggggcatgggtttgaccaaacccaacccaaaccgacctgcttacacccttagcatcatcagcaaagtgcataagggaatcagttttagcaagcaagttcttaagcttattattagggttcaattgattgaaagtatgggattttggtgtggggttttatatgaccctgagtcctccaactacaatagctaccttttttgttgtggttctcccaaggttcttatcatttacctagacaagcttgcatgtccatgtattaggttaaggttttagtgttaagccgccttattgtggacacccttaatttgtagactcatgcaccttcattgtgataggtgttagggggtggatatagtcccacattgactcgagataaggccagagtgatgcatagatagcttggacaattctcaccttacaagctagttttatggagttgagttactttctaagctcaaattctaatataagactctatcctatatccattgctgttggccacctgcattggcacgccccaggctagtagccctggggtgagggtgtgtattaagctgccgtaattgtagacacccttggccaaccttaatttgcggcctcatgcaccttcattgtgataggtgtaagggagtgaatatagtcccacattgactagagataaggcttaagtagtgcttataaggcttggccatgacttaccttgcaagccggttttgtgggattgagttaggccctaagtccaaattagaaacattgtgcaggcctttgacataattgaagtacacttttttggtcttgcctcaaacataatatcatgccctgaaagagtaatataggactgaagttatatggaaaaccatatgatgccatagaatgaggcatcaatttgtttttgcctatcttggtctgcagttggaatatccttggcttgtttgacaaggtgatcatgacagcacttctcttctaaccttaattctagaacagtgcccaacaggaataatttggctgcacccaccaatttgtaacatgataaaggggacagtggtgaagctgatggcagaaggtgcattagaggcagtgctagaaggtatacatgttggtttctatgaagataatggcgtaggaggctggggtaattgacttgaaggttgaagctaaaggacttaggttagtgagataagttttcttagttgatttgggcagggaatagggaggtgagtgaggtttgtggaaaggatgggaggacggtggtggagttgccacaaaaatttggcggccagcaaaggctccagatgctggtgtgtactgtgtattaggactgtaggacacacacaacataaaatgcagcctatgctttgtgtacacacgccagcatgagtcagtaacaactaatactacccattatacatgttcttaaatctgacatttacttctaacaattttatatggtgatatatgaagtgtaacatcctaaatttttctctaagatgtatataattatgttggataaaaaattaattaaatgataaatttaaaaatttataatgtgtgtaacaacaatatttataatttcttaaagaactataaattggtgtatttaataattaatttgtaagttaaataataaataatgtaataatagtattttgattttataataattattaatttattttgaaggttcaaattatatatatatatatatatataagataataattaaattaatttttcctgataaatttttttgtcattttgtcaagacaggatatgtgtggaataaattaaaattttaatttaagttaaataaaattataatatttgattgttgacattttagtactgttagacactagtaaaataaatatagaatatttaaattaaatgaaccccaaaataaggcaccttggtcgtctaaatatgtggaaaaggaaagccatacaaatgatcttatcattcaattatatagttagatcaggtatttaaatagtagggaaaatgtggataaattatttaccactcaaatctatttggtaaaaattgagtcaagtaaaatgtgtaaaaattgactcatattttcaaaggaatttcaccctagctgagacatgcagctattctcactttcgtcttataaaatattgttatttcatttaattttgacattaattataaatacatcaatttttagtagttcaaaaatttattaatattattgttacacacattataaatttttagaattatcatatattatatattatatatatattgtagagaaatttagggtgtgtttggtttgcattttcattttctgttttcattttctgaaaattgttttcattttcaaaaaattagaattctgaaaacatgtttggttttacttcttgttttctgttttcaggaaataaaaacactgaaaatttatgatatattgacttcttatcttgttcgtatttttaaatttgcttaaaattacatttcttgtcatcgcattttcattttacccaaaatgaggttcttgttttcaactgaaaacgagattttattgctttcattttctggttgtttcctattttcattttcactgaaaatgttttcaaaaatccaactaaacacattttcatcaccgttttctgttttcaatgaaaatagaaaacagtcaaaccaaacacccccttagggtgttacaaatagaacttgttagtctccattcctgacatcctccctcaccattttatttttgaatagagttttattattcttaattatttttctttttttgtgtgtaggaagcagttcgtagggctaccatagcccagaaatt

SEQ ID NO: 3574 - DNA, 1488 bp, Glycine max
  Intron number 1 from transcript Glyma03g27790.1 (locus Gly ma03g27790) derived from phytozome v7.0 (chr-ID Gm03; pos 35579304 to 35580791 reverse strand)
aaagaaggcgacaccttcttcttaatcactcagaggtttttccttcttctttttgttttcctctctctgtttgcaacagggtacaccaaatctcacccaaagttcacaccttttctgttttttaattagattaggccaaagtttcattgttttgagaaaatgggtcatgcccagaatttgctcagatcttttgctttctttgccctccattttactgacctaactcgaattttgctctattttgtatttatttgagatggaattgttgggagatagtgggtgaaattttggctaatcttagagtttaatctgatagataattttacttaggtctaacagttgcaaccaacaaaggttggttcagttggtaaggaaagaactcttatcccacaaggactagggttcgattcccattgccaatgtgaagaccttgttggtaggtaatctggaagtatctttataagcattcttttaaccttgaggccttccctgatccctggtgatccccgggacccaactctcctaaactttcagtaataaaaaaaactattgcagccattctctgacaaagaactagcttggtgtttaattgtttttgttagaaagctgcattttgcatgatgggcaaatgttactcttactgtgttgtatgaaccctttttccatgacaagcttatatcttatgagctaatactgtaaatcactttgtttgggggagggttattgagcttaaatgttacagttgtgaaattaggaggtatagggttaagaaggatttgtttacagctgattttgcagtgcagacttcttcaaatccctaggttgcattgttgccttgccttgccttgccttgcatttttgtcgttataattcaaacttcaaagattatgtttttattcagttcggttagttgtttaacttacttttgtttgccaaaggtgcgctagggggagaggggattgtaatgttggtgtatgacttttactgcagaaaggataaaaactttacacttccgcaaagtataggtcttcatatgctcactgcctataatcaaaatcataagaaacagcttccttgtatgtgcctttcctcccaatgtgcccctaaaactggaaacaagttatcgcaaaggaaaggagctacttgactttttaaaagcaatcaaagtcgtgctgttccaaagtagatttgctcataaaaaacatcttagaactaaaagctgtgtgcataaaaaataaaaaatttcagtccctttcttaatgtttgtcagtggaagtccatagagatttctttttttattgaaaaaaatcagtgacaataacctaacttaaatttgaaatactatgcagaaattctttgtagtttgtactttaatcttcattttgtggctataccgctatagattggctggcctagtttgaataccttcacacacacatgtaattacacaggattagaaggaagttgtttctgatagattttatgcag

SEQ ID NO: 3575 - DNA, 1143 bp, Glycine max
  Intron number 21 from transcript Glyma06g45740.1 (locus Gl yma06g45740) derived from phytozome v7.0 (chr-ID Gm06; pos 48459637 to 48460779 reverse strand)
ctggcaagagttagttattctgtactttggaagttctcatttttctttttgtcgtgggggtttggtacagtagctatactctaacaagtgattaggtatctgatatatttcactaaatatctttaaggttctagggttgaatataattttaataagtttggcacatgcgacatatatgctctagcttgaagccaagtgttgaataacatgtttaacatattttacacacgttaatatttgtaggtgtcagttactgtaaagtagggattcgattgattcccttgttatttgttacttaatataaataataaaatagcatacatgtgtgtacctccaaatctccaatcattctgaaatctctcgtctatagtttcatttacaaacaactgtctggtcattacataaatttgcagccagtcgatggtagttgagttctgacagagggatgttgctgtgttaaaagaaagataagtggcatctactgatgcttaaattgttgaggttggctgcaaactacatttttgggctgactgactgagttggtagtcaggaagcaatcaaatctgtgtttctggattaaatctttttaatgtgtttctttttcattttgccttgttatgattgcacgtgaaagtaaaatgtaacatagttcctcatgctatttagtttctggtaatttaaaggcctgtttggtaaaatatgttttgttcccattttcagttttcacttttaattacaaaaaaataccttattttcattttgtttttgtttccaaagatatggataagaaactgaataaatatttcaaaatagaaaacaatataaaaccaggtaatatttgttgcaattagtaaaagaacaaggatcatagacatgaattttttttctcaaagtgaatagaccctatgtttctgtgaattaatgggtaatattagttgtttcttgcctgcatatagcatgctggtgagttcttgtaatgtaacagtttgtttaattattaggagaacacaaacatgaattttggtgtaagaagctattcattactatgcttttgtggtttccactctttgtaattggtgattaattagctgctggttgttttatccaggagaagcagccccagaaaccttggcccaaagaccg

SEQ ID NO: 3576 - DNA, 8019 bp, Glycine max
  Intron number 3 from transcript Glyma13g05040.1 (locus Gly ma13g05040) derived from phytozome v7.0 (chr-ID Gm13; pos 5269474 to 5277492 reverse strand)
gaagaggaattcaaacatcttttaacaaattacaggttggtctttttaaatttgaatttctacttttcttttcaatatacaggtttatatgtttacattatttttcattcttatcttattttcattccttcttaacaataacttatgcattctaatgatcagactttgtttctagctaaaggcttgcatactttattaatgcttcttaatctttattcatgctttttgtgatttgttctgatgtatatcatcaagtcctttttttaatcacattctcaaagctaaccccattagtaacttaagttttgtagacttacaaatgttgtaaaaattggttgggtcatcaactcagacgagacactgatttaatggatcaatggtcaaatgggatggtcactaattgacctggtcaatggtcccaaactttttggaatttttttatatattgtctttgtgttagtgttataataagaagagttacagaataattttcgatcgatgataactaggaagcaaactgaaaatgcataaggtgggctgggcaactacacaaaacgtggggcaagcacttgcaacttgtgactgtgaattttacttttaataggatccaccaagcttatgaaatatgaatcatcgttatgtttctctctcattaaaaattatctacacattaattgctttcatcaatttttttttacaatgttctaaaattgaacctcactgttatgtttctctcattaaaaatcatctatacgaaaatttcttcaataaaatttcctataatgttctaaaactatatattaaaaattatttatattttaattgttttcaataagattttctgtattgtttttaaactgtttttaaagttatttattaataaaatattaatgattttaagtcattgaatgaatataaaataagactttaattgaaattaattttttgttatttttgttgttgttcttgttgttaatattattattattattttaataatataatcgaacatcactttagcttttcatgcaagtcctttttttatttacaatttttttcttcaaattttgctatgatttggaaaaaacatgtataatttcttaagttcatcaaaaaaattattgaaacttttattaatattttagcatattatagaataacttaatttgtcttgcaaatttttcacaaaattaatttaaacataaatattctagttttttttatttagtacgtactgaagtcgttaaaagagctgatattataaaaaaaaagttacatttaaattatatattgtaaacttaattatgttttgtcttggtaagttcggccactagatccagtatatacatatatatatatatatactctaaatttaatattactgtcatgataaagtaccaaaataataaagaagaatgtcatttagaggataaactgcaataataatcattaattaaaaaatcaatggttgagattaaaaattaagtttagattttattaaataaatgtttgatttttttacactttttaattgttaattttcgaataaacaattgtaggtgtattttatcttttaaagtgcactctttcattgagctttgagacctatggattttcagattcaattcatctaatttttttaataaaagaaaagtaccctctcccaaagaaacaactatgaaaatacaagtgtaggaggtcggagattgctcaaacatcagcatgtccctccataaatatgaacaagcttaacagtccattgctcagccaatagcttccagatagcagaaacaaacccttgcttgcctccctgaatactctacccattgccacttgcgagtcatcccacacctccattttacaagagctaactaaatccattagcattcaattcctaaggaatataaatcctctcatttaaataaataacatggacacacaaaaaactaaccaagattatttaaataatagcaagtcttattataattactttgtgtgtttttgttttttacatgccaaaaattttgggacagttgagaattatgcctgcataatttttttaaaaaaggttaattttatatatattattgagagaaatttgtgctcttttttttttaacaaggcttatattaagaaacaaaaatattgggaaaaaaaaattaggtagtgcttaatttaagtgtttattttttgttttcattttctaaaaataatttttattttcaaaatttagaaaatatatatagagaagaaagtattctaaggtgttaccacattttaactttttcagaaaaaaactagaaatgatgatttgttatttttagttttggacttgtttttaaaaatatttccaaagaaaatattttttaaattttaaataaatatattttcattcttattttctgttgttttttaaatgagaactaaaaccactcaaaccaaatagtctccctaatgttcaaaaaatttaaatgttttgaatttagagcgatgtgctctcttttcattcacttgggcagtgtgcaaattaacaagtatcatgctacttgagcaacataacatctttagtgggattcttgaactcaagaatctattttcaccagatctaccactatacatgctttgaaaatcttcagcatggaggttgggttcctcctcatgaactctcaagaacttccctcatataaaaaaaaaatattttgtaatatctctctccctaactgattaataaaatatatttaagtatgatccattgtaaaacttataaaagtggctcaagaacttaaagtgggatctaccactagagctaaaaaaggaaagatttcttacatcaacaaaaactgattcaagaacccaaaattggttctaccactaaaaatgctccaagtgcaatacaagagagacaaaactttgaagaacatcatttaccttctttgattctctggtacaattagttcttctccattttttcaacttttttctttctatatttccttcaccacaacccaaatgaccaaaacttgagaagtcactatgggtgcctctatgcgatgcaacgacaacaataagtcctcctccttcgtgcgatgcaacaacactgacaagttgtgagatgcacaaaggcacgttggagacgagaaccagatggggagacaacgtggtttcacagtttcagaaaaaggaatgtgtttaacctggtctgggccacaaaatcgatctggtcattggttttaaccaaaatcgaccaagtggaccgggtggaacctagccgcatgcatgactggtcgaattaccaactcgagacaatctaagcatcgactgatccaaatcgattttcacagcattgcttagaatttgcttcttaataatttgttgtcattgaaacttcatcacatgaggagctttaccttaagaatgttaatatttactactaatttgtattaaatgcaaaaaactaaaaaaaaattaataattttggtatgaaatatatgggagaaacatatataattctaaaaattaaaatcattaagggtgacaacttttttgctttatcacagtgtcactacattgagaaattatttatttaaaaagattattcattttaattgttttctaattactaaacatttgatttttgcataaaattagaagcaaataaaggttcacatgtgaaagcccgtaatgcaaaggtcattggttgtttgatgtatgtcgtcgcatgtacaagacctatcttatgttgtagtaagattaagcagatacataagcaacccaagtaaatagcataagcatggtgtaaatagaatactaaagtatttgaaagggacaataggttattatttgacatatgatgataatccttcaattttaggttatacaaatgctagttgggtaagttagatagaagatcatgtgtttacaagcaattgagtctgcagtaggggtgttgtttcttaaggatctaagaaacaaaaacacacacacacatatatatatatatatagtatgattcttgtaagaacactatgagaataactaataataaccataatattaagattaaaaacaatagacggttatattaaaatatttaaaatttcaaattaaaatctaatatattattaaatctttaaaagattaatcaaacaacaaacaaatctataaaaatctcaattatcacttcttaacatatctcaaacatcactatcaccactaccataatcgtcgtcactatcattatcatcgtaagttgcaattacctccgctgccatgacaactgctatcatcgctgctgccattgttaccgtcaatagcgacaatgactatcatgacggcagaggtggtgacagtgatggtgatagataaactatcgttgagatattttaggatgtaatttgtttagtgaatcttttagagattaatgactatattagattttaatttaaatttttatgtattttaatctcaatcgtctattatttttcaaatttcaaattaaaatctaatatattatcaaatctctaaaagattaactaaataacaaacaaatttataaaaatttctattatcacttcctaaaatatctcaattaactcatttgctacatgagtgaacttaaaatgtgcttggataacatactttttcggttggatatgactagactattcctctagtccaccaattaatcatgagtcttattttcatttatataatgttcaatcttcttatttatatctaatgtgagacttcaacaaaaatgttctcataggatcgtgtatatatgtaggggatttaattttgattggggaatatccattaattatatgaagtttgaattaaatatttcatatcctttgacgaaaaggctagcataagatgtggcgttgaaaataaccaaagggatgggattaaagatcacaaaaccattatcaccagtggtgaaaacccaattcgcacttgagtaacatcaagtattaagtttaatagtgaaagtacactattataattattgcaagtaccatgttgataccatggttcaagcatttttctctccctagttagttccctggtctctttgaaacaggtagttgaattgtgtgatgtgtttttctgccaataactttagagtttctcacatccaacatgaggataattcttgcgcagataaattggggagttatgagttaaccatccaaggctatgagtggtgggatcttctgccactttttcttagatcagaattttatgcaaatggaataggctttcccacatattgatttaggtcgaaatttagtaataggctttggtatttgtcctctcatggttgttgtttgcgtctttattctcttttaataatattttggggggttgcttttgcataggatttgttctgtcttattttttttgccaacctaggtgggatcaatgttataaaatgatgatgttttggtaccttagtattttattaaaaaaagtacttgataccatgttatattcatcccaaggtttgtaaagtacttgattaccatgtgtttaaaaacaaagttgagtaagacatgcactcttgttcaaattagggatggaaaaaacatccgcacacacgaatatgtgtggataaaatctgccacataaaaaaaaatggatatctttaatagatatctgtaagcaaatatcatgatacatgtattcgcgggtatccgttacttgttagcattaaaatacttaaatattatttttttttacttatattttaatgtagttttgtttgagtttatattttagagagtatttttttagataactttgtttggagctcacaaaataattttttattttttaagaattatccattaatatttttaattgtgtagaatatttgaataatttcagttgtaactattaaaattacttatttaaataaaatattagaataaataaaaaaatatagtaaaagtatttttaacatatatttttaagctatttttgattttgtaaatatccacagatatatgtgggcatttgtttaagtagcacttacgcgggtaacaggatgagcatgaggcatgtatttatccagtgtgataggtgactattactcatacttactcgtcccattgtcatccttaattcaaatgagatagttggtccaaagtttgtttcccacattattttggatgagtgaaactatgtcttattaagtaaaggttcaagtgtaaaaattagttttaccaagaatttgagatttcaggggagataagaatttatggatgtttaaaatggctagctaggaattgagagaattttcaaaatatgacgattgtatgtcttcatgaaaagttgtattggttcatattgaaatttatttaatttaaataaaaaaagataagtctaattataaacaacaatttagaagaagaaagtgactctttatataagacatcaagtgaaatatgtgacttttcatggaatgaaaataattgaatacatgtgagtcttaataaagacaaagtgtttataaatatgagctttctctatgcgtaaagcgttgtattttttcattctccttgttcattcacaaattcatttgcctttgccttcatgcccacgaggcggaagcaaaattatcattttgtaaatactgttgttgtcatggtttgagttttgaagtgcatcatcaaatccaagttgcaaccaagtcttgtcattggtgaggcgaattaaacttgaaggaaaaatacacagtcatgtcacactttccatttactcttataagatcctttcccaccaacatttctttaaggattactatatcatgtgtgatattttattattgaaataactgaataacaaatgaaagatgttttggaaaaaaaagggctataagtaggagaaaaacacttatcgttaagtgggattcattttgtttgcataacttactaatgcgtaaaaattgctctcaagggaagcacacccaacaaagcagtaatagtgaaccaaaaagggtaggaatctttacaattttttatccttgttgtagtcttcacaattttccctaatttgtagctctcttagaagttctcactcattcagagaaaagtaaattcgaaataaaataaaaggtaaaaaaatgaaactgttgcctccttatatttattgttgagcctccagtgtcataggggaatgcacgaccgtgcttgattaagcacaatttgcttcaaagcaggtgctagaaccttgatttggggtatggttgttgcacaatcgtgctttgaaaagcacaacattgcttcattttcgaaagtggtgcctggtctccattgcatgccactgcttagagaaagcaaggccgaactccttattcgaaagcagaaaccttccttttccaaaataagcacagccatgtctcatgctctaaagcgaaatttaactcctttttaggttttttctcctcttcccgggctcatgtccaacctgcaccaaaaatatgatattttatataaaatcattcataaccagtgtcaaaaacatctaaatgatgcaagaaacctcatgataattacaaccaaaataggggttatcactttctttatctgttaaattttgggttgtttaattggctaatagccttaaaggtaaatgcatattattttctctactataggaaaacgaatggatctttttttacaagaactgcaatacaaacacatgccaaattataattttcaattgacttaaatactttttaagtccttacaatttaattttttttgtttttagttcttacaatttcttttttgttctactttttgtaaattatgttatttttgttctagtttttttttttaattcgattttttcattaggtattttccttaagcatatctcattttagatacatggaaggtttagggtcttttttattggactctaaaacttaaaacttctatcattataaaatgtttaacaaattagattttgatttcagtaaacctgtagaacctgatcgcctttttgagtgcc

SEQ ID NO: 3577 - DNA, 2114 bp, Glycine max
  Intron number 5 from transcript Glyma17g23240.1 (locus Gly ma17g23240) derived from phytozome v7.0 (chr-ID Gm17; pos 23050108 to 23052221 reverse strand)
aggtttgattaatatgcatacaagttaccctatgttttgcattattatggtcttcgtcgggtatttcattactaatattcagagagactttagagcttcattatattccttttttatttgagtttttcttatatcttattgtgtaatgtatgttgagagagagagaaaattagaaacatttgataaattgtatctgatttatacaatggaggctcttattaataattagtgataaatacaaaaacaaaagctagctaatttacataattatacagtacatacatacaactgatgatctcacataatatccgccataattactatatttgcataatctctaacatacttacatgatctttaacactccccaagctgaaacacaaattggcatcaaagttactccacttagaacagtcttctacaatcacaaattcctcctttgtggtaagatggtcaacataaccttgggctttaagccaaaaattgatgttggagacccaagaatcatagttgctcctatccaacttgttaacaaagagagaggcagagccatggtgaaaatggtggcatcagctttgggagggatgtaattcactacggatcagtgaaacagagagagaaaatgttgtgaagtgtgaactgtgccaaaaaggccaaaaagtgaatcccaaaactccaaacggacaaagcgagctgagcacagatcagacatgacataataggatgggttgagtggtggtgacagtgactactgactggaaatggtgacatggcagagctgcggcaaggtgagagaaaaacacgagatgcatttgccatgtgtgcaggcatgtcatcgctctgatggctgtgaaactttagggtgtggccagttttgggcatgcaaccttgatctagcaggtggtccctgtggttgccagggttgagcactgagcagtggtggagacattggaaactagagaaaaaggtggccaaaaagagaaacactgctgtagatgaagagggggactggaaattggagagaaaatacaatttctgaaaaaaatatcaccaatggatagtgggtccattgggtattcaccaatgttgttaaacttgagattctacttaggatcaagaggagggcggaaccttgtaactcagggatcataacacgaatcacatgatcctcttgaaatgcaaaatcatacttgcatatgcattaacaaacatcatagataaagctaataacctctaaatcacaacattgaacaaacttaaattgaagaatcataatcataatatgtcataagatccaaatacaatagtttaaaaaatacaattgaacaaattaatataaaacatgttcataatgcattcacaaaacataagtagagcaagttgttaaccaattgtttgtagttctcacttcatagagccaaagaggtgcaggtggcagtggcgcaggttggaggtgggatggctgcagttggcagcagtagagagaaattagggttgtagatgaagtgagaagcaaagaaggagatggagttgtgtatgaaggagaaaaggaagtttaaggtttctaaaacctgatgattaaaatcatgattttattccaatcccactcacaagtgatcccacaagcgattcagcacaaaagagtcagctcaacacataaggatcctacgatttaacttcgatcctaacaccaattgtgttcatggagtagggttgcctcttgtcaagctctagataccatgtttagagagaaaatgagagacaattgatgagagacaattgtgttcatgtagtagggttgcctcttggagttataatacaaaaaacaacagttaccctaattgacagttacatacaatatagcccataatatcccctaatttcctaattgcaatattctctaacaatgtaattctttctctcttctctaaaatactttgcaaagaaagtcaagttattttaaaatacataatatttttgtgattatgaattagtagacacttaactgatttaattcagcagtgtgtttgaggaatctgattttccatataattctctttccatgctttgattgatctgttgtatatggagcttgttaggtcattgacaagccc

SEQ ID NO: 3578 - DNA, 5997 bp, Glycine max
  Intron number 22 from transcript Glyma08g03020.1 (locus Gl yma08g03020) derived from phytozome v7.0 (chr-ID Gm08; pos 2115262 to 2121258)
acccttcgctgtttagttcccgaccacaaactacggtaccaaatattatgattaagaatcaatttattttgcaacatgcaccatgcttctaatttgatgctatttctgaaccttttatatttgatattttacgcatactttttcaagccatgagaggactgatataatgcaaagcattttaagtatatttatttaattatttggcccctcaaaatctttgggcaagatcccccactgaatttatctccaaatttacacctcaccaaacaaaaagattattctaataacaaaatatcatctatactaaaaaatttaaaactggaaaagttaggaccaagacatgttaataatataggtttcttcgttttaatgtgatgagtgtagaataaattgaagaaaggatgaaagaacgaaattgaaaacctgaatggacctgccaacgtttaaaggggtagcttcagcatagagcaagtcaccaagcacaacacttttcaaatggttgatgctgagttgaatcccagccactctttggtatccactagccatgtgggctcccatgcttgtcaaagattctgccatcagtgctgatacccctccatgcaacaccttaaatggctattacaacttctgtccatgcaaggctctcccaccataaaggcattattcttcagcagccaaaaaaagtgtgggaactcctcctcatgactcgaacaaaactggcagtagtaatcatctagctgcacattccttctccttaggttttgctcttgttggcagtctatccctcaccaacctccaaacaaagtgtgcaaccttgcttggaattttcattttccagatgaatgtgaatgccccatcttcgttctcatccgcaccacttcattaagcaaatgatatccacttcccactgagtacagcccactcacatcccccttccaaatccacctgtcttgttggttaggctgaatcctcaactcctcaatatcctccataaagctagctgctagttccatctccccttccaacatcattctccgccactcaaaatttgattcccacgattcccccacccccacacccatctgctgaatagtgtgatgttgctgttgagatatacaataaagtctctggtacttttccatcaaagacagcccctcctccctccaactatcttcccaaaattttattcgcgacccacatcctatttttcacttcacaccttcattgaatcaccaccttcctcctctaaaccacgcacaaaacacaagtcccgccaccatatcaactccttgtggttcctcctcgtttcatctaagtttctccatgccccatacttcgactccaaaacctttgtccatctaagttccaacgccatttaccgagtaatgctctgtaaaaagatgcaagaccccgcacccctagaccacctttctccttagggagacaattgtgtcccacttcacccacgccaacttcctctgcccctctccatcaccccaaaaaatcgattgttgtagccgcaccaacctatccaccaccttcttaggtaccctggaaaaggaaatgaaaaaaataggtattgagttaaggactgcctttatcaaagtcaccctttccccaaaagataagtttctttgtttctactttgaaagttttctctcacacttcaagataaccggatcccatatcacactacgcctatgggtgtgcccctatggggattcccaggtaacaagagtctacagttaaggtatcccgcggtggacctaacccaatgatatgatctcccatatgccccaaaactgctcgtagcgaaatttattttcaaacccgacaccaactcaaagctccttaacattgctttgattgccttcacattagacatggtcgcttctccaaaaaataccatattgtcaacatattggagagtgttgatttccaccccatctctacctaccaagaagcctttgaacaaatttttcttttgtgtctccctcatcaaacccattagacctttaacaacaatgttaaataaaaagggggctagtggatccccttgcttgagtcctctttgaggagagaactcatcaatgggacatccattcaccaagaccgagacaaaagaagacttcaaacaaccatcaatccacatcatccatttctcgcaaaaccccatctgcctcagcatatagatgaggaaaatcctagcacacaaaatcatatgctttttcataaccaactttaaagactagacaactttttctccccatttttgcttcatcaaaagccttattagcaaccaccacgctgtgcaaaagatgtctcccctctataaaggcgctctgacgttcatcaatgatggtggtcatgaccttctttttctttagtcttctagttaggatttttgcgacaatcttgtaaatacaacctatcaaagaaataggtttgtagtcgtttaaattttgagggtcccgaacctttggaatcaaagtcaagaaggatgcattattgcctttccggaagcgtccatttgcatgaaactcgtccaagaaacgcaagacattcattttcattacattccaaaatttcttaatgaacttaaaatttagtccataaagtcctggattcttggaacttccacattcccacaccgttgcccttacctcatcctcttcaaatctggccaccaattttgcattttccttctgattaatgatcttgaattctacaccatccagccttgatctctcaaatgatgattcttcaaaccttttcataaatgattgtttgacttcctcccttactctgtttggctcctttaccccacacccgccaataaaaatccctctcaacatgtttttgcaccgtttccaattgacaatcatgtggtagaatctagagttgcagttctactctttgaaccactttattcttgacttttgcctcataatggattgttttgagtgtgttgtcacccaaacttcttcctgcagcttcttcctcagtcagatatctttctcccctttcttttccagctcattgagtttttgctctccctctttagctaaagctgaatatccccaaattgctctctattccacacttttaatctctgtttcaacaacttcaatttttcttttaatacaaaacctccccacccttgtactgagctctttctccaacaatcccgaactgtcttcctaaaggatttatcttgaaactagcagtctagagtcttgaatggcttcagaccccagtctgcaatgattgattttagcagaattggacagtggtttgagtaattcctatccaatatgaattgtgtactttcactccatttagagaagcattcagcaaatacaagaatcctatccagctggcttttagctgtctcgtttggcctataccaattgaatttgcgacttacacttggcacatcctcaacttctagtttcactatccagtcattaaattctgtcatgatccccccctccttgctctctttggccaacccccattcgttctgactatctccttaaacagttgaaatagccaactacactccacaatttgatttgacttgcacttcttaattgtttaatttgatcccacatgtttctattcagatttgctgcatcgcaaggggaatatatatatttacaattgtaattttttcgccatcacctttccaaataccttctagtaaaataaattcactgccaataacctcgttctctaacacaaaagatgattcactccatacgcacaagatgcctctagcattgttcattgttggattggttgcccatttttcctcggaatccccccacaaggcttgacacatagttttgtcctccctttccttcttagttttctgtagacatagcatatccacttgctcttttaccatcaatttcctgtagacatagcatatccacttgcttttttaccatcaatttctttactctccataggcattgacaaagagattgttgaacgagaataattattcccaaactgcttctaagtgttcctgaacatttttggttgccacctccaagatacgtgttttcctccgttagctaccacttttgcaaacgacactttacttgtgcgatctcgtctgtcttgttcagcctcactattgttgactcgctttgttgatgtgcctatgtcctccatttccagtgtcttctgttgtcctttgttagattaacaatggggctgcgccatgaccttcatacccttgtctcgtccaccagatgtagccctgtcaaactccctttctcgtagatgcttcttgtcttccctttcatgttttggtagattcacgtgtagtttaaggccccctatgatcagattatccaactatctctcaagttgcttgacattggatacacctttgaatctaacaaaaccatatctctgaccactactgttcttgttcttagctatgaatacctccctaacatcgcctcatttcttgaaagcaaaccacagatccttttcttgagtgtcttcagggaaacgcataaagtaaaaagacgtgatatctgaagcgtctctccaatttcgcatttcatctctctgccgttgttccgccaggtccgccgtgctgttgctgtcatgctctcttcctgaaaagtggacatgggatcgatcgtttacttgctctttgtttctctcgctcacccactctctctctctctctcctctctatctctcattctctctattggaaagtttgatgtataatgcctagcattctaatttagtgtggggattgaatggcctactcttaggattagtgttagttagaaacataatgttaggaacccaaaattgaattgagaaagaaaagaaaggattttattagcaagaaaagaacaaaaaataggagagaaaactttcctccaagggtttccccttcataaaagatttctcttttcacaaagagttaatgctcaatctacaaatgttaagatcccccttctcctatccttctcctatttatatctaataaacccttctgactaactaactaaccccttaattaactaatcaatatcctaaatgtaataactaacttattagtagtctaactatgttaactaactttcccttatccttatatcctatgacataacttacaattacattgcccctggattagagattacaaacttccctaaatattctgaaatcaggttacagatacaaggggaagtgtattttttttaatgtgaaaaccatggagaattggatcccaccatcaagataatggaatcaacgtgtgtaggcaattggccttagacaatttatctgtctctaaggactagtataattgtcatctttctgtaatattctagtaccttaggctgaagcttactaagcttcaaacttattacaaacaaacccttatatataagttgaaaaaagaagaaatatagtgagctccatcagacatgcatggaatacaactcaaagactgactagagatgctggagatgtctggaatgatcatgatcatgatcattagcctgatgggaatttcgtggtaagcaatcaaacttagcgaggcccaaccttctccaaacaacatttggaagcttcaaacagcaaaatgttttaagaaatccaaaaaaatgaaattgaaactaagtctgttggcaaggagagtgactttgggtcaccaaacaagtccacaagcagtaaatagatgcaagcgcgagatcaatgcaagggattttgaattatcttaatttattgtgcatcattcttccccactaagatattttgtaaatattctaacaatatttttgcttcaatgagctcttaatttaatctccttaccttgaatgttgcaatatcatcacatattgattaactttttttttagtcataactctgttattgtcaacttcttttgtatttgaaattacttatggaaatctaaattatccgtggcaggataaggcaccagcaagccgaggctct

SEQ ID NO: 3579 - DNA, 1502 bp, Glycine max
  Intron number 1 from transcript Glyma16g14690.1 (locus Gly ma16g14690) derived from phytozome v7.0 (chr-ID Gm16; pos 15585327 to 15586828)
atttgcctctctgaggattacggcaaaacttacaggtacggttttgaatgtcatgattcagaatactctctttttgttctgcttgaatcaacttcttcagccaaattaaatagcttccggcccccctgttagataaactttctagaagttttctcgtctaatttctccaaaaactaaaatgtattagttgattttagcttagggaaaaagcttaatttattttaccttcttctgtaagtgtttgttttcttcttctacaattatttatgaggaaatttattcaagcaaggcctagacctctacctaattagcctattgcttagttaaatctatgttccataagttaaatagcaaattgaggaattgaaatggttctaacaattggaagactttgtttcggtggatttagtttagctaagtgttaatttggctcttgctgttcacttgaggcataactttgatgtcattgtcctttcatcttttgttttaattctcaaaatcgtagaggatcttgagtggttggacactttttatttcttatgaggagagggatgacaggaaattgcattattgcgggtgcatgcatttggaattattagcccatccctttagcattcattctgtttttcctagtgatcctggacaggtaaaaaaagtggggtttgtttgaacattgttctgtagttgtatgacttgttttctgattcataaatacaaccatgtttaataataaataaataattaattatacaaaggaataattcagtaatactagttcaagaacaagaatctttctacatttgttgaaaattcggtaccattcttgagtcatcattgtcttcttgttcaataagatagctgcactaataatcttcaaaaccatttaaattctagtaatcgaaaaccctcaccgagggtgctgaaaattgatgatgatcctccctgatctttactttgattgattttaattcttatctttccattaagacccgtaatgtttttgtccacaagtgagctttgtaggtatgcactgccaagagtattttaatattcaattattcataataaatataaccattaatttggtcacactccgacaacaacggttagatctagctgtccaagtgttagtttcaagattttattgcaaagaattgctatagatgcttgaaagagacgaatgaagctagctggtatagtgatagtagtgcatgcatccattgtcaagtgtttaattttttttcttttacagttggtcttacagcacttgggaataatgctctacaaagggttttagttgaacttaacaatgttgtttacaaacattctacaatttcttttctcgataagcttcagatttaaggttatgaataagcttctatatgttaagctcttattgtacaagtacttaacttaattattaaaatgcgcccataacattatttaattatgtttgtgtactatgtggggtttgacatggtgtgatttgaatttaacaggaa

SEQ ID NO: 3580 - DNA, 4006 bp, Glycine max
  Intron number 1 from transcript Glyma17g29240.1 (locus Gly ma17g29240) derived from phytozome v7.0 (chr-ID Gm17; pos 31594236 to 31598241)
ccacgcttttgaaggcattatattatactattaatgttcatactttccgcatttccttttttattttcaaattttgcattgctttgttttttttgttagaatgctgttatttttaattaagtagtttgttaagatttaagcacactagtagagtaaaagattagtctattaagagtatctccaacgtgggtacttatatgagttgcttaactttaagcaacgtttcttaagttttaccataaataatataacatattttgaagcatggtaagattcataaaattaatttaagcactcactttagcaatcttagcattggagtgaatttttgttaaaaatgcttaaatctttatggaattgtaaggtccataaaattatgataagcaactcatataagcaattatgcattgtagatgctctaagtgggagagcctcatggcttaagtaccacgtcaatgagtttatttacttgacatggatggtagctcttttccctttgatggcttcactcacctatcattattgcatttaatccaacctataggtagtctttttctagcttggctctcaacaaaaacatcaactgtaaggacttaagcacatgaagagagtccaataaaaaaagattagtccattaagtatgggagcctcatggcttaagtaccctataactaaaggtgtgtttggatgaaataaaggtaacttaaatgttgatttcaagtaaaatctttcatttttagttaaagaagttgtctgttgtatatacttggacacttgataagaactccgacatagaagttgtctatttaggattgtaattgttgcttatgctcaattgatatttaatatcaatgcactatcagtgttaaagattttatcctatcaactaataaaaaattatcgttattatgattttaagatagttattctaaagagtttaatttccatgtaatcatgtattgttacaaatatagcactagacaggacccgaagagcaacgcaagacaaagatacaagttacatgaaatttttttatcttgtatcccgtttgacaaatagtggacaacacaagtaaaataatattaaatctactaaaatactaggatctgtttgattcgttaaaaattatggtattggacaagacaaacttttttgttccacgcttgatttgaaaaagattagatgacaactcaaatcaaacagatgaggacaacataaaatctacaatttttgttactcaaaaaattatgggataactttttgtcccaagtaagtggacaagacaaatatttttgttccacgattgatttgaaaaagattagaagacaacacaaatcaagcggatgaggacatgacaaaatctacaattttttgtcccagatacaaaatattaaaaaacacatatgttcctatttctatctctttaataattgaaaaaatagtaactaaccaacataatccttttaaaaaggaaacatcggattttttttatattctaatctctctctctttttatttcggtaacactggattttttttattttaatctttctctttttatttcgataaacacattaaatttgatataaattgtattaggataattaatattaggtattttagtaaattttatattattttagtaaacaccagataataaattttcttgtaacctatatctttgtcctgtattgttattgttcttcttgtcctgtccagttccatatttttaacaaatcaaacggacctaatattaattatcctaatacaacttatataaaatttaatgtgtttaccgaaataaaaagaaagagagagatgagaatagaaaaaattcagtgtttcctttttaaaatgattacgttggttagttactattttttcggttattaaagagacaaaaatagggatatatgtgtctttttaatactttgtacccgggacaaaaagttgtcccataattttttgagtaacgaaaataaagattctgtcttgtcctcatatgcttgatttgtgttgtaccctaatatttttcaaatcaaatttgaaacaaaaatatttgtcctatccagtaccgtagtttttaataaatcaaacggacccttagtgtacttttacattttcaaccaataaaaaatcatggtaggcgtgagtaagaattttaaggtgattgttgttgaagtcaacaaacttatcatggattcaggctatgcagcaaaggataggtgctagaggtggtgcaacctagttgggatcatttcaaccactctgatgtcttagcatggcctcttttttgctttaaaaaaacttatcatatacgacaatctgtaattggatgtcaataaaaacatcttacattgtcattgcatacaatatttactctgataaaagtcaacaaatttgtcatacatgtgggtttgtgattggataaaagaataaatgttacatacacggcttactcttcttgtttatattagaatttttaacttcctgatttgacttcattattatttctctttatttatgataagtgtaaaagtatttaagattaacataagtatggacgtaattgagaagattcatagtacttaataatgtcttgaacttttaagtggacaagtaaatagaaataaattttccttgaaaaatggactgatagaaagaattcaaagaaataatgtatatttgtttatcaaaaatacagaagtcaagtaatgtgcctgttattaatagtccttcattcaggttcagcataaaaactaagctgaacttgaaataatgttctgtcaaaccgaaccaatctagttatacctttgaagaactgaacagatttggttctttattactggttttagttcatgacttcattctacttctatgaaccagttttcaactggttttagtattgtaaaccagctgacttaacagtaaactatatgtttagtgagagctagattctggctagtcctttatgcatatgtggtactatatttttaagtaacgtgtacttgaatgactcaaatccagctaaagccagagatgagtcactccacaacagttgaaaaattcagagatgatgataggaatctgcccaatagtgagaaatcttttaaggtttacacatgtaggtccaagagggtcatagagtccattcagaattagtgctgtagtgctatgttagtgggaattgagttagttagaggagtgagaaacagtgagtggattctgttataagagaaagggcagtggttgtatggggtatggaatattttggaatggaattgggagtctagagctctcattttctctatctgtgcctttctgttatttttccttcttttgcagcaccaattgatacaatacgtatcagatgataaaataaagttcatccttgaaatttttatagcaaataaaggatcataacaagtcaaaaccaaaacataacaaatctttatcatcacacaaaatctagttcagaaattctctccaggatccagaaaaaacattgaacacattgaacaaaagaaaatgagaaaaaaatcaaatgtgagtttgagtctgagtgagagtgatgaggttattaaaaggtttggatcttttgaagtacaattcgattaggtttgcaatctggtttggttcatttggatctctgaagtctgaacaagcatttaatgtggtgtatgtaatacattcacaatgttcatggacacatgacatcccctcaactacatattctctcatttgaggatatttgaaatgaaaggattcttctgtttatctcatagttttataatcattttatgacattcattttgaaagatgaaaaagttagctgtctctttccttttcctctaaaccccgccaaatgtaaccttatagtctcacactctcactgatagtgtctgttttttaatctaaccattcaatgctgcaatcacttgattggaattttattttaaatgcacataaagggattaggcgaggcacgaagagttgacgaggcttt

SEQ ID NO: 3581 - DNA, 768 bp, Glycine max
  Intron number 7 from transcript Glyma20g35120.2 (locus Gly ma20g35120) derived from phytozome v7.0 (chr-ID Gm20; pos 43400708 to 43401475 reverse strand)
actggtattgaagctagattgcttgaattataaatctattggttctttgataacttgccgtgcatttgaggcatttcatttttataacctaataatttcttatatgatttgattccagcttctaatgtttagattcattttccaattagtcctttatttttcctgtaatatcatatacggttcttattaacagtacccatctgttaatagtccttgttttatatatttactcctaaaaatcactgcacaggctacaaaatttatcttgataataatttaatcaaatatggaatagtatttttgttttaatctcagagtaaatagtgtttcctcaaaaagcattatttacaatcaaatccagattgttgatttatgtctctgacgattttatataaaaagtacattttgaaattgaatattagcttgcattctgctgtattactagtttaaggatactaatgatgattctggatttttggagataaaatcctagagtttaagcagtgagtaatgtagcctcgttgatttgtaaggattatatgatatagactagagaataaattactaatgtagagatcttaatccatctggttgagggaatccagtgatttgactaaagatcctgagaattgttgcttattctagattctagattcagttgttggattttgtttttgtagttcctccatgaatgatgagaaaataagagttttgatgtgataatcttaaacaggtgtgaagcattttcgacatacccccggacatacg

SEQ ID NO: 3582 - DNA, 3254 bp, Glycine max
  Intron number 1 from transcript Glyma09g35700.1 (locus Gly ma09g35700) derived from phytozome v7.0 (chr-ID Gm09; pos 41639977 to 41643230 reverse strand)
cctgcgagaggtttgttctttaatcctaccaacatcgttgctttctgtttttcttttttgttcactgtgtaaacaatgatgtttttttttttgtgtgtgtgtttgaatttcaattttttatattcctttttgttgttctgacttgtgctactataattttcttttttctaaccttgctaactgcgatttgcctgctggttttcttaataactttagatgagttgcgtcaagtttagtatagaaagaaataagactctctctcacatgcacactcttctttcctcaaatgctgatgatatctatcatgctttatgtgtgctttattagtaataattaattcacattaggatggaagaagaagggatatctcacaagacttggctatttccaacgtaattgtatgagagacaagcggttgttgaagaggcttgtttaatcatttaatgtctttccatgaaggttggaaagatcacactgatgttaatggcaaataacttttggatttatctgacataccatgaaactcttcttgaactgtaaatttgtatgattgagattgttattgaagctttaggacagaattttctggggtgccagtgctgtaaatggtttgcttgttgacagctaaaagcattaggaagagttgagaagacgagccacccatgtaaacagtaaatatagaggctcattatgttgtgtataagagattgaaaaattggagatataatagcctttttggtgctattatatggatgtataatttgtgattgcatatgttggcatttatgatactatcttcactgtggtttagctcaggaactatgttcgtggccttgcaatcactttattgcagataattcagaattatttttggacttaattcagagtcttatttttctcaagctccctgttttgtgatttttgtttgtgcttttaccattaagtcaatagtttttgaatcagaaaaaaagtctttgctgttaaatgaagctattaatcatactgtgttgggatagtttagatttgagtatgtcagggaatcttcataaagaagtaatcacacagagatgagtatatgttaatttagattgatatatagaggaagcttaattcctcaatccattacatatgagaggtatgataaaatactgggattattagacaaatattggtatattacttaatctgttgcaacttgcaatgatataagtaagtcctttgcatgatacattcttgtcctattttttttttttgatcggcacattcttgtcctatcatcatagataaactaatttcagtgatgtttctgttttcattgtgtgaaaataggatgtaagtattaactcattttttaaaagttctctctggaagttggtaaagtaagcaattatttcttcaagataaattaaaccaaaacacagactaacttgtggaatttctggagtaaccttaggagaatcagatgggatatgcttgtgaagagtagtagtagatttcattggcatgcctgttatttgattgatgaaccattggagagattcatgttactgtgtattttaaaggtggccttcaatattacaacctttccaagtttcaactatattttgtacttttctccatcttttttcttaatgagttttctaatgtttagtagggaatgggtttcatttcatgaagttaaaaggcaaaagccaaaattgttaattgtattttgttagtttttgggctatgtgtagctgtcagtaggcatctgctggtggctaagtgtctcacactgatcacagggtgactcagcttacttgcaatcattgtttctgtgttgacaagtgcatgttcctgaataagatttctgcattgctctaccccacccaaaaaaaaatgttttaatctttttagaactgttaattttttatgaattgatttccaattttcaatctttttcttcatgatactaatttctgggtaacaacgaaagtaggagatgttgatcattttttagatgggattacaaagataatgaaagtaatgttgatcattgctgatgcagcttggtctctttcattcatttaagcagttgtaggccaaaaatctaatcaatgtttatgttatatgtttataggctctatatggataaagattaattggcaccggttttctggtctgaatactgattctatctcttcacttgcaatttctcttctctcactgcaaccttctccttatgtagattgctatgcagctacagaatactctcatgttgctttctcctttttaattgatttgaagttaaattctaaattgtcattttggtcttagtttgagtaatctttgatcttctgtgatatttgactccatgtcatgttttgttcctctgcttttagaattgtttagcatgccatattgtcatccactatcccaaattcattttccttgtcattgtccctgattctaataacatatcaaagtttatctatttatttatgtttggggccatataattaaattgttatctattaccatatccttatttgtaatttcactatatgcatattttatttacatatagttctgcagaacctataacattttgattctatcaaatttaacccttgttctgtcatatggcaattgatatgtgccaatttacttcaatcaagagcaacggaactgacagttgatttattgcaatgtagaaatcaactgagaactctacttgtttattactattacctgcaaatgtgtgatgttttcccttttagtaaatctggcaacatgatttcatgggaggccttgatatgcttgaaatgacattcatgatggcctcactaaaattaaaatgcacacattagcgattcagttttttgctgtccacaaattagttttttaatggtctgatattgtaaattaaaacaacagtcactggtgtggaacttcctattacttgctttgatgtattttatcatagcattaaattctttttggtcctgattgcatttctttgaaatgtgatctaccaatctaaacataatagttctcaattgatttttttttctttagccagtaagcagtatttattttttgttaaaaagaatgaataatgctggtaccattgtaactcccaaaaaaaaaacaagagaaaacccaaatgagcacgtcctatattttaagtctatacaattgaaaatttctctttcatggatttcttatgtttcagaatttccctaaattttcctcttgcaggttattgccttatc

SEQ ID NO: 3583 - DNA, 1310 bp, Glycine max
  Intron number 2 from transcript Glyma01g38390.1 (locus Gly ma01g38390) derived from phytozome v7.0 (chr-ID Gm01; pos 50503238 to 50504547 reverse strand)
tcgcctagagactgaggtatacctctttttctttttcatatgtaagtttttttttttttttggttttcctagaaattaataattattctgagaaattaactatatttaaaagccataggtatcacgcaattaacaagcgagagccattttcactggcccatattagttcttgtgcttaggaaactttttgggtaaaaataaaaaaaaaacagtacaaagagtttgactttatggcctaaccttgtggaaactgaaagcgcaagtggaggtagtacgcttgcctagagaatagagagagtaagttgaaagttgaaactccttttgtttcccatcaattactttatatccaagcactgcacagtttgccctcaacggttgtgtcattttctttagctcataacagaaacgtcaatttctggctagcatgtcaccacgttacttctgtggtggctttggtatttttttattctctattgttttctttatcttttgtaactggttgatttgtttgatgaatcttactgatcaatgtccatgaaatattgattataaatttgaaagaaaaaatatttattatgtaaaatataggagattctaaaaaaagttatgagtagcatataattgcatatttcaataaaaaaatttcttcttttaatttcttaattaatgctctaagatcactgattaggttaggatttgtatttatttatttgtttgtaaattttcttagtagtttattcctgtaaatgttgaaagaggtatagaagcacccgcatgcaaccgattcttcagggcaaaacaagaaagaaaaaaaaaagtaaagaaaagtggaaccaagacccaccatatgaacgtgcagagaggagctctgggctcgaagaaacccaagtgacacttgagttctcagccatagataagtcatgtggaaaaatattcaacaaaaataataataataacaaaaaaggggaaaaccactaacaagaaaagaacagcaaactgccaccttagtagacaacagaaggcactgtttcttccatttgttcgataagttccgtacaatattattaggatagcacacgttgggcctgctcaaggcccacttgtgaagaagacacgtaacatgtgttcccacgtgaaatgccattagcctctgatcaatacctatcatgtgtctctatttagatatattcccttaacacccctttaagctttatctttggttagatattatcataaatatattaactattttcatattggcacctttgcttgtaggtgttgaagctcaaagagcaactttctgaggcaga

SEQ ID NO: 3584 - DNA, 7500 bp, Glycine max
  Intron number 6 from transcript Glyma20g03090.1 (locus Gly ma20g03090) derived from phytozome v7.0 (chr-ID Gm20; pos 2822947 to 2830446)
ctggagtgagtatatctccaacttattaaagcattagaccatagccacatatataacaaatatctagaaaatcatgtctctatctataccaatgttctctagcccaagctgaataaatttatgtgtatatttaattatctagaatatcatttcatattctgtctatgataatttatttgaaataattcattttatcctactaaaatgaaatgaaatttaatttatttttcattttattgtggttcttcacataccttcaagtaaatctatcatttaatatggcatttttgttttctgaaatgacatctctctctttttcttagacatctgttattcttgttctgccatcttgtaagtcaatataacataatgaattgaccttggatggctcttgacctctttgattgagccatttcttattttgacctaaaataaagagttgttgacttaatttcaaattgaaatatggtgaaattataataaatctcaaggaggaggaactctacttgtagagactaagttctactcacagaaatggagcagaatgaattaaaagtaagctagaaagtgaacaatcagatttgaatagacagattctgctctccctgtcataaaccacccaaccctctaaaataattgttagtctctgcccctctccatcttctttcttttccccctcctccacattcacattttctttactctgccttatcattgtagaatttttgtcaacaattccctgctgctactagtacaatgtcttgcatagcatccttcaactatcaaatttctactattctcatcttggcctccaacacataaactcagtttcacatctctctatgttaagctcaggccttgtagggaggtttcggttgttaggaggattaatcccaagctgtttactctattttacagtcccttttatctcgatttggtgtggttgtggcttataagtcataagttgcagtcactcaatacagctaaatcaacctaattttccatttctctcaatttaagaaggcttttgggttacgacaccatggaggcaactctatcccatggctttgagactgatgatcctgtccctattgaaccagaagttagttacatgtgtgacacagaagcgtggataacaagtaactgaatggctcatttcttggaaggctaagccaattgaggaggtaacttgggaagatgctgatagtatctgcaatcattcccttctttctgccttgaggaagtggtagttttggctgatagtggtgatagtactttgggcacacaaaaggttcaggttgggcctaaaaaggccctacaagtttacacccataggcctagtattaagtattagcttaattgtaattagaagagactacataggtaagtggaggaatgctagttagagagagaaaaagattttgataagatataaaaagaaatctgtgtgtgcgtgtgagcaagtgtgggggatgggtgggacacattttttatcggcttcatagcttttaacttggctgggagcaagcattgctcttacatgattgcaatactttttttatatctacaatcaataccaatctcccttttactagataggaattgattagtatcactgtttatacaattgtacattgttcattgattttatttctacacccttttaagttggagcacatgggttttatgaaccaacattcttgcatatgcctttgtagtgtctccaacattcttggattctctttccaactatggtttatggatgccacattatatttaggttaatttcttcaagcatgcttgtttttaacaagcttaaatattttaagctttatcttgagtgggtgttaaatattatcttttttatttatgtttataatttgttatgttagtagctgttaggatttagttgcaaggtatgggacttgagtcccacaccggatgtatggattctaatgtggggtttataaagcctcggggcctccaattacaatagctagcttatgttgtgtttttctcctaagatttttaacttcttatcaattggtaccagagctttccaccaggtcgtgatgccaacattgagtgttcgcccgggactagtcaaagggctagtgcccagccagcttacgttgcactggggctgcagagcgttgtgggatattaggatccacttggaaggtacgagacttgagtcccaggttggaagtatgggattctaatcaggccttgagccctccaactaaaatggccagcttttgtggtgcagttctcccaaagttcttaacagtagacaatagccttattggtttgagtttgtgctagtagtactacactaatacaatacacaacataaatagtataaaaaaatagatgtcaatgtttggcctaattaattattatgcatcccatttcaatctgttaaattatgtgtgtacatgcttgcttctagctttatgtttaacttgtttcagaagacagcattgtaatgtcccatcaagctgtcttatctctaagccttgtattgtgtatatatgtatgtgtgttaaagttaataaaaaaagggaggttacttttcaactcactaaatatcaaagcttctcaagttggcatcagagcgggttctgccgtccgccgccaccgcccgccgctgtcgccgccgtcatcttctccggcgagaccagggttaggatcaccggaaaagcgcgaccaaaaccctgcaaaacgcgccgtcatcggagcttccacgcgcctccacgcgcggttacaacttcgtgtctcttccggcgcgtgtagttcacgcgccgccgtgccgtcatcggaatcttgttcgagttgctccagcagcctcgtcggcacctcgtggctgcattccaagtggtggttttctgttttgacaagcttgtgtggtagcttgtgcttagttctaccctttttccgttaggatttctgtcattgatcaaaaatgacttctgctggacctactttttctttttttggaactccgactatcacaactgcgaaactaaactggaagaactatttgtcctggtctgcttcagttgagctgtggttccttggccaaggataccatgatcatttggaaaagggtattgatactgttccaagtgacagaaaatctgagtgggagaagctggattattagctatgtgctgtcttgtggcaatcagtcgaggcggatgttttggagatccttagatcgttcaaaacatgttgttctttttggaagaaggccagagaaatctttgccaatgatattcagagtttgtttgatgcaactatgaaggtcacagccctcaaacaaaccagccacgacatgattgcacacataggaaaagctcgggctgcagtggaagagttgaagaggtttcttgtagctgattcgctggaggaagtgaataaaaagctggataagttctatatggttcttatcttgaggagtcttcattcagattttgatcatgtgcgtgatcaagttcttgctggagatcaagtaccatcgatggattctctcatcactaggctgcttcgggtgccccatgtgctgaaagaagaaaatctagctgacacgatggaaacatcagccatggttgcaactcgtgggagagggggaggccgtaacagtagaggaggtcggagtggtagaggtggacgtcctcaatgctcttattgcaagaggatgggccacactcaagagaattgctattctctacatggctttcctgataaagtagccaggtggctcagacagaaaaatcagagtccaagttctctgatgaagagtaccaagagtatttgaagctgaaatctgagaaatccagcagtcaagcctcatcttcctctgtaccatgttactcgacggcatgtatttctcaatctattgacggtcccagtccttggattcttgattcaggtgcctctgatcatatttctggtaataattcctctttttcatccatttcgtttccaaaaattcctcaccttattactgtagctaatggttccaaagttgcagctcaaggaagcggtcaagtttctttatcatcctcattaaagttggactctgttttgtttattcctcaatgtccctataatctaatttcattgagtcagttaactcgttctttaaattgctcagtaacctttacagctaattcttttgttattcaggaacatggcacgggtcgactgattggagaaggacgtgaatcacgagggctttactacctgaaatccaatgtttctgtttcctgttttgcaacttcaaatcccaaacttttgcataatcgtctaggtcacccaagtttaccaaagctgaaaatgatggtccctagtctgaagaatcttcgagtcctagagtgtgagtcttgtcaactaggaaaacatgttaggtcttcattcccacaaactgttcaaagatgtaattcagctttctctaccattcattctgatatttggggaccaagccgtgttacatcttttggttttcgatattttgtaacctttattgatgaattctctagatgtacttgggtttatttaatgaaagacagatcagaacttttgcctatatttgtgtccttcctaaatgagattgaaaaccaatttggaaaaacaattaagatctttagaagcgataatgccaaagagtatttctctcatgatgttacttcccttttatcttcaaaaggcattctacatcaatctacttgtccccatacaccacaacaaaatggtatagcagaacggaaaaatcgtcatcttcttgacaccgcacgctcactaatgttagcatctcatgttcctacacaccattggggggatgcggtgctcactgcttgtttcttgattaatagaatgccttcatctttccttgaaaatcaaatccctcactcaattattttttctcatgatcttttattccatgttccacctaaagtgtttggctgtacttgttttgttcatgatctttctcctggtttagacaaactttctgcccgggcaatcaagtgtgtctttgtaggttattctcgtcttcaaaagggttacaaatgttactctccatctaccagacgatactatatgtctgcagatgtaaccttctttgaagatacaccaattttctcaccatctacagaccattcctcttccatccagaatgttcttcctatttcctctccttgccccctaggtatctcacaccaaaatgtcaatgaaatttcaccttctccaccacatccgactgaagttgcttttccacctcttcttacacatgaacacaggacacagacagttggttctccaatacctgaagcctctcctcatgattctcattcttcttcaatcaatcctcaagccatggatcctacttcctcaccttcgtctgattcagactggcccattgccatccgaactcgatccactcgtaatcttcatcctatctataattttttaagttatcatcgtttgtctccttcatattcttcctttgtattctctctatcttcgcattttgttccttctaatactcatgaggcacttagtcatcctggatggagacaggctatgattgatgaaatgcaggctcttgagcataatggtacttgggaacttgtttctcttccccctggcaagaagactgtgggttgtaggtgggtctacgcagttaaagttggtcctaatggtgaggttgattggcttaaggctagattagtcgctaaaggctacactcagatatatggccttgactattgtgacactttctctccggtagctaagatctctactgttcgtttgttccttgctatggctgccatgcgtcattggcctcttcatcagcttgatattaaaaatgtctttcttcatggtgaccttgaggaggatatttatatggagcaacctcctgggtttgttgctcagggggagtatgatcttgtgtgtaagctgcgtcgatctctctatggtttgaagcaatctcctcgggcttggtttggtaaattcagtcatattgttcaactttttgggttgaaatgtagtgaagccgatcattctgttttttattgtcaatcatcccctggaaaatgtgtttatttgatagtatatgttgatgatataatgattacagggaatgatgctactaagattgtccagctaaaggagcatttattcagtcattttcagaccaaagacctgggatatttgaagtactttcttggtattgaggtggctcagtcaggagatggtgttgtgatctcacagaggaagtatgcccttgacattttggaggagacaggcatgcaaaattgcagacctattgatagccccatggatccaaatctgaagctcatggcagatcagagtgatatttatcctgaccctgagagatatagaagacttgtgggaaaacttatttatctcaccattacaagacctgatatctcctttgctgttggtgtgattagtcagtttatgcagagtcctcatgtcgatcattggaatgccgttatgcgtattcttagatatataaagagagctcctggtcaaggattactatatgaagacaagggtaatatgcaagtatctggatattgtgatgcagattgggctggttgtcctattgataggaaatctacctcaggttactgtgttttcattggagggaatcttatctcttggaaaaacaagaaacagactgttgttgctcgatccagcgcagaggctgagtaccgatctatggctttgatcacatgtgaacttatgtggattaagcaacttcttcaagaattgaagttttgtgaagttgcacgaatgaagttattttgtgacaatcaggcagccctccacattgcgtccaatccagtctttcatgagaggaccaaacacatagagattgattgtcacttcattcgagaaaaattattgtccaaggagattaccactgagttcatcaattctaatgatcagccaacagacattttgactaagtccttaaggggaactaggattcagtttatatgttccaagcttggtgcatatgatttatatgctccagcttgagggggagtgttaaattatgtgtgtacatgcttgcttctagctttatgtttaacttgtttcagaagacaacattgtaatgtcccatcaagctgtcttatctctaagccttgtattgtgtatatatgtatgtgtgttaaagttaataaaaaaagggaggttacttttcaactcactaaatatcaaagcttctcaagtcaatctaactgcgtattgttgattattcatagtcctgctttcactccctttacctacctataccttgtaattgcaatagatatcttgagtaatgctttgtttaatctcttctctcaattcttttttacttcttttgcgggggagagataagaatgatggcatgagatggctaatgtcttaaaatggtggaagttgtgctcaccattggctctattttgaatcaggtat

SEQ ID NO: 3585 - DNA, 6224 bp, Glycine max
  Intron number 3 from transcript Glyma10g26920.1 (locus Gly ma10g26920) derived from phytozome v7.0 (chr-ID Gm10; pos 35424783 to 35431006)
tggtatatattttactccccatctcttcactcttatactggttgtgcagtttgtaaacagagaacgatagacaaaccttagatatagttctttaggtatttttggtgctattttccaattagaattggaattttgcctcgtaatccacataataaaagtaaagattagtataggtcatggagatgaaactctgttgtaacaatagtttatagcaaaccgaaaaaaaattactggctgagtcacggacaatgtcgctttctttaagacgtttcgtggcactgccaaaaattgtgcaagcagactatcaaccacgacgtccccaggataaaacagcccagatcactgtataagattcccactgcactgagggaaccttttctagaattacaccctcttgtatgacttgaaaagtcactctaaaaggcaaccggaaaatgtgacttaaaaagtcactcttaaaggcaaccgaaaaatatgacttagaaagtcactcttaaaggcaacagaaaaatatgacttagaaagtcactcttaaaggcaaccaaaaatatgacttagaaagtcactcttaaaggcaaccaaaattttagagcgacagaaagaaagagggagaagtttgccggaaatgcatcgactgaaatatgggagggagaaagaaaagttgaggaaatacttctcaactggggcaaggaaaaaagaagaaaagagctttctatatatagggagtgaaacactattcaagtgtttatcctgagcgatgtgggacttgaagctttttttttctttttttcctttctttttttttcaaactttcatttgtactaacaatcccccacttgaaatttgaaaagaagattttcgaggatatcataaaattatgcataaacaaaggtgtcatacaacttgaacctttgcatagtgagtaagattcagattttactagagtgactcgaagtcttgaactctatctccgtcattaaaccacacacaaccttttcataggtgtgttctataaagcccgtgcgttaaaggccatgcacgtctatcccgatatagtgaacgctctagaaatttttgcccaaaatttcatatgaagcggcccccacttcaacattcacataggtgagtctatcaagagtactcctgtagcctaggtgctccactcaatgtagagcatagatctcattaagaattatgaattttttccataactcatcctcttgttacttcaggaatcatgctgctttcacttataacaacatgttcatctcatatcacttcataacttgttattacccattgaacctaattcttgggatctccagtcatataggtcgggttaccatcatgaatgatcatcgcagtaagggcaatagtcccattcttttagaagtgttatggactttctctctagctaatcctttcgtcaaagaatctgctaaattatcatcagtgcgtacgtgatccactctaacagctcctgttgagagtaattctctaacagtgttgtgcttacgacgtatctgtcgtttcttaccattgtaataacggttctcaatttttgcaatagccacggtactatcacaatggatcaacacagctggtatcggtctttcccataaaggaatctctgcaagtaagcttcttagccaacttgcttcctcactagcagttgctagtgctatcatctcagattccattgtggattgagctaagatagtctgtttctttgacttccaagaaacagccccaccaactatgctaaatatatagccgctggttgctttggaatcatctgaaagagtgttccaatctgcatcgctgtatccttcaagtacagcgggaaaccttttataatgtaatccaagatttatggttcttttaaggtacctaattaccctttcaatagcgtgtcagtgctccatactaggtctactagtaaacctgcataataatcccacaacataggctatgtcgggtctagtacaatcagtggcatacctaaggctgccaatgatacttgcgtactcagtttgtcgtataccttcaccagtgttcttaaacagttttacacttggatcatatggtgtactagcaggtttacagtcaaagtagtcatatttctttaagatcttctcaatgtagtgagattgatccagagaaattccctcttttgacctagtaatcttaataccaaggattacacttgcttctccgaggtctttcatatcaaagttgttacacaacaatgatttcacattgttcactacatgaatatttgaaccaaatatgagaaggtcatcgacatatacacatatgatagtgcaaatattatttacagatttgtagtaaatgcatttgtcactttcattcaccttaaacccattcgagactattaagttatcaaacttttcatgccactgcttaggtgcttgttttaggccatacaaagatttatctaacttgcagactttatcttcttgtccatgaatcacaaacccttcaggttgttccatatagatttcctcttccaattcaccatttaaaaaagcagttttaacatccatttggtgtaccactagactgtgaatagaagcaagagatattagcacccgaatagatgttattcaagtgactggtgaaaaggtgttgaagaaatccaaattctctctttgcctaaaacccttggctacaaggcgagccttgtatttatccacagtaccattaggttttagtttctttttcaagatccatttacaaccaattggtttgcaaccaggaggcaagtctactaaatgccatgtcttgttagattctaaagaatccatctcatcattaatggcttcttgccacaagtcagcatccaaagaagacaaagcttcttggaggtttgatggatcctcttctaatgtataagccatataatcgggcccataatctttagcaattcttgctctcttacctcttcgaggctctatatctggttttggttgtgcaagattttcactactaatagcaggaagataattggatgaagtacctccactatcccttaatttaaaaggaaatttattttcataaaaatcagcatcatttgactctatgatcacttttgcgtttaggtcataaaacctatacgctttgctattaatagcataaccaatgaacacacattcataggctctacttgcaagtttaaccctcttaggatctgggatccttacataggccagacatccccaagttctcaaataagacaaatttggttgtcttttctttaatatctcatagggagatgtcttgctttttgatttggggattctatttagcacataacaaacagttaacaaaatttcgtcccaccaaaaagatgttgcactagaactcaacatagtagctacaactaattttgtaaaagttctgttctttctttcagctttaccgttcattttaggtgaatatggagcagtcgtttcatgtatgattccatgcaaattataaaactcattaaacaaactggaatcatactctgtgcctctatcacttcgaagtttcttaattttcttattgaattgattttcaatttctgttacaaataacttaaacatgtcaagcgcttcacttttatttttcataagatatacatatgtataatcagagcagtcatcaataaaagtgataaaatatcgttttccatttatggtcaacgttccatcaaattcacatatatcagaatgtattaaatccaatggctcagattctttaactactgatttatgtgatttcttagttattttagattgactgcaaaaaacacatttttcaaagtgatttgaagatagctttggaataaaacctaagttactcatattagatatgcaacgactatttatatgacaaagtctagaatgccagatattaaaatcacacagcatgtaagcagaaggagaaactttattaatatcaagattcaatttgaacatgccatcagtgacgtaccctttccctacaaataccccattcttggtcaaagtaaataaatctgcacctatggtctgagtaaacccaaccttgtttaaaagaaaaccagaaaccagattctttctcatctctggagtatgcatcacatctttgagaatcaaagtctttccagaggtaaacttcagttcaacatctccagttccaacaacagtagtggtgtgggaatcacccagcaacactttcttattttcaacattcgtgtatgctttaaacatagcacgatcatagcagacatggcgggaggcgccagtgtctacccaccatccatctgatcctccaatcatattgatttctgttatcacagctatgtatgactcttgagtcatgttagcctggggagttcctgtcattgaaggatttctgcatttacgtgccatatgtcccggtttgccacaattgtagcagaggaatggctcaccgggattattcttggcaggtggatgttgtctagcatgttggacccttggggggttcttgttgcggttggaggtattgctcacattgcggttctgattcttaaagtttttgccaataggcttcagaactgcacctgtgttcttccttttagtgttgttgtgagacacaaccaacacttcatctttttgatcttgtctgcgtgcctcttcctcaatacgcagacgtgtgatcagagactccaaagagaattctttggtcttgtgtctgagaaggtttttgaaatccttccagccaggaggcaatttgtctatgatgacagcaacctgaaattgctcatccaatgtcataccctctgatatgatatcatgagcaattttctgtatctcatgggattgagactctattgatttatcatcagtcatttgatacttgaggtagcggctaacaacatactttttagtcccagcttcctcagtatcaaacttcttttccaaagccagccaaactaatttggcagacttatatgggctataataatcatagagatcatcagctaacccattcagaatgaaattcttgcataggtaatcattttcattccagagagctaattccatagtcattttatccttcacttccttctcagcatcctcaagtaccaccggaatatcagtgttcaaaacataggcaacttttctcatagttaaataaaacatcatcttttgttgtcaacgtttgaaatgatatccttcaagcctaaaaggtttgttgaggtcattgttgttcgagccagtaatatctacggtagccatagcagaatcgaaagcgtcttaaaattgttgtaacaatagtttatggcaaaccgaaaaaaaattattggctgagtcacggacaatgtcgctttctttaagacgtttcgtggcacggccaaaaattgtgcaagcagactatcaaccacgacgtccccaggataaaacagcccaaatcactgtataagattcccactgcactgagggaaccttttctagaattacaccctcttgtatgacttgaaaagtcactctaaaaggcaaccggaaaatgtgacttaaaaagtcactcttaaaggcaaccgaaaaatatgacttagaaagtcactcttaaaggcaacagaaaaatatgacttagaaagttactcttaaaggcaaccgaaaaatatgacttagaaagtcactcttaaaggcaacagaaaaatatgacttagaaagtcactcttaaagacaacaaaaaatatgacttagaaagtcattcttaaaggcaaccaaaattttagaacgacagaaagaaagagggagaagtttgccggaaatgcatcggctgaaatatgggagggagaaagaaaagttgaggaaatgcttctcaactggaacaaggaaaaaagaagaaaagagctctctatatatagggagtgaaacactattcaagtgtttatcctgtgcgatgtgggacttgaagtttttttttctttttttcctttcttttttttttcaaactttcatttgtactaacaatctataattttggttggaaaataacaccaaaaacacaagtaactactacatctaagttttgtcttttcttttcaatcttatgttccattttcataggttaaatgccttattcttttaagtaacttatgcacctagtgcataagataaaaagatcaatgttattttgcttattgtttctatgtaaattgtgcacttcaggaactagaaggacgggct

SEQ ID NO: 3586 - DNA, 1487 bp, Glycine max
  Intron number 11 from transcript Glyma05g12780.2 (locus Gl yma05g12780) derived from phytozome v7.0 (chr-ID Gm05; pos 13026430 to 13027916 reverse strand)
aggttgatcgagaatttcttatattcaataaagtggtaggttttctttatatatttttggttattaattttgtttattctttcagggagatattcaacctaatcaaatgaaatctaaatcaactaatccatttgattatccctatgaatctgatgtagatcacaacaatatggtatgtcatggagagttagtaggtgtttatctgttatttaatatttctagtatagttttgttatttaatatttgtttatttaaaattagttcctaatgatacttctgccaaattttacctcattggtgatagttcatctgatcacactcttgaaggttcataacatgtgattttaaccatttcaattcagcagtgttacttgcagtctttctattcggtttgttttaatgttctgaattcccaggagtgatagttgatctgatcactctccttcatttgaaaccttttgaaactccaccatagctaataaaatctaagggggtctttgttccacggattgatattgtattcccaagaatatgataagtaggaatgttattcctaggtatatttaatacgtttttggttacattttaatattcctagggttatttttaaaattcaaaaataatttaaataaaagtaaaaatggaaggatcattaaacattttggagaataacttccatgttcccatgggaatatcacttttccatcccccttgggaataaaagtataggaaaacatagtataaaaggaagttacaacgtttctagaaatcaacaatacatgggaataatttttcgaaacttgtaacaagcataggaatgttacgttcccatgtttacattactaggaatgaacttttaatccatgaaactaacacgctctaaagggcgtttgatacaagaaaagttttttcatgtgctgaaatcatgattcctaggaatggctaaaatctatttggttggcccatacatattattggcaatacttatgtttcttgggaataaaatattttcacatttagttttaatagaattttctcatttacttaaatatttaccacattaaattgtctaataagagcaacgtggtattttacccaaataaaactttttctctacttggaaaagttagattctcacctccccttggggacaattttgtgggaaacactaggcaaaaacattcctaggaaacaatgttttctgggaatgttatttttaaataataaaccaaacatgatgggaaacaaatattcccaacttcagattccagggaaacgaaaatttttccttgtacaaaatgctcccttaaattaattcttgcagcatggattccaatactctggtattttgctgctgcctatggaaaagatacaaatctgacaatttgaacatgggatataggagacagtgagataatgacttatcttctgttacctattatatgtaacatgtctggtgtttggtgtttcgaatacagtttcttgat

SEQ ID NO: 3587 - DNA, 5722 bp, Glycine max
  Intron number 3 from transcript Glyma12g07860.1 (locus Gly ma12g07860) derived from phytozome v7.0 (chr-ID Gm12; pos 5500598 to 5506319)
ccacagtgtgagttgatttacattttgtctcaggcatgtactgaaacaaattacagtgttttttttatcaaagtgaatcacttcatttcttccacttgaaaagtaaaagaacgtatatatttctgtgtgttttgaatacaaacactaatatcctttttataggctaagaataactaaccctattaaggaatatagggaaataatataaaaaggaaatatgaaaataatgagatatttatctaaatctaataatgccaacacaattacaatttcttttcagtttaaggacccaattaaaaattcccaaaaagtttaggacctactaatgtattaaaactaaaaagatactccctcctgtccttattataaggtctaagttaaaagtatgatttggtcctttttataaggtccaatctaaaatgtctcctacatttattatttttcacaaaaataccctttattaaagtcagttctagaataatgtgacagtgagagaaatataacacattaatgtttttgttagttttggaaattaatttaagacaaatgtaatgctgttaactaaatttaccaaattcctttatcttggtgatttagttaattggaccttataataaggaccaaaggaaatactttttaagcttcccttcaagttggtaaatggatatcaagttctggaaatcttaccatagggagctccttggtcaatacatctgccaattggagtcttgaaggaatgtaagttgtagttataagaccattatctaatttctctttaatgaagtgcctgccaatctctatatgcttggttttgtcatgctgtacagggttgtggacaatgctaatagtagaattattatcccaaaacaacctcagagggttttcataatttatcttaaggtcatcaagaatgatcttcatccataatatctcacagatgttctgtgccatagctcaaaactctacttttgcactagaccaagcaattacattttttatactcctccatgttactaggtttctctgaagcttgcaataccctgagatgtatcctttatcaacaactgactcagcttagtcttcatttgtatacatttccttgggtagcttgcattctcttctaaataacagtctgctttatctgttgtcctacaagtgttgttcttggggatcatgcatgaattggcttaccacactcacagcataagcagtgtctggtctagtatgggacaagtagatgaactttcccactggtgtctggtactgtgacttctctactgttggccttaatccccacttccaatcttgtggttctgctcaatgggaactttgaatgttttacacccttatttgcttgtttctttgagaagatcaagtaaaaactttctttgggtgataaaggtaccttgtttggaataggcaacctctatcctaagaaaatacttaagctttcccaattctttcatttcaaactaggttcccaacttctccctcataaccttctttttagtctaatcattacttgcaatgatcatatcatccacatagagtaagagtgtgaatttcccatcatgcgagtgttttatgaaaaaggtatgatcattgtaagatgtgtgtaataccacacttcaggatgctttatttttaataaagatatcatataattaaggatacaatgaaagaataaaaatccctaattcctagttatacacctttccatatttccctatttacatacaagaaaatcatatctttacaatacccctcaagttgaagcatatatgtcatacgaacccaacttgtcacgaatgtagtcaacatgagaacccttgagagatttagtgaacatgtctaccagttggtctttggagctaacaaagtcagtggtgaattgccaagtgtaccttctcccttgcataatgacagtttatctcaatgtggttggttcgttcatgaaagactgaattagatgtgatgtggagaacaacttgattttcacatatgagcttcatgttatgagtatcttaaaattttaactgttggagaagttacctaagccttgtaatctcacatgcagttgttgccatagcgttattcaactttggcactggatgtagccactatattctatttcttgtttcgccaggagatcatatttcctccaataagaacatgatatccaaaagtggaaccatatatctgatagtgatcctgcccagtcagcatcaaagtaataaatgattatggtattgtctttgtcttcatataataatccatatcctggtgcaatcttgatgtactgaaggatgcacataacaacatcccaatgactgtcacaagtggcattaaggaattgactcaccatgctgacaacaaagatgatgtctggtacaatgaggtaattacgtctgcccacaagtcgtcaatatcttcccgagttttttagcggctcaccctgacctggaataagcttggcagtaggatccattgcaatgttgttagggcgacaatcaagcatacttgtctcagttaggatgtccaaagcatactttcgttaggagacaacaatgccagatgaggatttgtcaacctcaatgcctaaggaatgcttgagcaaacaaaaatgtgaatgctgattctaaggcaaataagctattatttagggactcccactaattgtaacactccccctcaagctggtgcagatcttaaattgagcaaacaaaaatgtgaatgctgatcgataataatgcctcattatggtgggcagatcttaaattagcccttcataatccccaacatgagatggtgttaaagggagggctaacatggaaggtggggaatggaactaaaatcaagttttgggaggatcattggggctttggagacacatcgctgctggcaaaataccccagtttgtacctaatttcagaccaacagcacaactatattcaggagatgggtcagcaaacagacaaagggtgggagtggaaatttaaatggagaagacacttgttcgacagagagcttgagatggcagattgcttcctttctgaagttgctggcagcagtatccagattcacaaaaaagatgagtggatctggaaagcagagcctactggacaatattcggtaacaagcgcctataatatgctcaatggagtggatgttgaggaggataatgggtggatgtttgaggagttatggaagattcgagtcccaactaaaatcactatttttgcatggaggttattaaaggagagactacaaacgaaggcaaatttgaggaggagaagggtggcaattaatgatccattatgcccattttgtggtaattctgaggagaacgaagcgcatgtatttctgacatgtgacaaaatactcccattatggtgggaatctatgaaatgggtcaaccttcatggagcttttccgcagaaaccgtggcagcacttttcccagcatgcattctgttttcctagcaaaattcgtattaaccgatggagaagttggtggcttgccctcacatggacagtgtggcagcaccggaataaaatcatcttctcaaatgaaacttttgatggaaacaaattaatggaggatgctatttttacattatggacatggctgaagaactttgagaaggactttgctctcacttacagctattggtcgtctaacatagcagcaggatttgtattttcaggggggtagaaaccatagacagtgggtgttgtaggtctttgtaatacctagctttggttccttgcgagactgctattagtctgagcttggaaccatgttgctggcaagctaatctaattacatgtactgtttggtacctctggtactcactatatatataatatattttatctttgctgatcaaaaaaaaaaaaaaagctggtgcagatatatcatatgcattaagcttgttacatatagtttcaacccggggtcctttaagagacttggtaaaaatatctgccaattgatcattggaaccaacaaaatcagtcgtgatttcctcaaacaacaccttttctcttactaattgataatctatctttgtgtttagtctgttcatggaagaccatattagatgcaacttgaagagcaacttgattgtcacaaataagcttagtgtcctgagtgtcagcaaactgtatgcagctgctaccatggcacggtattcagctttggtgcagaatctagcaactatattttgcttcttgcttctccaggagatcgaattctctccaagcaaaacacaataaccagaggtagatctcctgtctgatggtgatcttaacaaccaattttggcattgcctttgtcttcatataggagtcctcgacctagtgcattcttgatatatctgaggatgtgcatgacagcatcccaatggctatcacaaggggcacggaatagcatgcccgcaggcggaaaagaaaaaagaaaaaggtgtagaatttctgaattgtgtcttaacaagatcacacacgactgtctatataatatatatttacaataaatacaaataaatatgaatgctgattctaaggctaataagctattaattagggattctaccactaattctaacagtgacaaaataataaaagcctaaagttacctggctcttatgatttggtcgctagagagactagactttatacgtgttgaacagaaaaagtgcccagttataaagactgggcacacaagggacaatgacctactgtgaagattggatacatgagattggttacagatgatggctgatgtcagcggaaaagagaatcccattagataggagttaatacctacttgaaagaataatgtctgaatattaaattcataaattacagttgtactaaagtaatttacataaagaaatgacttgaaatataaggaaaatcactgaaatattatttcttgattttcagtgtatattaagggtctatttatacggctctattcataaaatcaagctcaattaaacaatcctaataaggaataaatcaaattaaatctacaaaaaaaggaaagaaaatataaacacattaagcacatgctgcacacgttacaacagaataatttctgaatactatcactttgatgatttgaaaccatacgaggtgttacattagaccaaacagcatgattacatacctaaaataagactgaaaatctggtagatatctataataattacagtacagctaatgagggactgctacaacattatataaacttgtattgataattacttgctagaatatagctatacagtaagaaaatctgtcctaataaaaggaaatcaagcaataaatctgtcctaacagaaacaactcattccaagacagcaacccatcacagtttatcttgttgatcaacttaaatatccaactatccagttcattcttcaatattcaatatcactccttaactgatataaggatcaatgaaggaattgcaaaagataattactgcattcctcctttcaatcaaatttgaagtttcttttacgtagagatctatgccttaaagatgcaataatggattaaagtagtttatattattctatcctattgatcttatcatttttcaacttaaacaataaattgattcttcaataatcaatgattcaatgtcattcctgaacttggattaacacacttcctcagtctagtggtagtgggagtgaaagtgcgaccctcac

SEQ ID NO: 3588 - DNA, 2049 bp, Glycine max
  Intron number 1 from transcript Glyma07g05230.1 (locus Gly ma07g05230) derived from phytozome v7.0 (chr-ID Gm07; pos 3888303 to 3890351 reverse strand)
acggtttgtgtcttctttgatctcactctcagctttgcacttttcatcattctgtgtgtttgttgcgttgtgctagtgttagttaagtctgcttctttctttgttttcttcccttttgcttgcttacatgtttttgtttggttttcaagttccaaccttgttctttggacagctctgtcaattccccagcagattagattgatttggtctatgttttgtgtctggttttattggtttttgtatcatagtgaagtttgccagctgatctcttcagtggcacttgtttaattttttaccctgaatgttactgattactcagattgatagggtggcctatgctttgtgtaccaatgatttcagcaaaaaaaaaggattttttttaaaaaaaaattagtttttttttatgttattttcagttgtgtttgagctatcagctatgtgttgtgtatgctatgtagctggttgatgcaattctcacttctttactgcagagaatgttgtcaactaacaaggatagattgaaacatcaggaatttgatgtaataacacagttgctattttcttatattttattcttaaagtacagttgaacgaatttccaagttcaaaaacaggagatgcctgttataataatatccactcaagctgcacaaaaacaaattgcaacagctgagtgggacccttcgtcttccactttcattccatgtacttgttgtctttgatactgtgttttctgtttgatgttcaaatttgtccttcttgtatgatgatgtctaattcattaaaaaaaagaaaaagaaaaagaaagaaacctaagaactctctatgagaagatttagctacaaagattgcagctcaatcttgcttctgttctccctaagggaataaatgtaacaatcttaataaagcactagacctcatgtgagtgacatcttgagctgttaaaagctcgccattctatggctgctctccatcctttgtagtaggtctcagcattcacttgtatcacgaggttgattgctttattactaataagagtaaccttgaactatggtagctgcatttctgctaaattccaaaatccttctcaactttgttctgggctttatgtaatgaatcttgacctgccatatttctgtataaaatttgaagtattacattgtgatcgtaacaacaccactagtatgctggattctatctttagctatatgaaatttctgatatatcaatcactagcgtcttgtaggctctagccatctatttaaggtttgggaatgcttgcatggaattagtaaccttttttttactgatttttgcatcttattattcatgtccgatgtaatcctctacgcatatttattcttcttttgttatcaactacctcgtacttgaccagcaacttgctctgctttgtgatactttgaatgtataaaatgttggcttggtgaacatctgatattaaattttctactaaacccaatgatgaactcttgtaaatttaagtacgtgatggtttaaaacccttgcatatttactcttatttggtaagtggctaggtgatgtgaataggttttctttatgttcctctatagtcagtaatattacttttcatgaacttacatgcatccattaatttaatctcatatcatgccaatttggctgaagagactgcaatgcatcattttaagaatccctaatgaattttagtttctttattgttaattttttctttcttgatgtttaagggtgtaaagtcaatatcatgaatttcaaatcttcaatgtgaacattttctgaattcagactgagaagatttaatgattaatttgttcacttatgcttagaagtgataaatgctatcatcataggttccattccatagttggcaaatagtgttcatatcttaaaatatgtaaaaaggatggtagtgcagacactaatgtaatagaaatctataatgaactttctattttacatgtccagggtttaccaactatctttttcttaatgtttgatgcagttgcttctctaaaggttttgtttcaaagt

SEQ ID NO: 3589 - DNA, 2085 bp, Glycine max
  Intron number 7 from transcript Glyma08g06590.1 (locus Gly ma08g06590) derived from phytozome v7.0 (chr-ID Gm08; pos 4743777 to 4745861 reverse strand)
cagaggtaaagagattctgtgtacatatgttttccatcccatttgttttcctttttacctttttttcattatttttatctcatcactcttaacatctttttacttttttctttctttttccctacatccattcacctcaaatttggagtctgcacttcatatttttttttgtctcttttaatgatgcatgaacacttcatatgacacatcaagagtgaaagaggtaaaaagagaaaatatatgcaataagtgaaatgatgggaagaaaaagaaaaaacatgtcaaatgaatatttgtaatatatgaaaaaaataattaagaagtttcaaaagagtgtttgtaatatatgaacggtcataaagtcaacatttttgcggccatctaatccatgcgctcagtggtcaatgacaatactattggattaaaataaaactacgaaccaaaatgttttgaaattattaatgttaatttatcaagttgtaaaaaaagcggtaacttatcaattttttaaatgatattcatattagtatttgaacatgtctcgaaatagtagcatatagtatgattcttccgaataaaatagcatacgtttaaaatatttaccacttgactttttattaaagaatattttatatcacttaaaaaataatattttgaatctaacctacttccatcttcttttttttttgccatctgccgccagtaactgcgtcactgagcatattgtcaacaaaatcagagttaagttgtgacctaaaaatctcaagaagggaaccgactcaaccaagaatgtgaagttatcgaaaaatatcaaaaactctcaaatcaactttattgttgaattttagtatccttttataactatttcccccctcattttatgcaaatttaaggttcttgtggagcttgtttccatctcctaatttgtcaattgtcttcagtcaaaaaagaaatggcaccatcacaacctagcttagtgcttttcatatagttttttaatgtttaaatgcaatcatgcataacatgtgtgacatgaggttgaagctacttgcacgtgtttatcattagataacaagacataataattatgtaactggaggagtttggttaatctctagctagtatctttctctatatatgcatgcttgctgtatatattgagattctagagggcttactgccaaatctcccgtttgcgtcttgtggttgtttggaatcacagtggaccggtaattatttgtattattgcactgcttgtgcttcatgattaatatattattcattgcttattaaaaaaaaaaaaaagacattagaatgttctttgttgaatccatatgataacaagactcccttcttgagttttccttggtttttacagctcacttggcatcgatgactctaaggaggaggattaggataacttaggatcacaccattattattttatatttttaggatcctatgttagttttcttttcaatatttttttagcttcatttaataggacccctaggtttaattatcatccttatatagtcttgatgatatctgatggattttttttaattatatttattatttgcatgttacagtgggtaaggctctaatgctttcttagaagaagcaaaatgtaaaatgggatagtgagcactggggtgcatatgatccttgtccagtactcattctttttcatgggtcaggctataaccaaggaaaatgtgactataatggatgaattcccaaacattatatctacgacagcaacaattctaaggctgtgtgatgaccttgaaggggaccgggtacgaagaaaatcaactatttctaacgtcatattgtttcacctagttggagtgttggaccacaaataattgagaatctgaaaatgtacaacttggattggttaactccaccaccattgaaacatcaacatcaaccttgcctctcttcatatatattccatgtttaattaatttaattaactcaggatcgatgttaatcatgatgtatagatgaacactccttatatgttatctattgtttttgtatatttgctaataaaattattttaaaaaataatgcagg

SEQ ID NO: 3590 - DNA, 1361 bp, Glycine max
  Intron number 3 from transcript Glyma03g27410.1 (locus Gly ma03g27410) derived from phytozome v7.0 (chr-ID Gm03; pos 35113149 to 35114509 reverse strand)
atcactgtccctgggttggccagtgcattggaatagtaagtcctctatactgtaacaagtgaagtttagaaacttccaatgagataatgttacatgcttttatccgacaatttttttcttatacttcttgggaattaattcaaaagaattatagaataaacttgaaagtaggcattgttgatcttctgaatctatttgattactacaagtgactgaagttagtatgatgtgtcttgaagtgcagtgatgaagttactagttggttccatacatatttttactgcaatgtacaatttcattctaaacactccaaacttagatctaatcaattgacacttgaacctcaaataaataagaatgcttagatcagtgtttagatctaatcacagaaggctgaaattccgccatataaacttgccattgcgccttatggcgtcatataaacaaattgcctagggcggttggcaaaaaatctgcgacgccatggcactatttaactacactggtttttcttgctctgcatgaaaaattgaggacctctaggctctgcgtgctattcctttttcaaaaattgtctgattagagtgatgattaccttgaactgagtgacacattgctcaaatacctgttcataaaaagcttgaaaagtagttttgcatttttttctggatttgggattgaggaagttctacatttgacatgttacttaataatgggatgtccatgctcctcctgtggaagataatttaatttagatttattgtctaatgtttccatgatcatatgaactcatagcatcttttccatgcaaactacaaaatttcatacaagctactactatgtggctggagctttcttgaccaatcacatttccttagcagaagctatgagtaatcgaaggtgccgaaactaggaaatgtatcagagctctaaaatgcaatgcttaattatagacgataatatctttcccaatacaactggatgcataaggaaataagcaggagaatgagattctcctgcatgttcagtgttttcattgaatcatgtatacagttaggcagtagtttttttataccattttgatttttagttggtaaaggatatgattatctcctttagattggtcttgctgcatgcacctccctcccatcctgtaaggagaggatgggagagaggagaatgttcagtttaaatgtgtcttcttcttagagatcccttttccttggttcaattggttagaaacagcaatatgaatcgtttgtgttttctagtgcccaaatgttctacttcatttcatttcttacaagcatttattctctaacatactgacataattgcagcgaaactatcggtacttcttc

SEQ ID NO: 3591 - DNA, 3595 bp, Glycine max
  Intron number 3 from transcript Glyma20g34060.1 (locus Gly ma20g34060) derived from phytozome v7.0 (chr-ID Gm20; pos 42498677 to 42502271)
gagaaaagtatgttgctctgaatttgattcagattttcactttaatttgtcctcagtctgctgattacgggatacaactcgtgtccttctttgtcttgtgaagttgtagtttatttccctgctatttaaatgttaattgtgccgtttatcataattcacaatccatctatcaattctcaaactgataactcatttacatgattagttttgaatatattttgttgatttgttcccatgaatatcttaaggggtgtttggtttggttgttttctgttttcattttcactggaaatagaaaatgatgatgaaaatgtgtttggttgaatttctgttttcattttcagtgaaaatattttcccaaacgaaccaaaaactggaaataataaaatctcgttttcaatagaaaccaggaacctcattttggataaaatgaaaacacggtgacaaggaatgtaattttaagcaaatctaaaaatacatttccttttgaaaacgcattttcagtgtttttattttttgaaagtagaaaacaagaagtcaaaccaaacatgttttcagaattctaatattttgaaaatgaaaacggttttcagaaaatgaaaacaggaaatgaaaatagaaaatgaaaatgcaaaccaaacacacccttagcatcttgagattaagttagcagaaataaaacagctagtttaaggacattttcgtatatttaaatttaaaagataatgacatcctacattttaagaagcaataaatttcatttggtacatataattcagatggaatagctttttgaaaaaaaaatgctagtttaactgcaatatttataagttgaattagaagaacgaaaaattcttcactagattcctttttaactctatttcttatgtcatatttcataactagtacagtacatgctttcctcgattgtgctagcaataatagctttgacactgtaatactgctaaactgtgctgctttcattctttcacatgcatgaggtcaaaatagtctacagagtttcatctgtcttttttaacttccagcctagatcagacatattatgtgacaaatgaaacagcacatcatgatttgaagataaacgaaagaaggggaaaaaaggagcagaaggacaaggatcagtgatgtctggagttagaaatgtgagggtaaaattcttcacagttacctacttcaaggactaactcatcctgttcttaagctattgggtagaaatctagccaaggttttatacctctaacacccctgtaacacaattacacaagggcccttttggcatgaagtgtggacagtaaataggccaattttatgttgtgctgaaattttaaatttgattatgaagaatgagaatcaaaagaattaaaattttgaccactagggggtgcatttggaagagcttatccacaacttgtttggacttatcttatgacattaacatagttaagcgattgagagagtttatgaaaattgcttatgatatgttgacaagttgtttttgtcttatttcaataagctcttcagtatagcttatgaaaacagtttaacactatttcctttttgattatagaaatagcttatgcataacacttacatgataagcacttttttttttttttggacagcaaaactatattttatagataaaagtaccagaggtactaaagatacaagatagttatagttttagatagactagtaactataaaaaatcaggctatatatcagtctgatcagtccagaattctcaacatccaacaccctgccccacagatttttgtttcctaattacaaaaaccatcttggtcacatgataagcacttattcaataagcccttaattaagctctttaaccaaatgcacccttggtcatagaggctccaatactgttcatgaacctatctaatagcatatctaagggcaaagagacatgcttaaagatatggacaatcctttccaaccatatatacactatagttgcataaactgcaaactgccacaaaaatttgaattcagtagtggatgctcattactactgggaagccgcttagagccttagaggaaactttttggtgaaaggagagaaagaaatacaaaaacactatttatgataaactaagcattaaaaaatatgtttttcattcatgtaagattcgcaaaattcggatttagttcctgctaaatttttcatctatttttcgtctttgtaaaattataattagcttttgacttagaattaggtttagattcatccgaacttacatgtttgatgattgggcacataagctgacctattagccaatcagacaatgacatgttaaaacagtaatgccctcgctctcttcatcagaactgtttttcttttcttttttattatcacagtccaactcctccaccaatatcacctcctccggcactggcatctcgtcggatcaccgctccttcaccgtcggccagtcctccaacaccatcctctcttgtttctcaacaaatcgttttttgttcctcccttgcgcttcccgaacagccatcatcagagtctcttgttccttcgtcgtcaccatcgccaacatgatcttccctacgaatttgaggtttgcttcgtctccatcttcgcaacattgtgctggtgaggttgattgttatggtgaggaaattgattggaaggaggagggttgggtgatgggtctgcggttgaaacgttgaggttgttgttgccatggttgtggttggtgttgatgggaggggaatctttgatagtggtgtggaagtgcagagaggggaaagttaaagaggcaattgaatggatggacaaaggggtcaaagctggtgctagttgcttttaggagtggtctcacgttgaacagcaaggtgattgaaatgtatgggaattgtaaaaacacgattgatgcacgtatggtgttcaatcatatgcccaacaagaatatggactcttggcacttgatgatgcgcggctatgcaaataacacctatggagatgaggccttgcagttgtttgagcacatgaatgagctcggtttgattttaatttgtgtttttttccttgttcttgatctggattgattctaagttgttgattttcctggagacaggtggtgcagtgctattagggaaaggggtttcttgtactttatttttaatttgtttcctgcaatttgtagctgttttaactcccaaaaagttatattttaaaatttaaattaaaaaaatgtcacatatgtccggatttgtccaaacctatctttggaccaaaaagtcacacattttaattttgcgaggacgaaaaacagacaaaattttgccatgatgaaaagtgaactttgatgattttataaggatgaaaaacatattttagccatttaaaaatggtatgtctcatctggttttaaagccatattgcctagtacttgaccacaaagcatgcatatattatatgactggatctgtgcgagctatctgttgtatccgcaagcttttatcccatgttgcttgaatgttttgtgaataatatttgaattacgttgcaggttaggtcgtacatctgaattcttaatat

SEQ ID NO: 3592 - DNA, 3233 bp, Glycine max
  Intron number 6 from transcript Glyma05g01800.1 (locus Gly ma05g01800) derived from phytozome v7.0 (chr-ID Gm05; pos 1258170 to 1261402 reverse strand)
ctcaggtacacagctttaaacctttaaactttgcttttgcaatgtagacttttgtaccgagttaaaaaaattcaaataacatttgtattcctgtggatatagtttatattctgaatgaaggggacacattgatagtttccttgctcaacagcactaagccactaaccatcatgtaaaatgatttgttttattacaagcttaagctgtaacactgatttataagaatttgatacccccttcccacaccctcttcggttgagtatgctggagctaagcaagtaatgactcttttctactggaaatgggatagagcttaaagaaaatgttagtggctatggttgctgatgttccatgactggtggaggcacaccagtaaaatgaagaagttcgacaaaaagcgtttctgtatccaggtgcataggtgaacttttggcattgaagtgaactgttgcagaaatttgataggaagaatggagttaacataagctatttaatttcacaggcgagttcaaaatgtatctgtctctttaaggaaaccaactcatagtccttaatccctcacaacaaaacaaagtccaagttgctacaaaatattaacaagtaattctagattcaacaacggacaaaacttagatcaagtttcttatgtccttgtcatttagctctccaatcaaatgatgacatgtagatgtttatttgaaattctgcaatacatatttaatggaagttgtttattatgagaaagaacatccttgtgccatcatttgttttgagaacttgataaggaataaggatacaaagaacttgatctaagcttttctttaaacaaaaacttgatacccatataccataaatacacaattcttatgcccaagagaccataaacttaaattcacacattgctatttcacacctagactagagcatcaaccattgttccctccctccttttctccttctgttagggatttatctcgccgtagtacacatgatagggtgcttgtacaatatattgtgactttgatcaattttttgagtagcggtggacatggattggatttttaagaatctaatctatttccaattcatatctacttaaatgtattggatcttaaatctatattcacatttttttcaaaaacaatttggatttaagatccaattcatttaagtggagatggatttggtcatatccacttaaatgttataaggattttttatttattttttacaaattttggtaattaagcgctaaaaagttaaaacttagcacctgttcatttaagagttattttcaattgaccttggtcaagactattttcaatcaatcttggttggagtattttttacctacctcaactaaggcaatttggactggcatcggcccaaacatttttagaccgatgtcaaccaagactattttttagttgacgtcagcagtgtattttcatttgatgttggtcaaggatgtttttggtcgattttaggtaagatttttttttgttgaggttagttagggtttttactcaatgtcagtcggtaatatcttttggccaacatcggctaggggttttcaatcagcattaaccgtgactggttttcaatcagtgcattttctggccgacatcggtaaggtttttttttgtcaatgatggtcattgatattttttggccaacattagtcgggactatattttggtcgatgttgactaggtttctttgttgacactggttgaaactattttttgttggcgtcagctagggtttgttggccaatatcgaccatgactatttcttttggttggtgctagctagagatatgttttgttgacatcaactagggttttttcgatcaatgtcaattaggggaatattttggccgatgttagctaggtttttttttaccgatgtcggtcgatgatgatttttggttgatgtcggccaaaaaaatcctagccgacatcagcaaaattttgtctgacgtcgaccaaaaaaatcctagtcgatgtcgatcgaaaaacctaccagacgttgacagaaaaataatcatgacagagatcggcaaaaaaaaaaatatcctagctagcatcgaccaaaaaataacctcaattgatgttggccaaaaaaattttttacgacatctaccaaaatatagttccgaccaatgttggccgataaaaccctgaccgacattaacaaaaaaatagtctcaatcgattacggctttaaaacatcatcagttggcgttgtccaaaataattttaaacgagattgaccaaaaaaatctagccatcattgtcccaaaaattgattggattttaaaatccaatcaaatatcaaatccatgtccaattaattggattggatttaaaattcaaaaattagatttgaatatgaaaccaaaccatttaaatgaatttaaagtggattagattggattggatatggactgattttatatatttggatttttttttcagccctatccatcaaattccttttaagtgacaattaattttaaaattttaaccgttaacattttagtccctcggattttttttttactgcatagtccctcagattttaaaaactctattagtgctcaactttgtaaaatgatattaattttagtcttttttagtgctaaacaacagtgaaaaataactaaaatgcatgattttttgcaaaggtacaactaatgaagaaattttaaaatctcaaggacctaaatgcctaatcggtgtgtttttgaggactaatttagaggtttactccttttatttctccaaaaatttgtataacataagttatataaatatagtatattttaagtgaatatttttttgcaaaaacgaaagtgttttatcctatccacccgttatatgcgcgtcactaaatataagaaaattctcttatccaatgcaatgttttatttgatgccattccaaacaccgtataatatttaatttttatttagctttatacgatcaagtcttctactattgggcctttcctatcatgcgtactagctaattcttatatttccagaaatattcaattctggctatgtccttgtattcttgattttttctctttcttttgggtacacatttttattttattgaaagagtatgaatttcatttcagtttactgttttcgtaagtggatgatttagcttgtagaagtaactttaaattgatattgtcatgtccagtggaatcgcaaagtccat

SEQ ID NO: 3593 - DNA, 2727 bp, Glycine max
  Intron number 2 from transcript Glyma05g28300.1 (locus Gly ma05g28300) derived from phytozome v7.0 (chr-ID Gm05; pos 34148989 to 34151715)
cttccagtggcttttctggtgttccagttttccaggttcttctcccagctttttaagtctggtcattccatttgtgtcttaattcctatgttgcagctatttgacaataggggattcaaggaatgtttcacaacattttaatactacataaattttaaggaaaagcagggtgagcccatgtttgaggctcccacccagtggggtctctggaaggtagatgcatgcaagcttatccccacaagtggatggggagtctgtttttatgctgattatctgtttatagagagaagcagaaaccttgcaaaattggatgaacaatcaagaacatgcatacaaacatatatgtataaataaatatatactattttagaacaaaaaaaaagaaaaaatgaagtgatcttatgtcttagaagtacatgattataataatgaaaatccttgaatttcatagctgtgtaggtaacatagtctccacttgtgaagcatcattaaacaagtggcacggagtggttgagtgtgaagttctcttagcaacgtgcatgctttttgtgtatatagattgtaaatgtttgatattatcattttattcaagagaaaaagggaaagaatcagctcaataaaaagaatgagagtgagagatacactccatagtcttttattctgatgcggctatcgatttaatattagttcagaaatgggaattctggtttgtgaatatgatattgataatactccccagtgttgtccatggcagatggtcatcgcggcctatggcgctgccataatgggcctcccttcacaaattgcctatggtagttgcctggttggcaacaaatcctctccaccatggcggctatgaccatttaacaacacggttactccctctgtcccattttgtgtgatgtttaaggttttggcacaagaactaaaaaatgccattaatattttaatttcataaaaaatagtgttatttcctaatatatcgattaacttttatatgaattgcattctctctccttcatacatctcttttattttctcacttcataataaatggttaaggatataataggaaacaaatatttaaggattcattgatatataaaaatggcaatcaaaatgggactattttttattttgctaaaacgtcaaagaaaatggaacggagggagtactttggtagcaacaggcccacaattaggataatatattgctagttaaagtatttagagagttgttgttagttgggactctgatgctgtaagaggtaggatataaatagtgggagagaatgtaagatgaaggagttagttggttagttagtcttgggtgggagagaccaagctttcgattctttggagactactttaataagccattgggttccattgatccagagtaggaggctgcaggatgctgctcaataaatttgcctttctttcattctgttaatttctacattcagaaccagtatctataatactcatatgataggaacccaaaccccaagcccctcaaggtcccaaaacctctacaggtttacagcctaaaccactattctatccatgaattcctaactatagaccatctaaaattcctgtactttactgctacccataaattgctgctagcacatgcctggagtcctgtatctttcaaacctcagattagccacccattcacaaattcataaaccatgattcctttcttcaaagttcaaacctgtgacggaagcattggcgaaggcagagtgggccgacgatggagatgacagtgagggggagcaaacggaatttttctgagaggggtcttggaggatcgattttgcttctgaaagtaggtcttctatttcatttttgaactgggtcagcaaacctgacccaaatagcccaacatatttgtttttttttttaaaacgcattcaaactggaccgcaaaaagctgcacccaccttcaggaacagaacggttaacattccaccgttctcgcaagtaaacctgcgcttgattaccgttctgcagtgtctctgatctttcctccgactttgcttgatggaggctgcaaaactcgtaactcgtaggagtcaatgagtaaactcgcgttttttacaacattggacactggcacctatacaatacaacatgaaatgagtatcaaactttaaaaattgtgggcatataacacaaattaagtatcaagtataaaattaaaacgaaaaacacaaatcttgaatcaaaagagagaattggtgctttaaagttagcacgagtcattgtagacataataaaaggctatcatgtttctagtttttgtggcattcccatatgtattggtaaacaaattaaatataaagtaaaaaaaaaagaagctatttgacacgaatatgtgactatgtgtccaacacacaggtactacttatattttgaagtacctgtgcttccttgtttgccgttttttaaatggatttatgtttgtgttatgaagaaaaatgattgagttgatactgtattagagacactatgaactggacctgttctactgttctacaagtatatttggagcactaattcttataatcttgttatcataatttgtgattggactcatttctattgatgctatgataccttaatttttttcatgcgtgaatcccttaactagtattttgagttgttatattggtgagtttcagtccagaagtctgatattgaagagccaaaataagag

SEQ ID NO: 3594 - DNA, 2507 bp, Glycine max
  Intron number 4 from transcript Glyma12g23110.1 (locus Gly ma12g23110) derived from phytozome v7.0 (chr-ID Gm12; pos 25366520 to 25369026)
tgcttgacctttcttggtccaagtctcaggttagctgctattttgaagataggtgttattctgtaattccacttgtgtgttctatgtctgattgtacttataaagtttattttgagtgaatatgttgacattagttggtatgatgttcgcaacactataatgcattgaagttgttatcagtttttctattttgtcctgttaacagataaaatcatttaagaggaaatagctggacgtttcaacttattggtaaaattattgagctttgaatgtgtgccacggtgtgagaaattgagtatgagttctaatcaaacaagcgctaagtagaggctctggtgagaaagtggatcctaatcaaacattgttagagtaaaaggggtatagtaacacctactacaaaaaccaatagaaaccattaaaaagatattactctaaatgattattatactgaaaatttgattttttttatagagctcaatagtgtctattgatctatttagttgaccttacctaatgggataagacttggatcatattatatatagtacagtttttaattcgcagaatgggctcgtgtgacaactgactgataaaggattctaaattgcattagaatataatattcagtgttataaacttgctgttttgttgaatatgcatttaatggaacaaaaattttgatattagaaggactgatactatttttgtttagtcgtttggttattatatcatcatatcatggaaagtattagttgattatctactagaacactgctaattttgttaactgtagttgggattacttactttagtcataaacataaactcataatattacattttgaattttaggaactagatgaagttctgtctctgtgagaagatttctgaatctatttcccctaattcctagaaaattgatgttaagttttcaaattttttttaagtttattataataggtctacaattatttattttctaagttgcattgttattctaggacttccttggaaaggaatttgctgacaaacaatttaaagtggtaacttgtaaaaaactggatgacatgtgttatgatttctttataatggtatgttttttgatagtggaataccccataaatatatatccaaatttcctgaaattactataacgaatgggatgtatagagataatggctataatataaggtaaagggaatttagatttgctgcctaacaagctgagataatatattcaggtcagtaacttgcttaaggtgctgttatgttgggagggaacttggtcatgctaaaatagacttaaatatgttagtggtccctctaagtttgtaatttttcaattttggttcctgtaaaattttttgttcatttttagtttttgtaagtttatgttttttcagttttggttcttgtaagatattttactcatttttagtccccgtaagtttgcgttttttcatttttgatccttgtaagtacaaacttatggggactataaatgaaaaaattggaatcttaaagggactataaattgaaaaaacaaaaacttacaaggactaaaaataaataaaaaactgacaggaatcaaaataggaaaagtgccaacttacatgggctaaaattagaaaaatgaacttacaaggactaaaaaaaaaacgctaacttacagggaccacatatttaagcttgctaaaataggacatttttattacaccctgctgtagaagttacaataacaatttaaaactcttagaacttaaacatggttagtacattgtatcaacagtgccaaggcaagagctgacaacttttttctgcagtgaagtgaattaccaggaacttcactggggaattactgtcattgagctcactgcttacagttcacaccctttatcatcttcgaggagttaccattgggcatgaatagagaaaaaattgatggatcaggcttttgaagtatgaagaaaaatttgagagatttgaaaaaattccctttaatttttcataaaatccttgcatagtattccccggaatttaaaaatcccaacaagattttattaaaatgaaataatcctctctaaagattttaaattatgaataaagaagagttgcactgtagaattgtttcataaaaaattctaaatatattattagaaaaattaataaagaaagaaacttgttctaatttatattaatttttaaatctattttgaatttaaacattttttaaccagtttctaatttgctaagttctctgttgtagtattgggatttggatctgagtactgtgcagggtgatttaaatgcaaaaaataaattttagtgacatattattgcaagctacgaagatgtctttgaagagcttatttggttatttagagactctaaaattgaaacatttgtaatgacatgctgtgtgcattaaaaatttaaactaaaccatgtatatgtttatctttaatgtatttgtttttctgtttggtcagcgcttgctctcatcttcg

SEQ ID NO: 3595 - DNA, 8916 bp, Glycine max
  Intron number 2 from transcript Glyma01g00320.2 (locus Gly ma01g00320) derived from phytozome v7.0 (chr-ID Gm01; pos 118622 to 127537)
tctaaggtctgatttccatttgaaaatatttttaacctcttttatgatatctgtttgagtgcattttactctttcatccatcattatatgaaaccaatcctgaaccttcccctaatagcttaaggcattatgatataaaccttcacgacttcacctaaaaccaatcttgaaatcgtaccagagctgctatgaccaagtagttagaagtttgatccctgccactttcattcttataaataaagctcaattctgtcacaatatagagaaaacctgtgcaatggccctgtctcaagccctaaggaattgatgtgagggggttagagatatataactagtctcgaaccttcatctaaccgcataagattttaagaaagttggttgtcggcgcacccttttcagctctcaaggtaaggctagttactttctactcttaatccttcaatcaccttgagttattatgagtgcttttgttgatttactctattcaagtcctgatatataatcatttgtcgtattttaaataaagctctgtttgagaaagcttttgtagatttactctatttaaggaccctgcagatcactgcatattaattccaaaggagaattgtatacagtttgagaaagcttagaaggaaatctatgaatcttgcccatacaacaagcagaacagaagggcagttcatctttaacatgaattttgaaattacaatgattaagcacaagctttaaagcttgagaattgggatgacctagcctatggtgtcagatatatatagaattaggcacagtatttttacaatcaacagaagaaagtgtttatacaagctggacaacagagcagaactgaagattgggaaattgatacaagccatcagatccaacatctccttgaagaatgattttattggaatcttgagatttaacaaagtaacaattagcatgaaactcaaagaaaacatgattatctttggctaatttgcttacactaattaggttcttagttatttgaggaacaagaagcatgtttttaagaatacgtttgacattaggactgaaaggggaaacaaaattggaatgaccagcggctgagatattcagaccttgtccattgccaatggagatctggtctggaccctcaaaaggagaagtttgctggatgttctgtgagttattggtcacatggaaggacgctccagaatctggaaaccaagatgatgaagcattgcagtcagaatttgccaccatagcttgtgcagggctagaattagagttctgagagttatgattctgattctgactttgctgtgaactccaatttgaattagaagacttgttccagttattgttttggttctaattctgaccccaattctgattctgattctgattgtgagaccagttattatgattgttgttattcccataattgccattgttgctattcccataattgctattgttaccaccactggcagcttgatactgaggattgaatcgattgtagcatgtcagagctatgtgattgtacttgaaacaaacttgacactagactgagctccgactaccgcaaccacctccatggttgaaaccacccccgcctcggccattatggccactagaaccttgtgaatttgaagaatattgattcgtatacacagcattagtgtcggagtacaaattcgagttgtcaatctcagtggagtgcagcaaactcacttcggtgagatttactcttggtgtgaagaaattactcaaagcttcgagtttggtctatttgtgaagccatagctcctgcgcaaggatgtatccttcagtctcttcaattgcgatgtgtgtggtagacgactttcaattagagcgatggtcgagtcaaaatccctaggaagtccttccataatcacatacatgtgctcacgataggtagcagcatcacctaccgaagcaagcacatcaatgagtctctgacctgagagagaaaatcagaatcttgatggttatccaatgttgtgtgacggagctccaatcggagctgtcatgccgttgtttgcgtttggtgatgaaaatatgcatgaatcttgtcccacatttgatacgagtgtgttgatccaagaactcgagcaagcatggagcttgagagcgtagactgaagacaaacaatgagaaactgattttgtttctgccacttcaagaagagaggattaacgcgattaagatcatgatcttcatcggaaaggttttgcggagggatttgaggactcgcaatgaagcgattgaatctattctgtgatttgatgcaaaaaaaattgttgtagggaacaacaaagaaacatcttgattcatcagaaccatgttgagtgaagttgcactggagttgttcgccaaagttggcccaccgttgttggccagagttgcaccagaatttgtggaagccatgaaaaaaagatcagagagctctgataccaaacgcaagggaaaagggatttgtatattgcatttagagatccagctgagagactaagtgtgtctcagagggtggcggtcgacaataccattactgagttcaatggttgggtttccgacttagaagtagaagaagtacagtgtgtagggagaaaattcacatggtatagacccaatggggctgcaaagagcaaactggatagattctttgtctccgatgcatggatatctaaatggcccgaaagtacatacctcatcttgaatagaaacttctcggatcactgtcccatcttgcttagatctagaattgttgattggggtcccaaacccttcaaggttctcgattgttggctgaacgacaaaactttcgaaaacctagtcaaagggagctggacaaacttacaattaagggggtggggggatactcactgaaagaaaaaattaagaaactcaaggaaaggatgaagcagtggaacaaacagcagtttggagacacacttaagaaggtacagcagatcgagtatgatctcaacaagttggaagcaggcagcaatgatagacagctgtccccgcaggaactggcagcacgtaaaaagttgcaggaggatctttggacagcggcacagtcacatgaatccctgatgagagaaaaggcacgttcaaaatggatcagagaagaggattataattcacgatatttccacatgctcatgaattctaaccgccggagtagtgcagtcaatggaatgctcattgagagagcttgggttgaagatccaattagagtgaaagaagaaacccgcaatttcttcatgtccagatttagcgaacctgatctcgacagaccagaaattagtggcaccagatttcggaggattggatcgtagcaaaatgatttgctggtgggaggattgtaggaggaggaaataaagtttgcagtatgggtgtgacagtgagaaaagcccaggacctgatggcttaaatttcaagtttatcaagcacttttgggagacactaaatcctgacatcatccggttcctggacgaattctatgtcaacggtattttcccgaagggtggtaatgcctcttttatcgctctgatccccaagctgaaagatcctcaaacgctcaacgattatagacctatctttttaataggccatgtctataaaatagtggccaagatactagcaaacagattgaagaaggtgttgtcggacatcattgatgagagacaatccgcatttataaggggaagacacctactacatagtgtactgatagctaatgaagtagtggaggaggcaaaaaggagtcaaaaatcatgcttggtgtttaaagtagattatgaaaaagcatatgactccgtctcatggaagttcctagcacatatgatgaggtgtttggggttctgcaataaatggattcagtgggtcatgggttgtctccacttagcatcgatctccattctggttaatggtagccctacccaagaatttgccccacaaagaggccttagacaaggggatcccctagcccctctactgtttaatattgctgcagaaggtttaacaggtttgatgagagaaacggtggataaaaaattctttaacagctttctagtgggcaagaataaggagccagttagcatattacaatatgcggatgataccattttctttggggaggctacaatgcagaacgtgaaggtcataaaaaccattctcagatgttttgaattatcattagggctcaaaattaattttgcgaagagtcgatttggggtgattggcaaatctgatgaatggaggagggtggctgccgagttcctaaactgtagcgtgttgtccatgccatttccctatcttggtatcccaattggggcaaatccaagaagtgctgtggtctgggatcctatcattaggaagtgaggcaaaattagttagatggaaacagaaacatatatctttcgatgggagagtcaccctcattaatgcagtcccaacttcacttccaatctatttcttttcttttttcagggtacccagcaaagttgttgacaagctggtcaatattcaacgtagattcttgtggggtggaggaaggaacaaaggaagattgcatgggtcaattgggaaacagtgtgtctcccaaaagacaaaggaggactcggtataaaagatctacagacgtttaatacagcgctgcttggaaagtggagatgggaattatttcagaaccaaggggagatgtggactagaatactgatctctaagtatggcggatggagatcccttgatgaagaaagaagaagcagctatcattcaccatggtggaaggaccttatgtccatcaaccaacaacgggactcaactgtacttaggaatcagatagaatggagggtgggatgtggagacaagttcagattttgggaagatatatgggcaggcaatgacagaacactaatggcaaaataccctagactataccaggtttcaaatcaacagcagcaaaccatcaattgtatgggaagccataatgctgcagggtgggaatggaactttggctggaggagaccccttttcgaaaatgagattgctatggcggcagattttctagaggagacagcacagctaacaattcaccaaaatagtgcagattcatggatatggaaggttgacccgagcgggaattttctagcaaaaacagcgtatcagctactgttggcagaaaaaaggggggaaaatgaagaccggaccttcgtggatctttggaagcttaagattccatccaaggcagcggtgttcgcatggaggctcattagagatcgattaccaactaggacctacctgagaagtagacaagtggagataaatgactcaaggtgccctctatgcaacacctcggaggagaacgcagcccatttatttttcaactgcaacaaaaccctccctttatggtgggagtctttgcaatgggtaaacacaaggggtgtattcccacaaaatcccaaggaccattttctgcaacatgtaagtgggtctgctgttggaactaaagcaataagatggaagtgctggtgggtagcgctaacatggaccatttggaagcatcgaaatggggtgatctttgctaaccaaactttcgaaggaagtaaagtgatggaggatgcgatttttctactatggacatggcttaaagttatggagaagggtttcaccctgcatttcaatcactggtcctctcatctcacagtagctttttgtaattaggaaaggatggtagctgctgtaatctaagtaattagtgcagggtaaatgtatttctgtttctgcaggttcagcttggttcttattatatgtatcttggcattcagaaccagctgctaatccactcccattatgtatctacagtacctctggtactcatttatatatatactacttacttttgctgagcaaaaaaattaaataaataaataaataaaaatttagaaaatattacgaagccactgagatcccttacaagagcagtatttatactgctgagattcagttgtaactgaaacctaactagagctaactgtcaagtgactacagttattaaactaaccagagttagttactcatgtacacttacattgtcatagtttgatcttggaagagctttaataaaggcgtcttctgtttggtggtattaatgaacatgacaggccatatagagcctgttatgttctttattcagcatggcccccatacatcattttggattagtgatattacagtatacttactcggtgtcttttcttttgctttttagataggggatagctgtcacactgagagttagttaggttttctgttttgtattgcacagctataaatagctatcttctcctttgttgtaaaccaacaattctcagaatttcaataatacaaattacagttctgttcataaattctaatatggtatccagagcacagtttgattcttaacttagatctatggcttctgatcaaaatcctcctccacctctgacacttccgttcaatgtggaacctatttctacctttccactgctgtcatttggtggctgctgttactttctctcactctatttcagagaaattatatacgaaaaactatctcttcgggtatcaacatcctgtgataaaatgtcaccactgattgcatcattttcttgtcaatcctcaaattcctcactgttgaagatcatgacactggcagagtctctgcttcttatcttgcttgggagcagcaagaccaacttctcttatcatggcttcaatcttctatttcatgcgaaatgcttggctgtgttattggttgcaaatctttgtggcaactttgggagaagattcacattttcatttgcacactaatgtgatcgcactgagctacacagcactacacttgagaatagcaacatatctgaattcttgcttcgtattcgggccttagttgatactctcatggtgattggggactttgtttattctaaagaacaaattgatattattctggaaggggtgccggagcgaatataatagcaagttctactctcttatcagtagcgaatatgaaaaaattgatctacttctaatgcctcaccacaacttcctctgcagaatctgactgagcaatgtttatctcagttctttgactctaatggtggtgatcgctacgttgctggtcccactggcagaggtggctgcagtggccataatggtggtcatggaggccatggcagatattcaagtgttcaagtttgtcgcaaatttggacatgatgcttctgtttgctatcattgttttgatgaaaactgtgcctactatgtctctgaatcctccttcttcagtcaatcctccactacgtcaaggtatcctccacttagggttccctctcaatttcctttttctggttcctatttattcatgcctcaaggacatgtttctgttgtgcttcatgctataccacggcaggctcccttcatgaaccctaatttttcgaataattttttgcaccccactcctcaagctatgcttaccagcgctaaacctcaaggttcagcaagtcggtaccctaactcaggtgcctcccatcatgcgactaatgtttccccgaatattcaacaactcctatagggaagttaactagttatggtagattttctgcaccaaactacctattttctccctgaataaatgattttggagaaatttactttccatgattttggagaaatttactttccatagaatatttacgtcaattggctataagtccatcaaccttgaccgaggattgggctataagtacatcaattatgactaatttagtcaaatatggacttatcttttgaagaccaaattcttgtaacttatcttttaaaaagcaaattggtagtttaataattaatatatttagagaggaaaaggaatatcttaatcatgaatcacgattgaacaaagttggcccttcaacagataaatcccttgagtgttttccttatttggtctctcatctaaccaagctctttatgttttgtttgtgctttcatccttgcaattcagagttcacatatgaatataatgatcagttttccttgttccagtctgattaatgcactcggttgtctgatgtgcattttttcgccttatttaagagaattatcttaattatgactgggttaatcaagtatgcatattgtgctgaacctagttttcctctgtaatgttttttttatcctcaatgctaattttaaaaatacttgcaccacatatcatctcataattaaaatctttaattaagatatggtgtatggtcttagttgtgggttttaagcaactaatgttgatgacattggcctgtagatgatatacattgtgaatgttagtattatgaggttatgtttggtggtattatgattgcagagtatttattcttcaggatgcatttactcagatctcataattacatacctattgactggatattgtcttatatccactttaacttaagattttgttaacttacctgtctagcttctgctatttgatggaacagaagcatgtgcatatttgtgtccttgtgaaatttgtcaaaagtgctttcaggtccataagtccattttgttcttgcatgcatgcatttggttgaggaaggttaaatattaatgatgtggaaaaatatataaaaacttcgttactgttttgctttgggtgtcttttcattttcttctatttagggggatttatttattattcttcccctagatgtactttctcattcctttcaaatattttattccttctgaagaaagaaaacatttattgtgtaacagattttataatatcattggttttaaatatataatcattcatgcttaagtatgtttttgcttattttagtttcattgctttatgtcctgcagg

SEQ ID NO: 3596 - DNA, 2614 bp, Glycine max
  Intron number 1 from transcript Glyma16g25600.2 (locus Gly ma16g25600) derived from phytozome v7.0 (chr-ID Gm16; pos 29621593 to 29624206 reverse strand)
aaaataggtcaggctctctttctttcttctctctctctctctctctctatactttttttcttcttcttttgtttctgtgaattgctaaataccaattgctccaagatccgtgtttgaaatttgtgctttgcttaattagtatatagtattctcctatttatgtatctcttactcttccaattttctgcaacgtgatttcttgctctttctgcttctagtacttcgtttggttttgtttctattctttaattagtttattctttagttcttaagagctagctgctaaacaaaaaaataaatagataaaatcttttggtgaatgataatatatatgggtggaatctgaattgttttgcttttaattgttgcttgctaagggaagtaacttttttttgtgtatgtctgtgtctggggcattctctaaaagaaaattatggttattgaaggacttgcttgatgttatagcttattatgctttctgcgaatttcaccaattttaccaagatttatcttttgatatatggggttaaaagtttgggtatggtttggtttgttttgtggatctaaaagtggaaggaaattatcatgtagtgtaaaaatataacatcatctcatggataagaacctaggcttaaaggggaaattttgcctttgttttgactagatttagtgaagataaatagatgattttcaaaaaataaataattatatagctgagaggaacatttcattatttcatatatatatatatatatatatatatgtcttgaactgtactgtttccatttcactctgttctgaaaagaataatagattgatccagaaaaactaagagcatcacgatgatgtcaaggtagataggtgataatatagtatataataaaatactggttttaatttgtgccatctaacaaagctgtagccaagaattacaattgcatatattggatttgaattaacctcattaagtgacctaaaacaccattgtcacttgatacataataaccttatattataattctggacacagtagtcaatagtctgctatagcagagaaccggaaaggagtggccctgaactgctgtgagattcagatagtggagtggtactcaatagtagccattgtggccgcaatagtggataaaatagtggctttacgtgtgctatagaggtcctatcacgatataaattttaaaaaccatttttaaccctggaatactgttgctcagggttttcttgggtatatattccacatgttacctctgttctgtcctttgttccttcacactttgaaactttttttttttcttcgtgagttatgttcttcttcctttagacttcctagattgcattctgctaatttctatctaatttgtgttctttttctattaatttcacaaatattttttttttataatttttttgacttcattactgtgttcttattgctcctagattgatggtgattgtgtgtgtaaactgacttattatttatcataaatttctttaatttagggtgttttgttttgttttgattatttgtatgtgcagtatatagtgtttatattttgtattataacatttaaaaattaaaatagaggtcattctggtatttccagagttggctgctatgcatcgctatccaggattgctaatatcatgattctagattcacataactgaaattgcacttacgaatatacacacataaatatataaatatatgcataacagataatgttgtatccttgtgtctattgctttctgctgcattcaaggtaattaatcataggcatctggatgtcagacaaaaatttgaacatgtttatgttgtcttgtctcttttgtgctttctttcatgtaaactggaacagaaattgtcaaatgtattgcatgcaaggatacaatttcattatctcccgtccattagtcaaagtatgattatgcattaaggcctcagtattgcagggaatatattaaagtcttctttttattaaagtaaaaaatgtggaactttgtttcttgaattttgaagttatgcttcctctatagagtttgtagttaaaaagtcattatgtagtatgtactcaagagcataactcaacggctcagctcctcaagtatttttgaagattgcttgagcctaagattgaatccctggcccctaggtcgctagttaatggttgagtccatccaagttatcatcatctatcatcatctcaagttacaagagcatcaatttccaaacatagaaatggctgcttgggtttggttagaggagagaactggtaaataggtggatggaaattaaaaaaaaaaaatccaaatttcatcaattgaagagtagactggtcaccctcttgatgtaaatttcttccatttgtaaaagaaatgcttaattacttgtttctttggtgaatgaagcactcagaataatattttaaactccaattttgcagtagatttggtagttgctgctatttagtccaataagtgtattgccttctaatttatatttttgtattcagtgtgttttctgacatgggaatctattcaacttgatcttatgacctccacagatatcagcaattgatcaaaggtctttttgtttttg

SEQ ID NO: 3597 - DNA, 1019 bp, Glycine max
  Intron number 17 from transcript Glyma16g04690.1 (locus Gl yma16g04690) derived from phytozome v7.0 (chr-ID Gm16; pos 3945016 to 3946034 reverse strand)
ccatctggtaactacatgtcttcttggttcttatatttcttttgctgcttaatttattggaatattttcttattaggctgataagctagttttacctttgaagtctagtctaataaaatccaatacaaatgtaatggaagaaaaatgtgattaaatttattaaactttttaaagactagttaattagaataaatttcaggtaaagatttgaaagtaacaatttggtcaagtttataatctttattgtcctagggcagctattctgcctacagactctatttttagaaatgtttataattattatcatctttcaatttttaaaatgacaattaccggtataagtcccaaaaaagagaaatattgaagaaagaaaaattaatggtagttatttatgcagttgaagcatatttcaccttttttttttcctgtttatgcataatctggtatctacattttgtattatttggagaaatgctgtacatttagaaaagtcaaaaagtatgactgatttcccatatttaccaatgtttgctacacagtctagttattatttgaagatatctatgtacagtttgatccgtgctttttttgagagcattagtgattctttgggtctgaatgtcgtttattattgacccttccaaatctctgttcgtgtgtcgcatctcattttggctaataggctcattatcctcacaaacattggtagtctgctttacaaaacattgttttgttggttttaatcaatgccagcccatgtccttccgggtattgcgaaatatgtttggaactgttgactagaaagttatttattcaatgcacatcgtgactagcaagttattaggctgcagttctttgtcacagcagtgcctctgtatttagttttttatgctaattgtcctaggttgatactctgtttgcaaggattaaaacatgtacattttttcttttaatcttgtctgtatttgagctctgattgcttattcaacttgtttagggacactgaaaggaaagaaaat

SEQ ID NO: 3598 - DNA, 6117 bp, Glycine max
  Intron number 2 from transcript Glyma03g25350.1 (locus Gly ma03g25350) derived from phytozome v7.0 (chr-ID Gm03; pos 32441791 to 32447907 reverse strand)
cctacaacctcactaaactagacatgtatgctgttgtaacaatagtttatgacaaatcgaaaaaattactggctgagtcgtgaacaatgtggctttctttaagacgtttcgtgacactgtcaaaaattgtgtaagcaaactatcaaccacgaagtccccaggataaaacaactcagatcattgtataagattcccactgcactgagggaacctttctagaattgcaccctcttgtatgacttgaaaagtcactctaaagccatctaaaaatatgacttgaaaagtcactattatagccaaccaaaaatacgacttaaaaagtcactcttatagccaactgaaaaatatgacttgaaaagtcactattatagccaacaaaaaattatgacttaaaaagtcactcttatagccaaccaaaattttagagcgacagaaagaaagatgaagaagtttgccggaaatgcatcggctgaaatatgggagggagaaagaaaagttgaggaaatgcttctcaactgggacaaggaaaaaagaataaatgagctctctatatatagggagtggaacactattcaagtgtttatgcagagcaatgtgggacttgaaacctttttttttcaaactttcatccacattctcctttgttctaacaatcccccacttgaaattggaaaagaagattttcgaggatttcataaaattgtgcataaacaaaggtgtcatacaacttgaacctttgcatagtgagtaaaattcagattttactagagtgacttgaagtcttgaactctatctccgacatcaaaccacacacaaccttttcataggtgtattctataaagcccgtgcgttaaaggccatgcacgtctatcccaatatagtgaacgctctagaaatgtttgcccaaaatttcatatgaagcggcccccacttcaacattcacataggtgagtctatcaagagtactcatgtagcctaggtactccactcaacatagagtatagatctcattaagaattatgaattttttttttcataactcatcctcttgttacttcaagaatcatgttgctttcacttataacaacatgttcatctcatatcacttcataacttgttattacccattgaacctagttcttgggatctccagtcatttaggtcggtttaccataatgaatgatcatcgcagtaagggcaatagtcccattcttttagaagtgttatggactttctctctagctaatcttttcgtcaaaggatctgctaaattatcatcagtgcgtacgtgatccactctaacagctcctgttgagagtaattctctaacaatgttgtgcttacgacgtatctgtcgtttcttaccattgtaataatggttctcaatttttgcaatagccgcggtattatcgcaatggatcaacacaactggtatcggtctttcccataacagaatctctgcaagtaagcttcttagccaacttgcttcctcactagtagttgctagtgctatcatctcatattccatagtggactgagctaagatagtttgtttctttgacttccaagaaacaaccccaccagttatgctaaatatatagtcgttggttgctttggaatcatctgaaagagtgttccaatctgcatcgctatatccttcaagtacagtgggaaatcttttataatgtaatccaaggtttatggttcttttaaggtacctcattaccctttcaatagtgtgccagtgctccatactaggtctactggtaaacctgcataataatcccacaacataggttgtgtcgggtctagtacaatcagtggcatacctaaggctgccaatgatacttgcgtactcagtttgtcgtataccttcaccagtgttcttaaacagttttacacttggatcatatggtgtactagtaggtttacagtcaaagtaatcatatttctttaagatcttctcaatgtagtgagattgatccagagaaattccctcttttgacctagtaatcttaataccaaggattacacttgtttctccgaggtctttcatatcaaagttgttacacaacaatgatttcacatcgttcactacatgaatatttgaaccaaatatgagaaggtcatcgacatatacacatattatagtgcaaatattatttacagatttgtagtaaatgcatttgtcactttcattcaccttaaacccattcgagactattaagttatcaaacttttcatgtcactgcttaggtgcttgttttagaccatacaaagatttatctaacttgcagactttatcttcttgtccatgaatcacaaacccttcatgttgctccatatagatttcctcttccaattcaccatttaaaaaagcagttttaacatccatttggtgtaccactagactgtgaatagcaataagagatattagcaccccgaatgttattctagtaactggtgaaaaggtgttgaagaaatccacattctctctttgcctaaaacccttggctacaaggctacaaggcgagccttgtatttatccacagtaccatcaggttttagtttctttttcaagatccatttacaaccaattggtttgcaaccaggaggcaagtctactaaatgtcaggtcttattagattctaaagaatcaatctcatcattaatggcttcttgccacaagtcagcatccaaagaagacaaagcttcttgaaggtttgatggatcctcatctaatgtataggccattttttgctctttacctcttcgaggctctatatctggttctggttgtgcaagattttcactactaatagcaggaagataactggatgaagtacccccactattccttaatttaaaaggaaatttattttcataaaaatcagcatcatttgactctatgatcacttttgcatttaggtcataaaacctatacgctttgctattaatagcataaccaatgaacacacattcataggctctacttgcaagtttaaccctcttggggtttgggatccttacataggccagacatccccaagttctcaaataagacaaatttggttgtcttttctttaatatctcatagagagatgtcttgctttttgatttgaggattctatttagcacataacaaatagttaataaaatttcgccccactaaaaagatgttgcactataactcaacatagtagctacaactaattctgtaaaagttctgttctttctttcagctttactgttcatttcaggtgaatatgaagcagtcgtctcatgtatgattccatgcaaattataaaactcattaaacaaactggaatcatactctgtgcctctatcacttcgaagtttcttaatttttttattgaattgattttcaatttctattacatataacttaaacatgtcaagcacttcacttttatttttcataagatatacatatgtataatcagagcagtcatcaataaaagtaataaaatatcgttttccatttctggtcaatgttccatcaaattcacatatatcagaatgtattaaatccaatggctcagattctttaactactgatttatgtgatttcttagttattttagattgactgcaagaaaaaaaaaacacatttttcaaagtgatttgaagatagctttggaataaaacctaagttactcatgttagatatgcaacaactatttatatgacaaagtctagaatgctagatattaaaattacacaacatgtaagcagaaggagaaactttattaatatcaagattcaatttgaacatgccatcagtggcgtaccctttccctataaatacctcattcttggtcaaagtaaataaatctgcacctatggtctgagtaaacccagccttgtttaaaagaaaaccagaaaccagattctttctcatctctggagtatgcatcacatctttgagaatcaaagtctttccagaggtaagcttcagttcaacatctccaattccagcaatagtagtgatgtgggaatcacccagcaacactttcttattttcaacattcgtgtatgttttaaacatagcacgatcatagcagacatggcgggagccgccagtgtctacccaccatccatttgatcctccaatcatattgatctcaattatcacagctatgtatgactcttgagcaattttctgtatctcatgggattgagactctactgatttatcaacagtcatttgatacttgaggtagcggctaacaacatactttttagtcccagcttcctcagtatcatacttttcttccagagccagccaaactaatttggcagacttatatgggctataataataatagagatcatcagctaacccatttagaatgaaattcttgcataggtaatcattttaattccaaagagctaattccatattcattttatcattcacttccttttcagcatctttaggcatcactggaatatcagtgttcaaaacataggcaacttttctcatagaaaacatcatcttttgttgccaacgtttgaaatgataccctccaaacctaaaaggtttgttgaggtcattgttgttcgagccagtaatatctacgataaccatagcagagccgaaatcgtcttaaaattgttgtaaaaataatttatggcaaaccaaaaaaattacaggctgagtcgcgaacaatgtggctttctttaagacattttgtggtactgccaaaaattgtgcaagcagactatcaaccacgaagtccccaggataaaacagctcagatcactgtataagattcccactatactgggggaacctttctagaattacaccttcttgtatgacttgaaaagtcactctaaagccacctgaaaatatgaattgaaaagtcactattatagtcgaccaaaaatatgacttaaaaagtcactcttatagtcaaccgaaaaatatgacttgaaaagtcactattatagtcaatcgaaattttagagcgacagaaagaaagagggagaagtttgccggaaatgcatcggttgaaatatgggagggagaaagaaaagttgaggaaacgcttctcaattgggacaaggaaaaaagaagaaaagagctctctatatatagggagtgaaacactattcaagtgtttatcaagagcgatatgggacttgaagccttttttttttctttctttttttgtcaaactttcatccacattctcctttgttctaacatatgcatatatatatatatatatatatatatatatatatattatattcatttctttctttctttcttttttctttttcagaccctcaattcctttctgttctataaggatggtaaaatgtttccgatatcttccctttgatgttgatggtcttttttaaacatcaaagtaaactttctgtattgatttcctgagctttggagatggattgtgattaagtttataaattttgattgtacgaggagttgaattggcaattacctctggtgactggtagtatttggagaaggttgataacatgcttatttagggatagatggataacatgatgctttgtttgaaagcataggctttcactgtgactgtttagtgatataaattgcaactgaattgtgtaaatacgtaaaatggtaataagagaaatgggattctgctagatttttgaactcttgagtaaaagccgtatttgtgttttatttgaatccgcaccatttgccttaagccatatctctaaccttttttctccatatatgtggtggcattgtgggagggttagggtaatagaacagtagtcattttactttattttctcttttgtattaagttttctgatatggagatgcctatattgaataggagtgagggatgtttcgtacaattgcaaatagtgattaaaaagattagattatgtatgttaggtgtgccattgactttgatacttaaaatttttcacctgataaaagcaatagttgagtttgatagtttatcaccagttataggctgccgagttgtcatgatgtcaagaatgtagatctaagatgaacaacatttattgtcttttgtatctgcagaccgaggagccgttggggtggccaaataactg

SEQ ID NO: 3599 - DNA, 2632 bp, Glycine max
  Intron number 1 from transcript Glyma17g03570.1 (locus Gly ma17g03570) derived from phytozome v7.0 (chr-ID Gm17; pos 2383099 to 2385730)
caggcaagtcttctctattgtaattgtaaaccttctgccttgccctagaatctagtctctgaagttttttttttgctttttgatgttgtttgcagttccgatttaattttttggaggcctttgatagactcatgtgttagcttcgtagattcatttggattggttttcgtttagtatcgctcgtgtcctgttatgctgtggtttcttaaacaacttgttttagtagtttctatgtttaaagcaatccatttgttgcagttacggacccatagatttttccaatggaggcaaagccttccataatatcccctcggagaaatttgtatgtattaagttgtgatataaactgttcttttaaatgtggctaggtggtgtgtgtgtgtgtgtgtgtgtagcgtgtatggtaacatctcataagaaattgatctttgaatagtctaggactggttatgcaatgacatatggttccatgctttctgttcgtgtgaagaattgggcttgttaggtgccaattagattatccaagcaaataggctagaatctagatatatatgcttcttgctataataataataattggatatgatttcgcggatattatcccctggaagttttaagaagttagaaattaaactgaagggtaagaatttagttttttaccctcagaccttgttgggcacatactcttttgagctgtagttattagacaaggatctagtagtgttggaatgtttgatttaagttaaacctttggattagcaaagacttatgtgagccagaaatgaatttcttgatgctagatccgaggattttggctgcaatttggttagatagtattctatattttatccttttaattttatctgttacggttaatatgtgatggtagaatctgtgaagttgttgtcgtgtcactgggcagtgcactagttatggacttatgatccaatttagtcttcttctgatgtgttgttgttagcctggtggtcactaaatgtacaaagcattttcttttttctagagagttaattgcactcatttccctttttacttaatttcctcaacttcttaattgttactaccctgaatgcagtttgttgtgttatgtttgctaccacattcttttcagagttggaattgtacttctttcactgtaataatgttcaatgacgtgaatagtaaattagtaatgctggcatctgatgatatgttttgacttaactcctaagcacaataggcaaatccaacccaaaagactagtccattatgtgggagtctcatggcttaatctagcttcctactctactcaatgtgggactcgtaacatgatacttgatatcgtgttcttaattttgttaattgtttccctagtcattaatgagatcccacttaaatttaaaaattatatacccaattgtattctctggcatttagttgaattcttatgtagttgtttgtctcttggcttgttttcatataagctacctgttcctctcttgtgtatactggtcagttatttagtttaactttttaagaatttatcaaccattttaattaataatcaaaattcacatgttgttaactaataaaacaaattttgtattaaaagataagtactcagtagtagtattagtatatttatcttttcagtgctttaatcttggtttatgcaaatcagaaaacacccttagtaaagcagattttgtattaaaagatcagtactcagtagtagtatatttattctttcagtgctttaatcttgttttatgcaaataccctttattacaagtgaggaaagaagatcctatctgatgttagtattctcatgtgaggctggtttgaactctggttacattttagtaactcttgtttcttggcattctagtttcctcaaacagttaggattcacttttgaaaatagaaaaaaattgttggattggatgtttacagcttaatttgataagataccttggtactttttggagataaattattgcaaagatgtgtgttgaacaattaggaagccaaaacgtcatccacttggttttcagaactgaaagacaggaatgaaataattttgtatcaatgacaatgataatttttattttcagtccttcatgttcattaattactatcaacgtggaaataaatttctttttattatactatgtaatttcagtttatatttcttttcttcttttcttttcttcagattttgctcctaccaatcatattgcaagagaaattggaagttggggcattcttgtttcatttggctcataaaaaaacattttccttttcggccttgtttgcagctgctaattgcttcacattctttctagcagagcctttgacttgtttttgaaggaaagaggaaataaaaagattgccgaacaaatacataatgatttggatttcatcgatttaatcacatgaataatatagttattttaacaagagagatcagttggtctgcttaagattaatgcatgtagtttattggttttgtttttacttatattataatacttctatattgttataaactgtggttgagaggcatatatgatactttctttttacttaatctctcttctaattggatttcagcctgtcaaggtatatcgtctga

SEQ ID NO: 3600 - DNA, 7387 bp, Glycine max
  Intron number 4 from transcript Glyma12g16510.1 (locus Gly ma12g16510) derived from phytozome v7.0 (chr-ID Gm12; pos 15830606 to 15837992 reverse strand)
gttttgctgataaggttgactctttcatctctaagtgtaaatagatttgtatgactgagtgatctccatattgttgttgatgaagtcgaaatttaggaacacagttgtattttctgaggtgtgacagtcatggacctgaaattggtgtctcacgcaacgtcttaacatagagttaaggttacaaaacttgcaaaaaaaaatgattgaactggtgtaaagagggataaagcttaatagaaataaaaagaagtaaaaaaacaataggcatcatctccttataaaaacaagttcaaaatcatcaagccaacttttttttatcaccgattatgagtctataattgttgttgtcccccttcttgattctcacttttattgacattaatagaaaatttgaatttaaatgtcataattgtccatttaattaatttttttaagaaaattcttttgaattaaaattacaacaatcccccacatattttaaaagaataaattacatttaataaataaaagaaaatttattggtcaacatgaggtgtaatgcatcagacctgatatagcaagctatatgaaccagacctagattgataggacttaatacatagtgttgttggtgtagcaagctatatgaacaaaaaatactcgacatgtgataatggtttgtctaccaatcacaagacacttgttatcggtgtgttgcactactaggtcatgcatgtgcccggtatttatgagtgctctagagatcttgccaagatctcatgcaagcgatcccatctgacaatcacataggtgatttcattaagtgcatgctgcaaatcatacaccaaccataagggatatgaaaatcattaaaagctttataagatgtaaagctttctcaaacatgtaaagtttactacaaagtttattctctcattaatacaatcataacactttctcacaccatagactaaaagaaaattgatagaaatcaatttaagtgttaacataactgacaaatgacttgtttttacccatatgaaccttcttcatgggatctctaatcacaaaggttaggttaccatcacttgtttgtttttaagtgacttaagtttcattccccttgatgtttctaatatcatattcctcactaagggttttgtcaaaggattaagtttccttctaacttcacataatctatgaaaattgttccatcttttagcagttgtttaaccacattatgtctcaattgtatatgtttacttttctcattgaatgttttattcttagtcacaactatcgctgactgggaatcatgaaatgttagctaagaagtttatcaaccacttagtctcgctaccaaccatttctagagcaacaaactttgactccattgttcatttaacaataatagtttgtctagatgatctccaagctaccgcaccactaccacgagtaaacacataaccactagtgaattttgtctcatttgaatcagagatccggttagcattgttataccctttaagtattgcggcaaatctattgtattcaatatcataattcgtggtacctctcaaatatctcatgagtctaacaagtgcatgccaatggttttaattaggactatgggtatatatactcaatttgcctattgcatatgcaatatcaggtctagaaaagtacatcaaatgcagtaaacccaatgatttgggcatattggttttcctctatttttctttaattgagagttagcatcataagggatactcgttgacttaaagtcataatatttatactctctaataagtttctcaacataatgcttttgggatagtaatatactatttcccttctttataattttaactcccaaaataacacttgtttcacccatgtctttcttatcaaatttagatgctaagaaagatttagttttaaaaactatatcattgcatgtactaaaaacaacatgatcatcattcacatactttgtatacatgcactatcaacatcactactagaaaaaccatcaacaagtaaagtctcattaaatttttcatgtcattgtttaggctcttgttttaaaccatatagggatttcaaaagtttgaagactttgttctcttggtcatccactacacacccctcaagttggctcatatatatctcttcctctaaatcaccattcaagaaagttgtcttaacatctatttgatgaatcactaacttatggattgcaactaagactatcaaaatcctaatggaggaaatccttgtaacatgtgcaaaggtataaaaaatttatgtcaggtttcccagtaaaccctttagcaaccaaccttgccttgcacttatctatagatccattaaggttgtacttcctcttaaagatccatttacatccaataggatttggacccttaggaagatctactaaagtccatgtattattacttttaatagagtcaattttaatcctaatggcttgctcccaaaggttttcatatgaagaactaatagcttctaaaaaacttaagggatcatccttaataagatatgtataaaagtcatcttcaaaagatttctttgtcctatgtcttttacttctcctcaaatccttgcttataggttcactataggtttcaactagttgttcaagactagaaacgacactggaactagccctagacctcaaagggaaaacatcttcaaagaattcggcattcttagtctccatgatggtgtcgcactcaatcatatcactcttaagaactagaaatctataggtagcactatgttcaacataaccaataaacatgcaatcagaagtcttagatcctatttttcttttctttggattgggtaacatcacttaggctaggcacccccacactctcaaatatttaaggtttggttgatatcatttccataactcataaggccttaaacccattttcttatgtggaattctattttgtaaaaaaaaacaatcaagagggcttgtccccaaaggttgttaggagtagaggaacttacaagctatgaagcaccgacacggacaccggacacgacacggacacggacacggacacgtggacacctgtaatgtctaaaatatagaacgtagtacgggtgtcgtgccggtatcgaatactgacacggacgcgtgtcggataccagacacgacatggggttggagtgtccgtgcttcatagctaacaagtaaaacattcatcatttccttaagggttttatttttcctttcagctaattcatttaactcgattgaatgtgatggagttacttcatgaattataccttccttttcacaaaagtcattaaagaaagtgtactcaccacccctatcagatcttagcctcttgatttttctattcaattgattttcaactttagctttataagataagaacatatcaaagatttcatctttgtgtctaattagataaactttactatatctagagcaatcatctataaaggttagaaagtaacttttaccttctcttgtcatagtttgttttaaatcaacaagatcaaaatgaattaagcctagcagttcatttttacgttgtacacaaggacatgatttgttagttaattttgattcaacacatatttcacatttcttacttttttttatcatgcatattaattaaaccttgccgttgcaatttcataacatacgttggattaacatgtcttaatctagcatgtcatatatcataagaatcaatcaagtaagaaaaagaagatgcattttcattaatcacatcagaaacattgagtacaaagagaccctgatcataataacctttccctacaaatatattattcttagtcataactatcttatcagactcaaaggatatctttacgccaacctttcccaacaatgcttcaaaaacaaggttaactctgctagagggagcatgtagcacatcattcaaagccagtgttttcccaaatgtgagcttgagaagatctttcccctttccttgaacctgagtagttctcaaatcaccaagataaacttgttcttctccatcccccacaacagtgtaggaggtaaacatactcttattagcacaaatgtgtttgatagccccagagtctaccacgcatttgttcacattggtgacaacattcactttagaaatgactgcaataataatgtcatctccttcaaccaggttagccctaggcttaggaggattgtcatttctcacaactctgtacctgcactgaggagcaaaagtcctaacttcccacaaacaaaacaagctccatttttgcttgaaaaaaggattagaagaaggagcacataggatgagattagaaggagcaacacatgtgttattatatttgtacttattctttttattgtgataaattttgttggcatacctcttatgaaatggtttgtcttgtatcgtgttttccttggaagacattgctttggtccttgttgcaacacttttcttcatatttgtatcttcaatgataatgtgggtgataaggtctaggagtgacacctgtctgtgtttgtgctttaactgttgtttatagtctgtctaggactctaacaacttctcaatctggagttcagaaacaaactcgtcaggcaaaaagatgttttcagtctttagggtttccaacaacttgtggtatttgttgatttgtaccttgatgactttttcttcgttcatggtctaggggtagtagttggcgatgatgaatctttgtctgaccacgtcgttggcagtgtgtttgagtatgagagagtctcatatctctttgaattccttgtagaagcagttgatataaaaaaagatcattagacaaggcacttaacaaagtgtgacgacatatcttattggcttgaacccattgccgaagttgattggcatcaacagaggcatcaagtttgggagtgaaaaaagcgaagacaactccatgcatgtctagcaaggtgtgaactcgttcctgccagtgacgaaaactttggccattgaagacctcaatttttgagacgttgaccaaagacttagcaaagattgttgttggtggcatggggtcggaagcatcgacattgttgataggttttgtggcatcaaccatgaaataaaccttttagattgttgttgctaaagtcgaaattcacaaacgtggttgaacttcctaaggtgtgacagtcactgacctaaaaggtttatccacagtctcccacccaaaccaggatacaacatgaacgccttatcatagctaaagttacaaaactcacaaagaaaaatgattgagttgttgtaaagagggagaaaacttaatagaaacaaaaagaagccagaaaacaataagcctcatctcctttcaaaaacaatttcaaaatcatcaaccaacttttttttatcactaattatgagcctataattgccattgttcccctcttgattcccacttttattggcattaataggaactttgaatttcaaattttgaatttaaatgtcataattgtccattttattaaatattttttaagaaaattcttttgaaataaatattaaaattacaacaaatatactattaaatttaatcatacaatgcttgtagtaaaatttcacaattgaatgagaggaagagaaaaggaacaactctttgtaactcagttggaaggaatttgatttattcacttcatgccttcatgagacttgtcattttgtcctttttccttctcttgatgttgttgccacttgccaagagaattttcaataacataaaaataatagtaattatataattttgtccttgaaattgcattgattgatctataaaagtttgcatgtattgtccttgcatttgttaatttcatggcaaagttgtcctttaaaatgaacatgaccaaatttgtgattaagttagcaaatttagggactaaattgtcttgaagttgatagattttagcactaagttgatagagaaggactaatttatcctgaaattggcataatcaaggactaacttttatacatgaaaacttttagagaccaaatcaacataggtttcttttatcaaggattaaattgtatattgactctaaaaatgaagatgtaggaagaggtaatttgttggtctagaggaagaggttattatttatttgactaagtataaaaaagactaggttaagaattggtctttcatgacaaatattattcacttgtcaatagagatagatataaactcaaatatattttcgattcctgacatatactccaattttgtgtttgatccctgataaaatgttcctttgaatcgtgttgatatttaaaattttttgttctggatctttaatattagttaagtaatgaagttaaatatataacaatattggtggctactcaaaactaagtttttatttcaaaatagatttttttttaagaaacaaatcttaattttttcttaaggagaagttcctctctttctccttcctcttcctccgtgaccacctcctctctcgtgccgccgccttcaacaactcctgcatcctctgcgtcttcgtcggcactgatttgcggtgggcccccactccgccaccatcgtgggcttctgccaccgcaaccatctttcgccacactgtgctcgccaaacccaccaatatcgtaggtttcagtcagggattactgtccctcactgtgcaacttgcggccttatctccgaaactcggtaaccttttgtcttattgcttggtttctcactctttcgacaaagaacgacttcgcaaaccaagtccactcattctcggcagctatgatgaccccggcgagcgtgttgagtttgtttacatctccatgctctggaatccaaaacattcttatttctactgcgtcggactcaccgaaatctctgtcgggaagaggactattccgacgccagagatgctgcggagggtggaccgcagaggcgacgacgacgtggttgttgatagcgaaaccactttcacgatgctgccggagagtctatataacttggtggtggctgagttcagccggcgagtcgggcgagttcacaagcgtgcgagtgaggtggaggattctcagtttatttattttttattttaattaattctgacggttcttaattgccaaaaaaatttaaattttattttgaaacaaatattatttggttgatgagtcgccacaaaccacgttatgaccacagagatctaaaaagaaacttttcaaatatcaaagtagtcgatttgaaggaaaaatctatcaggaattaaatacaaaattccgatatatattagatattaaaaatatatttaagcctatataatttgaatgttggtaattactattcactgtggacaaccaccagattgcag

SEQ ID NO: 3601 - DNA, 3476 bp, Glycine max
  Intron number 2 from transcript Glyma20g03330.1 (locus Gly ma20g03330) derived from phytozome v7.0 (chr-ID Gm20; pos 3085857 to 3089332)
aggtgagcactatctagctttttgcttagtattgtttgttgtgttgttttttatcttgtcactatgatttgtggaacctcatgatagtactcatgctcatttaattgtaccttgtttttttgtttaggctatgtcactttttgtcctttatgttttagtgttttttcatttggttctttaagttttaaaagtttcattttggtcttttcgtcaatttactgttaatgccgttagggatttaaatttgaaatgattaatttaatagtgtaacaattagcttttttacggctaaaagatttcacatggttctctgattctctaaaatttttaaatttaatatagtattattgtgttgtttaaggtttctttgatttatgtaacttctgtaggttgtttctgctgtgttgtttacttgttttctatcttgtcactatgatttgtgaaactcatgatagaactcatgctcatttgcttataatcgtgaagtcaacagaatataagaattttatgataaaattataaattttccctgctggctgaaagttactgcccaaacatccatgttattgaccattattatatagtgcgatgaccaatgagtgattcagtccacttagatagatttatattcttccccctatgcgttcctttcttcattctttaatgagataatgaccattaaggactcctagggaacaggttagacctaaaatgacaccaaaacaggttatattgttatgtaaagtgattgttttgtccataaaacaaagcagttgataaagtttccagcctctccctgttcttcaagttgaaattagatttttgtaggcacccttccttttgaggaaatgcatgaatgtttcattttttttagtctatagtttctttattcttctgaagtttggaagtttctaggggagctaggtataacttggctttcgaaaattttaatgagataatgagattatataaaatgctagatagacagggagcactttaatccctatttctgagaataagggagatttgcaaaagtttgctaactatagagggattaggctcatgaaccatgaaactatgggacaaagtaattaaaaaaagatcaagacaagggacttacattttagagaaccaatttggttttgtaccaggcaggtcaagggctcaatgctgcatataccttttatgaagattgatggagaagttccggaggaagcaaaaagagctgcatgtttttcattgaattacaagaggatgactagatgcccaaagaagttttctataaggctctaaagaagaaaggattttgtatcacatatattgggccaacaaatatatgtatgatggtgctataattagtgttagaaccaaggttttaatttgtggttgtggtcacattactttttttgcaattatgaatattgcggatgttgtgatgtagattgcagttgttgtggtgtgaattgttcacaacaacacaaattatgttaaaattatctgtgtcattatataatctataaaaaatgtaacttgtatattttttcttgtcatttacatcacaaaaaatttccctctttcatattttaacttttcaaaatttaaattttttaaccttttcctcttaatatttctcctgtctcctccaatattccttcacccaaaagttacctacagcacatcaccaaaattttcccactcaaaattgaaccaatgtttccagtcacacactccagcctcttctcgctctttgccttatctctcccgtgtctctttaatcgatctttctccctctctgtgaccttgtgatgatgctgctgcagtagcactgcaagccgacaaccacttgagactggcaagtcaccagaagcacatacagggggaaaggaaatatgttatcaaggatggccgaaagctgcagttgtctgtgaagcaagtgccagagtcagacttgttgtgagatgaatgctgttatgtcaggttctttgtggccacaacactgttcggttgcattcaagacatgtgatttccctccattgtagcagtctgttgtggtattgttttcttccaatactgttttgttgtggccacatcaactgttgcagaccgttttttttaaaccctggttagaacacatgatgggatcactagggatttccttataacagtaggattaccaaaggtctactttgaacccttaccttttttccttgcctttcttgcacaatgcattctttttggaaatgatatagtcctagagtcgagaaaatataaatgataaagtaaatttgtggagaaaagcttttggatgcacattgtttttgattaagctaagttaagagtgtatttggaatgccagttcagctaggtgaacactaacactatcttaaaagtgaaatttgaagatgatactattccaccagtcctaaggtttaagtatcttagacctatcattcaagatggtggataaaagagatgcacccatacaagctgggtggatggaatgaagaaacagttcaagtgtttttcgggataataaggtgcctcttaagcttaaaggaaattttttaccacacaactataacatctgtgatgttgtataatatatttttcagcgtctgataaaatcaaattgaacacttgtgatattgtttgcatagatgtattcaaatattaagagccaaaagcgtgataattttgacaaatgtccaattttttttcttttctcagaccacttgttgttattctgtggctgcttgcaactaggaatcaaattatattctaccattattgacacttgtcaagagtatgttaggcccccaattaataatgtatataataaaaggattaggaataagcccaaataagatgggcccagccctgttagtgtatccaaagctgatgtgtaaagtcggagttagaaacagtagaagagttattaaaaggaaagattagaggggaattagttagttttggagttgtaactgatttgggggagagaccaggctcaaaggtcctggatagtttgtacattcatttctttctttgggaacctttgattctgaggagcaatacacatcctttcagatttctttttgccattctttcgtcttttcattattctttaccagttccttacagagtccttttcatatttttgtgtgaatattttatcctgcatcttagtgtgtaactacataatatgagatattaattctagatcctcctaatcaatcttcctaatggtcctcctaattactaaataaaaaaattattgattgcattttgtgttctcaaggcatgaaatgcatctactttctatttaatgttttctttagtaggtatcagaaatataatgattattagtaggatatatcattattcataatataatgatactgttaagcatgttagacatgaaatggggctaatgttatcttatttcttacctggttttcatttcttgtcatgaacagaat

SEQ ID NO: 3602 - DNA, 3348 bp, Glycine max
  Intron number 1 from transcript Glyma09g26630.1 (locus Gly ma09g26630) derived from phytozome v7.0 (chr-ID Gm09; pos 33165509 to 33168856 reverse strand)
ctgtaaaaatccagtcggctttcagaggttacttggtacgtgaaaatctggttttgtttttgttcttcgtagtaattaatattcgcagtcaaatgttgtgtttttcggtgtaactacgtagtttaaattattctttgttaatttaaagacttttttatcatcatttaattataaattattttaagtacgattttttaagtagttgcaacaaaagttaccaatcttttttatgatgataatgagaattttaatttttattaacggtgtgttcttttaaatatgtttgggaagtgaaattgacacttcaaagtgtcatgttaagttgtttaaggttttaaatgatgaaagattgaattaaattgatgtttattgataaaaagttgaattaatgctgaaaatatttgcttgtgagtttttgaatgactaaatttgagtatttaggacaattttgataccagttaattttggaaaaataatttgaaaaagttgtattattaaattaagtagtctgtgctttgattaagacttgagagtgatgaaatatgaagtaattgatccaaaattttctttgcttggtgttgttgaagttgaacacatgttttttttcatagtgatctttcttttttacctctggttttgtttgagtttgaccttggtaaaaacgaattattcttcctttttaaattttctccctcgttctcagcgcgtcagctaatttcaaatttgttgactcgctgtttctgattgtctgtgtgtgcttttcacccattaatttttctcgttgaaatggaatttcccctgctgtttttctcgggaaacaaatcctagtcaaatattattgcttcattttcaacgctgtttattttttcctaaaattttcacctatccaaagaaagctgttccctgccacaagtcacaacacaacagccatgccttttcttcttccaataaataatttgaattgttaggatcatgttaaagaattaaaattgaacgtagttttctattaaaaatattactgcattagtaatttattattctgatttttttaatatatttttaacacattttttaattctattcctctttctttgtagcttgtggtaaaactttggtctttggtagatgttgtgtgtggacctggcaatttgggttccgccgacaaatctctatagaatccaacttgtaaacgttagcgagataggatgggaatataaaaaaccgtaacttgtctatatcgatcgttttaatcttaaaaactatttttttagtttgaaagacaaaaatatcgataatttaaatctttgaaaaacaaattaatttccgtaagaaattaaattaattgaccttttcgtattttaagacgagaatatgatttttatttttggatgctgatgtatgatttccgaatcttttaggcctgaaacgatattttatttttcaatgttatgggtgttgaatgcaacatgtattcccatcacgcggtggctgcaattttcgtgtgttgagtcacttttgtgttgtggggggtgttctgttctgctttctgtcgtgtacttggcttgtgtcgtattgcttatgtgtgatttgatttggatccttgagaaaatgtagcagtgagactagagtagtagtaatgcagtatggtgttgtgaggattctgccagttaaacgattcagctcaaagtggccatgttttggggacttgggtgtgtgacaacacaagagtcaagggccaacaaagaaagtttcgagaagtggaaaatgggtaatttgtgggagtaagaaagtgtgagccccacatattggtgagttatgatacttacctttccggtgaccaaagtggaatgtcccctttgtacccaaaaaataacaccaaaggtgaagtggccgtgcaccaacacgtgatcattgacctaagtgctagtgctagttgttaggctacccatattttactcaatgtaagtaataacagagtcacgcgcaagttggcaaaaataatgtttttgttattggctctgtaatcggtatgatatagggtacatagattgactcattctccatttacataagtggtttaaggatttactatgaaactcttgcacacacttttataagtgagttcgaattttcttaatataattttttttgtccggtggacaatcttctcttggaagatctcttaatcggtagaattgcttgcggttaaggtttgaactataatgtttatgtggctatgtgagtctcttttgaccgttccaacatgtctttagtactatgccaagtagtattttgagcatggaataagggggcatcatactttcatgtttagagcattgtccatgtaatcccttaattaggtagaattatttgttgtttggaccttgtgggtctctgctgatagtttagtatgtcattaagccctgttcagtactattattgaaagtgtgtaagcactctatcacttttgttgattaaaaaaataaaaaagaaaaatggtacattgatggatttatgttaaacttgtgatttcttgggtttgacaaatgaaaagccgaaagtgaaagagccatgcttttttgggggggttaaagtgaaaagagattttttacacctcactttaaccttcacgtgagaggaagctactcttgttgaggacaacacggaccagcagttaggctgtaatgttttttgttttttctttctaatagaaactgaaagtaacattaagactacaatattcgttgaacttaaattttcaccttttgccgtccaaccatggtggggcatgcgacataggaagcttcaatgaatatgaaggagcatcaataatggatggctttccactgtgtatttatgtttactaatgattacgcccatcaacctcaacccccctcccccttctttctcgtgtctttttcatttcaatatcctccaactttctgacatccctctatttcccatcttttattttaatattatgtttagagtatgtttattttattctcgatataacattttaaagtaatatttcctaaagttatcattgatcaagaatcttaccatagataacaatgtatgattaaataacattgtaaaaactttacatgttaatttgttctaactaaaagcctttataattatgtaacaatgcagataccctttgcattatctttgttcgtatgctttaagtgttctttttttttctcctcaaaaaatgtgataggtgaatttcatggataggttttacgaacagtatgatatggaatggaattttatgttttactgatatttttttatatgaatttggaaggcaaggagagcattgagagcacttaaagcactggt

SEQ ID NO: 3603 - DNA, 1378 bp, Glycine max
  Intron number 14 from transcript Glyma10g03550.1 (locus Gl yma10g03550) derived from phytozome v7.0 (chr-ID Gm10; pos 2592094 to 2593471 reverse strand)
caattctaaaagggaaagaggtgttcacagaacaggtaattgcttagctgtgctctaactttattgtgtggaatttaattttctgtatttatcttagtattgttttttttgaaaaatttagttctatatttagctactgttgcttgttgcgagtttcaacatttctaagatgatttttcattcattagaacttttgccagtaagctagtcaaacaattgtatttccataccctctcttgaaaccatgaaccatctaaaagcttactgagaaattgcatctttgtccccatggttcatataatgttgacttgggtgaaagaaagtgaacaattgttgattactcatctctttttagttttttcacttagttcaatgttactccatattgtttccattgctactgctttaaatgcctagcaaatagcaatgctgatgtcatgataaaaattttcacatgccttggatatttgatcatcccctcccatttatggtgacctcttgaataatgtaccggagtttggacacattgttgtgtattaccattacattatatttaatgttttctttggtggttcatcatatgacaaagctatttgattgttgcaatctggggctagacttatgacttttcttggatggagtagtgctaggatctctgaggttattctcattccagttacaactgctaccaatctaaccttgaaaataattgggcatgatagagaggttgcaaatcatgcctgtcatctgtgccataactatttggcaataattgagttattccaagcttaataatcagtatgcatttcatgccatatttttgctattctaactttgtttcctgcatttggtgctttatcacatcccttaatatttttatatgctttcctttaacattaataacattctttatattatgtgtatgtcatattcaatttggataactgatgatttttttaccaaagaaactgttttttatttctcagaatcaattgattttgacaattttgactgtcttgttctgtatttttttgctcgagagtgacagatttcctaaatatactttgatggtggcatctttctcttttcaatagtctctatcctcatcattgttcctgtgcatgagtctctagcattggttgcactgcatgtgcattgagactttagtttcactttcatatatgatagaaaatacataattgcgttaagagatttttgctgctcagacaaatacatagtcatttaattaaactaatcaaaacaaattttattaaatgatgaacaactcaaggaaatatatgcataattttgaagcccgtggaatttattcattttgtttcatttattttctttaattgtatggcgcaggcatttaaaa

SEQ ID NO: 3604 - DNA, 2786 bp, Glycine max
  Intron number 7 from transcript Glyma09g24090.1 (locus Gly ma09g24090) derived from phytozome v7.0 (chr-ID Gm09; pos 29784229 to 29787014 reverse strand)
gttgactcatttgagagaaggtatattttatgttgttttcaggcctttgaaactgaaaatttcaacttgtggcattttcacccctgtccttagttcagtggtttcctggttaaaaaaaaatattagcaattcttgccaaagaaaaataagaatatttgttaattcagataactttggttggatatgtaattaatcaagcatagtttagtgtccgggtttgttgtacattggttaaatagggaattaggagctgtgtatccattattaaggttaatatatattcagttgtttgtgctatgcattgacacttggttttcatctgatgtttctcttttttctctcaataacttgaattcacttcatcattgcacctgtaaaaatgtataaatttgattcagattttgttaaacttgtattattggtttgttaggctcctcatccaaatagatttttgtgtcatccacaaagcatgactcttctgtcactgcttgaaagaagcctttcttgtaagttataactttagaaatgcagaatggacaggattaaaggggagtgaaaatggaaagtctgtcatcagtcatgtccccattctcttctctggaattagtctgtatctttgaagctttaagatccacttatatttgatacactcttggtcttagctcactttgttgaagtcttatagttctaaaagtactttgatgtctttattttctcatttcaaatgagtatttatttacgtatttcctcccactttaactactcaaactgaacatgtttgcatttcccgacaatagtattaatacaagaagatggatagcaaattcagagtcaagctcttattacaaggaaaaaatttgttaaatcaggaaccacacttgagaaaaggaacattgctagaaaaggttagatgatcagagctgccaatcacatattctactttctaaccctggcctaagctgcccaaatgattctgttatgcccttcgagtctccgactattgttatctccctcgttcatgtttctgtctgttgtcgccattgttaattgcctgctctaattccctgctgccatttgtacatcttattacatttgcctccttatcacctattgcaaaatccatattcctctatatgaattgtataacctcacatggcacaactctcaagctcattttttttctaactttctcttctatgtaccaaggaactggccatcaaatgaatgcactccttctagtgtcaccctgtcctcaagctaaaatctagaaaggcactctgaatgacctgaaacagccagacgttggccatcaaatgagcttgggtgttacatgggatacccaaccaacctagacaatctttattggttgactaaatgcacaagagatcatgggaaaaacaggaaacaaggatccctaaatgtaagggattgcagtaattacagtaataatgtctaacctctaaggaagtaatgaaagaatatcaaaaacagaatcagcttataatcagaaagtaatcagcctataatcagaaagtaatcagcctataatcagaaatagtctacacaatattcaaccccacacaagagcttgcaaaatacctatgtttgtggatcatatgatgaacataactccacttatagtagccagagcatgaactgcccaaattgactaataaagatgcaccctatctgaaactattgagcaaggaaacccatgcaatcgaagtaccccatttgcaacatagtgcagctctgcctccttgtctgaatatattcaattgagctgagaggcataaaatgagcatttttactcaaatggcccccactacctgttggatcaggctagaatctagaaggggaggttgaataggttctttcaaaatttttaccaattcgttcttaacacaaattaaaaacacccttttaaatcaatcaaagtttcttcaaaagatctttaaaaaatagaaacttcagtgattaaaacgtgtaaaaatagaatctattatgatggcccttgagattaatttcactaccaagatgaatacatgactcagagttttagagaataagagaatcacacaagagtttatactggttcagtccaatccgagcctacatccaattgttctaagtcctcttagaacttccactatatagagaacacaagtacaaacattatgcttacacaattctctaatagaaatcaaatgactcataattgaaactctagcaattctctaacatctttggtaaccctaaccaataaccacaatctaaaagaatgaaagataattgaatacacctgaaacgtgtagatctttaatcttcaatatttctttgcaagatgatcaatcatgatggtagaatgaatgattctttaatcaacttcaatcttcagactaattgtagtgttatttttttagaagactcttaaaatgttttacttcaagactaaacatatcaagagtctctcaaagaaaatacatagtggtgtttctaaattttaacaggtaaaacagatctaatcaattataaaatcaagtaatcgattaattcattgaaatttcctttgatctgcatttctagaaactggctaattgattatcaaaagggtaatcgattaattcgtttcagtctgagaattttgttccttatgtgttgtctggataatcaattatcatgtgtggtaatcgattatagaatcacacagagagtttctctttatttccaggagcttctctttatttccagaagctgggtaatcaattatcctaagttgcagatcc

SEQ ID NO: 3605 - DNA, 3337 bp, Glycine max
  Intron number 1 from transcript Glyma11g11370.1 (locus Gly ma11g11370) derived from phytozome v7.0 (chr-ID Gm11; pos 8098451 to 8101787)
gttttactaatcccaaacaggtgcgccctttaacctttcatttgtatgttgttgtcattgtggatctgattttggtaattgggccggttttcgtaccataattgtttatattactgtgaggttgtttccatagatctgaacgttccgttccaatcatttggcacgtgttttcgttttactctttcttttttactttctgttactgatagaatgaaatcaaaatggagttttttgtattttaattttgcttacatttacctgtaatgccaccctaaggaagtgcaccttacgaaattaaactctttcgtgtaattgaattgtattgctttcggatgcattttaatttttgccattgtagttattcccattattagttggctgctgtctatgcaatctaatttgattaatgatgaatcactcatggctagattctgtggattgcgatgtggctgggtagcatgctttgcattataatcgattccttctttatttattcaagtaagttgtttgagttcctttttggttgggttagtgtatgcactatgtagtactaaaagtatgaactaggtaatgtattaaaacttccatctgtagactagcagacaatttgagcagctcaagaacaaaatgggggtttagccctgaaagtgaatcaagggagggtcatactagatatataaggttggcttgatggtaaagggtgaagggagggagggataggttgtgggttcaaatccccctggtaacaaaaactaacaactagcatttgccaatccaaaaaaaaaagggaggggcatgctcataacacacattagccagtttgaagaagcatccatctctgtagatcaattctgtgtacccgtgccttgtaacccagctttagaaagaagaggataatgagagcttcaaaaggtgggtggagatacggaatcttttagttcccaatgattcctttaagtattaggggagaggatatctacactataggttcccaaggcacagggtgcatttagtgctcacagaaggctatgatcatttagaaatgtgatagaaattgatgaaacaaggatactgatgcgggagtgcatggttgctggggtttccttttcctcaagcaattcggttgtgtcagccccgagattggttggtctaacatttatgagctgactggacaaagatggatggaaggtaagatagattggagttcaagtggcacaggattaggagagtgtatgggtagaagaatgtggcatttgcagaagaggatagtattttgatgagaaaggcaatatgaaaaaaaaagtgtagtccctgggtaagcaatactgccgaaatcctttgatttcagtttgagtcttttgctgaaataaacccatcatgttttctctttcccagcatattatgagcattccctgcttcttggagtgttacccttatctatatttgaaacaatttgtaaacacagttatgatttttatcatgaagattgaaacctgcttctttggttgtggcggtagctctatctagtagaggttctttggttgaagttgtatgagaaacactctgactataaatgaagtttttttgtcccctatattacacgtggacctgttttgagaccaccatttttaacactgaatatttataaacataatcatcgacttgtatatcatttgattcgaaatcgatgattaggtgttagaatattaggaaaatatctttaatttattatagaatatcttaaattatctcataggattagtttgttatcttggagtatcatagattatcctttaaaattagtttcttaccccataatatctcctaggattagttttcatatttcttaataattatcatgttttgttttgttatttaagtaaaattaggagtctattaattagaataaataaaggttagtgccttagtcttttaaataagatcagtgcaacaaattgtattaataattcaagattattatcttttttatcttctctcctttttggctaaatacatattacttcaacatggtatcagagctgtactaaccattgtgacttgtccatcattattctgctattgagttgctgctcagaagtctattgtaacaatgtctttctttccaaatccttctcttgttccttgctatttgttgtttgccaccagtacatatccaatgattcctaacattagtgttcttctttagtttttgagcttcgttggtactactcactagcatgtttaatttcttctgctgtgcattttatcagcatgtttagtcttagaattcaggcttagtgcataactcaactctacaaaactagcttgtaaactgaagactgtccaagccttaataaggaatccatctgccatatctttggtcaatgtgcaatcttaacaccccccctgtgcctaggacttgacatctagagcgtggacaaatgcggatggcccaataacaacagccctcatgtctaggaatagacatctagagcatgggcaattattggtggcccaatacatgatagactttgaaaatactatattagaattttaggcttagggactaacttaacacgactcttaaaaggtataaggagtacatttgccatatctctagacaatgtgggatctcaacaaatctctatctcttgctgttgctgctattgtgtcttcattctagcaggttcataaactttaatttgtgcatttggcaaatgtcaaggaggatggcccgttctatcttatcatttggtgtccaaggtgatactgtagtgatgattaattgacgtcaatgaatcaaaacaaaagttttaatatatcagggatccaacgcaacacaaaaatttatgagggacccaaaacaaataatcatctattagaaacctcaaacatatataaccctaaatttaacaagtatatttaagagaaataaaattaaatgctcaacatataatattagaacaagacatatgacttaatgagaatgagagctctcatttaataataaattctaaaaacattttaatttaagaaaagatctttaaaaattcttattcaagatgattatttagatttataatgtaggagcagttaggagtctattcattagtataaaaaggcttagtgccttagtcttttgaataagatcattgtatcaaatcatattcatattcaaggttattttctttttctcttctctattcctctctaaaacgttgtaatcaacattaggccatgtgtaaaatttttccacttatgattttcatcttaactgataaactttcccttttctgatgtaggttgttgagatcattgaggagaaaccagaagagga

SEQ ID NO: 3606 - DNA, 1476 bp, Glycine max
  Intron number 2 from transcript Glyma03g30740.1 (locus Gly ma03g30740) derived from phytozome v7.0 (chr-ID Gm03; pos 38598381 to 38599856)
gaagctccagttttcaaggtttgttaaatgttctttgtgccccctatttttttgtatttaatttttgtttgtaatgtggtcacctaatgtggttttggtttttatttttgtctactaatcacacatgcttcatgattttgtgcattttatccttggttttttcttcatagttccattattaggaatgtctttctttatacccactcttattctctggttcatgtattagtgagttgtattcagtgttatcaatggcgaatgattgaaggccataattctgtcatataaacacattgcggcctatggcactgccatagcggctatccctccacaaattgcctataacttggcaaaaaatctaccatgccattctgccatggcagccatggtgccgccattgaacaatggtttgtttcaatctacatctcttctgtgtttctcccctatgaaaaaaagcacacatttcattatattaccttttcatatgcatggatactggtttgtttgggaagttgaaaattctgtggtatttctgcccagatggtagtattattgactgttatgatcactcatttgctggcagtcccacatagagaatgtatggtccgttctcatttaaattggccattattatgagcttgttcagttgtttgtggttccttaggggttgtttggtttgagaaaatgttttctgtaatctgttttcatttttaattacaaaaatggcatattgtttttgctttttattattttctattttcattttcctttgacaaactcaaaaaatgaaaatgaaacatgaattgttttctcaaacagtcaaactttaagtaagtgaagctctaccagctggttctgactagctgtaatatcatttgctgaataagaaacatgaattcagacattgaaagaaaacacattgtaatgtaacaatttgcatttagaattggcagattcacttggccttttggccatgagaagttatttgatactttttattatatatgctttggctttgaaattgattcttgctactacgcttaattatgctagttttctttttctaagtgctaccatgatgccaactaaattgatctttaaggttaatgaatgtgatttgatgtttctcataatataaattataataaatattttaaatatgcagagaaattgagtcaaaatgacaatcgaagttgaaaccttttttcttttgggtagttcatagttgttgtccttagaaggaaatgtcatggttttgtttttccgtaattgcattacgggagtacatggtgactctggtttccatacaactacaacatgcaaggcttgtctctaactctaatgtgaatgtgtttgtgactttgtgtttagcctgataacttacgctgagcaatatgcgtgtagaatgtttcttcacctgtgccatttctctgtttttcaggcattgcttcattttatatactgggactcgctacc

SEQ ID NO: 3607 - DNA, 8795 bp, Glycine max
  Intron number 2 from transcript Glyma10g25620.2 (locus Gly ma10g25620) derived from phytozome v7.0 (chr-ID Gm10; pos 33587643 to 33596437)
tgcgttgttgcgtgacctagataagagcttacgtaattgtaattctgtaattttatttatttatttatagctccttttacgaatgaaaccataattatttaagacccaatatcttttcttgtttttttcttttggttctttgatcatatatcattgttagtgggagaaaaactaatcaaattttaaaaatgctatgtgggtttaataaatttcagtgcctctgattatcattggctctgttggtgaactgagtacaagtttctcttagattgtgtgtctaatgtgattaagtggtatgataatggttgaacttcccatggaattgtattgtccattatgcctaggttatttctgccatggtttccaggattcaaaaacttattactgatatcaatttatcgcagtctatgttgcaaaagtaagcaggatgctagtttgatatcagtcatttgatataatatgtgaatggttggcatacacaaaccagaaacatagttattgatcgcagataggagcacgtaacagttagccctgaaaaagctatagcaggattaccaatattttgatgagtatatatacaagctgaatagtttatattacacataaataatgctcaaattaaaaaaatacaaaaaatgaaaagtacttttaaactaataatcagaagttacattttccagctaactgcacaagtcattaagaaaaaaatcaagaaatttaataagtgtaagcctcctagtggatgatgctacaactatttttagggtggctaatgaagttagcaaaatacaatcagaacagaacacaaacataggacaaaggggtgagtggtagaacagaaggaggacttaggatgaacacaaaaaaataaaaataagaagggcgtgcaacagaacaggggcagagagagggcacagacctttcttaggacttatgtgaaaactgaaggaagtaaaggatgtgcaaacaattgacagtctgagtacatacaaaatagagaagtgggtatgccaaggctttgatggaaattgctgggattggctggaacaatgccaacaagcactggagtcttggtagtttgtgtcaaaaccagggtttttaaatagtgtgctatagcagcgtagtgatgcggagctgcccctgcctgctactggggctgccattgtgtagcagtttagtgtagtgaccatagtggtcatagcagtgctatagcaacactgtgttgattccagaaaggtccattgaacaaagaagttagggcttttttgggggatctactgctgtaatagtagtgaaaattttaaagaagacgactttgaattagaagatgacgattcctatttaggaaacttgtatttgacttttgttggtatttacttgtatgttttgtttaagatacctatgactttctattgttaattatgaatgttgatgggtcttaatgcacaaaaatagtgataaaatggatataacagtgtaatatgagtaatgaaactgcaacggtattgctgtgagatccacaattacaggaagataagagcagaaaaaaaaagaaaaataacaaactggtaatagcaaccgatccccaagcacgcagtgctcccaaatcacccagaggcgaccccaccaaatcctaactgaattccttcctgattattcccttccagcaatagctatctatagccactcatgcgttcacagccacgtcatcatctttcattccttttgtccttttcctagtataaactctccacacccttggcctaggccccacttcactaatcacatttctatcaagtcccacctccttagacaatgccttgtccttaaggcaaaattctggaaactggcaacgcaagacttcattatcctcccaagtcacatcctctaaagctttatttttccattgtatcaaggtctactgaacctcattacccccctgtattatgactcttgaacccaacaccttgtctgggtacacatcagtcttctcagtcacttccaaatctttaggtaactctccctgtacctgatagttcccaacagctcgcttaagtaatgacacatgaaaaactggatgaattatagatgctgatggaagtttcaacctgtaagctactttgccaatcttatccgccacctggaaaggtccatagaatcttgcagcgagtttctgatgaattctttttaccactgattgttgtctatgggtctaagtttcagaaagacccattctccaacttcaaaacacaagtccctcctcttcttgttagcataccttgtcatttgttcctgagctttgagcaagtggagtttgagttgattcaaagcctcatctctttcactcaactctaatgcctcagctgccaccttagtctcattagacaaaaatctcaacaatgcaggaggttgcctcccatataccacctcgaacggagtcttcccaatagacacatgaaaggtagtgttgtaccaaaactcagcccaagggacccacaatgaccaagtctttggatgatcagaagcaaagcaccgtagataactttccagacacctgttaaccacctccgtttgaccatctgtttccggatgatatgctgaactcattttcagcttagtaccctgtaacttaaacagctccatccagaaatgactcacaaataaaggatctctatcactgattatagaacttggaattccatgaagtctcaccacttctttaacaaagagctcagcaattgacttagcagtatatggatgtttgagtaaaacaaaatgactatacttagatagtctatccacaaccactaacaccgccgcataacccttagacttaggcaacccagtgataaagtctaaggacaagtcctcccacacaccattaggaataggtagaggctgtaacaaaccaccaggagtagtagcactatatttttgtctctgacaaacatcacaagatctaacataatctctttcactcctctgcatccccacccaatataaggaatctgccagtcttcggtatgttctcagaaaacctgagtgccctccagcaggagtactatgaaattcttccaatagccaaggaatagagggtgattcggggggaaatcaccatcctgccatgataaagtaaaactccatgtttctcttgaaacccaggtctaacatcatgagactcctgcacttctttcagtaacttttgaatgtacgggtcattagttatttcatccaaaagtttctgtctatcagcccacaagggaaaagaaataatagaattcatttttacctcaccatgacatctggacagagcatcagcggctctattctctaagccaggcttgtacttaacttcaaattgatagcctagcagtttggccaaccaacactgctgatctggagatgaaactctctgttgtaaaaaatgcttcaagcttttatgatctgtgtgcacaataaattctctgcccaataaataatgtctccagtgctgaatacaaagcacaagggccatcaattccttctcatagacagattttgccagattcccatcagataaagctttactgaagaaagcaataggtcgtctctgctgcattagaacagcacctatacctctgccagccgcatcacactcaacttcaaaaggtaaatcaaaatttggaagaattagcacagggggggaagtcatgatccccttcatctcctcaaaggccttgacagcctctattccccaagaaaaattgtctttcttagtcaattcggtgagaggttttgctattttaccataatcctggataaactttctataataccctgcgagactcaaaaaaccacgtacccccttcacattctttggtgtgggccatgcaagaatacacttcaccttttcagggtccactgccacaccttctccagaaatgatatggccaagataatcaatttgagcacaaccaaacctacactttgcttgatttgccacaaaacaatgctcaactaaaacaaacaaaaccatccccaaatgcatttggtgttcctcgatatctctactgtaaatcagaatatcatcaaagaataccaagacaaactttctcaaataaggccgaaaaatgtcattcatggtggcttggaaggtagctggggcattcattagtccaaaagacattactaaatattcatagtggccgttatgtgttctaaacgccattttagggatgtcatcctcatgcactctaatttgatgatatccagattttagagaacatagtagctccatataattcatctaacaactcatcaactatagggattgggtacttatctggtattgtagctttatttaaggccctgtagtctacacacattctccagctcttgtctttctttttgactaataacacaggacttgaaaatgaactcatattcggctgaatgactccagctttcaagagttctgacacttgcttttcaatttcttctttttggtgatgagggtacctctagggtctaacattaatggcaccatgatcaggataaagcttaatccaatgcacctgactcctctcaggaggtagctgaatgttgtttccaaacacttcctggaattcttctaatataggttttaagcctttgggaaccactaacttggttgcttccattgactgtagatgaacccaccagcagcccagctcagttctgctatgagtatcctcaagataggagttcaaataacattgtctgaccaccttacttccttgaccttgcaatttcaccaactcattttcataagaaaattgcatagtcatggccttccaatccataatcaccttcccaagagtgcttaaccaggcaactcctaacaccatatccattccccctagctccaacaccaaccatagttgtcaatagcggccgtagcggccgctatagcggcggggcggagcggagcggcatccatccgcgacggacacatgtgtagcggcgcggtttcaggtagcggctggagcggcctctatcacggcggggcggagcggtgcgggttgcggaacagtttttcgcgtcgctacttcgaagcactggtagttctgagtggttcggtggttctgttctgtgttgcttctgctttgttcttcctagagagagagggggaagagagagagagagagagggctgtgttgcggcgtagttttaatataccatttggggattcagcagagagagagggctgtgttgagggctgtgctgcggcgcggttttaatataccatttggggatttaacaaaaaaaaactagggttggcttttgtagaggcaaacaatattaatatataataataatgttaataattaaataatatagaaatgatattaaataaatataataatatcataattttataatattaaaaacttatatatatatatatatatatgtatatatatatatatatatatatatttgttttaaagtttaaaatatctagttaaattgtagccaaacaatattaatatataataatgatgttaataattaaataatatagaaataatattaaataaatataataatatcataattttataatattaaaaacttatgtatatatatatatatatatatttatatttttgttttcgaacatatatatacactattaattatttatatatttatatttttgttttaaagtttaacatatctagttaaatggtagccaaacaatattaatatataataataatgttaataattaaataatatagaaataatattaaataaatataataatatcataattttataatattaaaaacttatatatatatatatatttgttttcgaacatatatatatatattattaattatttatatatttatatttttgttttaaagtttaacatatctagttaaatagtagtcaaacaatattaatatataataataatgttaataattaaataataatgtttataatattaaaaacttatatatatatatatatatttatatttttgttttcaaacatatatatatatatatatatatatatatatatatatatatatattattaattatttaacatatataaaaaaaacattagaatagcggtcatcccgctatccgctatcccacttttagagtcggccgctccgctccgctatgccggtattgacaactataacaccaacgcatccacaatcacttcaatccccccatcttcatattgacccctttacacactccatttgttatcaccttatgaccatcaccaagcttgatactcttagctgctgtaggtgtgatgacaagacccaaagcaatagtcactttgggagaaatgaaattgtggctcgcaccactatcaatcaacaccaataaatccacattctgtatcgtcccttcaaccttcatggtgtgagactcgcccatgcttcccaatacccccatcagtttacattccacctccacttcttcttcactttccaccgtcacatcctccatacttacaatttccccttcctctgtcatggtttcaccttctcctaggattagaaccctaagaactcgttctggacatttatgcaacgtagggtggtattttcccccacatttgaaacaaagacccttcgctctcctctcttcgaattcatcattgtggatacttcgtatccccttccacctcttcgtcatgccggaatgcggacccccatcggttttgcgagctgaggaaaccaaagacgaagttgaatttgtgttggatccactcggacccgttttttgactcgggtttgacccacccaactgaaacgaacgagttgcatccctgggttgagacccccctttcctcattaataacccggcccaatccttctggcccacatgcttgtaccccccttttttcacctcacgacgctcaccatcgtcatcttcctccttcaattcctcttcaacatcttttgcaattctcatcatctccatcctatttcgaggatttagagtacgcaccctcctccgaatttgaggtttcaatccactcataaaatatcccaggtattgttcttcatgaagccttccaacttgtgatgacaacagctcaaaagcttcgacgaattcctccacacttcctttcaccttcttcccggcgaggcgagattcactctgtgcagagtcaccagcagaggcttcctcctcttgagtctcccttctctttccgatctgtttgcttaattctgcgagaatcaagctttgttgctgcacttggagagcgagctcttgcagcgttgttgtcacattccccatctgtgtctccaaagcgtcaactcggtcacccatcttaggcttccttgacatctacaatcttcttcgttgtgtgagattgatccggtaggtcggaccaactgatgggtcttaatgcacaaaaatagtgataaaatggatataacagtgtaatatgagtaatgaaactgcaacggtattgctgtgagatccacaattacaggaagataagagcagaaaaaaaaagaaaaataacaaactggtaatagcaaccaatccccaagcatgcagtgctcccaaatcacccagaggcgaccccaccaaatcctaactgaattccttcctgattattcccttccagcaatagctatctatagccactctcatgcgttcacagccacgtcatcatctttcattccttttgtctttttcctagtataaactctccacacccttggcctaggccccacttcactaatcacatttctatcaaatgtcattaattttgagtaatttttatcattatgtaaactatatgaaaaatttcaaaatagctcgcttctgctatcccgctgtagcatttttggttctggcttctatgcgcctctaacatttgaatcgtcaatcattaaatcgtgaaatgcgaagctattgttgtcttaagaaaaaagatgatatagtgttcaatacttcaatgtaatgattttaaactagaaatagatagagcaacttaaccataagtcagtaaaacaaaataatcagttgtgtatgagtttgtgacgcctctatctttatagaatggaaatgaagtaatgaaatagccaaatataatgcatgtattgaatgagtgagtgacatataatgtagtagagtaatcaaataagataagttctaaagcgctccttctattccttttcatttaacaatttaagctttatatatgacttttcaatttcttttatgagaattcatgcaaaaaaagtaaaaaagaaaaataacaaatcattgaatcatgtaattcttatcgaggatgaaatctcaccgattcattcttgtattgtaaaatttaaagtcatgtgtttcatcttacgatactaattgataggtagccgagtcatcgaatcttgaattgtaagattctaataactatgaattttggtacattatgataagctcgttatctgaattttgaagaccttattttttggttaatttcattgataatgtcctatcaatgttattttcatttatatggtatatgttgcttacaattacccttaaatatgattaggtattaggtattagatattaaattcaaaggacagtgctctatttttcattcttgtgctgtcatcagtatctgcgatgcccattcttgtgttgaaaaaggaaaaagaaaataatatcagttgtgcatctctgttttctactgtatcatatcacatcttgagtcttgtctgagggttccactaaacagaagcattgtgatgtgtgtaaacagatattcaaaggcaaa

SEQ ID NO: 3608 - DNA, 5396 bp, Glycine max
  Intron number 7 from transcript Glyma10g11720.2 (locus Gly ma10g11720) derived from phytozome v7.0 (chr-ID Gm10; pos 12059193 to 12064588)
ttcccttcggcaaaaataactagacttggtgactggtatttcacttctcctttatatgattgtttatttttcagtcatatttttgtgttactttttgctgcattcattgcatgacttagttgaagaattccaaacaagtgtgcagatacaaagagaatggatgggtggggggggttgcttatgtgaaattgattatagactaagtgaggacaatttcctaggcaaaatgtaaatgggtgtgacttcctaaatagtggttcctaagaaaactatatgcatttaacatttgatggatatgaatcacttaacttaccagtgttatcgatggtggaccatagcggatggtgttgtggcatatggccaaaggatggcaaacagagaaaaatattttatatatatatatacgtgtgtgcgcttgtattcttttaattatgtttttttaatcatattatatataaatatattctattatatatataagacaacataattaacaaaataaaaaatataaattaaaaaaaattgaaagaataacagaattaaaaaccataatttaaaagacaaataaaaaatagtagaattgaaagaataatagaactaaaaaagcataattaataaaataaaaaataaaaacagaattggaaaatataaataaaaagttcggaattttctataattaaaaatgtataatatgaaaatataataaaaaagaaaacaaataataaaattaaaagaataatagtctttaaaaaacaaattaaaagtaacataattaaataataaatagggttaattaagttttttggtcccttaactttctcaaattataatttttagtccctcataaatcttgacagcttttagtcctctcttaattttctgtcaacatttgtagtccctatattaaaattagtccgttaagggatgatgtggtaaatagatgttcacattaacaaaacacatgcatcacattggggcaccatgtggaactatatggaagtgccatgtggcactatatggaagtgccatgtggcacccaaagtaagtggcacaatgttttcgctgcctttttagtcctttcaaaattttgaaattcagtttagtcccaataaaaaattcaatcttaacgtttagtccctcaaaaatttgaattctagtttttagttgttaattaagttgttttcttaatttagccattttttatagcaaagtacctatcaaactcaaagacaagttttatcgtacaactatacgtccaactatactatatggtagtgaatgctgaactttaaaggggcaacatgagaaaaagtaggaataacagaaatgaaaatgttaagatggacgtttggttatagtgttatacaagaaaggatagaatacataaaggatttagagaagagagagagtacagtgatttcttattgaggaaattcaactcaactgaaaactgattacaattcagtttatatagcagttacacaactgtaactgccaactaacctgagttagttagtgacagctataacacaaatgtcctaactatcaggctaactattaactgtctaactactaactatagttagacttacagctttagttaaaaagaaaacattacaacgagtaagtgtactcctataacccccccgcaagctccagagtggttggcagaaggcttttcaaccactctgagcttggtcccgtatgtagtgaagttagaaagggtgagagcctcagtgagaatatctgctctttgatcagcagctggaacatgaacaacctgaagatgtttcccaataaccttttcacgaacaaagaacaagtcaagctctatgtgctttgtgcttgagtacaaaactggattatgagccaaggctactgtgcttaagttgtcacagaagataacaggtggagcatgagggacttttagttcagctaggagagactaaatccaagtaacttcagctgtggccaaggctagacttcgatattctgcttctgtactggatctggccaccactgtctgctttttggaccaccaggagaccaaattaggtcctagaaagatggcagcaccagaagaagatcttctgtcatccggatcagatgcccagtcagcatcacaataagcatgaacagagaaatgggaaactgagaagttaggccgaggctgcatatgcaaaccaaagtttatagtccctttgagatacctaagtatccttttaacagccatccagtgttgttcagtaggtttacccataaactggcacactttgttgactgaaaaacttatctctggcctcgtaactgtagcatattggagagcacccacaacagatctatagagagagggatctgaaaaggattcatatcctgtactagttgacttacggccaccaaccataggataagaaaatgaattggcttcatccatagtagtcttttccaataggtctctaatgtactttgattgagtaagtataagaaattcattagtttgagagctgacctcaattcccagaaatagtcaagatctcctaaatccttgagaggactcagaattgagtttatatacgagagattgatgaaagtgggattatttcctgtgacaataatgtcatccacatagaccagcatgtagaccacagtagtagagcctgaatacacaaatggagggatcacacttactggatttaaaattgaaggtaagaagagtagttctaagtttgtcaaaccaagctcttggggcttgcttaagtccatagattactttgttgagcttgcaaacaagctgtttgttggagtcctcaaagctaggggttgagtcttgtagacttcctcctgaacaatgccattgagaaaggcatcactgacatctagcgactgaagtttccatttgtgagtgatagcaagtgtcagaaagatttttacagtgactggtttgattacaggtgaaaaggtctcattgtaatcataaccaagcctttgtcaacaagcctggctttatacttgctgactgtcccatcagggttctttttgaccctaaacacccattttcaaccaatgggagaccttgaggaaggtatgtctacaagtgtccaagtgccattgtgaataagagcatcatattctgccttcatagctgcatgtcaagtaggattgtaaagagggatgacttagttgacttgggttcagcatgagtgagaagcaaagttggttggatcctaggttttacaatgccagcttttgcccttgtacacatggagtgagtattgtcaggtctggccagcaagggaagtgattctgcagtgggtgctgaagcagatatcacaggggaggatgagggagctggtgctgcagtggaagagacctctggttgagaagatggtaaaggaccagcagctgctggtatagggatttgttcattattacttagattagattgatgtttccacgttccagtgctccggggacccttctctccttctttgaagatctgtttttgaattttcggaagctttttcagtgaccttgccgaagaacaccatgccgtccacgtgcacagcaaactcaaaacaccactgcacggggccccacgcagggccctatcgcgtgaagttcaggaaattgacgcgtgacacatctctggcgagcgtcatactggtctccatcatcactgcaggccttcattggctgccgtggaaccatgtttatccggcacaaccacatgactcgaaccacctttagtttctatttggttgaccatatttgtaacaagctcgatttgtgacattcatgcttgagcttgagggggagtgttagaattatatatgtagatgattgtggaaattagacagaatcatacgattctgattgtacagctataattaggatttgctattatttatttcctttcttagttgcaacaatcatagggattttggttcctgatttttatggaagcaattaatgatatacaaattcagcctcatatgcaggatattagggtctggaaagctgatcctagtggtatatattctactaagtcagcctacagattattgatgaccagcaatcaaattccagaggctaacatcttaaagactatttggaagctgaatatacccccaagggctgcgattttctcttggagacttattttaaatagattacccactagaggaaatctccttagaagaaatgtgctgattcaggataattcattccctctatgtgggaatgctcaagaggaggtggatcacttgttcttcaattgtaaattgaccacagggctttggtgggaatccatgagatggaaccagatgtttggccccattacaccttctccagcatctcattttgctcaattttgtgagggcttttttgcagggcaaaaccaatctcatcgatatggatggtgggtagcattgactagctctatatggcagcatagaaaccaattggtattcgagggcaatcactttcaaccttctaaagtgatggatgatgccttattcctcatatggtcttggttacagaccagagagaaaaactttagtatttctttcaatcaatggtcttctaacctggtggaatattttagttaatatgggctgcgtatatttatcctatgtagtgggctggatatatttatcctatgtagtgagattactgttgggtagttatttatgttggaaggcgacacactaagtgtcttgtatccatgtacttcaacagtacctctggtactgctatgattcatatcaataatatatatttttgccttccaaaaaaaaaaagtcttgtaaccctatttatacacaccatagtaccttttttcaaatatagaaaaatacagttcatttttctataatatattattctcttaattatcattagagaacaattagggatttgttcattattacttagattagattgagtctatgtaattaatgtagatcctatttgctcattataaataaaggattagtgggtcatccaagacacacaacattacacaataagcagaataaaggagaatgaaataaaaccagatttgaaaagggagaataaaataaaaccagatttgaataatctgatctcaatcttaactacttaaatcttctagaataaaggagaataaaataaaaccagatttgaataatctgatctcaatcttaactacttaaatcttctgtaatcgttattttaggataaaagcacatactatcaacaatacgataatgaactgcacactggcttgttttggattgttgctgataagacctttttaagttttaaagcttcatctctaccatgtatttaccatctgaggtatttcattattcttgcttctaggaacactgttgacggtgatcctcgttggtgctgta

SEQ ID NO: 3609 - DNA, 1188 bp, Glycine max
  Intron number 7 from transcript Glyma14g08500.2 (locus Gly ma14g08500) derived from phytozome v7.0 (chr-ID Gm14; pos 6521693 to 6522880)
atttaggtgactacctgcagttagaattcttggttttatcttttcatttttagactcctttatgatgacaattttaagtcaacatttgacaatttaactttacagattaatcgatgaaatatgtcctggatttgatatcactaccatttccgaacttcctatatggattagattttttcatcatagggaattgttgaatttcctttcttttatctgtatcagggctaaaattaccaaagttttgagaccccaaaagtgttcccttggaccagaatattttccttactttctttgtactgattatttccttcttcatgtggatctcttatattcttgttaattgaacattttttgtgaatcccagttcaagtgcttttatgatttacgataaaaaaatcttttttactgctgaagaccttcctttttggaaatggagtaaaaacatctcttgtcctgttttctgtattttgtatcaaaatacaaatgcatgtacaaggttgaatcaaacctaaataagcttctcttgcaggacttgccatgtaatttctaagagtagtttgtgtgtgttgtgtttacatacctatgcatatattatttatttcttgttcgtagaattattgcttttttgaaatttgattctatcctggaaaaattgcttcatatcttgccttgaaaatgttttcccacaaagccttcttcaatttctttttttaggaggtttattaatccttaaaaaattttggtgttcaactttcacatgaaaataattttttctgtattatttaatttaacttatctttgaatacaataatttccttgtatttaattttctagattgctcaaccatcccattattaggtaaaattaagttttcttttcgaataatgatccgaagaaaccggtattcatgtgtctctccaatcatattaatattattctgcactttatcatggagattttttaccttgaaatggtgatgttcatattgcagtgtgctggagtatcaactttgcattcattcttgatagagaagattagaacggctaacaagtgtagataaatttaagttttctttgatggggatcctttggttgctaggttctgaatttgattatgggggcatatggattgagttcttaacctcttttcttgtggtgtagtgttttgagtaggtttgggttaagcctc

SEQ ID NO: 3610 - DNA, 2472 bp, Glycine max
  Intron number 6 from transcript Glyma01g06290.2 (locus Gly ma01g06290) derived from phytozome v7.0 (chr-ID Gm01; pos 6418027 to 6420498 reverse strand)
tcaacagccatcaattttggcttggatattgctaggtatggtgtgtcataccttaagtttcctttatttttctttttaaattttttataaagagaacaaacagaaaaccacaaaacaagagaatcattaacccatagatctcttcaacctctccataaatctgttatataattataaaccactcctaaataattctcacacgtcagttactgagaatctgaaaaaactattaaatatgaccccacaaaagatctgagattacaaggagagcagtcttgaagaggaccttacacttttgccttgttgaatgcttctgaaatggatggatggaagatgttccaatttcagaagaggctggccattctacttctaaaaaaattccaaaagtcatttccaaagctgccaagcaaccttaaaatcaagaaaagatgattgtttgtatctgaacactcaaagcacataactaaagcattgggatagaaaatagtgttttagtttcttgctttacaacctaattgctgtagaatactctgaacgattgatgtccttgaccttgtaaaagccttatatgtttatgggtgcctctctacccctcaactcactttgcaactgtatttgattgtgcttatggctttctttggtgttctgatgcttcaaggtattggattgggctgttctgctgcatttttctacgttctattctatggtattcaaccccccctgttttagacaatatattgtaccctcccatagatgtacttgcgttggtcttctataaaaataaaaataaaaatcaaagaatgtcactgttaatggatgcaaagttgctattcaactcaaaaatatcactatatcgtcttgctgaaatctaaattccttagttgcttgatcagtcaactgcaagttttgatgaaattgattaaaacttaaaagtataggctgtcaggcttttcttaaaattatgtatttcaatagctaaaacttggttggagataaggttgcaaagatttggaaccacacaaaaatagattttctcctacctagtcatagtgctttttgctgcttactcttcagttttcactaggggtgggtatacaaactcagatccatagaccgggccgttaagcccgtaaacctagtggtctttatccgtggactcgcagactacccatttaattcgcctaaatccaatgtgcaagtattattaatttgttatgttaagattttgatatttaatttatgttttattattaatttgttatgtttaaaatgttggtatattttagggtgatagattttagcttaaaaaatgaagtcaacttttttcttcttctaattttatacatttttcactttttaaaaaaatattattttataaaaaatacttttttaattactattttaacctgtggaccggtccatatacttacccttagttttcactaacccattggttcaatctgaagttgttaagagtccaacccaaaagactagtgcattaggtgggagaaccttaatgcttaattatcacatcaagtaggttattctactcaatgtgggactcctaacattattgttaggatatagggagaagtgagagttaattaagatagttagactgttaatgagttagttagttagttagttaaaggggtttattggatataaataggaaaagaaggatacaagagagggagatttgttgtcattgtaaattgagcattaactttttgtaaaaggagaagtcctttgcgaaagggaaatccttagaggagagttttctctcctattttctgttcttttcttactataaagtaaaattctttcttttcttcatcatttcaattcctagttcttaacaaaagtttaccttgagtttgactatgaaccctagtttcctcttaaggaatatgaatatgcaatgaagcaaacaataaaatattggtttttaccttatctttggtagagaggaaagaaaacgagggaggaaagaaagttttgaaatttaaattggagggaaagtggaaggaaaagaattaaattttagtttcttgaagttaattttctttaaattttccttctattttctcttcaaccaatcaaaggaaaagacattgttatgtgtgttttctttcctttcactttcactccttccaaacggacccttggtctgtattgaagaaatttcatggagtaaccctgttgagacatatatatacccttgatatgattttctacaaaaaacaattgtcatagccagttaagtttttctgtgtatatcagggaacaaatggtatcataacttacaattttctttaaaaagaagaactggaccaagaaataatggctataaactgtattacaagctcacgtaaaaatataagtgaagtttttgttattcctcagttaaagaaactgaatagttcattgaatctaactattatgtattgtgtgaatattgtttgtagaggg

SEQ ID NO: 3611 - DNA, 1351 bp, Glycine max
  Intron number 11 from transcript Glyma18g16990.1 (locus Gl yma18g16990) derived from phytozome v7.0 (chr-ID Gm18; pos 17711179 to 17712529)
aggttaagtttatcctacttgcacagaagcttctatatgcatatttagcatcaaacaatttatattttttgaatggattacctcaataagtagttaaatttcactaaaatattgttttgatgatttctctgtaaaattttgtcaagttaggtagcttgtttgcttttcattgcatcagtccaacatcattggattctaaagagttaagattaaaaagaaactgatgcactgtcttattaatttaaacccttaaccctaaaccaaacctcactagccacagaacaaaagaaaggaacaactatgctattcagcagattcttaaattctgtagcattactctcaaacttggacagaatgcatacattagacatttgccaccagttacctgagctaattttggttctgataaagtgaaaatggccctgtgcccacaaggcacttacttattgagctagttttaacaatcaataaactttgcactttccacttggaccctattaaaaaactacaaaacattaaaccatgacagtatgaaaatttaagaatacatcaccaaaacatagaaactaaaaattccatcttaccttctcttaaatttctctaatttcttgaagtaataattgataatagtttgcttcatttcattgtttcttaaattaaatgctgcaaccagagagtgaaatcctaatatgatgattagaaaaaaaaaaaattatgctattcttaatattcttagctacacagtttgcaaccatattttttatggtaatgatttcctttttgaaactgcttgcatgtttggatgtgttttgttttcaagattataatctgattgatagaaaataactgtcagtgttactattcaaagtttttgataatttaaattggaatccgagattataatcttaacaaagaaaaagggtctaacaaagaaaaagggtcttttatgacaaacaaaatttttggaaattatgattattaaagctaacagattatttttgagttaacttttgtttttccatttgattcccaacagttaattagtttaaatacaaaatcaactacgacaaataacttcacactctcttttgtatttttgcttttactaaaaacatttttttttagacaattcaaatgaaatagattatcttaaaaccatttttttacaaacctccaaagaataagacttatgtcacaatcaattataacaataatcaatttactaaatccctagttgtaaaagattaacttgagtgcagaatgcttggatttcattgtgttaagttactaatgtgaattattctcttactgacgtgtctagaaatgatacaggtggcagaacttattgaaa

SEQ ID NO: 3612 - DNA, 4396 bp, Glycine max
  Intron number 3 from transcript Glyma09g01000.1 (locus Gly ma09g01000) derived from phytozome v7.0 (chr-ID Gm09; pos 540780 to 545175 reverse strand)
gttcaaaaatcttacaatttcttcctccgactttggtgatgaccctctccctctctctatattctatcttctcaaatattctgcatatctaaaaagtatacaggaaaaagcaataattttttgggtgtattggttttgttctcgtatcagaatttgaagtttcattaaaggattatgccgtgatcaaacttccaattctaattggaaaataataaccacgaccaagaaactgtgtctaagcttttttactaacgttaatttggtatttgatgtttgactaattgactagccatgcataccgatgtttcaaggaagtgtggttttgttagaattgaaaggtgcttaaagttgatgaagcagcactttttctttttaactttaaaaatctttatctatcattgggctgtacgctctctatcgaacgatatattttattctggtagatactagtcgttgtatgtgagggtttcaaataccagcaatgggtgaccttgttcaaagcgtggctttgtccgtcaaagtgtagatggtggtatggtacatacctgcatcctcttctcggtgttagtgcgttgaatgaactgttttggtatcttgctaattcgtcattttgcgtgtgcatgatattgacatatatccagctgttttttttttgggaaatataagactttagtcacattcttgtctatctaattttgccaatgtttgaattttaccgggattctcaggtttggctggttttgcttcctttatattgttaaaggttctccttgaaatgaatacagagatggatgaatgtgccgaatgcagcttgctggtgaatttaggtctggtaaataacctaggaattagggtttcttctgcagtggttgttcccaggagtggtaaggctagatactctcattggaaatgtaatatgcagacgaaaaagtggcagaaaagagttgaagttctttggggataagtggtgaatttttaaattttccagagtgaatttttaagaactaaaaaacatactaccatagttcttgcaattttatatattactagcggaagccttttattcatatttatctatcactttagaaatccagtatttttacttatacccttgtctctacctaagttttaaatactatcatatatacatcttaacagtggaagaggttgaaaaaattaatatcaagtttgtattcgtagggcaatggttaatgaatattaggcttttagtgaaaattgttcgaaaatatatttgtattttttggtacagaaggggagacgtatcattaatattaaaattttattttctaacaatttttatttttaagttcgatcttaaaccataatggttggcaaaacagttttaatataaatggttaataattttattttttaatttgtattttatattggataaaaagaaaatgaagggtattaagtttgatatgtatttttctcgtcgttgtcattttgatgtatggatcaataaatgaatttgctaaatcatttattcactcaattcaacttagtatcatttggaaaaggaaaagataactacaaaaacctcttttggcgagatgcatgcttttcattgttgggaatggtgagaaaacatatgggataaaaacgattgagagtagaactcgtggaaaagattttctactctgatcaggagagaaaattaatcaaatgacaaatacccttattataattaagttttgggaaagcatccattttagtcctataactttcggttaacttcaaattagtccttttatgtagaaactcatttttttagtcctaaaactataagagactagctgaatgactttttgatagtttatggacttgagagggttatttactctatttacttttttgtataagaaataatctaaagttgatgggaagttaaaggattaaaggggctatttactttatattttgttaaattggtaatagggtttaaatgttatttaacatgattagattttcttacttttgtctcctttatttttcccccattcaaacaatagaagaaaaaaatattttttctcttttttttttttcttgtcttttacatttgtgttttctctcattatcccaattccaaatgatgctgttatctaaatgatgcggttatagttgtttatgatatgatattttttgttgtaaaaaaaaacagttttctttttatcatttgttaaagatatgatatggtaatcaatatctagatttcactttgcacaaattacttagcacaaatggccgggcttttgcgagagggaattaacatgattcatgagttaccacttactaacttaaattattatttattatgataataggtctttgtgttacaagaaccttttacgattgattggtggtaagcggaattttgatcctccctgtccccagttctttaaaagtagaaattgaacaccccaaggagtgtgtatatgcatcgtttcgttttttttatttttttatcagcaagtatatgcatcgtttcgtatcaagcctttgtgctttttcttaaagtgtttagttagttttaaagagtttaagctggtaggatagttggtcctcaacagcaatgataaattcaattcagtcgtgtcgccctatttgttttctgtaacttttgtgttcatcattctctgtaattggactactaatagaatatttgtgtaatttcaaaagtgtgactatgcgtattgattgtcttttttcagaaagcgcttgtctctgtaactataagtgcggatgcatttgtcatacttgttattagaattatgaccatagtgtgctactgatttaatttctttgcatgtattaaactggaaatggatacacacactgttttatcaacacaatactgattgttccatgaaatctacaattgaatgacaatcatcaatgtcagtcaaactttactgctgttatgctaataattataaatgaaaatgagtaaaagcttatttcatgttgctctggatatgagtagtatataatcatgacccagttttagtgaatcactgttttctagcttccaactatgtatatgtatgggccaaatgatgtgactttccttccacttattgatttaaagattacaagatttaattcttgttccccttaatgtgttggtttttcaattttggaagtctcctttgtatctattgtgtaatgtgtcgttttgcccaaaaagactgttcagggtggtgtatatctcccttggtatattatacccaaaaaaaatctcccttagtatttctttttcctctgtgcatatgtttttaatggaaatcaatcactctattgatgttaattgtagtctaaatttttctaccacatattgacaatacattatctattaaataaataacgatcatgagagttttggaagcctttgattatgtgtgaggtataagctattcttattatttttttaaagttaggtataagctattcttaggtctcttttcttcgttacaatttttggcttcccttggttttaatttctgcataggaataaggttctatatggctttactagctagggtctatccgtccatgtatgcatgtcgataaagtagcacttcataatttatttatttatgatggtaaaaggcacttcataagttacatattggagaagtatacattcacgaggagtatactttttcgtccctaactttgtcgggactgaagaaaaagggagcgtccattatctgagttttgatccatggaatggaataatgcttcacattggcgcccggctctttatcctatgcaccaattcaagtgcaaactttcatggggtgaaatcaattattttctaatgattgcaagttgtacttgcagttattcttttctcagatcattttaaatcctcctacaatgttctcttggtaggttttctttactatatattcagtgaaaaaagcaactcatttatctctattttatattttttttgctaaatattaagattatattgatttataatatataatattaaattaatcattcatcgtggtgtgctaccaagatttctctttaacaatatagtgacccggattttaaattgatttaagagttcactgaattgttatttactgctcgcaattgtttaatttgatctattttggttgaacttgagtatctccagccaaatgctgaccttattcaaatccctttaaggttttaatagatgttattttatatccatggatatgaagattaaaactagtatttgattacatgtttaagtagaataattatttgtcaatcatatcacaacatgtttatccttttacttactatataatccttttagtatccaattaatgttatcataaattgaatcgattcatatgatgatcagctagca

SEQ ID NO: 3613 - DNA, 583 bp, Glycine max
  Intron number 2 from transcript Glyma13g24630.1 (locus Gly ma13g24630) derived from phytozome v7.0 (chr-ID Gm13; pos 27980833 to 27981415 reverse strand)
acgacctgaagctgtaatcatttcactttctctgcaattttcatttgtattactcttctgattgtgtgtcgtgtgttgtgcttagaggaaaaaccgttgctttttaagtggggatgctcagaaacgaagctttacttcagtgttgctttgtgctctgtgtttgggactccttattgattacgatttcgaatttgccaaagggattttgagtttaatcgttgctatcttagggttgccttttttttctattaaaatttgttagctttatgattaacctgacacataaagctgtagtacaatcatgttagttgcttcttcatagatttgctgatatgcgtgcataatgaacattatgtcttagttgacttgatattcttgggaatttgaattttactattactctgtgtagttactatggggagttagtttcttttggtggaattttatgtgacatgttattcttttttttttattaattggaaaattttagttgttagtattgttagtttgttaatctgttattgtattctattgttctatatttgcagtcgggcattttgggacaagaggatctcccaggagg

SEQ ID NO: 3614 - DNA, 1544 bp, Glycine max
  Intron number 1 from transcript Glyma07g16730.1 (locus Gly ma07g16730) derived from phytozome v7.0 (chr-ID Gm07; pos 16412776 to 16414319 reverse strand)
ctgctccacttgcacgcctcaccatcctttttcaggtttctttttgatttatttagaaaaagtatttgttatgaatgtgttagagatttagagattccacatcgactatggaatggccaaatcatggttttaaatagcgttccgcaaccgcaattgtggccgcaatgtcaaggtattttgattcaccgtcaccgcaatggctgcatcagccgcattttcttgcaatataaaggttttctgacttatcgcaacgcgaccacgactgcaatttaaaaccatgggccaaattaaagtatataagtggtgcaaccctcatcatacaagctggttttgtaaggtaaagttagacccatgacacacattctaagattttgaattttgggttgcctagcatgtcatggatgtggattttgaggttttggcttctggtttagttagttggttggttggtttcagtggtagattcaattcgaatctcatttgtcaactaattgaaatgaaattcatagtacataaggttttctagtatgtgtgccacagaaagaaatatcatggaatattttgagtttaatttttatacaatgtaaggcaatttttatattcttgtcttgtttacttagggaatgtattggattaagattttaaaatactattttaaaaaactttgtaaggatggaataatgacttttaagattttttaaaaagatttttacaattagaattttgtaattcgaattttaatggatttataaaatatgaaatcataagatttaaaatgactccatgaattttttaaaaacattcaaaattattgataaagatccatgaatttttctcacctaacactttatcgctttcaacaaaaagacaagggattataaacgatggggaagaaatacatgtcaattggtaaaaaagaaagaaagcaagaaagtcttatgaaatcttaagggtttgggtgagattgtttgatgtgtattttctactaaattttttttattaaatctattaaaattcatcctgaaaaaaaattcatcaaattttgtatacttttgaatgacaaaagactttttttaagttataagcaatattaattgaatatcaacggagtttatagaattccttaaaaaatcctagtcttgatggaatattacattacttatttctattatttaaaaatcttgattgaatacctcaagacttttttactaaaagaaaatcatttaaaattctttgaaatcctaattgaatacacccccttagtttcatttgttgtctccatttcaactttaaattttcaagcttcaaagtcaaattgtgataattgtttgatgaatcattcttctgctggtaatcattattgcatggttgtaactatttgtttttttaccttcaatgacatttaataatctcagaacgtaagttaattgatttcattgaaaaggatagagtgtatatccatcattctcctcgttaaattcaaattcagtcctttcaagtaatgtttttctgactattttacatgcgttggctttatcaggtgc

SEQ ID NO: 3615 - DNA, 1022 bp, Glycine max
  Intron number 1 from transcript Glyma13g27390.1 (locus Gly ma13g27390) derived from phytozome v7.0 (chr-ID Gm13; pos 30583089 to 30584110 reverse strand)
ttactctgttaacaccactgtgagacccgatccaggtaatagaagcagccccatctgttatctgttataaaaacattttgagcattgttattatttccctgaaaaacctttaggtgtagggtatctgtactatattatttcctgtgtgttatctgatttaaaaacatttaaatgatccttacatgttttcaacatgttccatttggtagaatagaaaagatttagagatgtaaatgagtcaagttatgtaaatgaacaaaattatttgttaattaccttaggtcggcacaatattcagtcaaatttgtttgttaacttaaacttattattgaactcaattacttaaatgagttaaattcaaattttacaaatttgatactaatagcttgtgaatagttcgtttatgcataaatcatacaaaattaatattacataaattctacaatattatatcatatgtttaacacttatttatatttttaaattattatctactattaaaatattttaaattaataaagttgaaagatattttaataaaaaaaatttcaaattaaaaaattgagttataaatgaattaaacaagtaaaactgaaactttagttatttcaaataaaaaattcaagcttttaatctaactcatttaaataaatgaattaagagtcatcaatttttttcaccctgaaaaggataacactctctttataagtgttgcaaaaaaatttatacaaagaaaaaaagttaataaataaataaaagaatataataattaattttataaaattaattttactttattattcttttctttacttgaaacgatgcagcacaacaacattctaaaaaaatatttataggaatataaatagaaaaaaatagttagtattacatttaaaagatagaatgaaaatcttttttctttctaacacttgttataagatgaagagaattctattgatataatattcacaaaaccaagataatataattcttatttttgagaaaaaaagaacacaggaaag

SEQ ID NO: 3616 - DNA, 3567 bp, Glycine max
  Intron number 1 from transcript Glyma16g04430.1 (locus Gly ma16g04430) derived from phytozome v7.0 (chr-ID Gm16; pos 3744697 to 3748263)
gctcccttgccacctcccctgaccctcctcttcaggtgcctttctctatcactgtcccttcaaaaattatcttttttaaagtgttcttctgttcttttatgtgattttgattgtggggttttgtttttattccttgatatgattgatgtctgtgattttatcatggcttcttgctttatgccaatgcttcttcacttgtgattgatgttgtttcgattcatgagtgtcctcgtttgaagaataaggctctggtatggtaatttgaaaatggggaatcggaacattaggtgttgtgtttggctaccatctaatgccaaactatgtgggaatcattttgggaaatttgtgattatgaaggaaattttgagggtatagttttgaaggatagtgtgttgggataattttcttttctattttgttgatatatgtttgttagaactgctttttccaattcaaatcaactgaaggaattcattgtgatgtcatggtcccagaaaatttccattagcattgtacagaagggaaaatatcaatatgtttggactacattaaatcttgtctatttttgcttttggctatattgatataatacgtatcagggctagttagaaaagtagttgttgtgagtttaggattggggatctaattgagtccttcctaggaattgttctgtggtccaatcctaggcatctagataagcaaaaaagaaattatattgtttttagcagactgaaaactgaggtctaattgattgattttacttgtactaaaatgcatccatgtgattccctccgcaacaatctacaagggagtgatcctttcagtctatcaatagagtttacttgttttaaatgttttgatcgataaagttctccataagtgtttacaggagaaagaaaataggtaaaatgaattaagtttcttgaataagttaaaatcaacttatgtattaaactttcatagaagttgttttcattaaacttcactaaaaaccaaggtgtataagatgattttagcttatggaggagctcaatgcattttatcttcttatttttcttctcctattagtatgaagtttatccaaacagggcgaaattatagtgttgatgagagattgcattaaatgctcagttttaacattgcagtgttttacagatgatatgtcatgtaaatgtaatgtgttatttaactccgcaaatactattatattatctccttgaggatcttctgaatgcaagatgagacacttatcatcaaaatctcttgtaggaaataatccctgtgaaatcttttgaatgacaataattacttacctaatggaaagagatgacattcttatgatttcaaacaagtcatttgcactgcaactgcagacacgcccaaataatgtctccaatttagtttctcctgttgtttcataatttatcagcaaaaacaaaaacagtatgccgtttacagttaagaaaatatcaaaatagatgatattttaatattttttcctgattctaatttttgagggtgtaaaaagaaactaacattgtcgataaagtcaatgtctcttaacttagttttcatttccttaggttatatgtttggaaatgtgataagtgataacttctaagcttgtagttagactgggatgtaatgcaaagtccatttatatatataacctatagtttgttccttgctcattatttgttaagtttacctggtgaagctcaggttaccaaactgagtgttagaagtcttcatatttgtcataagtgattctgtttgttcttatgaataaatgcttctgctaaaaaccttaatcactgtgtactttgaattttcacttttatttcccctttaagttttaatggcttatagctcatttaatggttatcaatttcattcagtctttccccttggtgtgagatttccattgtgtgaaaccagatatgttacttttattgcctgctctgctgatatttttgctggtcttgaaaactaaaatattgagaataaggagaagaccttataacctcatatttgtaaagaaaaatgcatctttgcaactggttaaaaagaataagaaaattttaattttaaaataagggtgaaaaatttatggatgaaatatatacgaaacattgtatgaaaaactcatccctaatccccaatgttaaggtgataccaagcaaactctaaattttacatgggtggctgagatttaactgtgtgattgggctatatcctactgataagaatttagactatggtaatcactttccaattttaattttaaaagcaaaacgattttaaatggatgggctcttttcatagactgaagtcaacttaagacttatattattaatttgattttatgcatctaacaatcacaagtaacagtttgcatgtagtgcgaatattgattttactttaatttgttaaattttaatctcattctaactttcatccgtttagaatcttgcactgtctcatacccccttccccccaaataaagaaaaaaaaaatgttgatctaggtaggccaaatcatgaaccacgatcttatgaatcacatgaactttatgatcacgaacctcaaccagttctccgactcatagagcttaatcacctaccctgaaaatatagtcacacacaaggacttctgcgcatgatgcgcaagtcccctaagatttaataggctcatcatgaattaattttggtatcaaaactagcaagtggaaatgtataaagaaagtagagaaatccaggaagagagaggagaagatattttttggagtattaaaacagtagtgagagcatcccttttataggcaaaaactggtcagaaaacagtacgagacatgatatctctcttatcataaagaacaaaataatgtagagggaatgcttattgttagaaaatttcctctttgattgatagttatcaacttttgacagaatcctctctcaacttgtattctctaaataatgtacctatgtgtctgattaaaggaatttagaacagctttgtcctgctactgtacctcaatgccaacttcaaatgtgtctttctttattattatgtttgtgttttctttcagcagcttgcctttctgctaagatttttcttttgtctgtctgtttgtgtgcaagtagaactgtctacaaaaccagtttaaatggcccgtgtagcattacttgatgtgtgccaattctgaaaatattgcagtttattttattggtagttaagttgatgcaaaatagtaagaagaatcacatgacttaacagcctccttttgaagggatgttgaaactcaatttaccccattaatgcaagataatgcacagattgtgtctgggtcagtaatggtttttggctttgattccaatgtgtcgttgtgttttagagtttcctgaaaatgcttatttttctttgaaccttataatcgaagctgatagttcattaatttgaaaattgatttgttttgcagatttggttattcatttagttaatttgtatcattatgcatattctggagtcttgtattttatatattgttttgatttgttcaggtgg

SEQ ID NO: 3617 - DNA, 571 bp, Glycine max
  Intron number 6 from transcript Glyma12g01040.1 (locus Gly ma12g01040) derived from phytozome v7.0 (chr-ID Gm12; pos 583494 to 584064)
gactaagtgtgaggtatgaattctgaataatttagcttttgctttgatgtctggtgttggtattcttaacattgtttccatgatttattatggtatagcccatctattatgactgtgtcgatgcccataggaatgttgcaagaggaaagctaagttagttttatggtcaaacccatcttcctggtagaaacaaaggaaaaatcttttgttgaatttttttaattacctttattttatctgttagctgtatatcatcaacaattgctagttgctcaatgagttttggaaatgataattagtgctttgtttttatttttaattcataacttttaaatactttatcttctccatgtttgtagtacgtgactggattttcttttttaaatgtttgacatgtgtaagtctaataggctactagctacttaaagtagtttaaagcttttgttgtttctattttttacatggcactgtggcagttaattcctcccttaccttgcagatgcagcatattttaattgagggatgtacttacttttccatttttttcccccttaaaaattgtaggtggttt

SEQ ID NO: 3618 - DNA, 1431 bp, Glycine max
  Intron number 6 from transcript Glyma01g25940.1 (locus Gly ma01g25940) derived from phytozome v7.0 (chr-ID Gm01; pos 34290288 to 34291718)
ggaaacaagctgagcagtatcatcggttatataaagtatggtataccaaattctatccaacacatttttttttcttactactgagttcttgttatgcttagatttagttgagatgattcatctaataatgtcagcttctctttggatcttggtattgtaatggatctcaatgattgttactttgttagacatctgtatgtagttttcattatttttcatgcaatgcatgttttttttttactgaaagagtcattctagagtgtttattttttgtacaactctctctgtgtttgtaacacttgaacagattgatgggcttaatttatattatggtccttcttgtattgagcatcttcattctttgttataataaaaggatattttttgaggaaaaataaagtataaaattctatatatgattaagatggacaaactactaaagtcaatggtttgtccaagctagatgtgatgaaaggatgtctaggatgagaacgggtttaaaattctataattgtactgattgtttgtattcatctattcatctattataataggattcatcaaaagtagtcactaaaacataactaagataggcaaactactacagtcagtgttacattcaatctctattgagcacaaattttgtacttaatttttttaattacccattcttagattttatgtagactagcaaaggaatcagtgcctatagtaactccttttgcctaatagttaattattgaggacttggatgggcactagagaatcacttcagttttttttttttttttaaattagtttatttatttatgctcaagtctattatattcttccagaaagtcaggttttgttgcttatttgaagggataaatgaaatactttgaaagttacaaatagttgcagatttaatatctttgattaagtactggctgttaaagtgctatttatgctgtcaaatagaagaatctcattatttctttcttaaattgagtcttatactcatgcagtatacaattgtttttatgagagaatagttacaattatgtatcatatattttctattgccaagaattattaatgtcaccttactttttccaccagtgaattttgtaattcttgtttgtaggatgtactgcctgttaatgttgattgtcatatattgattagattttccctagaacatttgtttttctttttctcaagagttttgagtacttagtcattaatgaagtttgttgtaactaaaagtataagaattatgcactacctataatcttttatgaatttacacatgctcttctttttcttgttctttctgtttgcttttggtattctatgttggatcatttgtgaagtggctatatctgataagtgataatataattgaaatttacaggaacccattcctgtcactcaacttgttagggaagt

SEQ ID NO: 3619 - DNA, 6584 bp, Glycine max
  Intron number 3 from transcript Glyma04g35850.1 (locus Gly ma04g35850) derived from phytozome v7.0 (chr-ID Gm04; pos 42334810 to 42341393)
gaaactcagcttcactccatctgtaacaacactcctcctcaacctggtctctctctttctctctttcagatctctctcgacacttgttggctaatatgattatctgttcctatttttattttttatgtcgataaatattaattgttaatatttttagttttttattttcatgtattctctaatttttgaaattaatccatacatgtgttatggtcacaagctatttgcaccaaattaataaaataatatgggaaacaaatcaacattcataaaaataataataatgagattaaggttagcaggttagacaaaaggtcctaaagcacgtttgaggaacttgctggcacacatggatgcactgtagtgagtcacgtggtttgtgtttgctttggtagccatgttatgttatacgtactcctcttgcttccttcatgataagattcatttaattaccctctctagctaaggacattttatatgtgtatactactctctgctgagcaaagagtatatatatatatatatgccgagggctgcttgactgagaaagttgtttcagctatgtgagtcctgatttatggacatccaaaaaatacaaacaccttacatcaaaatatcaattatatcaatcatttatctctcccctctaccttcttatttctctctagatgtagatatccttgagtttccaaatatatttctttttcctttagcggattagttatacctatattaataattttcgttagaattaaacagggtatatatatagtttaaaacaaccaataatgatatatgttacggggtctagtagcaacaatcataaattaactacaaataggtgaagtcctagctttattcattccttcattcaaccaagggatatgtccatcaactagagtgaaggaggtatgcttcatatcttaacattaaaaggctccaatcgtcagctatcatttgcaggaattaatttctttaaatgcatagaacacgaaaccaatgtgttatgatacacttttaaaagagtgatgttctttgtacaagagaaaattttataaaaatttctttacactcatttattttattataatatatatatatatatatatattaattacctattttattccctatttctttctcttttttctatctctgactctttgtataaattgttttaagattcagtacttcttttaaaatttcgatttacatttttttatgcagaagttaatacaaagagggaagagaaaacgttatatatgttcatgttttttttgttacatactttcactgaaactttaattgttggttttatggttgcatttcttaataattattttctactggtatacttttttcatatatattcgttgactttaatttgtttctgttgctgttcggtaggttgaagattttcatgtcagtctgtttggtcaagaaattcttgttacatgatgtttagttcatctctcttcattgatgataaatatttcaattgttaaaattttgcacacttttctgttgcatgcatgaacttatatgatgacactctatgcgtttaaattttgaaaatgctatatagccagaaaaaaattgactggttttatttttgaatttactgagatttgaggcaatgggtcaaactattcaaaatgacaaaccattcatctattcaagagtcaacagtaatttcaactcatttgacaaaaaaaaaatacactgcaaaatatcagtaaattagttactaatgtaacttgctttttttctaagtaattctgaggtcacaaaaattttagtaacaattttttaaaaaaaattacttataaataatttcgttaccaattttaatttttcttttatttatatgttatctaatgtgttacatagaatttcataatagagcttttatgtcttaagcatggtgcttgtttattttcttttatgaattactctttctcatattatatatcacactttttaaacttatttatcctatattgttttatattatcgcaagggattttagtaatgaaaaagaaaaacagaaaattttcattgttggaaaatggagcaattatgttggtgaagtttgcagttaaatttgattcatctactttattacaatttggtagtatttttcctatgcatttcttgcatttaatagtttatactagtttggaagagttacatttttttataagcataagtggatatcattgaaatattgtaaccaaagtcaacacaagtcaagaaatccaaaatcaagtgaatttcttagattgtttaagctggtgttctccctcctctttctatcttcattttttttttccttcattcattatacaagaaaaagtacagggaaattgagaaagtgtataataaaagggtaaaatgtaatttatccaattccaatcattcaacgatcaatattaaacaatacttttttattaacctaaataagtattaaaaaaaggataaagggtgaataaaataaatgtataattcaaaatcaacatgatgttatatgaacgattttttataagaaagaagcttgcactattaactttatagcgtaattaactttgatttgttggaaagaaaattgcaaattttctctcttttaactcctttacatattttatatatgctagtatactagtttatcaattaatatcactttgcatgtcacaacattcaaactataacttaattgaaatattagactcttcatcacctgatcatgtgtaacacgtaatgcaatagatttatggattaatattggaactttaattgacttcttaaaactataactctaaacaactgtaagttcttagaatgagaaatgcatgcatataaaaattctactaacctaaagatttatgaacatgacgaaatgagataattaaattaaatacatcaagttaattaattgctttttccatttccaaggcagttgttggtaaaagaaaaaaaaaattgcttccgcgatataatatgattggttggtattcagatgcaaattagttcatttcgtattaaatgtgtagcatattttttttatcagcaaatatatatatatatatgaaaaaaaaaggtacaagaaataccccaatgtacaaaccaaatgacccatcccttgcatgaatactctaactacaggtaataatatagttatgcccataacaacataaatatagtaaaaccgaagtttagagcctatccaccagccacatatatatgtaaactgttatagtgcagtggaatttcatgcagttttgttgttatatagttttaagagatggggtggattcatcattatatgtaaactgcaatttataatatgattgggaaggtgttttaaatgtagtggattagcatgcgttttgttataatgggcaacggcaaatccatctcatttgtacctcagatgagttagattctttaatagagagttttatttgaaactctatgttataatactcaaattataatgatgtctactagacattgtggatataatgaagtgcatgagtcactgtttaaataaaaaaaacagtgatataaagacacttctcgatccctcacacacacacacacacctagctcattccaagcatcaccattttggctactttattcatttctctctctgtcttttgcttatgcaaatccatgacccgctcctcctaggatgatctgcatcaaacttttctcttaaatattttataaatctttcatagtgtttaaacaagaatggaaggaaaggaaggaaaaggttttatataatttttccttattttgtttaggaacttggagataaacaggagaaaatgaggaagccaaactgtattctttcttatttttgtctctactttaatattatttgagaactttagagaaaggaaaaagtgatttataatatttaaacttctgacttttcctaaaataaaaatattttcttacattaacatttaatataagttgcataaattgtattaactcattagggtcagactagtaaagagagttgagatattatacatgaaattataagtttgaacctaataggatcgtacaaaaaagaagaagaattgtatcatactatcttaaatttaagtgttttgatgtttttctccatctcttcttttatatatatatatatatatatatatatatatatatatataactatttttcctttcctcctttcttttaaccaaacaatatttgtggggaaaaaagttttaaagtactcaactggaacagtactttggagccaatttcaaagagctataattatgggtatggccagatgtctgttttctttgatctttatcactatgattctgttccaagtagtggtgtggttgcacgtgttatatactgatctcattgtttcctgagaaatctactcctgtctcttcccttttctttagtttaatcgcctatgcttttgagcctatccattaaccctatttgaaattgttgtatacatgaggcttttgtacttgaaccctaagggttgtcgcaaaatttattttaattagtaatatcttcatataatcgaggatagacagtatattttatacgatatgtgttcattcgattggctattttgagtaaaccagttccagttccggataaagctgctttctttaatttgtgcatattgcgctggatctgaagattatggatttgatttggtggaaaataagagtgatcatattgaacgtggaaagagttagttactctggattatccacttaaaacgcacacacatgaggctttatatatatgctttttcaggtgattgcatgcctgtctattggttgttaaaatattcttctattaatgcagcagccagcaggacacatgatcgaaaaacttctaaaggaactgtttcagtgttaataatttctaccaagcgtatagtatccgttatttagggtaaatgtttaagtatgtgggggagatataagattaatttagtggaaagagagatatttaagagttgaaaggaaatagaaaaaaaattatgagttttaattttttactaacattctaataaaaattaataattaatattgacttataaaagaaaaaatattttagcttatgcatattgcatgttgccttattgcatgttgcctttagggaaaaggaaaaaaaaataaaagctaaggaaatagaaaaaaaattatgagtttgaatcttttactaacattctaacaaaaattaataattaatattgacttataaaagaaaaaatgttctagcttatgcatattgcatgttgcctttagggaaaaggaaaaaaaaaaagctaaggcaccattaatatttttggatttatatgttgtgagagaatgacaaattattaattcaaatttcaaattttaatttgtttaacttagtttttaatatgaaataagtgaaggaataaggaaaggtagagaaatgaaaagagaacaaggcaaaggaaaacaattttaatttcctagcctattttaggattttgaaagaaataggaagaaaaaaagaggattaatttcctcgatctcttttatataccctcaaatgtctgattttttgttaatttatgaatatatagaataaataatgttaatttcctggatgtttaaaattaacattatttattttatatattcataaatgcttaagttatatattacgtagaaattcatgcatgcttaagttatatattaacattattcatatgaatgactatatttgtgagttgtgacattatgcttagcttgcgatactttaatttcatatgtatttactatgtcatgcacgtatcacattcacatgtagtgcataaaaaagctactagctaggattgagttagagtttgtgtacgtagttcaattcaaataaacttcattgccacattgttacaagagagagatgcataaaattaaatttggtcttgttgttgaggttgctcattgcttcttctatacatattactgtcttttgggtcttttacatatatcaccaaataatgactctatattaatctagtatatgtgtcatgattgctttgtagtttatatattgtttgtagattataccattggtaatctattgtcaagtcctctataatttctgactgtttgtattataatggagcaaataaatattcatgctgttttaatttatagcccaaaccaaactagaaaaacctacacacaatttctcttcactgtttatagccaaattcatggtgattaattttcttgttccttctccggcttgaaataagtttgtttccttttttttaattccaacacttaatagcagtactctagattttctctgcagtataaacgcctcttaaatgttcatataaaatgtcacatcgcttaagtaacgaatgagaggatcgagtgagagtaaaacaagtttttaattgagtgtaaaatgaattagaattaaaaataagattaaaaattatgactctccaaaagttggaccctcgcggtaattgtgtgcacaatttttctatgattgataaattaactggttccttgtttgtacaattccgtgaaggtgca

SEQ ID NO: 3620 - DNA, 1134 bp, Glycine max
  Intron number 2 from transcript Glyma11g33750.3 (locus Gly ma11g33750) derived from phytozome v7.0 (chr-ID Gm11; pos 35621458 to 35622591 reverse strand)
gaagcacaacgcaaaaggtgagcaatatcatcctgtagttgctatgtgggcctcacttgcttttgtgctttctcatactgtaaattcttttggtggatgattctgccaaatgggagtttcaattgctggttgagattatcttcatgttaggggactagggcctccttccatggtggaagtttgtcaatctgtgttggagatatgatttttgtgctggacacacccttttagagttcactgttgattgggaatgatatgctttataaaagggttgtgtttttggtagttagcaataagtgaaataaagaagtaaagaaaaagtaaatcatttttatggcttctcttttttggggttagagatttcaatattatgccttattgatgaggaatctctggattttaagatgtttcaggccaatatgaaaatctgacctatatgattgatctttttctagagtaagccatgacaatttaagtgtgaattaattttgaataatgagctataccaggaaggaaaaggaaatttgttatgttgatggacagggacattgttgttacttgatagatgtaaaattgagctacttgatgctgaggataaatcttgtctccacaacttactttactttattgatattttaaaatttttgcaataattgaatttaattgtcaagataattagttcacatacattttaattgggacaccttggtgatcaaaaaacatttatttaaattcacttgatttgataactacaagctgagaaaatcttggtctctatttgtccatcaccaaaggaaaagaaaggggaaataattatggaaagtggtatcaccttattttataagatggttgcgatgcattaattggcatccccacacttttgaagcctaaacctgtcatgcataaaacgttcctaactttttgtttatgatgtaaatgtggaaatcggcattcaacttaatttgaaacatctcgtttggaatacatttcatattttcccattaggtcatttatcctgacattttggttttgtggtgttactctgttgattctacatacctgcttgaataggtcctgactcctgatgttctgctttgttttctctttgacaaggaaaataacaatctcttctta

SEQ ID NO: 3621 - DNA, 5506 bp, Glycine max
  Intron number 2 from transcript Glyma15g20030.1 (locus Gly ma15g20030) derived from phytozome v7.0 (chr-ID Gm15; pos 17643256 to 17648761)
caggtaaatcacttaacaaatataatagaatttttttccctactagaaaataagcttttaaaattgattatttaagactttcaacatcggttattaaccgatgttgaaagtattatcgttataacgtaaaataacaacattgattatttaaataaccgatattatataataagaattacacaacaaaaaaggtatatatgttcataccaacgttggcagttaacatcagttttttttacaaaactgatgttaactgccaacgttaacgattttcaacaaaaaccgatgttaattgccaatgttattatacgttaacatctgtttgttagaaaaccgatgttgttagtgtaggtcaacatcggtttttttaaaaaaccgaagttgttttaaggaatttttttaatacactgtctgttttttcaataaacccaaaaattaacctgtaaattttaaattagaccacacaacacaacatatataatttgcattctattttgaaacaatttttagcagaaaaattccatgagaaatttattaataactatgaattaaaagaatatttaatgttaaaaggagacatgaattgtaaaaaatgtaaagcaagtaaactaaaattacaaaatttcctaaacatcctaagtttcatttctaactttcaaataatactttgcccactggatgcaaaacaccttcaatctctctagttctaatggtctagcatcattgaaatactgcatgataaaataaaacataagttaatagtataatatcaatcataacaaaatcaaatttgtttgaattaaacaattaccgtttccaattattcttgaaacttcctaagattatagttgacatctagtgcatcacgtaatagccacactcagtgcttcctttttgtctgttacactaaatacataatgaaatttagatattcaacgttaactacaaattagtctacacagacataaaatataagtagaaaaacattgtttaaatcacttactttaacaacaatccacctagcaccagccttggatttagtttgtggagtatcatcaagtcctttcaaagcactgttgagtacaaacatggatgcttattgtacaattaaaatattgatgttctcgactaatgctaatgcaaatgtattgaaaaacaacactgacctattaattattcctttgaggtagttgtttggcctattatgcaacgaacaaaatcagatgacaatatttaccttaggcaaaatgatgaacatttgccaatattcactgtagtggagaccaatataggttattatagtattatacattatttaaattcatttcttcagtttaacttacccattcaggtaggctcctacgtacacatcccgttttgaattctacatccagttcttcatgtaactttttgattcaaattacaattgcccaaatctctagatggactgtggcttgaggaatccatacacatcggaattccccattcgcatacttgtctcagtcatatgcctattgttgttaacacaaagtaagttatgtataaattgacttacagaattcacaactgtataacaaagatgctgagacattgaccaccgtgtgctatatcagacagatctccatgctttatgtacaaggggaagtcttcattaaacaccctgaacatggtagcatcccacataacctgcaatggctttagaaaaagttgtggaatggtcaatgtcattacatatatgggatcatcgacctcatgatccggcctatctgcaggttttgctagtcccacagctctctgtttatccaacatagttaactaacataatttaattacagtgaacactaattgaaaaaaattatttgatgacactgaaatatttgttctgataaacgcttgaccagatgtgtcagccaagcaaggaaggtgttaagtgtctgccccactaacttaacctcttcagtgggtataggaatgggagcatctatatctctaacctcctcaacaccaaccttcacttgatcatgcaacaaaggaatgttgtgaacggttgtggatccctcataaactcttcctagggcaaccaggcagggaggattttcttcaatgtacaactcacatttgtctgagtcaccctgtctggatcgttccctgagggatcaacacaactctcctttgtgctgacacgagcagctgaaggaccaacctcaggctcaagaaggtagtgctagtccctgtgattgcatctgtgattgaaactagaactgcatctggctgaaggacaacattagttgtcgagtcactttttgtgtgattgactcctccaactggtccctaatttgttgtgctagctactccaagtctttgggagccatggagaaagacgtgtgggaggtccttggagccggtccaaagtatttcttgatcgtcacaccagctccagtagcacgcacacgaccagggtgttctggtcacccaatggcagcagtcaggacatcctaacgtccatgggggacaaaggaaccctatgacgcttgcaacgaatccggtacaaaacatatttattcgtttagtcaatcacacaataaacataaataattataattattaatggaaagtgacttataatcttatcaggaatttcctttgctgcctcagacgtcatctgaccaggtttcttggtgcgggtcatcttccacttcacgtgttgtctgatgggagatgggggatcaatcatggtgccagtgcttccggattgagcatcttcctccaattttttctttctcttctcattcatcaacttgttttctaaatattcataacccccacgagataacacgtgaggggctgtgttttgcttctggatggcctgtgtctttttttgcacatcctgcaaaaattcaacattaatgaaactcatgattacaatgtattataataagtgaatttaaagttgaaaacaatgaaaatcacaaattagttaccttccacgaagggtctctgcaggtctgacaaaattgggcccacttctccttgctaatgtcatactttttgcatacaatgtcgtcgtcactttccttgtcggctgcaagtgcccattttgacatcaaatcagacttgaaatgtctccatcgctcccccacagtctgaagtatttcttttttttttcctctgatcagatgctttaggtatatcaaattcagcttgacaaacaaaaatttacattctattgttactaaattacaattttattatcaatgaataaaatgaaagatttaactaaaatacctgaatatcctcccatatcaaatccttctgagcagtaggaacttacttccatttctcatgtgacatcgaccttatcacgagcgacgatccccaaatatgttcttaacttcttactgtggggaccgtcggccttcccggtcgcagaatcgacatggaccagcggtctctctaccccaactggtgtagtcgccaatgatcttagatgtgtgacttttcttgcccgcttcaaggtagacggtgactgtgatgctgcaccaggaggaggaggaggaggaggatagctgggtgatgtagccatttgcatgtaaagaaaaaaacattagttaattaagattatcacaaaactgaataagttatgtaaatgaatgaactgaaatgcaatacataataagaaaattgcattagacgatgttaattaattctcctttatcatgatcattacgattagcatgaatgccgtcagcttcttcctctttgacgatgttagccgacaaaggactaacataagtatcaatgtataaatcatcatcttcaacattaacaccaattgttttctcgtgtagaaccactgatcacctttcatcacaagggtcttgaacataaaatacttgtttagcttgttctgccatgatgaaagggtcattctggtaagcgagtttctttagatctaccaatgtaaatcctacatcatcgatccgtacaccggtgttattgtcaacccatttacatttgaaaacacagacaataaatttgacatagttaagctcccaaatttcttcaatgaacccaaagtaagggatggaagctacacatggattgtcatcatgtacactggtgaagtgttgagattcagcccttagggtgaccccattgttttgcattgtacttttctcgtcttgtgcttttgtataaaaggaatacttgtttatatcgtatccttgccaagttataacatttcttttaggcctatctgctagctttcttaatgtttcagaagcattatcatcagcaaagattctatctttaaaccaatctaggaaagtcttgttatgctttttcaagacctagttcttcaaaatttttggattactttcactaaaccttcatgccgaagtatgtatggcaaaacttcattactattattcaacacatacaagtgagcttgttgcaaatcttctacagttggagtgataacatgcagtcctcttgaacccttatcgctcactctttcgtcatgccccaacatcgattttttaaataaccaatgttaacctcaactatttaacatcgttttttataaaaccaatgttaactaactcgaattatttacaaaaatgtcaccgtgctcttgttaacatcggttttttgattggtaaaaatgccaactagttaacattctagtagtgttcattgtttttgattggtaaaatgagaataatgaaatggaaatgtgttacacctattatgtcttaattcgattattttaccttcatttatctttctccccaatttggaaggaataagatgaattagaattttgtttattcattgcatcacaacacatccaagtaaataaaataaaggttttattttaggtttaaatatccttttgttcctataaaataaaagtttttatcttagtcctatgaaaaatttgttttgattttaatcctttgttaaaattgattttagtttctattattaaataaaaaaaattaaataatgaataacaagttaaaaaaacttatcacatcatccagcttaataggataattatgtgtgatttttttaactatgtttttaaatcctcatttattcaaaataattgatgaaatcagaccggttgatgaaggatttaaaataaagtgtataaaaaaattatgcatgattactctgtcaaactccttaatgatgttacaagtcaataagttatcagcgtcattgttacatcattaattaatgttgttacttaataacaaggactaaaaaaattatatctttgaagcaatacctaaaacaaaaactttgaaagactaaaagaaatcctattttatagtgataaaaagttatttaatccttcattttgttatgttccatttcattttatcatatccctttctatcaatattccaaatttggttaggccatcactgtattctacacgatactggccttttattgactctttgcccttttcttatttgtgttgaacagatttgtt

SEQ ID NO: 3622 - DNA, 2652 bp, Glycine max
  Intron number 2 from transcript Glyma10g01520.1 (locus Gly ma10g01520) derived from phytozome v7.0 (chr-ID Gm10; pos 1114308 to 1116959)
tgtaacctggtttaaaccttcacctccttctccgggtaagttcagaactttaaaattctgaaatatgacattgcaaatcatgatgctttggtgttcttaataattgaaactaacagtgactgtaaaatgattattgtgtaaaaattacacatctaatgtttatttgcacaaggtatcaaaacctttgtaatgttatgtgttaactcattggcaagtgtaccaaatctttacaagtaataaacttctcggaagtccgaatccacagggactttgtttgtacttagattaatgcaaacccaattcaaaagcaagagataagaaatttaaaatttaaaataaaagataaagataatagataagataagatgaaagaaatttaaaataaaagataaagataatagataagataagataaaagatttttaaaatttaaaataaaagaaaaagataaagtcaagaagataagataacattggaaactgacttgcctgcctaggatgtatgagtttatgattttttctttaccaattcaggtgattctatctcacccacatctattcatttacttgcccctgatgcctcacgatgacaagcctattttacctatttatcccccaaatgcctttgcaaagactcattagataaaatgcatgaagttctaattctagatgtttgctttgacgcatgggcataatgcaatcactctatgcctagcaatgattttattatgatatcttttcttcttgttctattagaagttatcctctcccgagcgtctaacccctaaaactctttaaatcttatttagaagttaccctctcccgagcatctaaccaacccctaacagaatataaagatgagtatgcaaggtaaaaacagaaaagaaaataggaaagaaaaacctggtattgcattgataaatagtgaagagtacatcatacatcacattggctcctaggcctgccagaccctaactaagggtttagccactcatggccatgggctttacaatgagaagggggtgaaaggaagagagtaaatgaaacccctaggagagggggttctgctgtggtgtcttctgtcccttaaactggctctctatttatagctgttgcagtgggctttgggccttcgtagacgcgctcagcgcgacaccccctcgctcagcgcgtgtagatcgcgcgcttagcgcttatgttgcaggcttagcacgtacttctgttagatcgcgggcttaacgcgcgtgttgcaggcttagcgcgcgcttctgttagatcgcaggcttagcgcgcgtgttgcaggcttagcgcgcgcttctgttggatcatgggcttagcgcgtattggactgggcctgcttcagattttcttcttttcttcaatttttctggcctttttgcttgttacacctccagtttttatatctgtagccaaaattcaacaaaacatcaattctttaatatttaagcgcaaataactgctaaataattatttttaaagacaatgttgccttattttctatctcaaaatacaattatttagcagttatcattatgtaaataaaaaatcttactgttttaactacttccatgctattgttttaatgtatatagatttcatgtccatttgtttttcatttttccaatgttgctgctaagtggtgactggtgagaaaaggacgagaaagatatgttgatgctaaaggaactaatctattgattgctcattccttctgatagttgttatgttttgatgtttcttgattcattttgtattgtacctacaaacaaaaatcatataattttgatgcctaggaaagttttcagctacattgtcaattgtgaaatgcaaatttggatagttgtttgtatattgctaatatgtgacattgtactgtttaggtatctatgtttgtggtttgcatattgattgtaaatatggccaaagtagagcttataagatttgggcattcttcacctcataagccagttttttaggttgagttagacctggccaaaatttaagatggtattagagcttatcatggatccaaaaatctacctaactctgtggctttcctcccggtgcaatctacctgttcctgtggctttcctagtgcaatataaaaaaaaagtcttaaaatatccacattacaaatagtccaatcctaggcatgaggacggtgtgttgagatcccacatcgactatagatatgaccaaagtagagcttataaaggcttggacaatccttatcttatgagctagcctttgaagttggataagcctgtatgttagtcttccttgttgtcttgttgctacatttttgctacacatttaatgtgatatcccatcttatagcaacattgtacaatactcctagtttctttggtctctctcgaggctttagaagatgtactgaacagaactacatctagttttcttaaactttttagttgtaatctaacatagtactagatatttttctgtggttactgcattcgatccggtggaagaggaattactaacaactgcctcttcaatcttcatggggggtgttaagaatgaatatctatgcatttatatataataacatctttgtattctaaattctaatgcagctcctacaattgctacatcaccaacgaaagctccc

SEQ ID NO: 3623 - DNA, 1834 bp, Glycine max
  Intron number 2 from transcript Glyma13g20930.1 (locus Gly ma13g20930) derived from phytozome v7.0 (chr-ID Gm13; pos 24431006 to 24432839)
cagttctttgttggtggcaattggaagtgtgtaagtgtcttacccggaaattcttttccttttacactcccttctgtttttgattggttgaaaggggttgtttgttcattattaacatgtaatgtaatgcctcgtgtagctgatttaatattttaatttacacatgaacttctttctcatgagtgatccatgtttgaagttacattggttattgagggcctataacaatccttttcctttacttggatttgggactgacatcaagggcctgtcactatgagactgtggatagagttaaaaagggaatgatttaaggccttagatgagtgcatcataacaaaaatggtggggactttaataaaaatgtcacacaaaatacaagctaagtggctagaatggagaaagacattgggggttattggtgatcgcaaagtacctactaagctcaaaggaaaatgctattgtattgttctattactagctgtacttcatcataatgaattttagattttaaagggacaacaagagaaaaaaatgagtaacaaaaatgagtatgctaagatgaatgggtgaccacacaagaaaagatgggatatggaatgattgtatataaagagatattggtgtgacacctgttaaggaaaaacataacaaaaaattgattaaggttatttggacatgtgcaaagaaggcaattgaagaaaatgacgaggagagtaaatcacacaatttttagctctgggaaaagggtagagggagaccaagaaaaacattgaaataaattattagaagaatctcatagtaaataatatttataagaatttggtttttaattgagttcaatggcatcatatgattcatgtaatggatgtcacctagtgagataaggctattgttgtaaaattctctcatttagcagctctttagttatttttgaattgtaaagtctgcatcttaactcttgagcatatattttagctgataatcaatagcctttgtaaacttgtttccttaagtattgaacaaatgtatttttcctgatattccatctgtctcaattcaactcaaccctccactatgtgagctccacgtggattcaactcaacccttaattaagcacttattcaataaactgataaaattagagcttattcataagcttagttgtgaaccttattgaataaaaacagcttatacgaatgtcataagccattttgactagttcaaataagctcttccaaatttcacattctaacttcctgtagcaaaagcactgcagagtttgcttcaacccttttttccagccatctctcccttcccaaacctgaaattttagtgaagcaaccttttcccatttctttggaaggaagctttggtaatgtcataatcataacttgttcttgttatctgactggcaaacaactcttttgcattagagtatcataattcattgcaggctttctgactcttgatatttttgtgaaacagcttcatgtagaagttttttggctgtaagatttacctccactgttcaatgtttaagctgttttcctatcactattattttcttttgtgtgaaataattaaattactgttatttttaccagatttctgagattggcactccctttttgtttgctttgtttaatatttgttttgtttcatttgctcaatcacttataattatatatgaaccattttatccttgtcttcagtctatagctaattcactcaaccactagcctattgcattacatagaatattattttctccttcaatacactgcctctttctctactttttttaaaaaaaaaattatttcttatctccaga

SEQ ID NO: 3624 - DNA, 883 bp, Glycine max
  Intron number 5 from transcript Glyma20g25780.1 (locus Gly ma20g25780) derived from phytozome v7.0 (chr-ID Gm20; pos 35422954 to 35423836 reverse strand)
tggaacttggtaggtttctcaaactaaggtcatcgtattgtggatatgcaattggctggaatctgtaaaaaatattttgaacctaaatggagtttaatgtttcaagcatatctatttatggttttatattaatctactttaatcattctttttatggtatacacatttacctattatcgtgcagattttggtctattatttgaccatgacaaaaggataagaaaatagaattgtgttagatttttcagattgtctgaaatactgatatattcagttgttatatattttgtagcctcaatgccttatacgcctgttttgtttttttatttctttgtagtaggatacctgatctccccccttaggatttttgggatggatggttttggggggaaagggttgggagggtaagtttttcattgcaagtatgtattctctaatttgagagtttttaattaatccccctccttccttatttccctcccaaatcctccatctaaaataactgaagttcactgtagttttttatggagactccattaattcaggttcactaactatcaatgatactttggttattttggcttatcttgggttaaatttaaatgtatctattcttttactttaaattttatctcttgttgcctttctcgttattccatcacaaatcatgagcattagatacttttctctcatgaattcaattctacgctaggatctttttccttcttgtattgcttacctttgatgcttacatattttgtatagtatgagtgtatcttgatttaatttctttgctgcccgtctttctgtgtacctctctcccaacaaattagctttatatgcttttgttgaaatctaaagagccatatttttgcaggcttcc

SEQ ID NO: 3625 - DNA, 620 bp, Glycine max
  Intron number 1 from transcript Glyma17g06010.2 (locus Gly ma17g06010) derived from phytozome v7.0 (chr-ID Gm17; pos 4240147 to 4240766 reverse strand)
tctgaatctgaccaaccagtaggactccttcaaaggccagtttctctttaattttctcaatttctctgtcgattctttaattctccgtttcttttttctaaatgggtattccagttttccttcggatgcagataaagtttctctattttttggttttcatttccttgatccaagtttttctttttcttgatgatgatttgggtagattcagatatttccctttctttgattgttgcccatcaccctttttggcatgttctatacatgaattgtctgcatgaattaaaattccaatgtgttgattcgaatgcttaggtctcatacatgcttctactgggaaccaagaacaaagtagaatttcccaatttcgcagaattactgaaaactgaagagattatgtatctttttttttttgtgtggaaaacatcaaatatttctcagaatatgggaggccttgtttccctgttctgatttgtgagtggcaagtttgttgaaatattcttttgatttatctgtttgtaagtggaaagaggctagtctcacaagtcattttttttatctaacatgatggatttctccaaacagggattttgagtattgtttgaattgctggagacctg

SEQ ID NO: 3626 - DNA, 2050 bp, Glycine max
  Intron number 1 from transcript Glyma08g04710.1 (locus Gly ma08g04710) derived from phytozome v7.0 (chr-ID Gm08; pos 3352474 to 3354523)
ggttctgaaggttccactgtcgtcggtcagtattcaacctcttcatttcctattatcttttttcccttctctctatcaagtactcactcttgtgcttcgctaattatgtctttttggctataatttctatttgatattctttgaaatgcttcggctgctattgtatataatatggctaatggtgatacaattactttctgtttggagctgtgtggaatatgagctatatcgtttagataaaccactaactagtgttatgataaacaaacagggggaccaaaacaaaacaaaaatatgaaaaaggaaaaaaactttgattttaaagagtagttcgtaataataaactttgagttctttttgtttatatttattagcattttttttccagtgttgttccttgctgagattgtacataaattctttgctgcttagttaacttagacaccatgctctggcatattctctggatatttaattgcatcttccctggcactatattagaatgagctcacaattgtgtgcaaggttaggaaataattgaaatacaaagattgaaagagttgagaggaagtaaaatttggaaaaagcagagggtcaaaatggtcatgtaattctcaattaattttttttttttaaaaaaaaaacttctatctttcttaaagtaaatggtcattacatatacaaacttgtatatccacttattctggggatgtgatgcaaaagattgaggagattatgaaaaactttcttttgtcaggagaaggagatcataggagggatcatgttgtctgctaggaaatgtcttttatgacttttgaagcagcatggattagactggccctggggaatctggtgtctaaaaatatttccttagtggtcattggttaattggttgaagcttctgttcgacctgtgttattgaaaattagtagttacatgaacttcattagaatgggtggcatttcacatgtcagtttttggtagttgtatttgttggtacacccctcattttaaccttttctggggaatggttttgcttttgattttgggaggatgtgattaaggcaaatcctatttctttgaaatctttccttttcttttgtctcatttactctctccatcatagttgctaaatttgctcctaccacccttgtcctatatggctatatagcaaaatttcaaaactaaattgtggtacttttgtgatctggaatgcaattcagatcttgcaaaatggtgaaccaacttcttgaacttaatgaaatatgagggggggaaaataaacacattgaatggaggaattgccattgaattgcaaaaacgaaaaaaaggaggaaatgagagcacacaaatttgccagttgctgagatgaagcaggggaagaatgtgctggtagtggtgctggcggcatatgatgagcaggaagatgaaacctaactaataacagccctattcagctaagcgtaattttgtgtaacatgtactgtaagaaatgtcactcttctaaagatcagttaatgggatttctgtgttgacgttggttctttcttttattggatttgaaggaacaatagacaagagtcaggcaggtcaattgggacctattaggctattattaataatctgaaattgggtcacttgctttcagctgcaatcaggcaagcttgatcacatgtgggctaataccaagccagcttgatcactcttgagctaaaatcagaccaacaacttttgagctgtcattgggtcaataactttggtactaaaattgacagtatttggatcaggtcattctccttttatcaatcatagtggatatgtgaactcagatattgagaagtgaccaaatatatactcaagattatgatgcaacttaatgtttttgcatatttttctaacttacttgtaaatgtaacttatcactgattgtgttcatcttttattgtaacttcttttttttttgtaaatttgtaatttgcacctatcttgttaaaatttttggtctatgttcgcagttcctaggaatttcagattattggaagagcttgag

SEQ ID NO: 3627 - DNA, 1643 bp, Glycine max
  Intron number 7 from transcript Glyma16g06250.2 (locus Gly ma16g06250) derived from phytozome v7.0 (chr-ID Gm16; pos 5680138 to 5681780)
ttattcagtctacattccaggtatctttaaacatagttcgccaattttattttatttttaattttccacttttaattatttaatatttggggaagatacagtgacatataaggcttttgataccaacgcataggctacagtatagggggtggagtatccttttagatagaaaggattgtaggttgtattgtactttggtaattcttgctgctctcatttttgttcacaagctacaagttggtataacgttaggtaagtccaatgggctagcttctgttcacgagtgagatagagttagttagtgatggttagttaggattctaacagattgaaagagataagatattaacagatagggagagaaaactacaggattggattttagtaaagatgagagtggattttgagggagagatccctggctgtcaaaatcctaagagaacacttgtattcattctttgccagtgaacattattttttctttctataatccaactcacttcttccaactgatatcagagctcaggttttgtagttgtgggtattgaatcttcaagatgattttgaaatttaaaggagtagaggtgtatgggtggttgatcagcattgagtagcacttaactgctctgaaaacagtagaggttggttgagaagccatcgcattctgtgaagacactaagaggttgtattttcagatggtggcttaggtggaaatggcacaatctgaatacgacatggtggacctttgtgaaggttgtgatcaaacatttccaaccagagtactgcctagatcaagtggtctgggcattggaaagaaacaagaatggttgctgccacaagtcttggaaccagagacaaccaagaatggggaaacctagagggagtatccagtctcctatttagataagtaactagacctgaactattccaatggattaagaaaaggaacctagttagaggaattattggatacttctaggtctggaaaggagcccattttcgtggagggagaccatcttcttagttgtttgatggagaaataaatgcagattcatcccagcaaaaatgtgggagagaagacagaggtaatttgtccttggggcctgtgggtggggtgatggttgaacaaatatgaaaggaggcaggcttaggttttgagcagtttggtcaaaaccaccagactgagttcctcccatgaatgtaaatgatttatatggctccaacagtggttagactcgccaaagagagactaacagaatggcagtgatgactgaagccataattactagtcaaggtgaaagggctagtgattttttttttggtctcattcatatacttaggcgcttccaactcatttgagagatcctcgatagaagagatgtgaagatatgctgagtagtgagtaccaacacttgataatgttgttgaaccatatgtctaattggttttgagatagttgatgtaagtcatgaggacaatgttttatttgaccagatttgcttttattcatatcttttatttaacaatatgaggcatttcattgattatgtgtttcttttaacatgataaagtccttaaaatagaaagttcaatatcatacctggtcctttgttggctatgcttatacatttcagatcagggga

SEQ ID NO: 3628 - DNA, 1744 bp, Glycine max
  Intron number 5 from transcript Glyma04g42790.1 (locus Gly ma04g42790) derived from phytozome v7.0 (chr-ID Gm04; pos 48451218 to 48452961)
agaaaggctttgaatattcttcaggtagtttgctgatagccttcagttttcttatatacaaatctatctcagctagtcctttttattttgatgtttatttttttcaaatgaagaagtaattaatcaaacaccattttggaaacgagtactatactgtttcagcatctgcccttctgctgcttagatggacgcacatattgagatgtgtttagaatcacacacttgtatacatggaatcatacaacacttgtatacatggaatcacacacttgagatagcaagtattaatttcggtattttcacttagagatgactatgcatgttacatgatctgaaaatataaaactcttgaatgacttctgtgttgcagattcttgcttgacaactttcaactttaatttattggctagcaatatacattacaacagcaatatccttattccattaggtgaggtcagtactggattgcaagacaccattgggctcagtcaacaaccaaattctcaaggatattattcaccatgagatcccttttaataattgttttcactgttcttggtctccctctatcccttttcatagggttagaaaccatgtgatatactctatcactgggggcctagtgacattctttgcatatgcccaagtcaccttaaccaaatttttgtcttacccttgataagtgctacaccaatatctccttatatgcaatcattttgaatcttgtcctaatgtccattctcatgtcactgcatctatgtcaacattctcatttttgttactcctatttttctcctttgttgactctttaaagtctaatactgactatattagagtataactagtcgtatatatttataagtaaacttttctttgaacttagtaggtattttacagtcacaaataactcgtgatgttttttggctttttaaccacccgacttgtataatgtgtgtgaaatctttattaattttcctatcattttgtaatattgatcccaaatacttaaactttgaaattggtagtttgacacctccaatttttacctcaaaattgttttcctcttgtttattgctaaaattgcaatgtatatactttgtcatgctcttactcaagcgaaaaccttttgattcaaagtctttctccaaagctcaagtatagagctaacctcatcccttgattcctcaatttcatctgcaaaaaaatgcatttagggatagataatttttagtaaatatgtacgtgcaatgtactgattatttgtgtgtaccatgtaaatttgtgtttctgtttgtgtcaactaaatttaccaaatgataatttcttttttggtgaagcatggtttataccagatattatggccttaatccatcgtagccaaggatgctgatatcatatgcaatttcgttgcatgtgatatttaggaatgcttctagacgacatcttgcctttttatgaacatgtactgtataaagatttgtgactagactgaatgagtatataggaaactttttttcttaagtaattttccaatatatttttggatccaaatgctggttagtgattagtgttcttaaactttgattttgactgctgtgattttctttcactaccaaattgcaatttttaaccatgggaaaattgttatgaattgtatttatatcctgaattgttttgtttcttttgtatcaatggatcacaaatgacatattctgttgctttaatatttgtgcagtcaacacat

SEQ ID NO: 3629 - DNA, 1106 bp, Glycine max
  Intron number 1 from transcript Glyma13g30550.1 (locus Gly ma13g30550) derived from phytozome v7.0 (chr-ID Gm13; pos 33142080 to 33143185)
tttgaggctcttggtgcctacatctggagggctaagtaagtgccacaatcattttaaatttaattttcaagaattcactgaaatctctgcatgagatcatctcagttacaagttatacatcagaacatatattattggtatgaagagttaattcttggtataaaataaacaggtcctaagtcaatttcttaagattaaatgctcgttcttttttttttgttcaaatgttcgttctagtattaggataagttgattgttagtttattttagtagtaaaattagttattagtcaagctcatagatttttcgcaataacataaaaaacaacagtaaaacagtagtattaaaaatagtagaactatggtaagtagtctttacatattaaaaaaaaaaaatcttcagattggtctctaaattttactaaaatagattaatttaggactgaagtgatgaatattagaaatttcaaggattactttaacaattttattactttagagataatagtattttgaggattaaattgataatatattcaatttttcgattaagtttacaattgattcatatgattatcaagatgcactcttggtcggtaaaagaatctagctcaattattaaatagaatatatgggtgttggaaactttgttcggtaaaagaatctagttcaattgattaaatataatatgtaagtgttgtaaactttgttgtatttatttttaatttctactaaaaaaaagagtatgactcttaattagatcgtttcctctgattttgtcgtataaaaaaattaaaataagggaggaaaataacgtacatgttagatgtcatgattttaaataaagtagtagataaagaagaaaaaatcgccccttgcattttgtttgatgctaatgttttgttaaaattgtcccttaaaaaattaaaatacaatatatgaaaagaataatctattcaattacttgcggagaattgcgaatcagtattagaactttatattttcatgatgatatgagcaatattgtttgtctccaatgaacgatttaccatgtttctgaccattctatttgccacgacagggtcagggcctcgggaatccaggctg

SEQ ID NO: 3630 - DNA, 1206 bp, Glycine max
  Intron number 1 from transcript Glyma18g51810.1 (locus Gly ma18g51810) derived from phytozome v7.0 (chr-ID Gm18; pos 60564293 to 60565498)
ttccgcaagcaggtcacgcgctcttcttttttctagatttttttttttggatttgctgaaaattaattttgatggtgtgtgtaatgtatgcacagggcagggttttgtttgtttttgagcttgatcgggtggttttagtggtttattgagtaacatattaggaactgcaagcgtgattttgtgcatgttgtggtcttttcaagtggaatgtgaatattctgaaatttgaatggcgtttctagcttggtttatgcttggaatcctaggggttctttttgtaattctgggaaatcccagatgagggaaacaagtagttcccttcatgggattctctgttttctagtaatgggttatggcatggtgattcccttcatagatttatggtatgtactactgccacacatggagagggaaggttccagaatctggaagagaatctcagtgaattaattcacagtttgctggtctatgaggttagtcaggatggttggcacacttgatcaggcatcaagggtgggatttaggtagagcttgggtgagcaatgagagagaggcatcaactgtcaagcaacataaaccctaattggggagaaattgctccaagaaagcttcctcatcttctactgatatgccaaacataagtatattcttaaaatataaaaacaaaagaaaagagcccccccccccccccccccccccccacctacaaactaaactcatccttttgtgaaactcttatatagattgtgtttgcattgctctggttacttcaccagcttaacaatttcttccctgttactatgttaaatcatattggtattcttttactaaacaatccattgttctctattattcggttctgttgaagattctgaaatgtaataatattttatgctctaataaaccatttgagggtctttcgaagattctgaaatagtgtattgcttgttggttgaatgatatgataactggagttctccgtaaatatagaaatttagtggttcttctctttgaggttgttgttatttttgcatagcatgtgtggtaatttgttttgctgtgccacattcaacatagatgcgggtcttttcactttcttccttttgtttcatgagtttcatataatactgattggtaggttctctcttaaccaatttgatgtatcctaagattgtttatccttgaattctttgatgaacagataca

SEQ ID NO: 3631 - DNA, 2025 bp, Glycine max
  Intron number 2 from transcript Glyma07g13320.1 (locus Gly ma07g13320) derived from phytozome v7.0 (chr-ID Gm07; pos 11911702 to 11913726)
ctcataccagcaacatattccacacaatacctcaggttcgggcatgttattatatgtttgtgagttatatcaatgtcttcatctgcataaaagtcatgggaaactttatgtttacctatcagtaccttaggtatgggcatacagtgagttgtgtatttgcatctgagtttatttctatatcatcttcaatttgcataggtatcatggaaaaaatctggaataaactactgctatttatttatttttggtttgtttaagacactagttttcttaaaaacaattaatctgggcaacaaattttctatttgtttcattagtggtttattataaataattcaaacttacataatttagccttgttttggattttttgatctgtgaagttgtgcataattttggaaagctttgaagagatttttcaacggttggagcattggaggtgggaatgctggtttttatgattgcttaatgtggtgtttatcaactattattttagctttaatggagattatggaagtaatattttactgggtttatggtgacaaaggactagattgaaaagtgtatgcacttaatattttttttgaaaaatgtatggaaaactttaaatttgatggtggaacatggttctcttaatggtgatctaccatagcttctgagaaaaattagtttccaggattgagtacttgttttattccttaccgttcactaaatgaagagaaacccagttattgttatcaagctttagtaatccttagagtatagtgcttacactgttacagaattttgtaattctataaactttaatttttctagaactttagtagggaaaggaaaactaaaccaatttatgaaaatgaaaaaatgtcccaaatgaatcatagtgtacattacattgtccttagttattagtcttcataaggtgttaaaagatttaggctatgattgattcagttttcattttttagttttaaaagctattttctaaaattgttttatactacttactagattacttctcactcaaaattgatcaagttttaaaaattatattcaaaacaagaattttacaaagcaaaaaactgaaacaactcaaagatgttttctttctctttttccttaccaggctctctaatacatactttgatccagtctgagttgattatagcagtggagtgattgctctccttgcaaagacaatccatccttctcaaccagacactcacatctcttctggaatttttgttgtgttgtgcagtgcagtgattgttttgcaaggaaaacaaattgattacaaaaattccaatcaatgcctgaaacactttcggaatcaaagctcataatcaacatgcttggaatactttcatctcttctccgtctctttttctcttttttaatttttttttatcaaacaattagttttctaattttttagtttaagaaaactaaaagctcttttaaaaagggtactcaaacatgcccttatttacatccctctccaattttggaccctattgttcatagaatccagtatattgtatttttccaatatcaattttcttctttcccttgtatgtttgcataaaggctagttaatcctactttatatgaatcctctctcaccgttactcaatagagtttcagatttgaagatttcagctgcatatattatattgctttggagattacaacgaaagagattgtcactgatcatttgggttttgtaatgtcactcttttattgtatctacattctgaaaaggaaagaaaacaacttgtttagtttctgctttatccaataagtatatggttgtaatgttatcatgcatgcatatattataactttatttttgtatctatttatttgtaattgtttatagtggttctattatgctttactttggttcatttcttgtagcagcatgttttgtgtctgcacagtgttgcttctaccttcatttgtttctgtaattattttggaattgatgcaggtagaacttgcgaagcgtcttgtggcttcttcttt

SEQ ID NO: 3632 - DNA, 1058 bp, Glycine max
  Intron number 23 from transcript Glyma07g03980.1 (locus Gl yma07g03980) derived from phytozome v7.0 (chr-ID Gm07; pos 2835392 to 2836449)
gtggtgatttctaaaatagggttaaggtttagtgaagagattggatttgtatcattctgggattggagtttttaagttatcatgttcgtgatctctatttaggattctggcctggttggtgatttcggctatagatggtagggtattcttttttttggtgaacctggggtatccctagccgagatctagagactaattccttgagatactaagatctatttaaggggttgacttttcccaaagttgctcttccttacacatggacctggagattgaactcctgaccacatgtttaaggggcatgattatctaccaaccataccacaccacagtaatgttggccattgatggttgggtatgatgcccaatacacgctcagataccatgatgaattgtgaattgttttctgaagtattaataccttcccattgatctgattttgtattatacacaagaggcttccatgaaaacaagtaggcaaatatatgctaataaaaaagttataaattatctcaatctagaaaaacgtatctaaatggacacagaataaaatacatcttgggtaaaataggttcatgtggccccataaacaaggtttgcttccaacatctattagttccttgagatttacttgcttccgcttcttttctttcacaacctgcaatttgtcatgatgtgttgccatctaggttttccatcagatgttcttttaatattctttcacatcacttttggttagagttgtgttttggcttttttctgggtaccttttatttttttgttggaatttatcttgtatattataaaagggtttgatgaatttgcttttgttgttttatgaggtttttctgtgcttcttccatgtacttctcttctttatcttgatatttgtcttcacattccacaaaaaaaaactttggtgtatttaggttcatgctttgtattattttagcatttagctataattttgaataatactattccactgttatgtgctacttgctgctaattctttgatctatgcttttcagtggtacaataaattgcatccagggaga

SEQ ID NO: 3633 - DNA, 7923 bp, Glycine max
  Intron number 5 from transcript Glyma04g16260.2 (locus Gly ma04g16260) derived from phytozome v7.0 (chr-ID Gm04; pos 17345989 to 17353911)
aggaagaaagttgtggtgactgacaggttagtcattctgctagtaggaaaacatatatttttcaaggtttaaaacaactagtgttatattctgggaggagtttggaaggatgcagtgtctattatacatctctggactctggccagatttatcactttcatgctgtcattgagaccactgatcatgcaattgtgctctgcatttcttttcagtcttcacccccctgctctgccctgtgtgtttgggagaaataacccaaaaaccgttctaaaactctaacatgttgtgatactgttatttgttgtgaagtgttcttgtgtttttttgaaacatttatgaaatcatatttggtcatctgttgctattgatagttgagtgctaggaacacactctctaacacactccttcaaacacactctcggttaaaattgattgaaaactacaaaatcaggagaaacattaaatatgaacatggttgagagagatgagagagagagagagagaggtagagagagacacagagagagaggtagagagacacagagagagagagcgagggcgcgagagactgcctaggagcgaaagagagagagcgagtgacagaactcgagggaaggagagatggagcgaaaacagaagaacaccaactgggtcttcatggagacgacggagcctggatcgaaaggaaaatctgcatggtgggcaacgaatcaatgtccagggacgggtgaatactcttgctgatgaagataactggactacggtggttactagaagatcaaagaaggccacaaagaaacaaccaataacgggaagacaaacaaagaacatggaatcagggggacaatctaaacattacagccttaactggaggaacaatgctgatatcacttccttctatttcactcatttccctgaagaagttaacgaagagctgctatggggctttttaaaaagtggggcggcgttcgtgaagtttatattgctaaaaggctcaacaaggaaggcaggagatatggcttcgtgcggtttaagggagtatcggacgtaaaaggcttggaggtgagactggataacatcttcatcaatgactgtaaattgttcgtcaacctacccaggttcgagaggccagcactgaaaaaagacttgcagcagaagagttccaatgggaggaagtctcttgatggacccaataagcattgtggggcaactactggccctatgaggagatcatacgcggacgtaacgactaatggggcgtatacaggaggcgcaaagagagaggaggcaacaataacaactattctgatcaactcagaagaagacagagggtactggtgtaaggatgcctgggtcggcaagttaaagaaggtgatggaggtggggaccttagaggatcgtatagcctgggagttagggtacaacacacgcatgaagttcctcggagatgatatggttcttcttcctgggatgcctgatcacaaagcccagcacatcattcgttcggagatggaatccggaagttccctcttctactctctagagaagtggacgccggactgcaggcccaacaacagggttatttggcttcaggtgtggggattcccgattcaggtgtgggaactggaccacctcagaaaagctgtagcaaatatcggcgacgtcatcgagctagatgatgacacagaagacaaatatcgactggaccgggctaggctgttggtgcggacacctcttccgccggcgataaggacagaggttcgcgttcgtgtgggggacctagagtatcgggtatggattgtggaagagatggggcccgaagtcgggttgacccggaaagcaaactcgctgtctgagggatggtcggaggagattctatcggacgacgttggtgacgttgacgacgccatagacgacggcgacactagctcgtccttctcgcaggagatgtaccaccagaaacggtcatcggctgatacccaagaggtagagggagggaccgctgggtgccgatatacgatcagacctttgggtaaaacccaggtggacgttacttaccatgcaatgtcaaaccttgatgacgaaggtgtacaggacccctgttgcggtaagctcgaccttggagatagccatacgggacctgagaaggaagcagcaaacacaaaagaggaaatactgcaagcacgagggcagaataatcatctatcgggaagtattttgaatgctggaacaggatcaccagctaaccagagctatattgggggagaagaggtccacgtaatgcaactccactctcctctaacattgggacagacccatcaaggtgctgggctaagttataataaaggcccaaatatgatatatgaggggtgcagtaagcaggatatttaccctgtagttctgtcgggtgtacatctagaccagagtaaaaaaactggtgggccaagcaacaccataggcccaacttcgaaagctgaggggtgcaaccagcagaattcactacctgtaccccaaccctctaaagaaaccccagataagtattctaaagtctattttagacagaaacactccctcaaaaaagctcgtcctatgcagattgaaggaaattaccctcagcttcaagaaggagaagctgcttcagtaattcaaaatgacaaccaggacagggctaataatcagaataatgtggaagcaaaaaagagactaaaaagcattattgagtgtagtgctgaggtgttggaagaggctcaacacttatggcatcttggagaaaacataggcatggaggtacccacaactaattcagatattcttcaaagctatgcctctatggagtgcagagacagaaaagaagcaatggagctggggaacaggaaatcttttaaatgaatatcctgtcatataacattagagggctgggtagaggtattaagtgggcctctataaggagtttggttgggaaacataagatagaccttctatgcttgcaagaaactaagagggactttctggataaggcagtgtgccaggctttgtggggccattcagatttcgattgggggtggttccctgcagtgaatacagcaggggggctgttgtgtgtctggaacaacaccaactttcaggttgaggtcaaaatttctgaaagaggattcatcatgctggagggggtttggttggcagaaatgcagagagtagtggtggccaacatatatgctccgtgtgagatagaaagcaagagacaactatggcagatgttactctcaaggaaaaaccagtcccaggttcagccttggtgccttgtaggagactttaactgcattagacacccagctgaaagaatgggaagcagtcattacaattcagatgtgaatcttatagctgaatttaatgattggctcgctcaaatggaagttgatgatattccctgtgtggggaagccttttacttgggttaggcctaatggatcttgcaagagtaagctagatagagtgttagtctctgatgattgggtatctaaatggcctgatagttcccaatagttcccaattcaaccttgaaaggagttattcagatcattgccctattctcatgaattctaaacacactgattggggccctaagccttttagggtctttgatgcttcgctgtctaataaggattacactaaggtggtcagggattgctggactgcaaatcagcctttgggttgggggggttatgctttaaaatgcaaacttcagaatctcaagcataggctaaaaatctggagcagggataactgtggtgattcgggcagcaaggtgaagcaaacacagaaaaatctgaatgatttagagaattctctaacagctaatccctctgatcagcaaatccaagagctcaagaggactcaggctgacctatgggagcagtcctttattcacgaatcaatagtgagacagaagtctaggagtaagtggattaaagagggtgatgccaacacctcttattttcacaaaatcataaattttagcagaagaaggaatgccttgagagggctgcacattgagggtagatgggtagacaatcctgctgtggttaaggctgcaattctccagcacttccaaggtagatttgcagaaccttccttgaacagacctaatctggatggggtggcctttaatgttttatccactatccagcgtgatatgatggtggaacctttcaaaaaggaggagattttcagtgcagtgtgggcttgtgggagtgacaaaagcccggggctcgatggacttaattttaggttcataaagttcttctggaatgagctgaagcctgagtttctaaggttcttttcagaattttatgagaatgcagtatttcctaagggccttaactcatcattcatcgccctcattcccaagatcaaggatccccaacttattagtgacttcaggcctatatccctcattggctgcgtttacaaaatcattgctaaagtcctatcaaataggcttggtaaggtcatgaaccacttagtagatgaaaggcaactagcttttgtcaagggcagacagctgttacatagagttttgattgcaaatgaggttgttgaggaggctaggagatctaagaagccatgtttggttttcaaggtggactttgaaaaagcgtatgattctgtgtcttggcatttcctcttctatatgatgagacggatggggtttcatgaaaggtggattggctggataaagggctgcctctcatcagcatccatttctattttagtgaatggaagcccaactgaagaatttaagcctcaaagaggcttgagacaaggagatcccttggccccactcttgtttgatctggttgctgaaggtatgacaggtatgatgagggaagctgtgtccaaaaattgctatcacagctttatggtaggtaagaaaagggttccagtcaacatcctccaatttgctgatgacaccatattctttggggaacccactatggataatgttacagctattaaggctattctcagaagctttgagatggtttctggccttagagttaattttgctaagagccaatttggtgcaattggccaatctgaggagtggtgtagtcttgctgctgatttcttgtggtcccctgcagttcccattcatattcttagggatgcctataggtgttaaccctagaaggaaggtggtgtgggagcctctaatcagaaaatttgaggccaaactgaacaaatggaaccagagaagtatatctatggctggcagaattactttaattaatgctgtcttgacagctttgcctctgttctatatgtccttttctagggcccctgcagcaatcattaagagactcactgctattcaaagacaatttctttggggtggaaatttagaaggaaaaaagatagcttgggttgcatggaatcaagtgtgtgctcctaaagaaaagggagggttgggtgtcaaagatatcaaggcttttaacagagctctccttatcaagtggaagtggttgatgtttcagcaacaagatcatctatggagcagaattcttacttcaaagtacaggggttggagaggcttggaagagggccctcctaagcagattttctcctcttggtggtctgatttaagatctattactcagcacagcagcatggatgatgtcaataagcattttcgctggaatttgggcagtggtgatcaaatcctattttgggaagactcttgggtgggagaaggaattgttcttaaagataaatacccagatttatatcaggtatcatcccaaaaattaaagacagtggcaagcatggggatctttggggaatctggttgggagtggcaattttcttggagaagatgtctatttgacagtgaactggggggtgtttcagcttttattgaccaaactgcagtaataaccactaatgcagccttgagggactcttgggtgtggggagctgagccaagtgggattttttctacaaactctgcttataattgtatcaaagctgaccagttaccttctcagcctattactggctttcgacagctatgggaaatcaaaatcccccctacagccctagcttttgcttggagacttctctgggataggcttccttctaaggaaaacctaattaggaggcagattgtccttcaaaatgacctctgccccttctgccaaagtcaagttgaatctgcatcccacctttttttctcttgtcataaaataatgcctttgtggtgggaatttaattcctgggtcaaggaagatagagctctgcacagcaaccctatggagaactttcttcaacactgctccttggctgcctcgaggaactccaatagaaggaggaaggtctggtggatagcagctacaagatccatttggaacctcagaaatgacatgatttttaataatcagcctttcgtcatttccaaattggtggataactcgatctttctcacttggtcatggctgagggggtgggaaaaggacttcaatgttcctttccatcaatggtcttcaaatatgtctatgtcttttacctagtctgtgatttgtagggttgggcactgttatttttgatggcctttcatttgctgtttatgtacttgtcttttaggagatactttatcatatcttccttgtagtacctctggtactattattatcatatatataatattatctttggccgttcaaaaaaaaaaatatgcatatatttcctcaatcctcacacagcctaaacaatatttgcatgttgtggaatttactgaaaaaatttgtcctacttttattcctgaactgtctttggggttgacaaatttttagaagtatatttagcaaataatttgtttattgtttatacacttctctttgatttttcttcgaattttctttatatgcttgtcattgacggcaattagttaataatgattaatggagatagatctttttgaaaatatctttcattagaagggtaacttttattttatattattagattttcaaaagaatttgtttaaaaagtcatgaggggttgatccatgataattcttctgggtaaactttcaatattgagggagtaaagcacttgttaattacttgctgatctctctcttttctcactcttggacacacgcacacagaggtcaggattgtggaatgtgaacgctgtaatacttgatcttaccacagttagtaagttctcatgacatacgagattcactaatcttttttgatacatgaagggcccaaagggctgagattcactagtctacagttcaattttatgatctattttatgtaagtggaacaacaattagctattttataatgcagttgacagtttcttgtatttcctgatgtaaatatgatatttgtatatctagtttcactttcccctagaagtttacttactttcccataaaagagacagtgcataacaagcatgcattctgcatagtgtacataaagagtttagaagagtaaatccattgtgaataattatgccttatttaaattagttactcataagtagtgattttgagcaatttaatcgttgttttaactgcaagaatgaaaagaagggaggcatatcactatatttatttctacctagaagatatagtgaagcaatgccgattattcaattgccttgttgacaaattccaatgtgtcatcattctcaaagcatttgtatttggttttactgagtatttcatcattcaccgtaacatacatcctcgctgctaatgagaggcataattggtccatttggaaatattttcaatagctagaccttataattggtcatttggtttctttatatttctgatgacaatgaactttgcttataattttccttgtgaattatagttcatcttattttttgcagcttgtttagc

SEQ ID NO: 3634 - DNA, 4099 bp, Glycine max
  Intron number 5 from transcript Glyma10g28180.1 (locus Gly ma10g28180) derived from phytozome v7.0 (chr-ID Gm10; pos 36973795 to 36977893)
tagtggagtttgattatctaattacaaagaaaaaggtatgtgttcatccactgttattttaagcccattggtttttattgctcagaatttaggaaatataaatttttaagaaaaaataggtgttgtttggtttgagaaaaaaaatcagaaaatggtttatgttctcaattttaattatacaattttcaacttatttacactttgtttattgttttccaaagtttgtgttagaaacagtgaaaacaaataaaaaaattgtttcactatttcctatagaaatatttgaagacagaaaacaaagtgaaaaaaggtgacatttttgtaattaaaattaaaaataaaaaatagaacattttctgaaagtaaacagcaccatagtaattttcatttttgttaatgttttgtttatataccgtttgcatcttaccttaaccaatgctgtggttggtggaatctattaacattgggctgaaactttactttgaaaaagtgtcctatgaaagagtttttattgtctctatatgatgtgttgaattgaattttctgtccaccctgtcttagactgcagtcattttcaattttctagaacttgacacatcaaataaaaattgattggatgagataagcaatcccatttggccttgtaaaatttgttgtgcatgcactgaataatttctagatgatactttttattgtgtttgcaatataactcttaaccagggttaggttaaaactagatggaataagaaactaccaccttgagacctatatacactgccatcacgaaccatttccccacagccaccttcatcaccattcatagatgctactacttagtacttactactaaaaccattgtcacctccacctgctctcccttgaaaaaatgacacttttatctaagagggcgtttggtaggggaaaaatttttggtttcccggaaatcaaaggctaggaaacttagtttttcatgtttggtatcaatttttaaaaaataacattcctgggaaatgatgtttcctgggaatgtttttattcagtttcccacgaaaactttctcatggagggaggtgagaatcttacttttttgagtattttttcttttactgcagtaaagtatcatcttattctttattaaattattaagtggctcaacaaaatactacaggcataggcacgaatgagaggcccaaaaggaagatcaatccaccaaggcatctcatttaacagattcagttattgattgttgagctggcttgatagcagatgctgtctacctattgtctgccatttttcctttttgttataccttttctgttatcttctgcatttctgttattgtagtatcttgcacacagcatcctatatgctgcttataaatacctatggatcgtgtaagaaggtagactagaaatataagctccctttctcttctcctttgtgctttggaggcttcctagacctcgaattctaggtcccccttgttctgaattcctaacatttggtgctttcattgagctccatggctgagtctacttgttccaagtccactatggaccacattgaagaggccatcgcgaaactcacttccaatcaactcaaccttatcgctactcaaaacaccatgtccaccaaactcgacaaatttcttcagaaaatggcccatctcgaaaccagtcaacattcggccatggctttcacagtgccgactccatcgccgttgcagccactcaacacaactatcccccaccaaccacccctgcatttatactaccctccataggaccttttacgtttactgtgcccacacccgtctccacaacaaattttagaatcatcatcattatctcagaaattaactcatctttgcccttccacccaaaaactgtccactgtatcaggatggaaccatttcggaaaaaccacattgacattcaattgttgtgcaatgatgaaactccccactcttatgtttgtgccctgtggttcctcaagcaattagatgtctacttcatcctatttgatggttgggtagctgatgcatgccaactatttgatgatacaggttggttgggtagcagatgcaacattggtgcgcccctttatcaagtggttttgttctggtggtataaggagcaaaaatttggcacatgcccaacccaatccacatgaaatgcttccacatgcaattctgttttgtgccacatggaactgtgtgctatttgggaaaggtggtatgatgtctatggttgttaagtctaagacagaggattctatgaaatgtgaagttgttgatggaggagagctcaagtcaaggcgacttttgaattttagaggaaaaagtgcaacactaccttcaatcactgagaaggattgggatgatgatatcatgtttggagtggataacaaagttgacttctatgctgtttcctttgttaagaatgctgaagttgttcatgaactgaagaattatttgaagagctgtggtgctgatatacatgtcatcgtaaaaattgaaagtgctaactctataccaaatttgcattcaattatcactgcatctgtggggctatggttgccagaggagatcttggcactgagctccatattgaagagggtccacttttgcaggaagagataatcaacttgtgttgtagcatgggaaaggctgttattgtgacaacaaatatgctagacagcatgattgttcacccaactccaaccagaacagaggtatcaaatatagcaattgctgtttgagaaggttctgatggaataatgttgtctggagaaacagctcatggaaagttcccactaaaagctgtgcaagtaatgcacacagtagcattgcggacagaagccactatacctggtggtaaaatgccacctaacattggtcaagtgttgaagaaccacatgtgtgagatgtttgcctaccatgcaaccatgatgtctaacacccttggaacctcaattattgtctccactggaacggggtttcatggctcaagtggtgtttcttgaccacatacttattgtaacagacagagtggcagccacagaaaatggtcttcccccacacaaagcaacacctctatttgataagcttgcatttgaaaagacacaacaagcactaggtggacatgttcctatcgtattactaggagacttgtggaagaaatttatttctcatatacaggaattaacaaccgtgtcttgcatttcatctgtagtagcagtggttcttattgttcttaatatatatatatatatatatatatatatatatatatatatatatatatatatatagtgaggggtttgaacttggtgttcatttgacagcttgaccataactatcaccttgaggacaaggtgtttttcaatggcataggggatgttaggaagggaataatggctcaacaagatactataggcatatgcacgaatgagagacccaaaaggaagatcaatccaccaaggcatctaaaggatttcatttaacagattcagttattggttgctgagctggcttgatagcattggccagctagaagatgctgtctacctattgtctgtcattttcctttctgttataccttttctgttatcttctgcatttctgttattgtagtatcttgcacacagcatcctatatgctgtttataaatacctatgtatcgtgtaagaaggtagacaagaaatataagctccctttctcttctcctttgtgctctggaggtttcctagacctcgaattctaggtccccttgttctgaattcccaacactataccattaaatattatgggcacatgtgcagcatgcaataaacttaacaaaaatttaccagttttatatactacctcctggcccgatcccttcttttacaccattatttatcatgctcaccttacaaacccgtagtttgatgttcctttcatctcttaactatgaaaacttctaacctgcctgcttccttgtgaaactcaaatcaggagttgttttagcatcgacccattttatttgcaatcaatgttattaatagtaatactttatgttattctggttgcagcttgaagaaggggaggatttcattg

SEQ ID NO: 3635 - DNA, 1951 bp, Glycine max
  Intron number 1 from transcript Glyma13g16770.1 (locus Gly ma13g16770) derived from phytozome v7.0 (chr-ID Gm13; pos 20675101 to 20677051 reverse strand)
cctcatcaaatcccaaaggtattctctctctctctctctctctcatttattctgcattatcctgtctccagtagcaactcctaaccttaccgtgggatcctattggtgagttttaagattgttgtttactttttgcatgtggagtttgagctcaccttatgttcttcttaagttcaccactcactaatatatttggaaactagttctgggctacacttgttgctgttactattgttctgtttatggagttataaggttgacttggtggtaaaagggtaaaaggagaagggagggagggaaaggtcgtgggatggattcttcccgctaacaaaaaaaaactaacaattaaatactaacatttgtcaataaaagaaaaactattgttttgcttatgattatcaccttctcagtttgtttgttagttttgtgatggcactgatggggcattgtgttttctggcagagtttttcaaccaacttagaattgatggtttttttttttttttggtattctgtgtttttgtttttatttttatcattggaattctctggattataatgtgatccaactattttggactttcttcataaacatgctactacttcgggtttttggttgtctcggattgttttagttttgaggtgctaccatgttagcaaaatagtcttttatttatttatttttctttttatgaatagcatttgcctgattttggttccgatatggtattctataacaaaagaccccttgcccaatgtacgtcatttgcctctctctttttctgctagagtgtacactggacaggttgggtcagatttgattaaacccattatccaaattgatcaaaatactttggtttgggtgagtcggctttgtacatttttttctgttaaactctcgatcaatgacaagttgggttggattggatcggcgggtaaacaggcactttagtctctgaaagtggtggtaagtacctgagagtgggtgctgtgacatcaatccctaaaactaagaaaaatgtcaaataagtccttgaaataagttctcaaacttaggttaatcttagtccctaaacgaatgttaatattatcacttaagccatttgattttttgaattttggaataatataattgttgatttgcagtttttgagattttttttaagaaaataaaatcttttgacttagggaataatgtgagcacattttattttcagggactaaagtgactgcttactcaaaaaaatttaaaacttaaatattgctttagattttctaaacaattgtgaatactaataatatatatatatatatatatatatatatatatatatatatataataataattaataaggagcacattaatgggttttatcatctggttggccggttttaaaaaaaaaaaaacattacccaatcaaaaagtcattggatttgtacaggtcaggttgggttcgaccccaaacaactcttgaatctgaaccagtttgtttggttgtttggatttagttggttcaggttcatggattacgtggagaacacccttactcttttaagtttcaaaagctgtattttgtatattgtaccctgtctcgtctgtgagtagacatctttctgtcgtattgtattcctcactacattctaaaataattaaagacttggaaagggagatcataaatttgttgtcataacaaacttctatattttcttaaaggcttatgttttttcctaccattttttgtccaagatccagacagaatatattaaattcgatttaagaggtggagattgaaagttgtctatgctttatatattcgagtcttttatgtagctccttatatatgactactcactaaagaagaatgtcctttgagcacttctgaattgtttgcttaattagatgctcattttgtaggatataattgaaggttttgggaactaaggctgcaa

SEQ ID NO: 3636 - DNA, 6423 bp, Glycine max
  Intron number 4 from transcript Glyma09g40230.1 (locus Gly ma09g40230) derived from phytozome v7.0 (chr-ID Gm09; pos 45191897 to 45198319)
caggttattgtacctctttccctttttgttgttttgtagttatagtttggcattcctattcattatctagtattcaactgctgctagaatatctaaatattaaacattatattacaaatatacctctagatattctcacaaatgctttgtaaaatgttctcacaggttaatatagatgcctacatacacttttcccttcctcataatgattttttgttttccaaattctttgggggagaaaaaaaattgcgtgtgcttctatggtcgtgcaaagtaattttaaccaaatggatcgactagccttactccaatacgattctaaaataatgatcaagcgacagtttgtttgcagaaaattcagaaacatcgatcaggagtttctctctccacgtttagcatgaatattcgcagaaacttgaaaaaattacttcattttattttttgtgtccgttaagtgggtatttgttggaggacgtagatccaaacacccacctagtatcgggaagggggtcttctttcccaagctactttaataagtactttttgtaggtaactataaagaggatttacgtgaaaaataaaagttgaaaattataaacgaaaatgataaatgaaaactataaaggaaaaaaataaaaataatgcaggataaaatagatattattttgattgagtgtcttgttgtgaaattcagtacaaggcttatttatactgtgttaggaactcattatctattgaaccagtttttctatctataattgcctaaaacgtaacattaaggccatattcagtaaattctatgctaatccgggtgattggtagttgaatttggctgactatggtaagttcagtaagttgtggtgggtccatctttcttatggttgataacttctccttgattttaggcatgatctaaagtatccaacaactcttcactctacctttttgaacttcaaactgttagaaattccgcttcttatttatttttaagggagcatgatctttagctgatcttaactattatctatgataaaaaaaaaatccgagaatgatgggaaatcttatgctttttatcagattcatattttaattaagctacacaaattaatccgtttagtattgaaaaaaattagaaaaattcagtacgacttggccaattctgttaaggcttcatcagtcgaatggccaaccttcaatcagtacctaaggtaactaagtcctaaaagtaataatttctccaattcagctgcccaaaccctattcagccaacatcgagtgtttttgtaagtttacttcaactgaacaaacgggccaatttaactaattagccagattctaactggaagttcttgccttcagttgaccttcagttcagctaacactggaaattagccgaatctgaaactgatttcggaatggttggtttcattatcatcaattttaagtacatctatgctactgttggacattttagtgtaattgatctctttattatgttaaaataagagtacacgcttgttttaatgtaataacgagatgttcggtttaggcaaattttggaagttacatggaagttactaaaacttccatcaacggttggaagttacatgaaagttactaaaacttccatcaacgacagtttttaaagaagaaaaaacttccatcaaccgccaaaaaccacatgttctttgatcataaataatcattctggtttagaaagcataacgggtgacaaaacatacaagaccaaaacaaaactcttgaattataatcttctaattttatccgattgaacaattttggttgaaccccgaaatttgattcaatctgaaagtgttatacacgacttcagatttatccagtatcatcttgattttcaaattaaccaacaaaagattgaatcaaatctttcgagatgacgaacgatagttcgaagatgacaagcaagtttgcgaagttggacaagtttaaagggcaggatttcagaagatggcagaagaagatgcactttctcttgacaacaatgaaggtggtgtatgtgctgagtacaccgatgtcggtgtttatggaagacgaaactctggatcaagcaaggaagcgttcgaaatgagagaacgacgattacatttgtcgtggacacattctgaacggtatgtctgactctctctttgatatttatcaaaatgttgagtctgctaaggaattatgggactctcttgaatccaagtatatggcagaagatgcttcaagtaacaaattcttagttagtaatttctttaattacaaatgattgattcgaggcctgttatggaacaatataatgaactgctgcggattttgggtcagtttactcaacatgatttgaaaatggatgaatccattgcagtttcatctataattgataaactgccttcttcttggaaagacttcaagcataccttgaaacataagaaggaagagttgactctggttcaactcggtagtcatttcatgattgaggagtcactgagggctcaggaaattgacaaagtcaatgataaaaacgtagcaggttcctcttccgttaatatggtagaggaaagtggaacagttaagcaaaattacaatgctaaaggtaacaaacgaaaatttcaaggaaataagaacaaaggtccaaacaaacagacaaaattgtcatgttggaagtgtgggaaacctggtcatttaaagaggggttgccaggtgttcaaaggaaagaacaaggctggtccaagtgggtctaatgatcctgaaaagcaacaaggtcagattgtagtgaataattttaattcgaatacgaattcaaattatgtatcactaatatctgatgcatactatgtgcaggatgatgacgttgcttggtggtttgattcgggagcaacaagccatgtgtgcaaagatcgtcgttggttcaaggaatttagaccaatcgatgatggctctattgtgaagatgggcaatgttgcaattgaaccaatcctaggattaggttgtgtgaatttagtttttacttccagaaaaagtttgtatttggataatgtcttatttgtacctggtattcgtacgaacttattgtctggtatggttttaaataattgtggtttcaagcaagtacttgaaagtgccaagtacatcttgtcaagacatggttcgtttgttggatttggttatcgttgtaatggaatgtttaaattaaacattgatgttccttttgttcatgaatctatttgtatggcctcgtgtagttctataactaatatgacaaaatcagaaatttggcatgctagattaggacatgttcattacagaagattaaaagatatgtcaaaaacaagtatgattcctccttttgatatgaacattgaaaaatgaaaaacttgcatgttgaccaagatcactaggaaaccttttaaggatgttaaaagtgagactaaagtctcagaccttattcatagtgatttgtgtgatttgcatgctactccatcattaggtcataaaaaatatcttgttacttttattgatgatgcatcaaggtattgttatgtatatttattaaatacaaaagatgaagctcttgataaatttaaaatttataagaaagaggtagaacttcatcaaaatgggctaatcaaaactcttcgtacgtataagggaggtgagtattatgatccgatttattttcaatctactagaataatacatcaaactacagctccctatacaccacaacagaatggtgtagccgaaaggaagaatagaaccttgaaagaaatggtgaattccatgttatcttattcgggtttaagtgaaggattttggggtgaggctatgttgacagcctgttacttgttgaaccgaattcctaacaaaaggaataaggttaccccatatgaactttggctaaggtatatagtcaagtgtataatgggaagtctagacacttcggtgttagacacaacatggttcgggagttaatcatgcatggtgtgatatcagtggagtttgtgagaactcagcataatttggccgatcatttaaccaaagggttaagtagagatctcgtgaaaaggttggttgtgggattaggattaaagtccatctgaaatctcttatgttaagatacccaattcccatctaatatgacattaggtgctgaattcaatgtggaaagcttaacatgtagagattggaacacatcatcgaaagtatcccaaaaggaatgtgttcggttctgtaagttaaggaggttgaagtataacttctcaatggttcttttgaaaaattgcatttgcaggtgcaagaaagaaaaggactacctatataagcatgaagtttagccgcttcaagaagctgggacttggctttgatatgcttatgaaggatagggacacaggctattaaactagtgtcgagcaagagtaatgttatataaactattgtgcagattatcttcatgtattcattatgaatagagagggttcaatccttaatgacaccctgatattcgaatatttgaaatgtgtaatttgctaagatgaaattcaatcgtcacgatatttcatctatgcagtagtttgtggtatgttatgactttggtgatttgatcggtaattacactaaaatgggggaggtttgttggatattttagtgtaattgatctctttattatgttaaaataagagtgcacgcttgttttaatgtaataacgagatgttcggtttaggcaaattttggaagttacatggaagttactaaaacttccatcaacgacagtttttaaagaagaaaaaacttccatcaactgccaaaaaccacctattctttgatcataaataatcattctggttcataaagcataacgggtgacaaaacatacaaaaccaaaacaaaactcttgaattataatcttctgattttatccgattgaacaattttggttgaaccccgaaatttgattcaatctgaaagggttatacacgacttcagatttatccagtatcatctcgattttcaaattaaccaacaaagactccacttgaggaagcataccatgtgactcacacttaattaggaacttaattaggaaggttattagagtgcaagtgtgagtgagaagttcaacattggatagaaataaacatgttgatcaaaatctaaatgacaatggttcacaaacctagtatcttacagttttgagttgtatttggtgtcaaattcatttgtaaggttgtcttgtggcctattaatggagatcttcctcatactttacctcctcatattcttaaaaatactaatgaaaaaccacatatcctaaatatgatgacctgctcttatagtggcaaaaactttactcttaaactttagtcaagtttcaagatgcaaacatccaataacaaaacatccaaaatctaggatctacttcttgccatattatctgttagaaaataaaaatgagtagtgcaaacaaaaacaaaacacttattcaaagatatcattatgtcgtggaaatcattgccttgaaagaaaaattcggacctcaatgcaaatctgaaatgccgactgttctccaagattaacataacgagcttatgaacacgtgcacttgtgaccttaggctatggaaagcatagatcaattgtccagattatgaataacaaaacattaatagatacctgcagttggccattgtccaacattatcaaatatttataaatctacaaatttatataaatacctggaccaataacaattggttgtcaactattgtggaatctctgataatcaatcacatacaaaaaaggaatggtacgtgttcttccttaactaaattgcattggctccctaattaccttagtttcttaataagactgtcatctctcttcccaatggaaagaagaaaaaatatgttgttattgaatatatcatggaccataaccaattagtttcttctatatggttaattagggttcctataaatccctaatggccaatattggtatcaactcattacattcacaccaattttagaaaggtataggttcaccaaagcacaccacaccacttaaaatgaagcccattgaattaaatgcctaatctaaatgcattaaacatgacagccgcatttagaatagggaacgtgaaatccctaacaaaactatttataaatcttgaaaatcataaattctagaaaccctccactcatgtcttgaacattcctacagtatgcatgttagatatgaacaagagtgagaataaagagtattgtgtaattggcatttcttttatttctatttttatttactgttttctttatcatagacaatcattcaactttagattaatgctgaggactgaatgaactcgtgtaatatgtggcagcatttgaagcaagaaacagcaaacttg

SEQ ID NO: 3637 - DNA, 6672 bp, Glycine max
  Intron number 1 from transcript Glyma13g16040.1 (locus Gly ma13g16040) derived from phytozome v7.0 (chr-ID Gm13; pos 19947063 to 19953734 reverse strand)
ctattgacaagaaagtaacatttcgaacaagccaggtgagttatatccataattgatgcacatttttttcagattttgaaaataaatattcctggggatcttggtaatggtattacttggaataatgattgcaatgtttggttgacaaaaacattccaaggactgactctaactgccattagtggtggggagtggctggattccagtgatccgtcatcagctattgtcaacttctgacgaaacagagggtgggggattctggtgacagggctgttggtgtccactgtcaacttatcaattatggcagacagtggtggattctggtgatgtgggcagaaggtgccttcctttgtcagtcagtggtagactggcaatggcattgagttgccgaggtgtggcaatttgagactgcatgaggtggcaatcatggaaattgtttatggactacttgcatggcagaaatattcacatgctatgagaatagagcaaacccacctccctcctcaggaacgaaaactactacgagaatgttccggaaaaatattcttggcaatcatgtttgatttggaatattttagtaattttgccaaacattgtgtcagtgtatgtaaatgtgtagctgtcctgtgaaaacagttttgtatattgattgtaagggctgttagcttttgctaacaacacccatctagtgttagtcagtaattcagggagtgtaaggacttttctaactgcatttcaataggatcagttaggattggttagaatcagttatggttagttcagctgtacagaggtctataaatacctcaattgtaactaactctaactaactttttcagatcaataatatcagttttcttcttatttttctcctcttttttctcagtttattgaaaatggtatctagagccattttttcataatcactgtgtttttgcaaggtcctgttcagcgctttcatggcttctgctccttcaaacctcatttctcagttgtttcctaactctattgtagagaagcttgatgattcaaattatcttcattggcgacaacatgtcgaacccagtgatcaaattgcacaagttgcagcgatttgttgttaatctagttgttccacctcgttatctcaccgaggacaatcgcattgctgatcgcatcaacccagaatatgaaacctgggaagttcaagaccaaattcttcttgtttggttgcagtctacgctttcgaagtttatgttgtcaagagttctaggttccaatcactcgtatcaggtttgggacagaatccatgaatacatcagtcttcatattaaatcccgtgcgcgaaaactcggcactgcaatgtgcgcagtcactcttgatggaaagttgattgatgaatacttgtgcaagattaaaggatacgttgatgaactggcaggtgcgagtgttcttgttcgtcatgaggagtatgttgatgcgctcctcgaaggattatcatttgattatgcgcctgtgatctttgtcattgagagtaagaaacacactccatcaattgcagaaatcgaagccctactctatggtcatgagactaggttcacactatacaatcgcaatgctcaaatgatcagttctacgtagttaaactacacttagggttacacgcaaccaaacgcttacaaaaacaatgattctggtggttcttgaggctcgtatggccgtggcggtggtcgtggtgccttttttgatagaattccaggacatggtggtggtggttccggcaaaggccgtggaggttgctggtttgctaattttcaatgccaaatttgtcttaagtattggcacactgctaatgtctgccatttcaggactgatatcagtttttagccatgagtccctgactatttttgatcctaccacgctacaacctatcccctattctcctggtcccagtcaacccagtgccatgcttgcaaactcatcatctcatggtaatggtgcacctggctccacttggataccagattctggagccagttttcatcttactggtgattttcaaaacattaaacagtttactcaatttgatggacctgagcagattttcataggcaatggtctccaacactggttcctcaacttttctttctcccaatgatactagcataacctttaaacttcataaattgttacatgttccttcaatttcgaaaaatctgttaagtgtgagtcagtttgccaaagataactctgttttctttgagtttcatcctcattcatgtcttgtgaaatctcaggagaccaataagatcctcctacaaggagtagttgatgctgatggactctattcttttcacaacctcaagcttcaaggcaacccttctctgttgatgtccacttctgcctttgttccaaatgctaattttcctacttcaactgctactgtcaataatacctctaatgttgtttcaaattctgttgttaacacttccagtagtgctaatctttggcatgctaggttagggcaccctaatgatcatgtaatgaaaattgttctcaaatagtgtaatatttctcaactaaataaaaacatcacagagatttgttcttcttgttgtatgggtaaaagttcataggtcacctactcacagctctgcttctgtttattcacctttggaacttatttttactgacttgtggggacccgcccatgttacctcatatgctggttatacatattatgtttccttcattgatgctttctctaggtacacatggatatttcctataaagtccaaggctgaaaccatttctgtttttcaaaatttcaagtcaatggtagagttgctgcttaacaccaaaatcaagagtattcaatctgattagggaggtgaatacaaacctttctctattcttctagcctcttttggtatttctcatagactaatttgttttcactcatcaccaaaatggtgtggttgagagaaaacatagacacatagtcgatttgggtttaaccttgcaattttgggattatgcctttactacaactatttatctaattaacaggcttcctactactactctcaaatttgttgttccttttgttactttgtttaataaagagcctgattatcattttcttagaacttttgggtgtgcctgttttcctttactaaggccatatcatacacacaagttcaatttctgatcttaagagtgtttgtttctgggttactccttgtctcacaagggttataagtgcttgtcatcctttggtagaatttacatctctaaggatgttcttttttaatgaattgagatttccttatgctgatcttttcccttcttcctctagttccacaaaaaatcttgattcctattttagtctaagtcctaacttttctccaccttttgttacctctattcctcaaacatctcaagcatcacctgttaattcaggctctgctccccttgttcctcctggtttttcgccattacctgctcattcccccatcaccactgtttctttaccttgtccatctacttcttcggcatccatctctattcagcctcaaatttctgagtctactaaccctcctacatctacttcagaatctgtttctatatccaactctatcctagtcaacactcaccctatgcaaacaaggtctaaatctggtattgacaatcctagactacacccttcactttttctcactcagtttgagcttaaaactgtgaaacaagctctggcaaacaaagattggctcactgctatgcagcaaaagtatgatgtcttgctgaaaaatcatacttgggacttagtatcattacctcctaatagacaggccattgactgtaaatgtttacagggtcaaggaaaatgctgatgggtccattaataggttcaaagcaagattggtagctaaggggtttcatcaagttcatggtttttgattttcatgaaactttctctcctatgatcaagcctgtaactgttcgagttattcttactcttgttctgtcctatggatggaaactgtttcaacttgatgtgaataatgctttcttaaatggtactcttgaagaaactgtttttatgatacagcctcctcctggttttgaagttgcagacaagtcactggtctgcaagctcaataaagttatctatgggttaaaacaggctccaaggcaatggtttgacagacttaagtctactctgttgcagtttggttttgttggaagcaagagtgattcatccctattcatctataggcacccagtggatgttgtttatctgttggtatatgtggatgatataattctcacaggtagctcaaccactctgattcaacagctcacaaacagattaaatactgccatttcacttaaagaacttggtcatcgggattatttcttgggcctgaaaatcaaatatttgtccaacagtgctatcttaatgacccagagtaaatacattcgtgatttgtttcacaaaactcacatggctgaagctcattcaatctcttctcccatggtttctaactgcaagttgtctaaacatgctgatgtctttcatgatccatctctatacaggtttatagttggtgcattacaatatgctactctcaccagacctgtaatcagctttgctgtcaataaggtttgccaatttatggctgctcctttggattctcactgtagggtggtgaaaaggattctaagatatctcaaaggtactctgtttcatggtttgcttctgttaaaaatcccttggctatttgagcattctgtgatgctgattgggcatctgatgtggatgacaggagctcaacctcagggactgataaatgttagtgcttagctttactgagttttaaaagattggctaaaattttgttaaaacataagcacttagacaatgaaggaaagctggagttgctgcacatgatgtccaacgttatgtcaaggaatcagatcgggctgcacaatgcacaaggcaagataaaatgtcaaatgaagaattgaagctgcagaatccacgatgtcggatacaatgtccaggacatcctgcccgaaaatactggacacataaatctgttatacctttaacagattaatgtgcagtcagcaacagattaggcgatctatctttaggaacgaattaaaagataattaaagttcgaattacaaacttgaatagttcgttcagggattaaagattaaagataaaaactaaaagatcaaactttatcttctagatctttaagtgcagatttttcgggagaatgatagatcttatccagcgcaagttgttgcagcccagatacgcacactgctatataaacatgaaggctgcacgggttttgtaccaagtccgagattgaagagttattttgtgagttttgggacttgagtgttttgtgagccaccttgatgctaccctaacatcaagtgttggacctgagtgtgtagagttgatctctattgttcagagagcaatctctggtgtgtctttgatttatttgtaaacacgggagagtgattgagagggagtgagaggggttctcatatctaagagtggctcttaggtagaggttgcatgggtagtggttaggtgagaaggttgtaaacagtggctgttagatcttcgaactaacactattttagtggatttcctccctggcttggtagcccccagatgtaggtgacgttgcaccgaactgggttaacaattctcttttgttatttacttgtttaatctgttcatactgtcaaatataatctgcatgttctgaagcgtgatgtcgtgacatccggtacgacatttgtcattggtatcagaatttcaataaaggttactgtcaggtctagtattgaagctgaatatcgcagcatagttcaaacttctactgaattgacttggattcttactctgtggacagagttacaagtttctttcactactcgcgtaatattctgtgataatcagaatgctgtttctattgctaacaatccagtttttcatggtcgaactaaacacatggagattgatgtggtttttgcgagggaaaagattttggtgaaacagctctggatcagtgggctgatgttctaactaagcctttgtttgcgtcaacatttgaagctcttagaggcaaactcaatgcgaagtgtttccaatgaaaactctcccccttgagtttgaggggtggtatcagtgtatgtaaatgtataactgtgaaaacagttttgtatattgattgtaagggctgttagcttttgctaacagcacccatccagtgataaataactactgtaagggctgttagcttttgctaacaacacccatctagtgttagtcagtaattcaggggtgtaaggacttctctaactgcatcttaataggatcagttagttagaattcagttaggattagttagaatcagttatggttagttaagctgtgtagaggtctataaatacctcaattgtaactaactctaactatcttttacagatcaacaatatcagctttcttcttctttttctactctgttttctctcagtttatcgaaatcattggaatccagtattctgtaacaattcccattattggaaaacatttggcaaaccaaatgcctcaattgagtttattaacttgttatattctatttttgcagctggaag

SEQ ID NO: 3638 - DNA, 821 bp, Glycine max
  Intron number 1 from transcript Glyma17g33190.1 (locus Gly ma17g33190) derived from phytozome v7.0 (chr-ID Gm17; pos 36845236 to 36846056)
tgggaaggataaggattggaccatctcaagacaaggtataccactcatatatactcttgtactttttgttactagtcaaaataattccttaaaaatataagtataaaattattttttaaaataaaatatgtttctagcaagtttttggaattataatttatgtggttttagttttaattttttatgtgtgttgattttggtgttatgaattaaaaaaaaaatagtttcacaacttaataatgatttaatatagattaattagttattacactacatatatgccacctgaaaatgattatcaacatatgatatggtcaaatgtatggcatatgccattgttacgtacttatgtggtgatagagatattcttaaaaattaaaaactttatgaaaatcaaaattaatgaattttttaatatatcacaatcaaatgattaatgaagtctcgtatttataataactaaaacatttaattttaatttctgaataatgtgatttaatatgtataagtcattaaatcatttcttgagattcgtgagatgggaactaatttgatagaagtgcacaatcagaagtcttgagtgtaattttttaatgaacaaaataaactataaacaaatcttagcgacgctatcttctatgaacaaaataaactatttactcctctttctgcttgttgtcatacttttcagcttctttgttttctaatttttgttttgattttgattttggtagctttgtgtcaccgtgcatgaatgatgattaattttatccataacgtctgatctgtcttttttttatttcatttttttccagcttcaa

SEQ ID NO: 3639 - DNA, 2258 bp, Glycine max
  Intron number 4 from transcript Glyma10g08250.1 (locus Gly ma10g08250) derived from phytozome v7.0 (chr-ID Gm10; pos 7070044 to 7072301 reverse strand)
ttcttgtagatattgcagaaaattttctagagtctgtgagtattttcattttgttttattttgttcactgggctgatgggattgttcactttttgcatgtcgataaaatttatcttttattttgtgttgatatatatgttttttgtaatcaaagttgtttttactatctcatttattattttgaaccatgagctactgtatttaatgatttctaagcataatattttggttttcaatatacctccctaatttgtgtaatgcctttttgttttgtttattattatgcttttttgtttagcgtgtcttctaagttggatctgaaagtagagaacatatattgagaggttttcttctgccatctttctgattgttggacattctttttccattgcttgtacttgttatttgattctaattcttttggtatattttatatcagcaattattactgcatatactaatgttcagaaatggttagttattaattgaaaatcagtctggttctgctatgtttaataataattagataaaggcttgctgtggacatgcattttgtatagtttactattttgtttttctcctgggttgaagtaattaatattatggtaatctgaatctcaatcaatgggtttcacagactgaacttagctatggtttcttttggctggaagatggccatatatatgcatgcttgtgttcatgcatgtgtgggaggagatactattgattgtaatctaatggtaatggctctaaatcatctaatttattagagaaagaatagtgaactctcattattagtttattactttttattgcattaataagtagatagaataatcatatataattttaataaagagattttgattattcattctgaatgttaatttttaaaaataatatactgtaataattttttcagattattttaacaaccctaagctcaacatatacttttttatattgaaagtttaaaaaatttcaaagtttatttggatatttttgctcaagttatttattactacctttgtccctaaaaataagactcttctcaaatttatttgtccctttttataagtgtcttttcatgttgtcttttgcattaattattattattatttttatcaaaataccctaattattaataaatgcattctctctcttataaagattggaggagaaggagaagggtaacacacattaattaattaggtaaaaagtaattaagtgagtagaaagagatgatgagtcccaataattttaaggataattttggaaaactaatacaaattgccaacaaatttaatgttactaactaaactttcttaaagagtgtaaattagttaaaaaagtcttatttttaaggacaaaggaagtattttatatttaaatattaaatactaaatactatgctcatctttgaagtatgctgtatccatattttatttttaattacgaatgttgtagttttaatgaattacgatttacaaataaacaaaaatatcattgaattcacaaccattttattatatttaaaatttaataattacatttacttatgaaaaattacaaatttttatgaacattatacattcatatagtttgaataacattatttttaaattattgattaaagttaataacaaaaatattgcttttcattggagttatatttctccggtctctccttataaatgttaggcttcactattctccctttcattaaattacattattttgagccattaggaatgtaaaatcaatggttggatgttggtttaagttttcagaattacatggatgttcacctagtgtaatcgatttccttcttatctctgtcgtgtttttatatgtaaactgtagtttgtattggcttttaaagacatggttttagagagaaaaaaggacatgcttgtaatgaagatgattaattatgattaatgattatcagtttgtttttcactcgtttgttgataatttagccccaaaatatcataaaaaaataaaatttaagccccaaaattaatcgtcattggcttgttttatatttcctctttcctatgatttattttattttgtgatgatgattaatttgtttagaaataatcatgttctaaattgctcttggtcttctttcagataatcctcttattctgattttttttctatatactcatataagattgttttcagtaatgtccattattttatctatttaaatagataactaggtctggctgttcattagccaagcatcg

SEQ ID NO: 3640 - DNA, 10764 bp, Glycine max
  Intron number 2 from transcript Glyma01g23760.1 (locus Gly ma01g23760) derived from phytozome v7.0 (chr-ID Gm01; pos 30711120 to 30721883 reverse strand)
tagattgacattttgaaattaattttgatcttcaggtatgttccattcttgacgagacactacaagcagttggtgctaaaacaatggtggtcggacatactcctcaaactataggtgtaaattcgtaagagaatatatctatttaaacatggttaaaataacctcaagttgtctaaatttgataatgttgtatcttactatggttgaattttaacttaaatgcaattacaatatctaggtcgtttagttcattgtggatgcatggaatagtactattaattgaaattagttctttgcttcctacagtaaatacaattgtagcatatggctcaaagattgcagaatgtgcagtggagttttgaattcaagaccaaaggtaaaacaaattaatccatgagcataatgtccttaatgaatgcttttggttatatactaaatattataagagatagtcacatgtttcttaacctttcttctggttaccgagtgcccacttactgtggaaaaggcttgaatttttcatggggaatgtagcattgttattagcattggaactatgtaaataagtaaattccatttattatcttgatagttcatgtttctctaaattttgatcgacttaaaatagtttttagactgtatcttgatagtgcttgaatcaacttcactaccccatgagtcctatcactcaaaaaacaaacagaaagaatcataatcacttcaccagctcagggatatcatggaaagaggatcagcaaacacctaggtatttttgttttagatttttaaaatagtgtactttcaatgataaattgattactaagtagtgtgaaattgttatagaaaatcgtttctaaaaacgaaaatgagaatgccctaagtatttgttgcaaatacaagcttaaatgtaaaatacagtgtggaaaagataatttagatcattaaatagctctgctgtttgggttaaatgcatacataagaattcatgctaccaatgtttgaacagaaacataccttaattagttattttttatttatctttcttacattaagacttatctaaattagtggaaattggaaaactaaaattgtcttatacaaattcatatttttccaggaacaacagcaagaaacttcaatgtggcatagatggtttccctgtcacttacagaaaagacaacgagcatattggatggtccatccactcagctgaatttttcaatccaataaaccaaaacttcactaaaatcagtcttcatgcttttcattagcccccaagaaagtaaggtctacccgggtgatttacacgtcgaaataatcttaaattttattagtttctgatatacaaaatgacttttattttagtgtaaaatggtactagtaaaaagtataataaaaaataactaaaatgagtggctttttctagagccaaggactaattagagtgtttctaaagttttaacaactaaaatatccattccatgcaatcttgaggactagctagctcattagtttattctttagcccttgcacttcacgaagacctctggaattaattatgtaatttccacatttatggaagactcacttaaaccttataaatacttttgcagtggattgtatgccttcccatcatcaacacttcttgcctaatcatggaacctgaaaggtactgcatatggtgagtctgtagttggtttctatccatatgttgaattcattctagtgttgctgcattaaactatagaagtgaaacagatattgatataccagtatcacttaaagtggctaaatcttaataagtgaattctatgtttgttgcaaattaaaccatgcaaggagaaaaaaagtatttacattgatcaccattatgttatttaagctgttaaaatttggtagaccgcattataggcttgttatgtattacatgatttttttcctcttagctttatgtctgttccccctccccaatcaatcaccaaacggtgagtagttaggacttactaaggcaagatgcaaaactttcctgattgtgcagatggagctttcacaatgaataaaatactggaatttgtagattacaacaagtttccattagttacaaagctgactgaaatgaattctatcagagtcttctccagccccatcaagcttcaggtcacttttatttccaagtttaatctacattagatattcttgacttgaagttctgttcctattctgactttaactgagatattaagtgtaatatttgagtattttgcaatatggtcagtgcaatgacctgatcaatttaatacactgagatgctgcaaatattttctcacagtttcaataaaaacaaaaaatgatgcatttaatttgtgaaacaaaaaaactgggcagtcatcctagcaagtccttgatcttatcaaaatcacaatctcttttatgatttgccatgtgttgatcacttggttgccccctggatggttgatataattgaaacaaatgtgagacatttgtaaagggaatgaatgtctttttcagaacttattgagaagtacttcttacatacaaaaatattctggagaatctgaactaccaaaattggttcagaacttggccatgcttgttctcatccaatttgatcattttcaataactgtaatttggttaaaagactaatatttaatctttaagcaacttgcagaaactaagccactaaaggatgtactaaaatttactccaactgcatcctgccaagtgacttttctttgttgttaatgaaaaatacaggttgtatggactgctccttgctagttttattcatactttcctttccaaatattataaagttatttcttttcttattggaatttcaagagacatctttgcatcattttgatctatgcctattcctgctattaagaatgtcaaattaagtaagattataaatttataatggaataaatgtgagctattatgtatatgcttgtaggggatttgtatcaatgcatattttgtgatatgagtgccgagccaaattatatttaggattggaatttgatttggagagtgctgagtgaaattatatatatatatatattaaaaaaatgtctttctacatcggttgtggttttaaccaatgtagaaagtatcaatactacatcggttgtagtaattgacagatttacaaatttttacagacttcctacatcggttttaggaacaactgatatagaaatgtgttttccacatccgttttaaaaactgatgttaaaagtgcttgactttcaacatcgttagatacaacatcagttttaaaaccggtgttaaatgacttttttaactgatgttaaatgtcttttttatagtaatgttgtaagatgacataacaataggaagcaaaagagaaaaatatgttttaaggttatttggtgggtggcctagagtgtgaagttagttttctccaatatgccaatgacactatttttgtgggggatgttaatgtgaaaaatgtttttaccattaagaccattttaaggatgtttgaattgagggtgaatttctttaagagttgttttggggccattggtgtggatgatggggtggtggagaggtatgtgaaattgctaaatcgttgaatcttttctttcccatttgtgtatctaggcctacccattggtgctaaccctaggaaggtaggcatgtggctacctatcattgataagtttaagaagagattgactctttggaagcacaaacatttgccttttgcaggaaaagtgtatttgattaattcagttttgtattctcttcctcttttttatctctctttctttaaggtgccaaaggagttgtgttcaaaacttgtaaggattcaaaggagatttttgtggggtggtgatgatgagaataacaaaattgcttaggtaagttgggagaatgtgtgtaaaagcaagaaatcgggtggccttggtgtgaaggatattttggtgtttaatgaaacgatgttgggtaagtgaaggtggaacctttttaataatcggggaggtttgtggtgtgatgttgttgactctaaacttggcaagtggaaaagacacttttgaatgaggaagatgcgtccttggattctatatggtggagggatttgaggaaggtgtgtgagggtaaaagtggtgtaaaatggttttacaatggggtttcttggagagttggtgttggtgataagattagattttggaaggatgattgggtggagggacaatgcttggcatcactttgttgagattgttccttacatcggaacaagaagatgctatcattgggagtatgggtgtttaaagggatgattattggtgttgggagcttaaatggtgaaggcatactttcgtgttggagaatgatcttatagcccagcttatggctatgttggagttggtgcaagtgcgaaaatcgatgttggattcgtggaagtggttgtggtgtattgggttcctactgtaacaatttgtctcgtcgttatgatattactattttacaacgagacattaaaattttaagtgaacgttctattaatttgattatgaaaattgtgtaattttttttgcgatatacattcaccaaataacacacaaatacgtgtgtgtgtgtgtatatatatatatatatatatatatatatatatatatatatatatatatatatatatatatatatatatatataaaagtagaaccattatatatcataacatgtttaaggtataatttaattttttacatgtatttaaacttgtaatttacatattcaataaaaaaataaggaaccaattaaagaagagtttgattacaaaacacaactctcccaaaagaactccaacgttatgaggtttgctcagcgactccaacaaaaaaatctccctccaaaatcacctattgctgctcatctgttcccaagaacaaaagtttgaaatcatcacaggaaccaatcacatggtataaaattataagggtgaatttatagtgaaagattaacaaattatcaaatgacaatgattagaaaaaaaaaataacaacaaataatcacaattattctcaataacccatctgtttggcatacacatataagactaattatcaacctttcaacaatttaaatcaattatgttgggaatgatgcatgtacctaattcaactctcaaatacaatgtggtatcattcgagagaaatagcttaagtgtgtcttcttgatactctcacttaggaaaacttagaagcaactgtcgaggtcattctatcgtgcataggtcactcctcccccctctcccctatgttgatcaacatgattctcaaggtagtgtcaaactaagtgatatacccttaagtaccaacatttttttcttgtgaaaaaccacaggtatttagtgacaaagtttatattattttcacacaattatgcagtttgaaacacaggcttcaacaatgcattgaccttgaataattaaaaattttaaacaattcccttccttctccagggatgcttataattttttgaagaccaaatcccttttgcttttttagaaatattcagacaggtcattgcacccccaatatacatacacaacatgcatttatctcaatgacatcttcaacatcatctaatttcaatgtcatcattaatatcatctcatctcaatgtcatcatcaatatcttctcatctcaacatcaacatcatctcatctgaagatcatcatcaacatcaatatcgacatcatctcatttcaatatgagcaacatcacaagcaatcacattccacatttatacatgtaactcatacctaggattcacattccaggtctttagacaacatacaccacttataataataatttgtaatataacaagactgatatttaaggaaaaattctgaattaaagagaagaactattgtatacaagcaattcttaagcctatttaaaatttagtaaaagaagtaaataagagaacaaatataaatttttggacagagtttcctttgtaattaagacttttcccaaaatttcaatccatacaacatcattcacagttttattcatcaataacaaatatatttcatctcattaattaaaacacaagttttcttgaaaaatcaacatgcaattgaacaaacatacaaccccataattgggtttccaaactccaaatatgacatcaaaaactataaacccccctcacctatctatatctcctttatagttctttgtaactttgttcaaagatctcttagattctcatccgttggtccaaacacagaactttatataccaaattgaagacaatttaatatagattttaaaggcagagtcaaaattaacatttggggtcaaatacccttttaattttgaaatgagctaaaatggtgttttggggtccacatcaacagatgccattttaaaattctgatcacactaatgtgatcgaggtttagcaaaggtcacaaaaatgaaatcaatttcataaaaaagacaacccttataatgtctcactttcaagggttttttaaaggaaacatataaacatccgataatggtgaccaattcacaagagatacatagataggttttttctaattaggagaaagcataagaattgtggttacctcgaagaagccgtgaagggagggtcgagggctttgttctctactaaactcgcgagttgggttttgaagattctgcttcgattaaagtgttcattttcgtgcggtggtttgacgacaatcgacggcggctcgtggcggtcatcgatgatcgtgggttggaggaggaagaggtgggttagggtttgagtgagggttttgggagaggaaaaaggtaaattgtatttttcctggacgtatttataatctgcaagacttgcttagtgagttgatctcactaagtgaaatttaacttttggtgctaagtgagacatttcacgctaagcggaatttctcttctggttagaattacgcttaacgagctgggtcgctaaatgaattattccttctagatggaattgtgcttagcaagttggagtcgttgagcgaattgtttcctctgggtggaattgcgcttagcgagctggtgtcgctaagcgaatgttctaatgcagatataccaaactcaacataacctaatattcgcaccaaacaactatacacgaatagttcacacaacacttcaactaatccaaaataatcaagtaattatataacatcaaaatacatcaagtatctatttttggttatttaaatttcaggatgttacacctaatcataattggtgtggctttcacttattcacggccttatgctcttttgtaatatcggtacttctagtacctttctatcaatatatgtttctttgttgagttaaaaaaaatcatttaaacatttggatggagtaattcaacacgtgaattcatttttttggggaatttcaaattattcatgttaaattaacttgtttggatataatatttgaaacaaaattcaaattttagtaattttatgagtcattttgattaattaaaataatgagatttcaaattctctcaaaaaataaagaatttgaaattcattttttaaagacgctcactctcactcatggtctcgcttatgactctctttgtctctcgctcaacacttgcaactagggatgatcatggtttttacagctgacatcgacacaagttatttttttatcgacgttggccaaggatttttcagttaggatttttttgtatgacaaaccaaggctattttttggttgacaccagctaggtctttttggccgacgttgggtagtgttttttcagccaacttcggccaaggtctttttggtcgatatcaactagggtttttcggctaacatcaactaggttttttgggtcggcatcagaaataactatttcttagtcaacatcggctaagattttctcaactttcattaactaaagttattttttagtcaacattgacaagtgttttttttttttttaacaatattgactaggaattttctgccaacgtcaactaggatttttttggttgacattgactagaactattttttagttgatgtcggctagagttttttgaatgatgtcgaccatatctagttttagttgacaccgactagtgtttttcaactgacatcagttagggtttttttggtcaacatcagccaatgatatttttaagccgatgtcagctaatgttttttaaccaatgttctctagggtttttttgtcgaggttggatatgactttttggctgacatcaactagggttttcttggctgacatcgaccatgattattttttggtcgatatcgaccagtgttatttttagtagacatcaactaggttttttggtggttgttagttagggttttttaggttgtcatcgattgtgattttttcttctgaaaaaatcttaaccaacgtcaactaaaaattagctttgattgaagttagttgaaaaccctaatcaacattgactaaaaaatatatttgacctataaaacctagctagcattgcccaaaataacactggccaatgttggcaaaaaaaatcctagtcgatgtcaccataaaaacactagtcaatgtcaactaaaaaaaatagctatggccaatgatgcctgaaaaattctagccagtgtcgactaaaaatagctctgactaatattggtcgaaaaatctaaccaacattagcctaaaaaccctagccaacattgactgatgccaacaaaaaataacctaaccaacattggttaaaataaccatgcccgacatcaacaaaaaagaacactaactaatattgactaaaaaataactttggtcgatgtcaaccaaaaaaaccttagttaacgtaagctaaaacaatttaattaaatattttaaaattagatagtgtttattttctataaagtataatattcggatttcatctatttaaaatataaaaatgaaattttgcataggagataaattgaattactctatccaaacaaagaatttaaaatttaagaaatttgaattgatttatccaaacaaaatatttgaaaatgaagaaaattaaaatcaaaagaattcaaattccagacatttcaaatctccaataattttgaaaattattgtgttgtaaattatgaaaattgaaattttgatagagaaaaagaaagtaaataatgaaaattgaaattttgatagagttgtaaaaaagttaaacgttaaattaaaatcaaatcaaacgatttatttatttattagcaaaaatggggaaggggcaagagggccaatgtgaaaattaagtgaaattctagaaaaaaggcaatggtccttctatatcattatattttatcctgcctaatggtaactgattctttataataagaaacaaaatacagttcaatgaatgttcccaagcttgatgcatgatctcatcatttatgaaggggaagaaactcaatcaaaggaatatatgtagggaaaagatagcaattgcattataaattcttccaaaaaaattaataatattaccaaatcattatcctgctcattcaattcaacatcaaaatccagatcagagagggctaataaattttcatctgtagtctgaatagcatttgttacaacccccaatagaccttcaagttcataagtatttccttagctgcaagacgtgtatgactagctaattgtcaaactaagtgcatgtctaggaaagattaatttttgaaaataaatacttgtttttaaaacttttctcaaatagtaaaaataagcattaagaaaaaaagctgaaggaagcaacaaaacattttcacaaaggagcagccagaaggaagtccattacgggttaagtaatgcagattacaaggcaatattgaccaatgaaaagaagattcctccaaattggaatacgtcttcataaattaagtggccacgtcgtttcaaagtcaatgctgaagacaattatgaataaaggcaacgatccaaatggttaaataagtaacaagtttctctttgaatattcagaagagaaatatatattcaactctatgaaatgatgtatataggcttatcatagcatagcagtcaaggatcaatcatcaatcatcaatcatgaaataaaaaggaggccatacctttgattttatggttacagagtccatgtgtgcatgagtgcacttccgtatgcagagttaaccatatcgaaacagttacatagtcatcagaaaaatagtaataaaattaaatgagtagaattcaaattgagatttcataacaaaaaaatgtacaatgttgtttcaagcatagatattttatggaacaaaagacatcaaatatgattatttttgtgacgttaatcaaaatttctcaacagtaatacatgtcatgatagaaaaaaaaaaaagcatagaagaactagagggaaactgaaaatgagagaaaaaaggagacatgatagatgaaaagaaacaagattgcaagcaattgataagaaaatcggaagaaccacattgcaaaagctagaaatattagttggagaatccaacgccttataaaccccacacaaaaatcccatacttccaatgtgagactcaagtctcataccttgtaattggatcctcacattctcgatgcccactgatctgaaattgcagtttcaaggaaattattgtaccactgatctgttctatttgtaatctagccatgttttgtatgtttagatct

SEQ ID NO: 3641 - DNA, 8720 bp, Glycine max
  Intron number 2 from transcript Glyma15g35450.1 (locus Gly ma15g35450) derived from phytozome v7.0 (chr-ID Gm15; pos 40102853 to 40111572 reverse strand)
tattcagggctagaagaggttcgtgggtctattgcatgtttccaaaatacttgcttatttatatctatgctttgtaacaaacacattttaatttgtttagtaatgatctccatcttttaagttgctttatatatattatgttttatcaaattttgtaataaataagacagtttaattcatatatactgtcagtaaaatagttttacgaagacagccaataagaatttgtcttattgctacatcatattaatgaataggatgacattataaagtggtagaattgtattggatgagaagtaaaaaaaagttcagcaacccatctgaatacatgagaggtaaaaaaacgtttaatttaatcaagactctaaagactaggcaactttacagtttcattcaaccgggcgtataaatttataatgccttgaatttgctatagagaccgtttgagttcatgactatgttatatgtcatgtactaaacatcctaaaagtttaagttgtttggtgaagactcataaatgtacaaacccacattctttgtgctgaactttaactttgttataattatgtgtatcttttgatagattttctgtttttagcttccttagtctcctgcttagcttgtggtagaagacagcagtatggcttgtcttgtcaagctgtctctatccctttttgatgtatatatatatgtattatttgaatgtaataaagtaagcaagtgagtgaacagtcttcttcctcacatattcaaagtttcaagttggcatgagagctggttctctgaccactatcgtcgccgtcgccgtccgccgtcagccgccgtccgtcgctgtcaccgccgtcaaatttgccggcgagttcagggttttgtgcgcctcgaggagcgcgacacaaccccgcaaaccgctctacaacagtgcctcttcccggcgcgtgaagcccacgcgccgacctccggccaccggaatcgcgccggacttgtctcaaacggagcgtcgtcttcccctgtcttcgttccagcctcgggtgcagtgtttacgtgtcattttgtgcttcctcctctctactccgttaggttttttgttttttccttgacaaaaatggcttcttccggtcctgttttttcattctctggaactcccaccattactactgccaaactcaactggaaaaactatatgtcttggtctgcttccgtggagttatggtttctcggccaaagatatcatgatcacttggaaaagggagttgatgctgttccgaatgacaggagagctgaatgggaaaagctggattttcagttgtgtgcagtgctatggcaatctgttgaatcggatgttttggagatccttagatcattcaaaacatgttgctctttttggaagaaagcacaagagatatttgccaacgacattcaaagtttgtttgatgcaacctagaaagttgttgctctcaaacaaaccagccatgatatgaatgcgcatgtaggtaaagctagagcagcagtggaagaactgaagagatttcttgcagcaaaatcgttggaggaagtgaataggaagctggacaagttctacatggtccttatcttgagaagtctacatttagattttgataatgtgcgtgatcaaattcttgcaggtgaccaagtcccgtcaatggactccctcattactagacttcttcgcgtgcctcaagccttgaaagaagaaaatttagctgaaagtgtggaaacatcagctatggttgcatctcgtggaagagaaggaggtcgcaacaatagaggagactgtggtggaaggagtggacgtcctcaatgcacatattacaagaggatgggccacacttaagagaattgttattccctgcatgtcttccttgacaaagtagctcaggtagctcagaccgaaaaatcagagcctaagttctctgatacagagtatcaggagtatctaaagctgaaatccgagaaatccagcagtcaggcttcatcttcctctgtaccatgttattcaacaacatgtatttttcaatctattgacggtctcagtccttggatacttgattcaggtgtctctgatcatatttctgataataagttctcttttacatccatttcttttccaaaaattcttcatcttatcactgtagctaatggttccaaagttgtagctcaaggaagtggttaagtatctttatcttcctcattgaagttggactctgttttgtttattccacaatgtccctataatttaatttcattgagtcagttaactcgttcattaaattgctcagtaacctttaccgctaattcttttgttatccaagaacatggcacgggtcgactgattggagaaggacatgaatcacaaggactttactacttgaagtccaacttgtctgtctcctgttcagcaacttcaaatcccaaacttttgcatgatcgtctaggtcacccaagtctaccaaaattaaaattgatgatccctagtctgaagaatcttcgagtcttagaatgtgaatcttgtcaactaggaaaacatgttaggtcattctttccacaaactgttcaaagatgtaattcagctttctctaccattcattctgatatttggggaccaagtcgtgttacatcttttgattttcgatattttgtaacttttattgatgaattctctagatgtacttgggtctatttaatgaaagacagatctgaacttttgtctatcttcatgtcctttctcaatgaaattgaaaatcaatttggaaaaacaattaagattttcagaagtgataatgccaaagagtatttctctcatgatttctcttctttattattttcaaaaggcattctacatcaatctacatgtccccatacactacagcaaaatggtatagcagaaaggaaaaattgtcatctccttgacaccgcacgatcactaatgttagtctctcatgttccttcacaccattggggggatgcggtgctcactgcttgtttcttaattaacaaaatgcctttctcttcccttgataatcaaattcctcactcaatcatttttcctcatgaccacttattccatgttccacccaaagtgtttgactgtacttgttttgtccatgatctctcccctaatttagataaactttctgcccgagcaatcaagtgtgtttttttaggttattctcgttttcaaaagggttacaaatgctactctccatctaccaggtgatactatatgtctgcagatgtaaccttctttgaagacacacctttcttttcatcatctatggaccattcttcttccatccaaaatgttcttccgattccctctccatgtcctctaggtaccttaaaccaagatgtcagtgaagttccatcttctccaccacatccacctgaagttgctcctccacctcttcttacatatcaacgcaggacacagccagttggttctacagtatctgaagcttctcctcctgattctcatccttcttcaatcaatcctcaagccatggatcctgctacttctcatccctctgattcagactggcccattgccatccgcaaaggtactagatcctcttgtaatcctcaccctatctataactttctaagctatcatcgtttgtctccttcatattcttcctttgttttctctctatcttcgcattttgtcccttctaatattcatgaggcactgagtcatcctggatggcgacaggctatgattgatgaaatgctcttgaacatagtggtacttgggaacttgttccccttcctcctggcaagaaagttgtgggttgcagatgggtttatacagttaaagttgggcctaatggtgagattgatggacttaaggctcgcttagtggctaaaggttatactcaggtatatggccttgattattgtgatactttctctccaatcgctaagatcactactgtccgtctgttccttgctatggctaccatgcgttattggcctctccattagcttgatattaaaaatgcatttcttcatggtgaccttgaggaagagatctacatggagcaacctcctgggtttgttgctcagggggagtatggtcttgtgtgtaagctgcgtcgatccctctatgggttgaagcaatccccttgggctttgtttggtaaattcagtcatattgttcaactctttgggttgaaacgaagtgaagccaatcattctgttttttattgtcattcatcccctaggaaatgtgtttatttgatagtatatgttgatgatatagtgattacagggaatgatgctactaagattgtccagctaaaggagcacttattcagtcatttccagaccaaagacctagggtatttgaagtacttctttggtattgaggtggctcaatcaggagatggtgttgtgatctcatagagaaagtatgctcttgacattttggaggagacaagcatgcagaattgtagacctgttgatagccctatggatccgaatctgaagctcatggcagatcaaggtgaaatctatcatgaccccgaaagatataggagacttgtgggaaaactaatttatctcaccattacaagacctgatatttcctttgctgttggagtagtgagccaatttatgcaatatccccgtgttgatcattggaatgctgttacatgtattcttagatatataaagagagctccgggacaaggactgctttatgaagacaaaggtaacacacaaatatctgggtattgtgatgcagattgggctggctgtcccatggataggagatccacatcaggatactgcgtctctattggcggaaatgttatctcttggaaaagtaagaagcaagctgttgttgctcgatctagtgcggaggctgaatacagatctatggctatggtcacatgtgaacttatgtggattaaacaaattcttgaagagttgaaattctgcaaagtggtacaaatgaagttatattgtgataatcaggctgctcttcacattgcttcaaacccagtcttccatgagaggaccaagcacatagagattgactgtcactttattcgagagaagctactgtccaaagagattgtcactgagttcattaattctaatgatcagccagctgatattttgactaagtctttaagggggcctaagattcagtttatatgttccaagcttggtgcatatgatttatatgctccaacttgagggggagtgttataattatgtgtatcttttgatagattttctgtttttagcttccttagtctcctgcttagcttgtggtagaagacagcagtatgacttgtcttgtcaagctgtctctatccctttttgatgtatatatatatgtattatttgaatgtaataaagtaagcaagtgagtgaacagtcttcttcctcacatattcaaagcttcaagtaacttctaattttcattagaagaatggaagtgacaaggatcaaactttagaccatttggtcatagaggcattgctatatcatgtcatgaaccaactatgccaatagcttaaattgtcatatgaagacacatgattggttttatattatacataattttttgtctacaagcttttgaatttaaggttgtaacatgttaaaatagaaatgtcttgcccttggtgtgccttgttgccaatcattacgaagttggtcccatgcttggttgaaaaaggagggttgtgttaggtagttgataaccagtgtaaaactttgttgaatgtttacgacatggattgaaattatattgtgtaaataatagattattactaacaaataacacgtttgtatgtctatagtacagtgagaaagcaagctttactgctttagtgttgaatgcagtgaaaataaccaagggttccaacgcttcctgaacatgtgtgggtaaagaagcttggggagagagagcctatccaacttagggtttgggttcttgatgtagttgttaatatgagggtaatgagaaattcccgtgacagaatcccatggtgccaaataaacagattgaaagtaaatgacctctttagatgaatatttttataagagatttgatatgcacaagggagggctaaccgtttgtggaactagaaagaaatcattggatggattcagaaggtagccagacgacacactcagtgaatcaaaaggcttttgccttggacctaaggagaaaagtcttgatgatgggatgctagagttgaagagaaggttagcgttattgcaaggaatttatgtaaagatggttttattttttttatgcaaaaatgatgagagcaaagaaaacattaatgtagctacaaaggatactaaggtggttaggtaagcgaaacttaaagcttatgaatggttatactaatctttaagcaccacacatggggtaaagaattaagcttacattagggcagaaaaagaaaaacaagagacttaaatcaagtgaaatgcatttggaacagagaaggtaaaggcttagattctaaatgagatatccacataagatggaggagttattttctgaagttattttattaaggacaaacaacattaaggtactcagaatattttatacaatacagtggagtcgatgacaagtattatacttgttgtaaaatttacaagtggaggcaaaataagcgtcaaagaggatggacaatggtagagcagttggaccaaattaaaacatctattgaaatttggaaatgtctaggtaagaatgaacattgaaaagttttataaatatcagaatattgtggtgaatgacgggaaatacaaagaaaaataaaaagctttggaatgaatgtgttagataaaaaggcagtagcatttattgatgtaagatgataggatttttcttttgatggtttggccatttgagaataaagaccaataaaagttccactatgaagaggatcaaagatgatctgatactaataatatggatacccactaaaaaatgtaagaatctgtaacatccaaattccccttgatacatagttgattcaatgttagaaattttcagttttctgatatgtaaattttccagtttctgaaatccattacatcccataccaatccacttctcctctttacttatttcactaaataccgaatgtctgaaaacagagcactagctacaccaactgccaacacatgcttacacacaactactgtcttacctcttttggtctgccttctatatgcatgagatgtcaaccaccacggtttcaattttttcctttgtacagtttgatgctttacaatacattatagctactgagtcaccaactgcctcatttgatgaatttttgttccataatagattatatatggtataaacttatatgttcttagaatttaagttcaagagctaacttaactccacaaaaccggcttgaaaagtgagggctacccaagccttataaagactacattggtcctatctttaatcaatgtgagatctcaacacttatttcacgcccaagacttgagtgtggacaaatgcaaggtggaccaataacaataccttcactcttgagaataaacatccatagcatagagcatagacaaatacaagtagcccaataacgaatctaggataagttttgatactatcttagaatttggacttatggtcaaactcaattccataaaatcgacttttaaggtgatgattgtcataacctttataaggattggacctctggaacgtggacaagtagcccaatagcaacacccccacatgcctagaaataaacatctagagtggagacaaatatgggtgatccaataacacctttctatgtctaggaaaatacatctagagggtagacaaatatggttggcctaggagtggatctaggatagattttaatactatattagaatttgagtttaggtctaacacaacctcaaaaccaacttgtaaagtgaagattgtcctagtttttataaagactacattggctctatatctctaattgaaaatggatttcaacatatactatattaaactaaattaaattcaacatatgtacatttatgcatatgcgtaaattaaattcaacatataacaaatatgtttttggttttgttttttggacttgtaattatatgtttattatgttttacaatttttaatgcatatttatgtacatactctacactgaccgcgtcctatatttttttgggaacaatcatatctgtgccatatcagataagtttcatattcaatcatcatattgtgtttgtgcatcacaggtgatagtctactgaatagagtactagagaaaggccaagaaaaacttagagaaacatttgaaatagacttatatttttatgggtatgtgaagactgagcacaatggctttttttatttcatgtcgctgattccacctaatcaagaaatgctattgttagtttttttttttttttttgtcattgtgcatatgctgatgtgcatttgtgtcagactagtgcagcctcccttgttatttaagtttcctcatttgtcttcgtgcaagattttcattttttatttatggagcaaatccaaaattttggaaatgtgctatgtagtgtgcttctcacatgtttgttcttatctaacaaatgataatgcttttattttctaccccattgaggctttctatctttctgtcttatgcttaatcttatcttttttatttgataaacag

SEQ ID NO: 3642 - DNA, 547 bp, Glycine max
  Intron number 2 from transcript Glyma11g09620.2 (locus Gly ma11g09620) derived from phytozome v7.0 (chr-ID Gm11; pos 6860031 to 6860577)
gttatcctggatcatctgctccacgtatgatttctcgaattttattcttcattattaaatctttaatcagcaacactaattattacaattccgttgtataactcttgaaactactttgggctaatggtttaactggaactttttgagatttgagatactggtgttggtgtcttctaaaccagtatataatacgtgtgatttacgttgcaaattccacatcacatgcggattgtttagcctttagctgaaaaaaaatcataattagtgagatttctaacttgaacctttggtaaatggtaactggtaattagatttgtgaatgcattatcccccctcatttttctcctcaattgttatcgtagtttaattttgtatttattttggctgtcatctattatgtttgaaacttgctatgtgtttatatgattgtattttattcaaactcagtttacttgtgcattgcctattggaaaggtttttctgctgactatatttatagtaacatggttgaaaggatctaacttaagtgatttgtcattaggatctc

SEQ ID NO: 3643 - DNA, 7996 bp, Glycine max
  Intron number 1 from transcript Glyma09g13250.1 (locus Gly ma09g13250) derived from phytozome v7.0 (chr-ID Gm09; pos 14667291 to 14675286)
atattgggatttcaggttgtcataatccatactatgtaaatttcttcttgatttgttgttttctatgtttatgttttttcaaaatccccaaacttacaagaacctatgaggagcaccaataaagtataaagcgcaaaatagagacacaatttgtttaacgtggaaaacctctcaatgcaagggtaaaaaccacgggtcgtccaaatcaaagaaataactccactataatcaatgaagatacaagagaaccttcaacaagtgcactaaaaggtgttacaaacaaccaaatcaaaatagacctccaattggtacaatagagacaagaagataaaactcccaaaatatagaacagagaaagcaaaacacttatctctctccagatatgacgtgtgtacaacttgttgtccaaacatcagcctgatccaacggtgaacgaatccacagttgcaatctaaaaaacgctctctggtgggtatgcaaaaatcacaatgattttctctctcctttttttctctctcaatgatttgtaactattttttcctctcaaatgagtccctctcactgtatctcactctctaatctgacctatctccacttaaataagtgagacattcgggtcttttcatttaagcctttactccacataggaagggagcccaaaaaacccaacaaatctccccctcacaactatgtggaggtgactgccaaaccgacaatctcacaacaagcttcaaacttccctcttagtgatgccttagtcatcatatcagcaccactaaaggatttcaccttcaaagggccacaaacatctgaatgcaccaattcaagcaactcagattttatggagggaggaagcttcttgaaggatactctagtttgcttaccaaccatgcaatgagaacatttctccaaatatgcattcttcagtcctggaagcatatccttcttgactaaacaatttaaccccttctcactgatatgactaagcttttggtgccacaaagatgcctccatatctagagcattcacactatctctagcaaccaaagcttttgtccaatacaacttcaaaattttctcccccttggccacaaccaagttacccttggtgagtttccactttccagaaccaaagtggttatcataaccagcatcatcaagtaccagcacagagatcaaattaaagcggacatttggagcatgtttcactcctctaagtagcaactgcattcccatgttggtttgcaaacaaacatcaccaacaccaatcaccttggacacaccatcattacccatcttcaagactccaaaatcacctagagtgtaagatgtgaagaactcattcttgtctgtaacatgtagtgtagcactactatcaattatccacatgctctcatcagagaaaagattaagcgaatcagggtcatggagaataacaagatcatcactggtaacagtagtcacacagtcatcatcatgatccttctttttttgcttgcccttcttgtctttattctccttcttccatagaaaataattcctttggatatgccccattctgtgacaataatggcactcaacattcttgtaccgagacctggacttgcttctgctcttgtctctatcaccctttatatgtgcctccatcgttcaagcaagtagaaaaacaacgccttcaaagagctctggtaccactctgatggggtaaataggccaacacaataacaaactctataacagagtaataggcagcggaaatgaattcccccaaacttacaagaacttgtgaggagcaccaataaagtatagagcgcaaaatagaaattaaagaaaatagagacacaatttgtttaatgtgaaaaacccctcaatgcaagggtaaaaaccacgggtcgtccaaaccaaagaaataactcactataatcaatgaagatacaagagaaccttcaacaagtacactaaaacatgctacaaatagccaaatcaaaacagaccctcaattggtacaatagagacaagaagataaaacccccaaaatatagagcagagaatgcaaaacacttatctctctctgcagatatcacgtgtgtagaacttgttatccaaacatcagcccaatccaacggtgaatgaatccacagttgcaatctgaaaaacgctctttggtaggtatgcaaaaatcacaatgatttttcctctcctttctctctcaatgatttgtaagtgtttttccctctcaaatgagtccctctcactatatctcactctctaatttgactcatctccacttaaataagtgagacatacgagccttgtcatttgggccttttctccacataggaagggagcccaaaaaacccaacaacgttgtgttgaattgtgaattgcatattttacaagagattctgctctagaaattcatgatgtcaacattttggtctattctgtgtgcaacaatcttggacccccccctttttatgtttctggaagatgtgattcccaatgatgttaaggcaattcttgctattttgcctgttagagctgttaaaacttgttgtgattgaaaactctaacaagagaggcattgtgttgaactgtgaattgcatatctgaaaagagattctgctctagaaatccaggatgtgaaaattttggtctttctatgtgtaatcttgggcttttcattgtcataccctgatgtgtcatcattttctcctatttcttaatcctttttgtcaccattttaattattgattagccttaattatcaaattaattatgcagttttatcatttgagcctattggactaattttgtgtttttaatttaatttcaggagaattataagcaattgggcttgaatccaaaattgggcttggacttgaagagagtagacaattttatcaaatcttatcttatctagattttatctaatctagatattatttcatctagatcttatcttatcttatcttatttagattttattttatctagattttattttatcaaatcttatcttatcttgtatagattttattttatttatgggcttggacttaaaatagatttgtaagctttggggctgaaaatatataacaacaccaaggctctagtttgaggaccctctctctcctttttcgtttttagttttaggcttctcttcttcttttagacactttttcgttttggaagaataattctagttttcttcattttctactgattaatggaaggctaagtctccaacgttgttttctcttgaggatcaagcacaactctctttgaggttctattattactattaaattctgatcaatttttcctcttcaccaattactttgtatttgttgctattaatccatgcatgcttagtgcttgattaattgtctctgcacttaatttgcgttcatgcttaatgatcgttcatgattaattggtgtatgtgttgcttaatcacataatgaatgccttatgttaaatttagcttagtaatttaatttagggttggattaagtggttgaactgataaaggataaattctcgtaacctgggataagagacttgcttgtgaataaagcggaagcaacgtgtttcaattctgatatttttaattcaaatttacttgctgtttaatttacaaaaacaaacaaccccccccccccccaaattcgttactgttttattactatttgttatgaacgtttggttgaccattgctcgttgggagacgacctaggatcacttcctagatactgcatttttaatgtttatttgattcgggtatggcctcgatcataccctgatttcgctcaggaactatcgttcgttgatcttttgatcctcgctagtcggcttatggtgttgaatgctagttacagtgcaaagcaaggaaccattcagtgtttcgatcaggaaggcaaaaaataccaagaaaggagggaaaaagggtattttccttggttttcctggacctcagctcgcctaggctagcctctgcctggtttggaccaccaaatgacttcaaggttaagaaaccagctcgcctgggcaagctcatgacttcaggactaagccttagctcgcctaggcaagctgccattgccccaagtgacccttttcctataaatatgcatgctagggaggctgagaaggggttcgaaagtttagaagtggagggaattgagagaactaagaaagaagaagaagaaagaagaggaaatgaagccgaggtgctaccgaatcgcgaccgggatcattccctttattgttttcttgttctgtattcttcgttcgaccgtcggttagttttatttttgaggattaaatgtgatctatgtacccttaggggtcccccttgttattatgtgcacatccatcttctccatctatcatcggcaatctcatttttctttgtaaagttcaatcttaaccaatcactagtgttgtaaagttgtctttaaagagattgaaagttaataaacaaaaccaagataaaaacaactcataactaacttctttttatcaaatatcacttaagatcatttcaaggtccaacaccttaacgattctttccgcttttcaaatttaaaagatcattttaaggtccagcgccttaatgattctctccgcttttcaaaatttaaaacatcgtttcaaggtccaatgctttaaacgactttttgttctcaattaaaatgaatctttcaaaaacataaaaatcaatttaacacataaatattcagacttaaagaattacataggtttgaattcctcatcgcacctgaggatacataggagcaagggcagtccccttgtcgacccaaaaaaaataaaaaaaaatataaaaagggaaaagtaaataattttaaagtcacgttacgcacactcgattaaaggctgtcgtcccttgtgacgggcgcgtggggtgctaataccttccccatgcataaacaactcccgaactctcatttccaaaattcgcagacctctttttggtttttctaacgttttcctcgaataaacattggtggcgactccatgcattttctccctagcagacaaacgctttggcttatccattttgccttcgccgtcccatcgtgaggtaggttgtgacattcatgtttctaaaagatgtgattcccaattatcatcccctcagtataattagaaaaagggtcctaaaatcttagattccttagctacaatgataaagacataaagtttataccataaagtcccaacagtgaattatctcgtcattcattttgccaccgatgcaaattcaaccacttcccaccctaccaataattaacaatataaagcattgttattacccaattcttgttgagataacaaatattgtgaatcaagttcaatctccgagctttaacaaaacaatcatggaagtcctcagtccaaattcagactcaaattgtttttgaataattcatgctcattatatgtcttgcgcttgctatgagatgttattttccttatatgtgctaatgaattcacctatgcttcatggatccggtgacaaatagctctatttttcttttgagtaggttttgaattagaatttagtgaatggagaaaataggtgttaggagatatttgcttccttaagttcacccggatcaacttagattagtcaaggttgaacatgtcatttgcaataccaaagatctcaaaaaaaaaaatccatagtcttgttaaactcaacactgcaccatgcacaggatcatgataaacaactttaactctgtataggttatggatgccttaatgccttaaaacaaaatatattctattttcatttttgaggagccatattttgttttcatactttgttttcatttttaattattaaagttaccttagttttcctgtgtctcttattttcaaatgtttgtaaaagaaacagtgaaaaaatgacaataaaaaaaatgttttcactatttcatatacaaaataaggtgatattttttaaaataaaagtgaaaccaaaaaaatttttcaaatcaaattgttccttatcacataaatgtagaagtaagcttcatgatgatgaaccaaacaattttgatgatgccaaaagcccaagtgattgattcaagattgattcaagacttcaagatcaagcatcaagaatccaatccaagattcaagattcaagagaagaaatcaagaagcaacaagtcaagacttcatataggatgagtattaaaagattttttaaaaaaccaaatagcacagttttgttttacaaaagaattttctcaaattttctaagataccagagtgattactctctggtaatcgattactagttggcagtaatcgattaccagtgaccagtttggttttcaaaatattttcaaatggtttgcaaagttccaaaatgattttcaaatagtgtaatcgattacactatattagtaatcgattacaagtgaatctgaacgttggaattcaaatccaattgtgaagagtcacaacttttcataaaatacattgtgtaatcgattacacctttgtggtaatcgattaccagtgaatagttttaaagaaaaagttaagagttataactcttaacatggttttctcaaaatttataactcttctaatgatttctttgaccagacatgaagagtctataaaagcatgactttggcacacgttcaaaatatatgatattcttccaaactatcctttttcacaatctttctctaaccattgcccattgttttttctttgccaaaaagctttctaaactttgtttcaaaactttgttttttttctgcaagtggaaattctgcagaaaacaaaagtgtgctatcttttcttccttcttcctcttgccaaaagattcaaaggactaaccgcctgagaattcttttgattcttccttctccctctggccaaaagattcaaaggactaatcgcctgagaattcttttgattcttcctcttccctttgaacaaaagatttcaaaggactaaccgcctaagatatcttttgtttccctttacaaagattcaagggactaaccgcctaagaattctttgtcttaacacattggaggatacatcctttgtggtacaagtagagcgtacatctacttgggctataatactgagaacaagagatggtacatctcttgtggatcagtttaagtggagcgtacatccattttgttgttcaaagagaacaagggagggtacatcccttgtggatctttgcttgtaaaggattttacaaggttattggaaatctcaaaaaccggtggttgcttgggaactggacgtaggcacaggttgtggccgaaccagtataaatcttgtgtttgctttcttcttccctacactctttatttttccgctgtgcactttttatttccactttacttttgtctcagttattgtttctgttctttactttctcttaacttagtagtaaagcctaattgaatctagtaacattaagaaggatacatttttaattagtcaagacacgttcataattaattcaattccccccttcttaattatgcaacacaatgaagaggttggtaatatgaagccccaaatctatagtgaattttccaatatgcttgagaacacaaacaagttatttcttgatacttgagaactcatgttgtgaggaactgaaaaagggtaaactcaaaattgtttccatatttgttatattatatataaattgtctttagattatcttagagtattttcttgacttgtgtccttaattttatggttttttctaatcattaatcaatttgaggttgtatttgtaatactagtaattgacctaattactcataaataagagtattaggttaaagtgatatacaacattacatatatttcactattttagtttattgttagccatctctctcgttttctttttccttagaacctaaacttatttctgatgcatgttttatggttaataggtggggttacatcc

SEQ ID NO: 3644 - DNA, 4715 bp, Glycine max
  Intron number 2 from transcript Glyma02g02690.1 (locus Gly ma02g02690) derived from phytozome v7.0 (chr-ID Gm02; pos 2054520 to 2059234)
aagtggagcagcctgtttttcagtctcaggagaaggtataatttatagtgcttgttggattggttgtttttgaaaagttagtgtttggaatgcgttgcttgttttgaattggtaaaatgggaattcagctgagttaagttcatggcttgaatgctgttatgtctttgttggaatgaagtttaaattttttggactgctttgggactgaagtaccgtagatgtcaacattactttatttggttggataaaatgttgttgggaagtgatagaacttttgttgagaggtgatttctgtttatggttgcacaggtaagaggggagggatgtgagaaggatgtttgctgatttgtttgttgtaattcttctgctgatacatggggttagggaaaaattaaattagaatctcattgtgtttcttagttttgaagaaaatcattatatttcttctccggtgttactgctttatgcagtggacttgaagtgtatttattaatttatatagatgaataagcatggttaacctcattatactttctttgttatgcaacctggatgaatgtagtattgatgaagtcgtgcttaagaatatgctctagatttacatgtcccagtgacttaattgaagttggcaagttactcatttgcttcggctacagctgaaatgctataggaggagggtatctgtaatatactgtactactgtgcttaagctataaaggggcatgagacctataaataatttgttttctatcatgaatcatgagttataaaaaatatagaattatgcaatatatatttgtttaatcatggttatcaaactcgggagactaattaactcgtatgagttgacgagtctacaggcacggtcttgtttaacttggtggcaaattactttttgtgtgtatttgtagcagactcgcaatcttgaggctgaacaagtttgttgggtcaatttttaatccaaaacacatgtcgttttggttgtttttagtgcatttagggacatggttatgtgacctttagcgttgctggttatggcgttgcaacctttgttgtgggtaaggcactgtgacctttgctgttgtggacagcctttgtgacctcccactcctctgtgttctcttgtctgtttgtggcagtgctagctaaaagcacctgatgggtcgggtcatagtcagggtttctttctttatctcttgtctgttttgtattgttgggcctctgtttgagcccaacaggtatttttttgtttttttatgaaaacatagcatataatatataatcaactaaagaataataataatagtaataataataaatataagggtattataaaagagaaaaaagattatgcgctgacaatgtaaaaagttttatgcagtcatccaattacaactcaccatgtatgataagtttgttgacttttaaaataattatgtaaaatgatgaaatgtgattggatgacggtgttttacaccgtcagtggataggcattaaactcattataaaaaataaaaaaactatttaaagcataatatataacagtgatataataaattaaataataacagtgatgaaaactaaataaagcataatataataagttaaaataagtgttttattatattatttatatgaagttgactattacaagtttaaagttgagtttacagagctgcaccaagtttatgtaaaatctggagtttgacaaccttgtgtgtaatcttaatgcacaaagtgcaagatagagttatcccctgcacttgaagtgttaggagaaaccttttagtagctaaagtaccctgtacacaatacacatgcatgtcttcaagtagattgttatattttgttctacacagttaatctgcaatatgtacaaaacatcatgttgtacatagttatcccactaggttctgcttctagacgtgttctacacatacacgtcttccattattattatattattattgttgttgttgttattattaatgtgtgcaaacaatgataaaatatatgatgtttagaaccattcttgatatagaagaatgtacaagcagaggttctgtttcttacagatggtatttcatgtgggcatgtctaaatatttccaatgtttttttataatttttctccaatatgctgggaacaaccattttggagtgatttttctagattatatttattttttctgttaggttgaaatgaagagacccttcttcacgacatgttttgagaaattaaatctatatctctgaaagttgagtctttggttataggatgtgtatgcaagttctatgtcagaataggccttgtctatcttctttaaataagaaggaatgtcatactccctctggtcttgattataagcaaaaaaagacatacttcacagttattaagaaaattagttaatttcatcaaatggtgtcatttccaattaaaaaataaacattttccctaaattatccttcattggaacttgatatcaatcataaaaaaaagtctttggccttattaaatgaagggtattttgtggatagtttcattaaataaggtataggtaattgggatttgtttatatttgagacaaaaaaaaaagaagcaatttttgttgcttatatttgagaccggagagagtatagtttatgggagaattggtagtgcattgataactctcctgaccatgtcttctagaatattattgtcattgttgacgttgtatagtgtgttgtacttgttctcttcaattgaagtcaaaatgttttttactgataagtccttggtttcaggcttcgagttatcaactgttgcatttccctattctaagtggcgagttagtgtttatatggttaaatttcctgtttctgtggggttagcgaaatgatataatataccagtgacatggtctgtctttttaagtatgtggctgtctcaaataccagatggagtgctacctgggtgtgtccaaagtgatgatagagggcatgagagggaaattctccattccattgtctgtgtagtggtgtattggtgttccatcccctggccaacataggtggctgataaacacttgtaacttactaggaaataagttttccttatcttttgaagttctacttctactatgaaataagttttccttatcttcgaaggtctaacaagtgtgtcgtgtactatgcatattaggccaaaaattttaagatcactgttattctggtgacaagtgtgcaaatatctatttatatttactgttgaactgttatttgaattgaatcctgatccagtgtaatagtggtgcgcaaaattaaatgtatgcctataattttcataaacagactaacactcatacaagaaagttgattgatctatgtagtggacacccgatagtgtaacgaggttttgtcgtcattgtttttattttgaatacttgcacaacattctagaagcacatatggttgctatggcgactgattgttttttctcccattttgtcctctttctatttacacatacggatatatctgtgaagtatagcttgacattttttataattaacaatcattgttataaactataagtctggtgctcttggtgatgggaaccctaaaatattttggaagaatgaagaataactctgtttcagtcatgaatttatgatgagagcacacaaagtactcctttccttacaagggcaacaacattacaactaagaaatctcagttaacaaaattattattctgatctgcccagtgctgtaaactttttacctatttaaactggatagactggtggaaggcctatgtctttgaaatttgtagtatatggtagaagaaataagaaataggctagtagttttttgtatctgtgctgaacagttatatgtggtttatccgacagttatttgtattaattgtggattggaaaattattgtgtaacagttgttccccttctaagtgaaccctcatgtgctgagtgtttggaccgaaaaatctggtcactaaaccagattgttttagttgtacaatactgttttgcgtttctaatctctgagtcagccataaactctatgtcctcctaaattcccttaccactgttgtaaccaccttaactaactatcttatggaataaacacaccaaatcctgcatgaactttctactgagtcttttccacgtgcctaacaacctctagattttattctttaaactttaaaggaggttcccaacacctaggtcttgccattatttggagatcaattccaaagttatggtctctctgttgcaagtattcttaggaatgatgacaatattttcaccttggcttttgatcaattccaaagttatggctccttgacaacttcacaatatcgatatttcataatcaaagttcgtgcaaatactgtaacattcaattacctagcactaactagtgtgataactttctttaagctgtgtaaaatgtggcaatgtaaaacattatttgtttctattatcccggatttttttaaagtagtctttttttctttcctttctttttctttggtgtaagatatctatggtgcttcacttgttctgtgatatgaattctacagatacacttcaattctcactgcttgtcgcttttggtaaagaatattgtttttttcatctttgaatcaagccaaaataaatttggatactttatactattagcttataagttccatatgcttttattagg

SEQ ID NO: 3645 - DNA, 5353 bp, Glycine max
  Intron number 13 from transcript Glyma02g34760.1 (locus Gl yma02g34760) derived from phytozome v7.0 (chr-ID Gm02; pos 39250293 to 39255645 reverse strand)
agacattggagcagctggagaaatcttttaggcgggtaggtattcttaaaattattgattgttgcagccgttcccggagcttaaccattattgtacttgtgataacaaagtatatcctttcttggatgcttttttcctcatttttaagttatattaacgcaatcctcaactacctgttttattttttgtattatattattcattgttattgagatttcttgaatctaactgttgaaaatcagaatataatattctgattctattaatattagtggtttataggcacataatctatgatttagaggaaacaaaatatcctctattaatgtgtaatttaattagcttatataaacacatatctgctgttcacataatctgttataattgactgaaaaccatgtgctagagtacatagtggatgtgtgtttatataagctaattacattaattacacattagtagagtatattctgtttcctctaaattacagattatgtgcctataaaccactattattaacagaatcagaatattatattcttgttgcatatcttttggggtttctaaattagatttgtatgcatcattactaaatatttttttcttgttttagaagtcagcagacatagactagactaggctgtcacatagactaggctagactgtcttttccccctttctctctcttatgctttgtactctataaattgtaagctgaaatatgaatatcaagagtcatgtgagtaaaattttctcacacttaaattcaagttggtatcagagcgggtttcggccatcaccgtcgccgccgccaccgtccgctgcctccggccaccgtccaccgcactccggccgccggaatttttttttgggtcaaaatggctacttctggtcctgttttttcattttctggaatcccaaccattgcaactgccaagctcaactggaaaaattatttgtcgtggtctgcttcagttgagttgtggtttcttggtcaagggtaccatgaccacctagagaaaaacgtcaatgttgttccaaatgacaagaaacttgaatgggagaaggtagattatcaactatgtgctgttctgtggcaatcagtcgagtcagatgttttggaaattctcagatcttttaaaacatgtcatcttttttggaagaaggcccaagagatcttcgccaacgatattcaaagcctatttgatgcgactgtgaaagttacagctctcaagcaatctaaccatgacatgattgcacatatgggtaaagctcgggcaacagtagaagagctgagaaggtttcttgtggctgattcgttggaagaggtgaataggaaactggacaagttctacatggtccttatcttgaggagtctacactcagattttgatcattacgtgatcaggtcctagctggagatcaagtcccattgatggattctctcattactaggcttctccgtgtacctcatgcgttgaaggatgaaaatctcactgatgctgtggaaacatcagccatggtggcacctcgtgggagagggggaggccgtaacagtagaggaggccgcaatggaagaagtggacgtccgcaatgcacatattgtaagaggatgggccacactcaagaaaattgttactctttgcatggcttccctgacaaagaggcacatgtatccaagtcagaaaaacctgagtctaagttttctgatgaggaataccaagagtatttgaagctcaagtccgagaaatccagcaatcaagcatcatcttcatcagtacaatgtttctcaacaacatgtgtttctcaatcaatcggaagtcctagcccttggatacttgactcaggtgcctctgatcatatctctggtaacaagtcttccttttcatctattttctttccaaagattcctcaccttgttactgtagccaatgggtccaaagttgcatcttaaggaagtggtcaagtatcattatctccttcattgaaattaaattctgtattatttgttcctcagtgtccatataatctaatctcattaagttagttgactcgctcattaaattgttcagtaacctttaccgctaattcctttgttattcaggaacatgggacgggtcgactgattggagaaggacgtgaatcacgaggactgtattatttagaatccagctctccgatatcctgttttgcatcctcaaaacccaaacttttgcatgatcgtctgggtcacccaagtttattcaagctgaaaataatggttcctagtcttaaaaaccttcaagtcttagactgtgagtcttgtcaactagaaaaacatgttaggtcatcatttcctcaaactgtacaaagatgtgattcggctttttctaccattcattctgatatttggggaccaagttgtgttacatcttttggttttcgatattttgtaaccttcattgatgaattctccagatgtacttgggtttatttaatgaaagatagatctgaacttttgcccatatttaagtcgttttgcaatgagattgaaaatcaatttggaaaaacaatcaagattttcagaagtgataatgcaaaagaatatttctctcatgatctttcctcttttttatcctcaaaaggtatcctacaccagtccacatgtcctcatacacctcaacaaaatggcatagctgaaaggaaaaatcgtcaccttcttgaaactgctcgttccctaatgttaaattctaatgttcctacacatcactggggagacgcagtgcttactgcgtgcttcttaattaataggatgccttcttctcttgaaaaccaaattcctcactcaattatctttcctcacgacccattgtttcatgtctctcctagagtgtttggttgtacttgttttgtccatgatctttcccctggtttagacaaactttcagccaagtcagtaaaatgtgtctttttgggttattctcgtcttcaaaagggttacaaatgctactctccaatcacaagacgatattatatgtctgcagatgtaaccttctttgaagacacacctttcttctcatcctctgtagatcattcttcttctctccaggaagtactgccaattccttgtcctctaggtaactccgaccaaaatgtcaatgaagtcccatcttctctaccaaattcaattgaagttgtctctccacctctgcttacatatcatcacaggacacgaccagctgattctatagtacctgaagcctcccctcgtgattctcatccttctccaactagtcctccaaccatggatcctgcttcctcacctgtctctcatcactctgagtcagcctggctcattgccatccgaaaaggtactcgatctactcgcaaccctcatcctatttataattttttgagttaccatcgcttgtctccttcatattcttccttttttttctctttatcctcacaccatgttccttctaatgttcatgaggcacttagtcatcctggatggcgacaggctatgattgatgaaatgcaggcccttgaaaataatggtacttgggaacttgttcctcttccacctggcaagaagactgtgggttgtagatgggtatatgcagttaaagttgggcctaatggtgaggttgatcggcttaagctcgattggtagctaaagactatactcagatttatggccttgattattgtgacaccttttctcctgtggctaaaatcaccactgttcgtctgtttcttgttatggcagccatgcgtcatcggcctcttcatcagcttgacattaagaatgctttcctccatggtgatcttgaggaggagatttatatggagcaacctcctgggtttgttgctcagggggagtatggtcttgtttgtaagctgcgtcgatctctctatgggttgaagcaatcccctcgggcttggtttggtaaattcagtcatattgttcaactttttgggttgaaacgaagtgaggctgatcattctgttttttgttgtcattcatcccctgggaaatgtgtttatttgatagtatacgttgatgacatagtgattacagggaatgatgctactaagattgttcagctaaaggagcacttattcagtcatttccagaccaaagacctgggatatttgaagtactttcttggtattgaggtggctcagtcaggagatagtgttgtgatctcttagaggaagtatgcccttgacattttggaggaaacaggcatgcagaattgtagacctgttgatagccctatggatccaaatttgaagctcctggcaaatcagagtgaattgtgtcctgatcccgagagatatagaagacttgtgggaaaactcatttatctcaccattacaagacctgatatttcctttgctgttggagtggtgagccaatttatgcaaaatcctcgtgttgatcattggaatgctgttatgcgtattcttagatacattaagagagctccaggacaaggattactttatgaagacaaaggtaatacacaagtatctgggtattgtgatgcaaattgggctggttgtcctatggataggagatccacatccggatattgtgtttccattggagggaatgctatctcttggaagagcaagaaacaaactgttgttacccggtccagtgcagaggctgaatatagatctatggccatggctacatgtgaacttatgtggatcaaacaactaattcaagaattgagattctgtgaagttgggcagatgaagttatattgtgataaccaagccgctctccatattgcttcaaatccagtctttcatgagagaaccaaacacatagaaattgactgtcatttcattcgggagaagctattgtccaaagaaattatcactgagttcattagctctaatgatcagccagcagatattttgactaagtcgttgcgaggacctaggattcagtctatttgttccaaacttggtgcatatgatctatatgctctagcttgagggggagtgttgaatatcttttggggtttctaaattagatttgtatgcatcattactaaatattttttcttgttttagaagttagcagacatagactagactaggctgtcacatagactaggctaggctgtcttttccccctttctctctcttatgctttgtactctataaattgtaagctgaaatatgaatatcaagagtcatgtgagtaaaatttcctcacacttaaattcaagtattctcattttcaacactgataaattatcacatgaaattcttttgaccatctatttcattattaattctctcctgatattcagcattgattaattgtagattcttctattcaattgcttag

SEQ ID NO: 3646 - DNA, 8853 bp, Glycine max
  Intron number 5 from transcript Glyma0041s00210.1 (locus G lyma0041s00210) derived from phytozome v7.0 (chr-ID scaffo ld_41; pos 30256 to 39108)
tagacaggatcctatccaaggatgtaagtgaaggtcttaatcttctaggtccatttactattttttaacacattaaactaagataatttcatttctcttcaattagattctccaatcacgcataggacatggaattggtgcatatggtcctggtatcaattcctctcacaccttccccaatggaagtttccatggaacattggctggcatgtctagtacatcctcacaattccctcctttgccacaggtaaaaagagttaagatctttgaacatgttactctaatgcgtttaatttctatgcactgtaaatataaaagcttttatactgccaacctatcagaaatcattgttggtatgatatttaaggtactttttgtaaaagtcaactaattgttcatacatgatgatgtgtggttggattattgtgtaaaactctttatactataagtgcatatatgattttctctgctctaatactctttagctctcaattatgaaaaatactgattcttttacatgcagaatgttttggaccatgagttccaaagcttctatggaattggatacgattctaatacagcacttgacaacttgggacccaatggtaataatggacagaattttaaatttggttgtttgcacaattatatcaagtgtctgattcttgtaatttattgttacattgaacagggcggttgaaaacagagttatagtgtgtgcattattacatagccatgttactacagcaacaaagactttggaattttcttgttgactgcacaatttaaccgaagatgaaaatgggaggacaatagagagggaaagaaaaagaaaaaaaataaaggttttagttgtatagggtctttaatacctaactgttggcacttcgaatttttagcagaagatgacttgttagatttatcaattggaaaatgagttacacatattatgtgtagaatctagatcatgtagaacaagttgcagtggtcttgtttaatgacacggagagcagtattttgaggagcatgcgagtaaagtgtgtgcaactatcattacttttattgaattattatgtatagagttgccgggttcggatttttgaagcacaatgttttcaaatttcaagtgttgcagattggataatgtgtgtacttgactactacttatgctagggtttatggtttttctttgtatttttcttttcaaaagaaaatgtaaccaatgaggagattcttagtgcatacaacttcaaggatgaatatgttgcaacttgtatgagggtgaaagattgtttaagtagaccagtgcttcaaacattggccttcttttgtttttcattttcccatttgttggtgtttcttatttgaaaagtgtaatttaaacacctctcttctgagaaaactaggcatgttgaatacgtaaacatgactcattcttttttactatgatatagcctaaaagtcttaaaataaaacaagtttgatgaaatagataaaatatttagactatcaactgattaaatgcataaattatttcaaattgactttgactcattaatttttttttgttacaaatcacaaatatccaatatatatatatatatatattgctgctatctaaacatgagcacagcaacatgagacagaaatgcaccaaaaaaatgttttgctttagtttgcatgagaaggttttcagaagctgagttataaaaggtttagagatgtgaaacgtgtaccggaatggttacttgttggtcatctaactttttatttttatgagattgaatttgtctgttgttaatattgttatacgcttctgcccatttcaaaggtaatgataatgataataatgatttataacaggttattgggggttgaaattgagtctggtttgttgacaaggcatagaaagcttgccaggaactattttcattggcaaacatctctagtaattaatccttggttttgtggtagctttctaaaaggaaaacattgactttcgtggataaaggaaattgtttaacacttcaaatcaaaggtgactaaaatgttttcatttgcttctaatgtagatagatgatagattattagttgaccaacaactgttctgattaaagtttgtcacgggggatactatgtgggtaagaagttgagctaactatacttacattacatgtagcatccaattcccaccaacttacacaatacaacatcagcagtctacactcacaaaacatctctgaacgcttgtaaagatctccatctcccattgatcctccttaagttcttgcattcaaacatgcctaccagtagtagtttgtcaacagagatattttcatttgtggttctaatgttgttctcagcaagcagtcacacaatggttgccggagcacgcaatctcctggaatcaacattgtcaaaaccagaagtgcctcaacttccaaaatccaagttgccacttcccagcaatccctaaattaccaaagccaaagttgcctaacatccctacattcccaaaaaattgatccttaaggtccctgaattgcctacagtaccaaaaatgtctaaggttcctaagttgtctaaagtacccaagttgtctaaagtctccgaatagcctaagccaaagttgcctagagtacgtgagatgcctaaggttcctgaattgtctatgcccgagttgcctaaagtttctgaattgcctaagtccaaattgtctaaagtacctgagatacctaaggtccctaaattgtctaagcccgagttacctaaagtacccgagttgcctaagttgcctacggtttttgaattttctaagcctaagttgcctaaagtacttaagttgcataaggttccagaattgcctaagctgagttacctaaagtacctgagaggccaaaggtccctgaattgtctaagtccgagttgttgaaagtccctgagtagcttaagctcgagttacttaaaatatccgatttgtctgaggttcctgaattgcctgagccacagatttcgaaggtacctgaattgtctaagctcgagttgtctaaaataccttaggagtgcgtttggatagagaattttaattgaggaaagtaatttattagagaatttgaatttctataatttagaattcattgtttgaatgcttttttatgaagaatttaaaattttgaaattttaaaacagaattttaaacaactaaaaatctagaatttcaatttccttctaaaaggtgagaaattgaaattctcttcttaccgtcttcttcaggaaacaccgtctgagctcctaaatatttggtgtgagcatagagaaacaagtatatacaactagcacaccaactatatcttctctttttttttcattcatttttttctcctcataatttttttttatccaaacacaaaattttgaaaataaaggaatttcaattgaagtatttgaaattcttagaatttaaaatttttccatccaaacacactgtatatgcctaagtttcctgaatttcctaagtttcctgaatttcctaagtttcctaaagcattatcaactaccaatccttgagtttgaattatgccttatgctgtcttgcccaaaggtcataactggctgcattccaatgtggcaatgcctagttcatgctgtttgatggatgtgatatgattatgttaattttcacttgtgtataacatgttttagctacttgagagtgattgtggcggtttacaagtattttgcaccatactataaaattatgtttagtttggagttgtttaaattgattatagttataccattgcatacttatagacatctccttcatgtaatgttgtgaatttaataagattgccatttctgagtataactttctagatattttgcttctaatgttggttctgtcgttacattttttttcttgttttaaaaaactcaatatacaacactaaattcagctaccgaaattttatcgatgctctctgcgaagcaaaggaaactatgatcagggatcatatcacgcacaaattaacattttcgtatatcaaattcttacatttaatatttgatacaatcttgattcgctactattatgcctcagacaagtacactgatttattagaattttcacaagtaatgactttaacacgtattgattcattaaatcataactaattggatctgatcagaattgtagaatgctctatattagtatattttttatggaaactattgagatttaagagcaagcaagaatctaaaagtactgaaattataaatattaacaatgcgtaattttatttaaaattaaattgtaaaatttggctcttatctatgctaaggcactggcactgtcatgacatctcgtggcatactctccagggcttccctttcccattcccatgcaacaagctaacaagaccacggttaatgttgacacatctataataagaatgatttaaaattaaaaatataccaagattgatgttattactagaaatagggcataccataaattttatattttgcaaacattgacaattttaagactgaagaacagaacataagaattttcttcatgagtcaacaacttggttgaatatgctatgcttggtcggagctaaataaataggtggagtaatgaaacatcaaatgctgaattaaaaaacaaataattaaatattcataatttccatatatctggccttcttgatataaagattaagtttgctaactaggtaagtttcttttctcaaagtcatacatagattatggagataaataaaatctggatttgggaagagaaatatgaatggaaatatttgcaaagttatgatttcttcattcattgcacatgtatgtatctttaggatataggaaattatgtgacagaagggttatcaacatcaatattatgaataattaaaccaatgtcatgcaagcaaaacaaattcaatctaaacttgattagtttcaactcctatcaaattaaccactcctttagttggatcccagacgatgaagataaatatctccttatcttcaagtcaaaatgagtaacggcacaataacatataggtagggcttgaacaaaagacaaattaactatcaacacattgttaagaagaataaagatatgcttataaaagaaaaaaagaataacaaacattaaagatgctaaataggttttgctaactggtactttgactaggaacagaacagtacacgataggctaaggaatcaaattacacatcatgcattctacttataactttacattttccgtcgtgcatgttaaataataataaaattgtcactccaataactcagttgttaaaacataccgaactccagcttaaatgtaactaagcctatcttatactattggaaagtcaaagatggagtattagtttgataggtaactggtaatttcttggaaagtaccaattcgtttaaatagtattttaaaatagtaagaccgattatcgactctacaggaactttaactgtattcagagtttatatatgttcaattttaagcaattaagaaattaaatttgatattgattgaataatgatacgaaatgtaaaattcgacataaacaaagataattaagcacaacacattaaagaaatagaacacaaacattggggggggggggagttgagttgtcgattaaagcgaaattacgaaacatattgagactcaacctgtcaaagttactcttgatgcaacattaatgatttttcattatttaacgttatttcaattattattttcatctgctaacataccctaaccgtgatctttcaagtgaaagagcctaaattacataatttcactcataatcccttaagagctacatcaaataatttgttctaagaataaagatgcataaataaggctaaataatatcattttattcctagacatggattacctagatgctctttttaagttcataagagataaatattttccaatgcataaaccttataacactacatgagtatgggtgatcaaaccataatcttgatattaagcacaaaaaagagacaataatatcaaaataacattaaataaataattagaataattagaataactatatgcttcgctaagcggatgccactcgctaggcgaatctgttttgctgagcgagtcatcagctacttgaaccttctcttctttggcctgaaactgagttggattcaacattaattcacaaaatgggagtatctactctataaaatcacactaaacagaaaaatatgtacaattcctacaaaaagaaccataaattgaaggtaacacgttatttccttgcaaatattcaatataaaactactcatgaatagcaactaacaagcgcacatgcaaagtccaactggtataggtgactgcgctctaagcagtcagatacgcgttaagccgccaaatactcactaagttcaacctccaagttagctcctcacgctcaacggttgttgacgcattgagcgtgctactcttaattcttctactctcttttaggtctcctattgtgtaattcaattctaccaaaattacaataaaaaatactgcaaattaactaaatttagtatctattgaataaaaaactcataagaaactaaattcttaatgttttgaccaaaaaaaataataaaagagaaaaaaattaaataattgatatataatttaaatatacaaattatgtatgcatatagcttaaaagagtaaaggttatgaagatacttaaaaatcctccagaaaaagtcaaagatcataattctagttattaagaaaaatgataaaattgtggaaaggatcataaagcattacatacattaaattcttgttgtccattgtcgatcttgttcctcttcagttgcttcctcaaattcttctaggagtgatagcaaactttctccatacataacacaatgtactaaaccatatcccccatccatcctctgtccatgtgcatcatgctcaagcactttgcctttgccatcaagtttcgctaatattttgtcttcattaatcccaaaatttcaccatttttagttaattaagcatattataggtgaaagaaatagtgataagggtgataattaggagacaaaacaaatgactggatccaagatgactccgctttatattctttcattgtccatatctcggacattgcatcaatactaccatcgaaaatacaaagcctcaaataatgcggtccagatctcaatgcaatggtcagatcatgtgatagtagaatctctaatgattttctttcagaattgggtgtctcggctacgtcaaaatgggatttggtgaattgagatagcaataacttacacacatttgaaaagcaatagagatctcactacaatctcaacaaaatttctacgatcaaatggttagggagatggggaggatcagaataagaattcaagacactcgtcttcatgttcatcataatacctattattttgtctctagttttctctaacgtgttgtatagtatataagtatatgaggttgacaaatcttttccccctttttttttaccggagacaaatatctttttcataataaaataagtaagtatatataagtgataacaaaaatatccattaggtaaatctttaacgataaaatatttaaaattataaacgagatatttgtaaaatatgaattattttaaaaatttacttctttcaaaatttacttttaaaattatttttaattatcttaatatatcattatattgtacatcaatctgaagatactatcttttttttttttcttgtttaatataaaataaatcttacgattagtattataatcttaatcaatcctaaaaaaatattgtaatcttaacgtcatatgtaaattttaaatttaaattgaattaagtttttattttagcattaatttaatttaaaattaatcaaaattgttgtagtattaaaaattagtttatcttaaaaagaaaatttccttccatctagcgtggtggatccaaacatacccaatagatgtatttcaattgacaatatatattgagtttgtgagagaaaattttagtttgatttgattcatcctagaccgaggtttaatcattaatttttttaaaaatattgataattattttttaaaaatatcaaaattcaagttagaagtaaagataataaaaatcttaagttgagagtgatatgaaatcaagtttgtgataaaaataaaattaaaacacaaatcaaattaaactttataattataacttgttaacttactcttttaaaaattaagtggtataaattaacaaactttacatccatttattaacatacatccagttatttttaaaaagaataaattaataagttatactcgtatttattttaataaaatttataattataatttattgacttatttttttctaaaaaaataagtgaatataaattaataaatctcacatttttttaatatagatcacatgtctactttatgggtggtaatcatatttgaattaatatgacaacattattttttatatatttgaattaatacatttttaatatggcaacattatttcatcacccaagctttttttacggattttattattatatttttttttcaatttttatacattttatttaataatctattatcgttagttgaccgtcaattagaatagatgatgtgacaagttgtcatccctgcacggtacctaacataccacaatgtttgttatgttatgagaaaccaattttttatttttatttttgtaatgtctcgttatacaactttttgcttgtaggtgagtagagaaaagattagtgagcaa

SEQ ID NO: 3647 - DNA, 5972 bp, Glycine max
  Intron number 2 from transcript Glyma19g37580.1 (locus Gly ma19g37580) derived from phytozome v7.0 (chr-ID Gm19; pos 44691581 to 44697552)
attggatctgtttcagcaggtacagtagtgtgtcaaaagtcgttttttatttgatgtgttttcttatttgtcacttgctaaaactcaacttccatgttatggacttttctatggtagtgcctattactactgatggagcagtgtgataagaatatggttcagatattttcctatgtggattttagaactagaaatggcagcagaaggagtgctcttaattttgaaaatcgagataatcctggataaatctgaagtcgtgtataaacactttcagattgaatcaaatttcggggttcaaccaaaattgttcaatcggataaaatcagaagattataattcaagagttttgttttggtcttgtgagtttttcacatgttatgctttctgaaccaggatgattatttataatcaaagaacaggtggtttttggcggttgaaggaagttatggaagttttatcctttgaaaaaaaacggttggcagttgatgaaagtttatctttttaaaaaactgtcttttcttgaaaaataacttccatgtaacttccaaaatttgacttccatgtaacttccaaaatttgcctaaaccgagcatctcgttattacattaaaacaagcgtgcactcttattttaacataataaagagatcaattacactaaaatgtccaacagacctcccccattttagtgtaattaccgatcaaatcaccaaagtcataacatacaacaaactactgcatagatgaaatatcgtgacgattgaatttcatcttagcaaattacacgtttcaaatattcgaatatcagggtgtcactaaggattgaaccctttctattcataatgaatacatgaagataatctgcacaatagtttataacattactcttgctcgacactagttttactagcctgtgtccctatccttcataagcatatcaaagccaagtcccagcttcttgaagcggctaaacttcatgcttatataggtagtccttttctttcttgcacctgtaaatgcaatttttcaaaagaaccattgagaagttatacttcaacctccttaacttacagaaccgaacacattccttttgggatactttcgatgatgtgttccaatctctacatgttaagctttccacattgaattcagcacctaatgtcatattagatggaaattgggtatcttaacataagagatttcagatggactttaatcctaatcccacagccgacctttttacgagatctctacttaaccctttggttaaatgatcggccaaattatgctgagttctcacaaactccactgatatcacaccatgcatgattaactcccgaaccatgttgtgtctaacacccaagtgtctagacttcccattatacacttgactatatgccttagccaaagttgcctgactatcacacctgatagacatgggaggtataggtttgggccacaatggaatctcatagattagatttcttagccactcagcttctttaccagctgctgctaaagctacaaattcagattccattgttgaatttgtaatgcaggtctgtttcttggatgcccaagagatagcacctcctccaaggaggaatacccaaccacttgtggatgaataatcctccatattggttatccaacttgcatcagagtaaccttcaataaccgaaggaaatccagtatatgtcaaaccatagtcaatggttccctttaagtacttgaatactctattcatagcttgccaatgatgagaactaggattacttgtaaacctactgagtttagcaacagcataagctatatcaggcctagtactaatcattgcatacatgagtgatcctatcgcccttgagtattcaagttgagacactgctacacctttattaggtaatagcttcaggttaggatcaatgggagtacttaccggagaacaatctttaaaattaaatttctccaatatcttctcaatataatgtgattgagagatggaaataccattgtttccacgtttgatctttattcctaagatcacatccgcctcccccatatctttcatatcaaacttagaagacaaaaatgccttagtttcatcaacttgatcttggtcggtaccaaagatcaacatgtcgtctacatactgacaaatgataactcctttgccatgagtatcaaacttgctgtatagacatttatctgcttggtttataacaaaaccactagacaacacaacctcatcaaatttttgatgccattgcttaggcgcttgtttcaagccataaagagatttcatcagtttacacaccttattttcatttcctggcataacaaacccttcaggttgtttcatgtatatctcttcatccaattcaccatttaagaatgcagttttcacatccatttggtgaatcatcagattgtggatagcagcaagtgctaacaacagtctaatagtggatatcctagcaacatgagcatatgtatcgaaaaaatcaataccctccttttgcctaaagccttggataaccaatctggctttgtacttgtcaacagtaccatccactttcatctttctcctaaagatcatcttacatcctaatggcttacatccaggaggtaagtcaaccaatttccatgtattattttgcatgatggaatccatctcactttggattgcttctttccagaatacagcatcccttgaagccattgcttcactaaaagtctttgggtcttcctcaacattaaggcaatattgatattgaaattcaatatcattccttgacccttcaaccaaatagagttgaaagtcatcaccaaatgacttagcttttcttactctcgtactctttctagtttcagtactagttaaaggtatatcctcaatattaactgagactttcgacatggaattcatgtcctttggcctaggtatagatgtaaacctttgttcatcaaagatagcatcccgtgactctataaccgagttcacagcaacagaatcattagattctagcacatagaatctatatactttagaatgttcagcatatccaataaatatgcaatctatacctctttcacctatggttttccttttaggttctgtaagcctgactacaaccctacatccccaaattttgagataactcaaatttggtgtctttttgtgccaaagttcatatggggtaaccttattccttttgttaggaattcggttcaacaagtaacaggctgtcaacatagcctcaccccaaaatcctttacttaaacccgaatatgataacatggaattcaccatttctttcaaggttctattcttcctttcggctacaccattctgttgtggtgtatagggagctgtagtttgatgtattattccagtagattgaaaataaaccggatcataatactcacctcccctatccgtacgaagagttttgattagcccattttgatgaagttctacctctttcttataaattttaaatttatcaagagcttcatcttttgtatttaataaatatacataacaataccttgatgcatcatcaataaaagtaacaagatattttttatgacctaatgatggagtagcatgcaaatcacacaaatcactatgaataaggtctaagactttagtctcacttttaacatccttaaaaggtttcctagtgatcttggtcaacatgcaagttttgcatttttcaatgttcatatcaaaaggaggaatcatacttgtttttgacatatcttttaatcttttgtaatgaacatgtcctaatctagcatgccaaatttctgattttgtcatattagttatagaactacacgaggccatacaaacagattcatgaacaaaaggaacatcaatgtttaatttaaacattccattacaacgataaccaaatccaacaaacgaaccatgtcttgacaagatgtacttgtcactttcaagtacttgcttgaaaccacaattatttaaaaccataccagacaataagttcttacgaataccaggtacaaataagacattatccaaatacaaactttttccggaagtaaaaactaaattcacacaacctaatcctaggattggttcagttgcaacattgcccatcttcacaatagagccatcatcgattggtctaaattccttgaaccaacgacgatctttgcacacatggcttgttgctcccgaatcaaaccaccaagcaacgtcgtcatcctgcacatagaatgcatcagatattagtgatacataatttgaattcgtattcgaattaaaattattcactacaatctgaccttgttgcttttcaggatcattagacccacttggaccaaccttgttctttcctttgaacacccggcaatccctctttaaatgaccaggtttcccacacttccaacatgacaattttgtctatttgtttggacctttgttcttatttccttgaaattttcgtttgttacctttagcattgtaattttgcttaactgttccactttcctctaccatattaacggaagaggaacctactacggttttattattgactttgtcaatttcctgagccctcagcgactcctcaatcatgaaatgactgccgagttgaaccagagtcaactcttccttcatatgtttcaaggtatgcttgaagtctttccaagaagaaggcagtttatcaattatagatgaaactgcaatggattcatccattttcaaatcatgttgagtaaactgacccaaaatccgcagcagttcattatattgctccataacaggcctcgaatcaatcattttgtaattaaagaaattactaactaagaatttgttacttgaggcatcttctgccatatacttggattcaagagagtcccataattccttagcagactcaacattttgataaatatcaaagagagagtcagacataccgttcagaatgtgtccacgacaaatgtaatcgtcgttctcccatttcgaacgcttccttgtttgatccagagtttcgccttccatatacaccggcatcggtgtactcagcacatacaccacattcaatgttgtcaagagaaagtgcatcttcttctgccatcttctgaaatcctgcccttcaaacttgtccaactttgcaaacttgcttgtcatcttcgaactatcgttcgtcatctcgaaagatttgattcaatcttttgttggttaattttgaaaatcgagataatcctggataaatctgaagtcgtgtataaacactttcagattgaatcaaatttcggggttcaaccaaaattgttcaatcggataaaatcagaagattataattcaagagttttgttttggtcttgtgagtttttcacatgttatgctttctgaaccaggatgattatttataatcaaagaacaggtggtttttggcggttgaaggaagttatttatttttaaaaaaaattgccgttaatggaagttttagtaacttccatgtaacttccaaccgttgatggaagaataacttccatgtaacttccaaaatttgacttccatgtaacttccaaaatttgcctaaaccgagcatctcgttattacattaaaacaagcgtgcactcttattttaacataataaagagatcaattacactaaaatgtccaacatgctctccgagtgtctactatattagggatttcaccctcagcaggcagtgtttctatgtttctgtggggcgtttgtatgctgccagaacttacattatgttattaccatcttgattatttccttttgtttgtgtaaagcttgttttggattcacagattgcaaattccaacacagcttctttcatctgctcctaatgactttaaactctggtgtgtcttaaccaaaatttattctgttccattcattcttaattcacttggcatttgtatccaggtattccgcaagattaacacagataagtgggagtt

SEQ ID NO: 3648 - DNA, 801 bp, Glycine max
  Intron number 1 from transcript Glyma17g16350.1 (locus Gly ma17g16350) derived from phytozome v7.0 (chr-ID Gm17; pos 12999362 to 13000162)
tcactcaccttgctgctttgatttggatcttgaaggtgaaatagtagtataaatgactttttgagcattcttttctttctgggtcgtttctcaaatgatattttcatgctgctgttgcttctttttttttgtcaacgtataagcattttatttggttgtgttattgttattatcatctttattatcattgctaaagtagttggatttagtttgcaacctttcagcttgatttgttcatcgtttgagcttgttcacatttgcactgaaaagattcaattttcatgagcttttctttttggtggatgcaattttagatcttcagctgatccagctaaaacagttgagatttggggttgggggagtgttgtgccatgcaatacaattatactaatgagattgtttgaaagtgggtattggattctatgaagatcagacaatgtgacaccaaaaactctgtttttaaaagtttctttttcttcgtgtaaaatcattatcaaatcacatgttagtgttagatccgcttgcatgttcgtgagaagaaaaaataaaacaaagttcggatgaaactatggttgaaagagagttaagctcgtttattataaggtcttctcctgctagaaattgtgcccccaaactaccttatagattctaaatcagtactagtacctttttttgttaacatataataaattctgtgtacttagataattattactactttattaattttggtagtttgcttgattttgagcctcattagtttcagtgtacactgccataggtttgagagggtactgccat

SEQ ID NO: 3649 - DNA, 1803 bp, Glycine max
  Intron number 3 from transcript Glyma11g38060.1 (locus Gly ma11g38060) derived from phytozome v7.0 (chr-ID Gm11; pos 39015175 to 39016977)
ccaagaataggatctctaaatagtcttacaattctgtaagtatttgtgatatgaaatatccacaaaactgacctctccccctgctccttccctggtttcaattccttgtatcatcgtgcttttttttgtttcattataatgttagacatgaattcatgaaatcacattgatagatagatttctgtgtgttaggcgtttggcaagtgtaccaaatgtcaaaataataaagtctcggaagtccaagtgtcgaattccacaggaattttgtgttgtacttatcttgaatacttttcaatttataagagaaagaaataataaataagaggggtagaagaaagaataggaaacagtaaggaagttataaatagtaaacaacaagagaattaaaagcaaaagagttaatcaggaaattcaatggacctaacctgtcttgtttgcttaggatgtatgaatttatgatttttctttatcaatttaattagatctattctacctacatacatctatccatttacttgcctctgatgtctcacaatgacaagcctattttatttacctatctcccaaatgcctttgaaaaaactcaataaataaaatgcatgaagaataaattctagatgtttgttaaatgcatgggcataaagttaccattctatgcctaacaatgatttccttatgatatattttctttatttttctattagaaattatcctctcgagcatctaacctctaaaaccaatgcctgcatcttttctttaaatcttattagaagttatcctctcccgagcatctaaccccgaaaagaatgtaaagatgaaaatgcaagacaaaataaaaaagataataaaatagaaaaacctggaaaggaatccttttgcattgataaatctgaggtatatcatacatcgcttgactttttaggcctgctagaccctaactaggggattaaccactcactcatggccatgagggctttacaatgagaggggggaaagaaagaatggatacaaaagagagaagagaggaagagttcttaggcggctttaggtagtagtgagagtacagacttggtgtcgtttacctttagtctggctctctatttatagttgctgccgaagtgggctttgggccttgcttagcgagagctgttctgttacgcgcttagcgcattctattttgcccgcttagcgcctgttgcgcacttagcgccttctgttttgtctgcttagcgactgttgcgcgctgaacgagacactgggctcggccttttctgatttcttctatttctcactttttgcttttagcacctccaatttttatatctacagccaaaattcaacgaaacatcaattctttaatatttaagcgcaaataactactaaataattatttttaaagataattttgctttattttctattattaaagtacaattatttagcagttatcactgtgttatttttatatgcttactcaggattgttgaatatactatcttctatgtatctgatgaattgtggtagactattcaatcattcattagggttcctactatctaattgttaatttcagaaagtgaatatggaaacatgcatatattatctgtagtgtgtatagaaatatgtatactttggtatttttcaaaaatcacttgatgctcttttggtgaattttgtgattttaagtcatactcccattcttatgagttcatttgttcatacttttcaccttttttctttggtgatgtatgttacacatataatgcagttctttgcaagggaataacatcactggtgacatac

SEQ ID NO: 3650 - DNA, 2631 bp, Glycine max
  Intron number 5 from transcript Glyma05g24520.1 (locus Gly ma05g24520) derived from phytozome v7.0 (chr-ID Gm05; pos 30677834 to 30680464)
tttcactggctttgcagcttgcttgcagtgttctggtatgttttcaaatgctttccatgggccatatatatcacaacgtgtatgttgactgttgaggcactaggcatcttgagaatatttttccttcatctttataatgttagaaaatcagaaatatgttgctctcacgtgatggattggccatttagactaaatattttttgccacagtataagagttcctggcaatgagtggtttaaaatttaatggacatacatggttaagaattgaacatttttgcccaaagtagcagtaggatctggttttttaggccatacttcagagtgtcgcacgatttcacataagagagctagtagtgtgttagaaacaataggatccattgtcattttcaaataattcagtatcagttttattttattctctctgtatctgtgtttcattgtattctttagcttcatacctcctgattcatgcttccattttggctatacacatactatttcatattttgttttttgaatgcagcatgccagttttgtttgggaacatttaaagaaaaagaattgaaattacaatagcttaagaagtaaatattggagttgaagagttttcctttcgttcatgcaggaactttcttctgcttgagaaacactgttgaaaatgtgtttaacacgtctgacatgtttaccttcatcaagttataaatatcaagattgaaacgtaatatgctaattcagtatagcaatgttggattatgataaaaaattagtaattttatgtgggatcttatgtacatgttaattattatattattgatgtggttatgaagttatttttttttacaaaaaagagttggccagtgcgggctgtagcccacttggatgctgctcacaaagtctaggctgggctagcgaattgttagcctgcaacataattggcccagcccagccccacctgaaaatgtattttcctgcagcaatcctacccgatggacccagcctaaatatgaagtaccaatctaaagattattcttgctactagatggtgaaattggttttggatgggctgtccctaccatgggtgctagtggaattgatgactcatcctctactcacaagtcacaatggagaagcaaaatccattagttttcttttatttaggaatttttgggcagcattgtttgttatgtttttttttccttttttttccctctactgtattttaaataggaaacaaaagcttgcacagaataacatacaagaaatacagatttcattcggatatcacttgatcactgttttgttaatataggctcaaaagtagttcttagatagcatttgcccctacttttttgggcttttcttctccttataagagagtatacataacttgcagtgtttcttgttgtttctcagttaactgatattttaactactgtagttagtagttagtctgttatcagttgatagtttagtcagttagtgcctaacagctttgtaacagctgtcaactaacttaggttagctggcagttatccaactatatattcatctttgtaatcagttacagttgggttgaataatattggttttctcaatctcaatctcaatctcctcttctccctgaaattctctcaactcttttactccttgaaaagagcagcaagtcaaacacaattttgaagaagctctaaaaaaataaaaggagcttccacaaaagctgattcgagtggtttctgttcctctgttccgaaaacttctactccctcaaggacatgcatgcctcactagtgtctctctcacttgccaataacctttatgttcttcaacagtgcaaaatgtttaccataatcacaatgtttttggtactgccaattttagcaaaatgttttaggtatcttgtattctgtgttgtttgctttctcttgataatgaaagaggggaggggataaagaaacaattgtgtgtggtttagtggatcaaccatttttggtaccagttaccaaatagggatgtcagagatttaggtagagagcaaattagttcagagtgcatgggatgttgaacttttgggttgatcttcatttgtggatgaattcggagtgcttggcaagtgtttttggtattgaagtttgagttaagctaaaaaaatataaaattactgttgaaaatcataatataatcttctgattctattattaatagcggtctataggaacataatctttgatttaggggaaacaaaatatcttctatttatgtctaattaacgtaattaacctatgtaagcatgcatccgttgtgcactgatacacggtttttactcaattatccctctttttttcctcttttaacaattaccaaacagttttagctttatttttgaaagtattattttaaatttaaactttaaagtaacttttaaaatgaaaaaggaaaagaaaaagcacggccaagcactatctttgtccaagtaattgattccttttatttagggaattggaaggcaaaattaattttgatacactgccctgctgctctttctctttcttattttccctaattgaaaagagaaaatgagcctattttgagccttcaatacttgtttattgatgcaggttgttgcttgtcc

SEQ ID NO: 3651 - DNA, 1094 bp, Glycine max
  Intron number 2 from transcript Glyma06g09900.2 (locus Gly ma06g09900) derived from phytozome v7.0 (chr-ID Gm06; pos 7432141 to 7433234 reverse strand)
agagaagcttgctgcttgtgtcaacagggtaccgggtgagaatttctcaccacccaactttgtgtatctgtggtttaaaattagtaatatctgggaagagtttggtgtaatggtattgttgtaacaattcattattttgattctataaatcatgttatctttgttgattttgtccctggacttgatttgataaataaatgattctggagagcgaggatgaaccacaaatatggttaactttgcatatagatttgagtgttgaggtgtgatctttcatcttgtattacacttttttattttattttttaaatgaaatagcaaggtccagattaaaaagttcgttagtattatgggttactttgtttgcatctatctcttcaaggtggcccgggaaatactcaagcaatgtggaatgtgattttattaattgaaaatcttttggaacttttttcttttttttaatcaatccatttgtgaaacgtgattgctatactggaacctatggatatatctaccagatgcatggtcagaaatactttttgcagttgtattatgtaactaagacttgaatgaattccactacttgacatataacttcactctgagcttatatacttgtttcacttatggtgtgtgcatgtgaccatgtccatcagtgccattgttctggtagggtggaaaggattgagtttgatatggtcttgggtcaatttgttttctaaccaagttggtcatgagtcaatttggataaactttgttgtaaatatttatagaagaaaataaattgaattaaggaagtaaaatgaatcaaacttatgtcataaattaaaattaaactaatacttaactttttcagaatctcactcgtttaatttcttcacaagttaggatacatcaatttgtcctaacttaccagagaagtttaattcattttacctccttgattctttttatttccttcttttataagtgctggttgagaaattatccaaactagctctatgtaggttgcatctcatatttgacttttaaaagctcaatgttttatgtcttctgcaggtattgaatcggtgtaccagtgggagggaaaggta

SEQ ID NO: 3652 - DNA, 741 bp, Glycine max
  Intron number 1 from transcript Glyma10g13730.1 (locus Gly ma10g13730) derived from phytozome v7.0 (chr-ID Gm10; pos 15495664 to 15496404 reverse strand)
tagtagtgattatacattaaattaaataaaaatattttaatggaaaaaataactaatgcacaagagagatgaaaagaagtcttataataagggataaaaattattcataatgtcttacttaaatggcagaaagagtatatttctgtaaaaaaaaatttaaatctttatatatgtatttttgtataaaaaaatccttatatatgatccattaataatactttttttaaaagaatatagcaaactacaattttgagtcaaacaaaaaaataaataagaaactacattttggtgactagtacttaattaataaattttacatatttatgttgactcaaaactgttacattgactaaaatattcacattttatcatctgctgcaaaatgatcttatcatgtacaaggcgtgccaaatcaaaatttctttataaaagaaaaacaaagaactaacgtatgtcatagacaaccaaaagtcatacacaagtcactcaccagggacaatgtcaacaaccttcaagtacctttattccatcctcttcctcacccttatcatcaaaggcacgtacattctattagttttaaatttcaccatttttctttctcttctcacctttcattttcctaacaaaacttttatgattttttattatttttattttacaatgattctctatatttgttcttgtgtttggtacataaacttttcaggctctagttattgtaacttaaataacatcattagt

SEQ ID NO: 3653 - DNA, 1994 bp, Glycine max
  Intron number 3 from transcript Glyma19g05370.1 (locus Gly ma19g05370) derived from phytozome v7.0 (chr-ID Gm19; pos 5804813 to 5806806)
aaggtgttgattctgcaaaagtagagctcgtggaggtacttatctcatgctagaatgtttataaactatactaggatagttaaaatataatttatcattaattaatcattaattgctaagatattgaaaccctgtaactacttgattttctacttttaactcatttataatattatttagcatacttttgttagtagtttggttaagaagtcacagttactgctgacatgatttctttttcctccactggggaaatatcctgtattcctgttgtattcacaactaagtatgagttgggtttgcagatagcattctcttggcttagtcacttatttttaaaatgattcagaatgctggatgcactggtactaaatggttatttatgctattaatactagaatgtgaattgttgtactttactttttctttttgattctcaaaattatatggctgaaaattgctatcttaatgtttataacatagcaagaagaaatatgtggctaattgacttggtagtattataaactgaataagtgttggtagacaatagtagtttgctaaatatgatttttttttatttcattttgcatttctattaaatttatcaattggaagttggaattagtgataatagtacaatatttagcttatgacatggtacaataggcataaaagctttggtatcaggggctatgaaagtttatgatttgtgagatgtgcagtgtttataaatagtaatctggttttcttataatcaaattcagaagctcttatctcggaataataattatgttcaaattcatttgactgtccaaataaagaaagctttgatcatgtgaaacatcatttttttttgctgtcaaaaacaaaaatcattcattactaaggttctgttatgcatttatgttagatcattttaatcataaaaggccatgtagttctctgcattatcttctctgcttttctatttaaatattctaggattggctcatatttgttgctgtttccgtatgagcatactaagacaggttgaacaattaaaacattgaaacaagatttccctgccagttagatttgcttaaaagttgtcatttaaaaattactcttgcctcttagttataactatagcctgtggcatttagatgcattttcttgaaagtaatcctgattgcatcaagatattgtagattgaaatgttatatttgtatgaactatgagctgaatatggacaggtattagacagttagcccactcgttagttcgttgcaaatggttgattaggtaaattggggaaatcggattagagggattgattctgtgaatttgctagtttttgtgtgaaaggagaaatcgttagtggaggggaaagggaagctcttggagaagagacctctctcttagttcatttgataaaattgttcatttgtttctatcaattttctatttattctatcttggttcataacatattcactgattaatgttcaatgtagattgctttgagatacgtaacaaactaaccattttgttgaaaaatattagagaaaattatggtttggaagagttagaaagagatatatctaggacaaaaaacatgaaaaggttaggaacctaggagataacagaatcagagaaaatatagaagataaaactgatttatttattagaaactgagtgtacaactacttatacagatataacagaatataaaatataacagtagttaatctgtatatctctaataaggaggaagcatggaagaatattacatcatattcagttaattaattggtcccatccaatcattgaatatggaggactacattgtaactactagaaaatgaaattccaattatactatagtggactaaaacacttcttaaatgccttgatatattgattatttataattttagtagaatgtttcttgtcaatggttaagcaactttattgtgttattgttattgagacagtccctttttgtagatagtatc

SEQ ID NO: 3654 - DNA, 1501 bp, Glycine max
  Intron number 14 from transcript Glyma09g18490.1 (locus Gl yma09g18490) derived from phytozome v7.0 (chr-ID Gm09; pos 22927732 to 22929232)
acccttacctatacaagaaaatttacaggtatataatatcttaaatttgtgagaatgtatctgcaccaaaatgatcaagtattgtcagcatatttaaccaataagtttttcttttttaaaaaagaaaaatctgtaattctgctatcattaatgcacttttttctaaattaatggaattctagtgaagttttcatacttggggcctgggcatagtctgtttgtagagagggcttaatgttaagaagcattacattctcccaaaactgtttgctatctcattacaaccccttgtagaatattggcttaatgcactttttggcctccccaggtattgtaattgtgcgatttgattcctcaagtttcaattgctcaaattgggtcctcactcctcaaagtatcacaaattaacaaatatatgattttggtccctcttttagtcttccattaaatatttaacatattttctgacatgacactgaatgatgatgtgacggctagcatgttgcctaatacatgttgacgtggcttaattgtatttttggtcccttacaattgtgatatccaagggactaaaaatgtaattaaccacattaacatgtcagcaaacatgttagttgtcacatcattgacatgtcatcatcagcaaatctcaaatcataaatatttaacaaaagattgacagagaggccaaaatctcacaattgtgttgcatggaggacccagtgcaattgaaacctctgggatcaaaattgcacaattatgatacctaggatcgaaagcatagttaagcctagatatcaactcctgaacttttattgcttttttcctgtaatttttaatgcataagaaataggtgactatgccttgatgtattttacttttacatctatgccatataattgagtctggttaaaattgacggtgggatttcctctgggttcactgcattataattgacggtgctttcttgattgaacattcatatatagtggcttgagtttttacgctctttagtgttatttctatgtatgcacattacattgcatatctgtaaactgcaggatgaatatcatccttaatctacatatatgtagtggagaaagaaatcttaagctattctgtctcaagaattatattctggacaaagaactctgagatttctgtcctttatatctactttcatacaacaccatggcattctgtgattaacaaagtgatgtctattttttttgcccaaactcactattatctcctgtattttcttttctttaaccttcgttggctgtctgtttcccaactttacttgcatcctgggaaggactgtttgtctttgtcaattatttacaataaaggaaagcaattccttgatttagtgacaaaattatgtaatttcatgcatcacttaatcattttgttttcattctctgtatttttcgttattataataattgtgtattgctttgcagatttgcaaagaaactgttgaggcagaagtgtagat

SEQ ID NO: 3655 - DNA, 4730 bp, Glycine max
  Intron number 1 from transcript Glyma06g15640.1 (locus Gly ma06g15640) derived from phytozome v7.0 (chr-ID Gm06; pos 12307918 to 12312647)
caagagccaaagagtgctgtgctgggtccctagaggttagtgctcactacactgctcaactcatactactcctatctctattctcttgttcttagttaattacagtatacccttttaatttcctctgtttctgtgctccatgaattaatatgaacgaatgaagcttcctctggcttttgaaaaactttgtgtgtgtcaatttcacataccctgttgctcctcctgtgcctattttccctatgtctccctccatttgcttgactttattgttttgtgggatgaaagcaaatatagaaaggaaacctcttgaagtgcaactcactattttctggagagtggtatcacctatcttgttttcttcctcatctttttttccctctgatctttctagctttgtgatatttgcggaagcattattgtaaaagcaaaacaagaaagtgaatgcgacccaagagagtagggaaatcaaataccatgattggcattgcaaacgcctaataatttaaatttgttactgctccatggtgagcaatgcttggtctgcgattgaaattggcgaccaacttagtagaattaattattcatattccatttttaatgtatttttttctgaaaaaatccaagtgaaaatcactatgctatatatacaacacaagggtcattttaatgataccaaaaggtgtcctcgtagcatcaaatctgctatagtgcactgatttttatgttttttaatttgcaaatgcgacatagatttaggtcttaaagctcaaataagccttctcgtcttgtcattcaagagtaaaagggcatcgagcatgcatgtgagagaattctcacttctcttgtctttgcacttaacagtttaaatggaactttgcagtggcggctatgttagatttcattcattcattctgggtcgagccatttttcttgaaggcttcttcaccttcattggcctcttacattccaccaatccaaaccctcataaattttacgtagttttttcaacaaaaaaagaaagaaaaaagaagtaacacagtaaacacacactcacattatttaccaaaataaaaaacacccacacatcaatagtattaaatggtagatatgattgcttgatgattatcttcaattatcttatttaattaatttttgttcacttaccttacacatataaaatacaactaatcaacaaaaagcatacttaaaaaggacctgattgagcatgtgaatgattcgctaatggatactctattatatacatgttttattgacatagaagagatatgtgtcagagttcttacaattaatataagtatttcacaatatattttttatattaattaattttaattattgcgggcacatggtaacgcacgtagtagaacacaacacaagttggcacacgaagcaacacgagtgcaagattctgaaacatccattacattacagctagtgcttgtgcggtttgggataacattaaacagataatgaagcaaaaatttcagaactgaaaggggcttctcaccctacactccagtggcagtggctccacacttattagtgtcatacacctaccaaggtccatgatatttctcaaacaaattaattcactgttttaattatcctcgtctctacattgtccagcatttttcacttctcttgccattttaattttttccagtcccttgaactaaagaaattaatttttcaatgtatgcttgaaataaaatactttatactaatgtacaagcacttttttaaaattaaactctacctggaagaagatgaatcggaaaaatctagaatcaaggggcgagtgaaagcgtgagttgtgacattggagggaggttttggaaggttcgaagggtgctaagaggtgaaaatgatgtatactatgatctatcttatcatatgcattttaattttcaccgattttttttcctaaagacacatgtcatgcaccatcttccattctgttttgccggacaccacagcttcctcgtttcttacagagggattcaaaactcttttgcataaacaaactaaattgtgacagagaaattgcttggccacattctgcttaggtagtcctttcaatggctattatattattattattattattattattattattatataaataccacaccgtgagaactagcacttcaattgcttcttaatgatgggtccttcaagttagtcacgtgggtttcttgtagtggcttgttgctaagaaaatccacccaaaattggaaaagtccagtttcaaagaagttttttttattttttattttatttttaaaatgctgaaactccttttgagaaaggggtgaaaatcctgattggcttccagttccagagatctgattgctcggggggatagaaagtgataacagagaaaggtcctttccatgtcattagcatggaagtcaaggtatataaataataatagggatgaatagtttatgcattaatgtagtaaaaagaattataatgttatttaattataaaattattatgtataaattaataaaaaaatattatgtataataaattttgctattttaatcattatctttaaaatcataattaattaaccatgtataaaaattattgtattcatacattcaatttctttctcttttttttatcttagtttattttttaaaaaagtttacttcttaacgcatcatttttcctttttttcttatgtacagaagacatatcatttctgctaatcattctttttttttttctttcttttatctctttctccgattatccctgtcattttatacacggtgtacatttaacatttttccataactaattaataaatacgatcctctacgttgtcccttgttatcagagatgacaacgtttcttctcatcgtgaatgacagctaaagttagtttgtcttaaatttagatacattcaattttaaattattcaacattattaaaatacatatttaaattagccacattattgaaatttatattcacacacgcactattttgaatttgaaaattaaagaatatttacaaaaattcagatgactgtagttaaaattttaactgtaaagaatcatgttccgatagtagtaaattcatcttgatgccgaataacgcagaacagaaggtcagacacggtcagctcgttagcaggtagtgaaccaacatcgctaagaatagtagtaatgttttgtgcaaacctatatcatacgaaaaaggaaatataaaaaaagaggtaaaaaaaaaaaagcaacaagagaggtactagtatgaagtgagtattactacaagcatcttgctaattcttatgtgattaattaaaaaattaaaaaagaaaaaaactattataaaaatcataaaaaaataatcaacagcataattttctacatttcaataaaaaaattccttcttcttaagatgttgattaaaaaaattttaaaatacttgttcataaatttttattcttttaattcagatgaaagatatttgttaacactaccttcccaccattaaggtgaattatttttgttgcataataccaacaacctcgcattaatggtggaaggaaggaaaaaacattacacgaaggccaagaaattaaaatctgaactgcattgcagaggaagtgagtcggtgctataatgatttgctgcaataagggaacccctatggtggctcgggcacctatatcactcttaggtcttcacactttcgactcatcgctttctctttctctaggaagggtaaaagggcacttccatagcccccagtactactactacttctacttgtgcctacactacacacataccatttagtatctattttcacttgttatgttatctctaggactcctcttatagccattaatgcgtcttaaacacacaatgccaggaaccatcaaccatggaattatgtagctgtacagctcttaattactttataattaaggcgctatttgtttgttattgtcattctcttcaccaacaacaaactcagagcaaataaaaagaagatttttattattattattataagaatgaaaaaaaaaaacatttggaatgatgaaaagaccatggagttggatcctgctgtggttgaattgaatttgtctgaaatctgaactttgatctgtggtttctggttcagccttgtcacaacaatacaacacttatgcttgatgtaggcatattcttttcatgtagcaggtcctttccctcgaaagcgaaatgcttttaaaaattctgtactttttgtctcttcacttttaatgtagtaacaataccacaactttattattattattgttgttattgttaatattatataatgcggtcaatgtttaaacctgtgtcactatttgatgattactaatttataaactaacgctgaaattttctctctttggttagttatgatgacatagagagagataataggtggggattacattacataacagcaaagcatgaaggtgttgttgtagagtggttgttgttgtagttgttgtagttgcagcagagtgcagagaacagtaacatcttgtttaccgcgccgcgccgcttgtgtgtcgctcgtgcgtgcagttttcactcttcaatctcgaggtgaaagaaagacttgtttttggtttggtttgttttctgggtgacaccactttccttcttccgccagtttctctcgtgtcttgaaccttggttcggttcact

SEQ ID NO: 3656 - DNA, 1423 bp, Glycine max
  Intron number 2 from transcript Glyma02g08710.1 (locus Gly ma02g08710) derived from phytozome v7.0 (chr-ID Gm02; pos 6769261 to 6770683)
tgcttaattacattcaggttggtttgacatttctccctttttcatatactatagcatcattggtgtgtgcttctgctgatcgggactgcaggactgtgtgtagcaaacaaacatacaacacaagacatacatacggaggattggcatggattataggttttaccaatggatgaaaattagtggcaagaaagtgcattattgaaaatgaatcatagatgaatgacttgtatgaaagggaagaagattagcaaaactggtttagtttagactatatttctttagattagtatttttaaaatcagaattttttaaattgtggttgcattgcaattacacacaaaaaaggataattgcaggaaaatatggatgatgcaaccacatttggggttgtagatgctgccaaaactttaatattgtagctgcaattgtggctacagactgtaacttaaaaagttggagtggattattggcctgatcatgactaaatatttccttgaggttatcaatttttaagttgtcagaaccaagccaaggctttataatttcataaagtaagtttataatagcccatctaggatcaggagtgagttatggtagtgaacgttgggctttagagggacatgagaatacaatgggggatagtagaaattataatattaaggtggatgtgtgttcacacaagaaaggacaggatacaaaatgattgtctacaaggatgtgacaccgattgaggaaaagatgacatgaaattgatttaggtagtttgtatatgtgcaaactgcaaaaagaagaccacctgaagtaccggtgaggatagtaaagattggatgtttttagacctgtgaaaaaggggagaggaaaatcaagaagtatattgttaccacttacaagtgatttcacggtgaataatatccttgggaatttggtttttaactaagcccaaagatgtcatgcaatccatgtagccgatcttgtctactctagtatgataagacttttgttgtaggctttagaaggtacaatagccttgagagttgggactggtaattgataagtttttttttttggtttggttcaacatttgtagaatcatgattgacaatttcacaaaatataaaatggtgagattttgtaacttttgtgttcatgttgcaatttagatatctcgaagttataaaaaaggaaactcaatacacaaggctcccacttaatgcgttttggggagggtagttgcccacagctcacaagtggagagcctgtttttaggatttaaacttgtgatatattgttggaatattagagggtgataacattgtaaatttagtgtcaaatgtgccattcgtgatggttaattcttcaaaattattgatatttcctgttttcttcggttgtaaagtatgtgaaagttcattcctcttgcaga

SEQ ID NO: 3657 - DNA, 1793 bp, Glycine max
  Intron number 1 from transcript Glyma09g17060.1 (locus Gly ma09g17060) derived from phytozome v7.0 (chr-ID Gm09; pos 20781198 to 20782990 reverse strand)
cttcatcaacgatcatctcttccttaatctcatcagtgagtccaccttctccttttccaccctttctcaattcttcatttttcattagttattagtattttgtttgttaatcggaggttttgaactcaccacctcgttttttctttcacaagccaaccttataactctagtgaacaataataataggccaaaaatgtgtttttattttattttttatctatgttctcaaagttcaataaacatttagatttaattccttgtttttaagaattcattatattcctagagtgtgaatcaactggcccgagattgttctagatagtctcacaattagattcttcggtagcaactcttaaaaatttggaaggagagttttatcgtctatagtagtagaagtagttactctttgtatcaaaaagatcaaatctatcaatatttggacagaaatacaaggtttttttttaacaataataataccaatattgtgggtaccattgagggcgagccctggtgcagcggtaaagttgtgccttgtgacttgttggtcatgggttcgaatccggaaacagcctctttgcatatgcaagggtaaggctgcgtacaacatccctcccccataccttcgcatagcgaagagcctctgggcaatggggtacgaataaaaaaaaaaattgtgggtaccattgaatgtttggattaactaacataacgctattccaacttaattagtagtattattgagtatgagccattcaatacaataggagtgagtgaactttgttgcctataatagtcttatctgacttgtgcggaattggtttgtttggaggatattttttattttatggatttgttttgggggatgtgtcgttgatttgggggagggttgatcaatgttgatattttggacctttttggttgcttatgagatttggggtcttggaattatttggatggaccattaatttggattatgtgcttcttctggctggccgattctgttgttggtttcttagttttacatgcttttgcggctacggaaactgtggaaaattcaatttgctttcaggtcatagataggattaagagacgtggtttcctttctttttttaagaaaaaaaaattgagtggtgtttttagaaggaaattattattaaaattttatgtgtatatatatacatatcctagagatcggacagggtaaatatttcctttaaagtttgaacctttttaattatcatgtagttaattagttattcctcaatttgtctttgcttttgtgtgagcgggagttttcctcttttatatcagtcaatgatatgcctttttttgacttcagagtaaatacagttttatatggtttgctttgttgtgtaagtgacatgggagaagatggaaaatttggaatgaagattattactttattcatacaatcaaggcgcacactcgatcaagttaccatagtatgtcatttgaaattagtgtgaccattatatgttgtaatttggagtgctaggagtagggttacatatttgaaaaattggcacacataatgtgatgtgagtaaagggtcatgcgaattattgatttacctactaattctggattaatatggtttatgaaattccatattctcagtttctgttttctcttatttgtgcatctttttacatatcctagcacatttcccctctacttttatttatgttgtgcatattctggatactgcattgcttttggaagttatttaattttgttgaaatttaatctaattgcaggggttgctcaagaaa

SEQ ID NO: 3658 - DNA, 672 bp, Glycine max
  Intron number 1 from transcript Glyma08g47340.1 (locus Gly ma08g47340) derived from phytozome v7.0 (chr-ID Gm08; pos 46222340 to 46223011 reverse strand)
aggtcttggatttgtcttggtccagatctcaggtaagctttttgctttcatttacttttatcttgatttgaaatgtgtgtttagctgaatatttttaaaattaattttcaaagaatttaattaataaaattgattcacaaataaaaagatttatgtttatcatcggagcaaatgtagagtgtaaattgattttgaatacttttatcattgataaaaaaaaaacaactatttttcatcatttctagttaaaataaggttttgagacaatcaattttatccaaaaacaatcaaatgcctatttttttcttttttcttttttttttttttgatgattttgattgtgaaactaacacactcaaaagcaacttcatcctcatgaatccaaattttatttgattggaaacatttttaagtagtttctatattggataaacaattctatgctcattgttactattaatttctttttggaataaaaacaccaaaatacaaatcactttatttgaaaaccaatatattcaaaatcaatttcgtaaatgttcatgtatccacgcatatattctacagaaaatttaccatgcatgctttataaattttctgcaaagaaaaaactgaaggatgattttattttctaatgtggatttgtccttgcagttacttctctcgtcttcc

SEQ ID NO: 3659 - DNA, 1387 bp, Glycine max
  Intron number 12 from transcript Glyma06g12360.1 (locus Gl yma06g12360) derived from phytozome v7.0 (chr-ID Gm06; pos 9537592 to 9538978 reverse strand)
aagagaggcgcagagcactgtacaacaaacataaggtatgccttttgcagttaataatgattttttatattagtgatgcattcttcaatctcaccctctctctaaagtagaagaacagtcttcccttgttctaaaaagtttaactaaggaaagagtttcatgaacattgtctgtgctctagactgtagtgtcctgtctggaattgcaacgttggaaactacacatgcttggggtggtggtagttaaggttgccaatgtcatatactttaccaaagaccatatagtgaaatgtgaatagaaaaatggatacttggatcataaggtcctgcttctatcccttgttcttttttaaacatttcaaagtccccccattttgaaggtgtgtttggatgttgggaggggaagagaaaaaaccaaactaaaaagggaaggcgagagaacgattttttccccagcccttcccgaatggaagagggagaaactcatgtgcctaaccaaaatcaagcagttgaacccaattgaaaccccaagctaaactgaaacccaacatgaaactttaagatgaagttctggttgtaagctaaacacagagcttcaaaacccaaagccgtgctatttatgttcatggttctaatagtgatagcctacctgtttagaatgatatctatattttatcatacttttttgggatatcagacaaatgtatattggctgtacctctcctattgctgtattccttgcatactttaagtgttagaaatatgtatattaaatgaatgtgtggccatacaagaaaagacaggatacaaaatgattgtatacgagaagatattagtgacatgtattgaggaaaaaaaaacaaaaaattagtttaaggtgatttggacatgtgcatagaaagccattgaaggtactggtgaggagagtagatagcagggtttttagctttctgaaaactaaaaggggtagtgagaggctaaaaaggacctggaggaaattattataagggatctcatcatgaatggtatactggagaatttggtttagtcaatggtgttatgtgagccttgcagctgatttcacctagtaggataaagctattgttgtagtattggaagtgttagaaatgatgacatacccaaattaaagttagtaatgaatgatatatatggaaacttctttcaccattttcatttcattggtattctatttgaatgaacctaattaacaacggaagaacaacattttgattcttcatatgcccggatgatagccgtgatttgatatctgactgcacaatattgatcttttagttgattttaatttcatttgttttacttgtttgttgttaggatcaggagaaaattaagaggaaaaagttgctggt

SEQ ID NO: 3660 - DNA, 3346 bp, Glycine max
  Intron number 3 from transcript Glyma18g38430.1 (locus Gly ma18g38430) derived from phytozome v7.0 (chr-ID Gm18; pos 45899013 to 45902358)
agtaagatttctctctctttctctttttcctctgtttctgtgtattaattaatttttattatataatttttttgctttgttttctagtgatattattggttcctatagtatctcatctcatgataggtcatgtgcttagtagattagtttatctgtttaaggtctcttttaatttttattatacttagagaagagtgctcacatgcatgatcatttaactgaatagaaggatcagcactcagcacagattcagcacggcaaatccacttggcttttactattaattaatgtagtaataattattgggatgcatgaccaaaagaaggaaaatacccttgattattaatttctcgtgaatcctccttttggaataatattggataacctttttttttttggtgaatttcgcttttatgaaaactctgtcaaagtggttaatctagctattgtgttagttgaaagctactagctatatgtgattttccattgttgggctcaccccaaaatttatgcctatttttgtacaagggtgataaatatccacatcaaaacaatgctaagggaatttagagcaaatttccttgttggaacaaatatcacctctagaaaataacatctaaagaattctaaactaataattgtttgggaaggacctaccatttttctgaaactttatgttatactactggtactaaagtattactatttttttttaacataaggtattcccagcccaggaactaataactaatccaagtatcagtatttttgacttaaagagtagtgcacaatattaagtgaactataccagaagataattgtatagttttatacccgacgatgttaattagtatcatgtgtaagaaaacgagaaaaataatagtatttgattccctattaatgaccccttgttattctttgatgcctttcacactctgacgtatttagccggtttgttattccctttagtcacggtaccattaattttaaaattctccctctcttttctttttttcctaattaataaatgtagttcttgctttaattaattcttcacgttctcttactcgattctaaggaatcaaccaccatgttctttgcagatgagatctcttaaaaattgaagcgttcatattctatttgccagcttaaccacatgctggtgtcgcgtgatccgaccatctggctcatgataattttctcgtctttttatttatttattttccttatccgaaaattgcttttccaagtacaaacaccattttgtaccaaaaaatccaagtttcttgactaatgacttcaataagtcattgtgtcttatgtatacctgtcatttaacttcctcttcacatttgtagaatagtgatccccttaattgcttcgctaatcacattcattggtatagaacagtagatgaaagtaaatctcttctaagcttgctttggtgaacaaaactattttaattatatgtatgggatatatacattgtctaagttaaaatatagtaggcaatttctttgttaattaatatatgacctagaggaagttcttgatggttagagtaaatgagtaataccggtctttttactactcaatccttgcatatttttatgctatatattatatctgattaaatttatatactactactagtatattttaagggctttcaatggttgatgaaaatcaaaatcatgagagtcactctccatattctccaattgcctcggataaaataatttgcatcatccattccacatgattaatttggtcctacgtacagttccaaatcagtaaataaagactttttctttgtattattgatttgcctttttccatctttatatctcttcccaatagaaccaaatatccaaagttgaattcagagtgttaattaggaacttatgcagtagccacactcccacatatcttccaacagggtggggcaatgcacatgaatgggttcctcactccagcctgtctacaagaaatagctccaaattgcagatcagatctggttccaccctaacacttttctagtcatagttgtattttggccgatctagcagcagcagcagctgctgtgtctctgacacattatgctatacaatgagacacccatgagcttattaaataaccatgaatcaggaacttaattaataataacgctttttcaccccaccgacacccccaaaaagtactaagcaactagatcttggcatttattttcctagcagagataaattatgcttgatcccaacccccgattttccgtatgcaccgtatcattctatccgtatagacccacatgacccacccactagtctcatcttagccatgcagggacatcaacgatattagtaattcatacccacttgcatacttattaaactgttaattactaatttagttcaattttcaattcattttctcatgtatgtcatcatttaataacacaccagcatgacactgtgatagctaatcatcattaattaataattagctagaatcctatacagttttgcgttagtcggtgacaaaagttaagtgatgtaatttaagagcatatagatgtacttaatttattaataataatagccttatatattcatcataatccatttatatgtctgaacaataaaaaagctattatatatatatatatatactcactttcttttccatcttgcactatttttttatctctttatatttttcattatatcattttattaatttctttctctttctttattatttccctgtattatctcctttcttcaaccaatacacctaggaaaacaatatttagtgagtgtagactattataactcccattaactccacatgatacataaacctttttcgatacaacacatgatgaataattaagtattattaatttttcttaaaatataaaatttaaacattagtataaacattggttaggactataaatgaatagtagtgtaagataacctaaaaagttctccaaatttagggaatactttatttttttctaaaaagaatagatgcaaactcttagtcaaaagtcaatttttattaatttgtagtcatttggaaaaaaaaaaaactctcagctagaattgatgaaaaacacacaaaaaaaataaggaattaactataacaaattaaaagtagaaagctagaatttatttagtgttaatgaaaagtgaagttggtccactgcatcacatccatgactcctttggatgatgtttaaattagttttttcatgtgctttgtttctttactttatttattaattatcattaatttacctaaaacaggagcatacgcaactacacggctcgaaggaacctga

SEQ ID NO: 3661 - DNA, 2935 bp, Glycine max
  Intron number 5 from transcript Glyma15g03500.1 (locus Gly ma15g03500) derived from phytozome v7.0 (chr-ID Gm15; pos 2434858 to 2437792)
tacgttcagctggactgcaagctctatcccatgtaatgctccatatccggtttatttgttcttgcagaatttgcttacgcatttccattagtttataattgtaacttgtaaggacttctctattctttttttatcaatatgcacaagaatctgcacgttttgatgatttttacggaaagggcctctgcagaatataaaaattaacagttttagttatttctgattaatagtcattaaacattgaacttcttcatacggacttgcaactttatttaacttagtagaatgtttaagctatagaagactagaagctttatttttggaaatagttgttatagtgatacatttaaatcattcaaactgtttattagttaccttgtctctaccacagtacctttgtttagttgtctttcaaggtcaattataccttccctggataccttttgtgacaccctctaccttggcatacatatttatataatatcatacatgaaaatatataattaattaaaatgattttattcaataaacataaaggagctcatgcgggtaaaagattcacattcgcgttaatcaccaaattaaaaacttatcaaataagggtatgaaaacatctctggtccaaaacaaggtcatctaatttatttcttttataaaaggaaacaatttaagcagaagaataacataaagtaacatattcagaatattatgcaaaaaacacaggaacccatgtctcaatgtcacaccttatcagaacattgtattccagcgttctctagcataaggttcttcatagttatccacctaaccatgtgctcccacggacacaaagttcgagatcatcaccggattcaaacacaaacaacatatcaggagtgagttatcacattcctaactaatagagagaaacggaaaacatagatatacatatcatataaatgaaatacaacttacttaacacagctcgtgtcattccaccacttatcacgtgacatcacttctcaacactacatatctcacacattttcacatcattcatgtactcaaggatcaaaacataatagcactcaaccaatcaatatcgattaatacacaaatattatgtaacaaatatactaagactcaatcctatatgcaatgtggtaccatgtcagtgaaaaacctcatcggacgcttaggagtacatgacaagagagaccatgcactggtaagtcaagttagggtcactttgttttgtgagagcgctcaaaccatatgggatcagcataggcttcaaagaacattcaaaccgaatatagttatccccaagacctacactccgaagagtccgtcaggacctctccctcctgattcaggttcaacccaaaaaatattttagcatgtagattctatctatgaactatataaaacacacaaatactcaattgttctcaaaataattttaactcatcgcgcttcaaagtgattaaactcgtcgggttcccactggatcccatcacaatcgcagtaactcgttgcccttaaagggtcttacaattatgtgattgtacggttcatagctcacaactcaatgcacacaatatctcaatacacatgtatgatctcacaatttaacaaatactcaacttgtcatgtacacatagttcatctcactttcataatcccaagacaacatgttatcacacctcatgcattatataaatgtcacacaataataatattaatgttattttcatatgattaaaccccttaaacaatttcacagaatcatatcaaaatcataggtcacaaacatgaaaacagtgaaagcactcaattttatcaaccaattcgcatcagggtaccaattggtccatcaaacacaacaatctcataattatagtcataaaggaagaatcacaatacaataaacattccaaactaaatttcaatttaatcctctaaggatccctacatatgttcattctaatcttaattgcgataaactcatctcttacctctaagtgggttcatgtgtgtagtccggcagcgatagtggcgtttctagtggttccctaagattcatcaagttttttctctggttgctttgctagggtttccaagcgttagagagaaagagaagagattgaaatcctcatttcactgtcttcgtgcgagggacgtttctctctccacggaccttatttcgcaaatcccaacggcggggatgtgcaaaaatgaattccgaacctggtgttcaaattttatgacgatccaacggttaacgagttcgggatcgtagttttactaggataagtttgggtgaatgcgggaaaaagagagctacgtgccaaatatatttttctcaaagagagctacgtgccaaatatatttttctcactattgacattatttcacaaatcccaacagtgagaatgtgcaaaaatgagttctaaatttggtgttcaaattttatgacaatccaacagtgtccgagattgtagttttaccgtgacaaatttgagtgtatgtgggaaaaagagaaggttttggaagagggagaaggaaaaacaaatttgagagaaataaagagtatagagatgtaaactaacctaatatgtctctatttataattagggtactctcagccggttatttactctatttttctttattatattattttataaaaggaactctattttactccttatcaaatgaataaataaaacatcctttttatttttaagaacatatatttattttatttatcttaaaatcattattttaattaataaaaaatatttctccttatttatttaattacaaaaacctttttattttcctaaaactctatttatttttaaataaaaaattatttttaatttattttatgaaaaatgagatgttacaccttttgttcttcctccctatgttttttgaccaggtgcagttc

SEQ ID NO: 3662 - DNA, 1278 bp, Glycine max
  Intron number 2 from transcript Glyma18g12770.1 (locus Gly ma18g12770) derived from phytozome v7.0 (chr-ID Gm18; pos 12066472 to 12067749 reverse strand)
tggtggagctgctgtcatcactagcactaacccaagtaaggcttctactgttatgaccttactccttagaagactattagattaagacttgtttggtttgatttgatgaaatattttttgtttttattttctatttgtcaaataattatgaaaatactgtttttctcatgagtaaatagtttatgcaatacctgtgtaaagtgttttggtgcatttggtagattggaaagaaatgaaaataaagtgaaatggattaaaattttgaattgaagtaaaatgtaaaattgtgagttcaattctctaaacaaacacatacataatcataactttatggtgtaggataagtttattaatttttataattatttttttaaaattatacctgtcatgattttgattagtttgtactaatggtgtaagaatttactgtacatatatttgtttcttattttcaaagcatagaaaatggggcacaacaaaatgataattttaccatttcctgaagagatggatcttaataaataagaaataaagtgaaattaaagtgacattttaataataactaggtaggcccttaaaaagcacgttaaatgtttaggctaggtgactatttttaatttaagaataagagacacaaatcaaaatgtgcaacaaaccaagaaaactagcactagtagtaggggtactactcagctggaaaccaaagtaaaaactcagtgcctttgattggagatcagaactatccctgtgatggattcttgggttccattctacacagacaggagaaaaataaaataagcttttactgcatcttttttaaggaaatattttactgcgtctctgaatagactttgaaaatgccttggggggatacataggaactaaaaaagtgccactgggtgatgccagaagtcaagcttttttctttttctactttattagagaacgtatctcaaaagcctcctatatcttgtcgatatcaaaggcaatcctatttatcacaatttgtttttcaaaacattgtgtaaaataactaatgcggatacttttaataaagacccttgactttaaatgtcgtctaatacattaatttatgatcattataagtagtattaaagtaatataaaaaaacctggttgattataaagaggtctaatgtcatttaattgaacagaatgcttgaattattattgagctgtattcttacgtgtgaaaaaagctcggttgattagaaacttttattagtttatcaatgtgttgcattgcaggtaccggggc

SEQ ID NO: 3663 - DNA, 1942 bp, Glycine max
  Intron number 1 from transcript Glyma20g34590.1 (locus Gly ma20g34590) derived from phytozome v7.0 (chr-ID Gm20; pos 42970109 to 42972050)
cctcttggaactcgaggcaccaattaagatctgtggtattctttttcccctccctcaatcaatcacatgcttctattactatttcttagtcagcttacttgttacatgatcatgtcagttctgtgatgacttttactgagtggctttttgtatgtgttattgtagcatgtgtggattgttgtctgtgactaaaaaacaagttaaagctataggataattctttttatacaaagcagttatggtctaaagttgttttagattataggtttaggggaagttcttataattgaattggagatcacatttgaaacaacttggtgtcttgttttttttgttttttcctgatgttggtaaggttgtgtgtcatcattgaaactttggtctttaattgagccgaagtgcgatccatgtatcttacctcacttagtaagataagacttagttgttgctgctacggttgcatatgtcttaccctccctagaccccataattcttgtttatttgaattataatattaatgcctttctatgagctctagaattacaattttttattagattctttaaattgcattatattttatcatattgaagtaaaagaggccatacccctcgaaaaagaagaactcctgttaaattctgtttttaggaatattaaagtgtctcttcttattctgttgatctgttctcatggttgtttcatagaagtatgctcaattcaacttgaggttttctcaaaacctattgtatgaaatatcttagtctgggtggattataacacgaataagaatctttctagaaacttaattatcttcatggggacttcaggaagcaaaagttttgtggatggatttgtccagtatggaaatgaaactatcttctcaatggtactagccaatgtgtcacatattttcacttgtaaatactgaaacatgaattttttccctctgcaattcaagtaccttaatatactatgattgacaagccatttctgctggtattttttttttttttttggtggaagctggcatataatttattacagagtatgctttccccattccatatcaataaactgttgatctgaatatttcccatgcagcttcaactggaaaacaagtatgatatacatgatatgcatattatgtatattttttacatgtaatacagaccggcaagattattacagaatatgctttaccctctcttaggcttcctcacatatagctaactagtaatacagaccaaaatcctctgtattttagcaaaattaaaatagccattgtcctacgacaaccaccaccaagccttatccaattaggttgggttggattggattgaaacaagcatcaaacaatgtcacaaggctttctaaaaccaaattataattaaattcaattatcgtaaggtcttctttaactgatcgtcctaatgctttctgcagtataatttaataactatctactattgttgtggttattataatgcatgtgtctgtattgtttatgtagttgttttgtttgtgtaatatgaagaaacagagcggagttccacgtaaagtgacctgtatttggaaagattgatgtattatattgtaaatataaacctttttagaaccagttatcaatcagtgttaagtgaacaaaagttactccaagggcagttcgatcggtttttcgcagaattatacaattgaatatctaaatttctatgatgactactaggcactgcacaaagtttcttatttaattttttaaaatgattttacatctaggtggaaattagtatcccatattagacaataagatttggagtttggtcaaaaattacaggcaatcatcttgcataacttttttttcttttgtccagaatgaaaactatattttcattttgtaatttaagattggaagtaatagtttgcttcatttctgtgttaccaggag

SEQ ID NO: 3664 - DNA, 3169 bp, Glycine max
  Intron number 1 from transcript Glyma20g26180.1 (locus Gly ma20g26180) derived from phytozome v7.0 (chr-ID Gm20; pos 35700704 to 35703872)
gagtgcacgggattatcctctcataactcagggtatgcctatttggtcttttctatttgcatcttgaatttgtgaccgtgttttgatgaatcaatacctagattgatgctgtattagttagaaatttgaaggtgtaggattcatattcaaatcaaattaccctctaaaaggaaaaatcaatgggctttgtagttggtaattctgtatttgtgaatttgatttttgagtgatctattattaagtagtagtgtcttggtactcattggaaagtttctgcaatttgagtggtccaaaaattcactttttgttcctttagatcacccttttcttttagctcccttttttttagtgtatgcttggggtggagttttggagggaaaggaaagggagagctaatagtttagttttgaattaagacatgaagtttatgctaaactgtctttttatttgtttcattttaaatttgatcaaattagagaatatatttattaaaaatgaaaatttgccctcccttccatttccctccagaatccaactcccaaacatattcagtatttattggaaacttgatgtggtgtttagaattaattttcaaatcaacgagcttgcccttagatgcatgcttactcatttcatttatcccggattatttgaaaatggtgtcttatcattaaatctttaatatgatcagcttgaatttatgtatgtcagtataaatattcatatatgtttttctttttaaaatttctctagttgtcttaaatcttaattttacttccttgttttggaatttcatgagttctgtttgattagttctaaaagacttttgcattgaggtccatgtaatttgcttttatgtgaataaatgatactttctttaagttctcattttgagatttctttttgcattgatattttttggttcaaatactgatgtttaaggtttgtacttttaaaacaatactgaaatgtcttcacattggattggtcgttacaggttaattaaactgaggtccgtccatgtgttactttgaattctaattttcattttctaaatacattttaaattctacctagagttgaccatgatttaggatatagtattgaatgtggaggacactaagttgaaaagacaggttttccaaatgattagttttttcatgcataaggaatgtctggtaaaacccaggaggtgaagccaagacataaattgagaggggctgcaaaagggaaagagggtattgaggatcgctgctgtggagacaggagtgaggaggtagagatggtagaagggtatttatgggcgacaggtcagggggaacttgctcttggcttcgcctttggtggttacagccaaaagacagaagttatggttcttaacttcttatcttaaccaaataacaaattctgagctagagattcttcaaactcatctgtgaatagtcaagtctgaagaaactccaccaaaaatctggttcagtttgctagtgaatgagtttaggtcatcttatgaatttgaagttactttatttgcttaccttgttttgttcaacctgtttgtgaatgcatttcacactcctgccaaagtatagcttgagaatttttgacaaactgctttggcgttgcatactaatttccaaatggaagagattgattctaagctggggattgtattttatgtgatagaaggttgaatatcttcagtgcttaatattgcaaaatctgacaagggaccaagtcaattcttctgattgcatgggattacatgtgattattgttatttgctcatgaattgataagttgaaatactgatcttgttatacagatcttataagactggagcatgggcttctaattggagggaattttttaagcatccttacaaagtggagtagcaagttgtggaatgaaattgttaatgatgaattaacagatagtctgactgatatgtgcccagaagatgttatttagcatgctcaaatgtcaaatagttttgagcaaaaagcttgtaaaaaatagcttgtagatactaaaatgttttaaggggaatggacagctgcagctgtttaattattagtttcagcacttcaattatgcttttggatttaacaaggacaattgggtatgtttcactctggtatacacctgctacaggaagtaagcataatcaggagcaacagacatgtagttcaaactttcattatgattatgatgaaggggggggggggggacattgcacactgatatacacctactattgcatactgttagttgtagatggaaatcttgagatgtcggtccatcttgaaaacacttaatcatttgagggctacatggatggagtcagagatatcactaatggcacttgttagttgtagatgaaaatcttgagatgtcagtccatcttgaaaacacttaatcatttgagggctacatggatggagtcagagatatcactaatggcacttgttagttgtagatgaaaatcttgagatgtcagtccatcttgaaaacacttaatcatttgagggctacatggatggagtcagagatatcactaatggcacttgtccaaggccaacagtaaagaaaacacatgtttgtatgttggtaaccacagagatgggcttttgatgccccaatatgtgagtcacttgtgaggcattcaaccagacacattgtttttactagaatctcctaaggcatttcatgttttgcaagtgaacccttagaaccctgtacagccaatggagctcgctggtccaaaaattttgagtttggctataaattatcattaacctctagattggcaagtggcaacactctattctgcttcggttctcgtagaccctagtcgtgtcatggccttgttgattaaaaataaacattggggttcctctgataccagtagagccggacatctttatcggttttgctatatattattttagttgcagtacaagatcatttatattcactattttatttatttattttaagtgaagaaatactcattattctaaacttcattcactgaattctgcttgtttgaaggtcaatagagttctttgttttttgttcatattctcatctcagcttgatgtttgccttctttccatacttttctaagttactgatccaactctattatctttatcagatctgtccc

SEQ ID NO: 3665 - DNA, 1159 bp, Glycine max; identical to SEQ ID NO: 3287
  Intron number 4 from transcript Glyma12g36540.5 (locus Gly ma12g36540) derived from phytozome v7.0 (chr-ID Gm12; pos 39582972 to 39584130 reverse strand)

SEQ ID NO: 3666 - DNA, 705 bp, Glycine max
  Intron number 3 from transcript Glyma07g30570.1 (locus Gly ma07g30570) derived from phytozome v7.0 (chr-ID Gm07; pos 35543275 to 35543979)
ttggaatagctccagaggtaagttccattatcataatcccttcagtctcttatataagcgcacacaaaataaatcatgatgattaagaatattaattaactttatttaattttcttaatctctttttaaaaatgaatttcattttctaaagaagaaaacttagatacaataccttaggtgtttttttgttgttctcccatcagaattggaggagtttcacctttataatccacataatcctttaatgtaaatctttattttgcatattaccgaaataaaactctaaatctagtcggagaacaacacaaacaacccctaaagtattgtatctaagttttttcctttccaaaaccgccctttatgctaatggatggaaaacttcaatttttgggaacttgattcattttgaaggttgtgtagttgatatcatgagaatctgagttattggaaataaaatctgatttaaataaaggatagtttaagaatgatttcattaataaggtgaaattagttgagatttgcttatattctgcacgattatacttattttttttcttagactagagagggtgaatatcattagctaattaggcattagtggctagtgtaatccatcaactcagtaatcattgtagtgcttgaggctgataaactggtattgaccaagcaatcaaattattttgttgtataggtgacagcagcaac

SEQ ID NO: 3667 - DNA, 786 bp, Glycine max
  Intron number 5 from transcript Glyma07g00630.1 (locus Gly ma07g00630) derived from phytozome v7.0 (chr-ID Gm07; pos 325217 to 326002 reverse strand)
actgcttttcagattggccggtgaacgcgagctaggtacacttattaatttttcttcttctcatcttttaatgattctgatgattgtcatctttgcttaccatgagcttaggaaataacaattttattaagcattatcctactactagtttaacacataattaacaaatcacatatttgtggcaatggtgagtttgtagtgtaaatatagatgttaagagaaattaaccggagtggtcaactattggcacaaaatctaaaaaaaaagaaacagtttggcattgatgctgttggttttaaggtactgtatcacaaaaggatctagtagcagactattgataatggtccggaaaagaattaaattatttgattttctgtaacttcattaaaatgttctgatgtgtttgataaccttaggtggatatgcaatttagaaattttaactggcgaaagtcatactctcctttagagctgttgcaatgtgaatcgcttttcagtttctagtcctatttggatttcattatatattgtttataaatcaatctgtattctgtagcatgaatcttggcagtagccttcaattaattaatcggcttttggaatgtacaagctttgtttttttgttaactgtaataataccaattgcacataactgcatgtggtcaatggttattacttttttaattgcaatctgcattttgagttacttattatggtctttcaatttatattttgaatcatccagtgataagtacagcagtgtcacccccaactccagttggtgact

SEQ ID NO: 3668 - DNA, 2325 bp, Glycine max
  Intron number 2 from transcript Glyma06g43630.1 (locus Gly ma06g43630) derived from phytozome v7.0 (chr-ID Gm06; pos 46644820 to 46647144)
ctctctccaaagtggcatttgaggttggttctttcattcttgtgctttaaattatttatttattgctcagtgttttgattgaaacacttcaatttttggaggtgttgtgtttgtccatgcaagttttgtcactttcctgatctagctttcaagtttttttactcaaacttgaaaacttgttgagtcatttccatgtttgaactcaaattcagctaccctctaatctgatctaaatttgggtatttgagctcagaacttggtgtgctgcatgtgcataattttgtggttaatgtgtggcactgtgcacactaaactaagagcaataaaggctggatgcgattggttggagactttgctttttgctggggacatatctaaatgttaatttaagagataataaatatttgggtcttattaattattaatatatactttactcaaaacagttctcttactttctctacctaattcaaacattactgcacataaaagaacaagacagtggaaagccataataatttattcctgcaattttgtattaattattaaaacagacgtggagtttcattttccacatattcatttgattttggtagaaaagggaaactttttcttttcttgcttcatattcaaaactaccaagcagtttcttcctttttttccctttattttttttactagaaaacctcaactttggttacatccataaagaccatgaaaacccagttgctttatatagaaactttatcaaacaaatatttcaattaggaatgatttgtgtttggagatctaactttccctccaattcagtgtgatttaattaacatcaatccctgattgaagttttgaacagtgacttagttttcatcattggctgtaactgaatcatgagtaagacaacgactaacaccattattcaacaaaaccgtttttctttccatcattgctctctgcaaatgaaatgaaatgaatcataatttgatattttgcctctttttttttagcctctccttccaccagaaaatcttattatatgcttcattatgtttgtttatggtataagcttccataatgctatttatatttatacaatattacaaaagatatataattattcataattgcgtgtgggttaatttagttcaaaattttttttaaagaaaatattagttgaatcagaaattttaaaatctacttgtacaactgaaaaaaactagaactccaacaaaatactttttaattaagcacatgggaaaatatttttatcaattttaattataaaaataccacattatattcactttataattttttttcgcattgaaaataataaaatcttttaaaaacagaaaataaaataaaaatatctcttcaattattaataaaattttaaaataaattttcaaactagactgaccgcattctgtggatttctgagtatgtcttctaaaagaggtatataattaataatttaaccctctatcacttggagaatggaccacttgtggttacaaacagttctctgcttttgcgtttactccacaaatccagtaaactgcagtgttaaaaattggaccacttcttggtgataagcaagggccatgttttgccttttatatcaccttcattttttaattttgaattagaggataagtattctcactaatggtaaagtgagattataaattctaaggctattcatatcctcttcacaaaaatagaaatcctgtatgatttttaatcatttttgaagggtgctaacatattctagcactcttattgtcctatcttgtatgattagtgctaataacatattttaacactcttttcaatacattttcttttaagaattagacccattaaacaaaaattgaaagcacatatttaataaaattctcatgaacttcacttataaaaagaatgtattaaaaaagtgtattatttcaatatcttgtatgatcatgttttgacaaaatgttaactcatacttttggatattgattaacaaattaaaatgaaaaaattttctattaagatgtgtaattatattgttcatgatttttttaatgtttttttttataattttcacaataaatatatattttcttcttttatttcttaaccaatattcactggttaatcatactctaacattttttataactttttctttataagagtagagagacaagacatgattggaaaataatttggtagaggaattgcttaagaacttaccttacttaatgaggaggttttaccaaattaaaatttcaattataaaaaaaaaatgtgacagtacaaatactctgttttttcagaact

SEQ ID NO: 3669 - DNA, 555 bp, Glycine max
  Intron number 4 from transcript Glyma10g29590.1 (locus Gly ma10g29590) derived from phytozome v7.0 (chr-ID Gm10; pos 38422858 to 38423412)
aaaaaactgcttcccaccctgatttgtaagctcgcttgattccttgtaattgttgcttatttaactgacaggttagtggttattaacattacactaccaacacgatatatagttacatcatctttggtaattcttatgttttagttgatatttattaacgggaagagtgaagttaatggttaacattagcattaaccccctttgtccaacttggttgttgttgattcgtttctaataatttgtgctccacttaatcgtgtgatagttttgtttcatttctcatgttatttcattgtagtatcctatgtgtgtgtttggattggtggtgagttgatctcaccataatttttagaagcagcaaatggttgcttttatggtgaactcaccatgatttttgcactcatcatgattttctactgccaaaccaaacacattataaataccaaggtctaatatatttgaactttggagaacaaatacttattattttgccataaaaagtatttatctgtgtgacaacacatgatttggatttcactataaatgtgtacaggt

SEQ ID NO: 3670 - DNA, 1725 bp, Glycine max
  Intron number 6 from transcript Glyma13g41560.1 (locus Gly ma13g41560) derived from phytozome v7.0 (chr-ID Gm13; pos 41819173 to 41820897)
ttagcattattccccaaccagctggtaatgtatgcatactgacaattaaaatgttgtcagttttatgttctaaccagtaactacacttgccaagttgtaatgtaattttttaccaagccctatataagtatttttttttatccagcattttaatattctactaaaaatgactttgtatatacaacaacaacaacaacaacgccttatcccactaggtggggtcggctacatggatcaacttccgccataatgttctatcaagtaccatacttctatccaaaccattaatttcgagatcttttttgataacctctcttatagtctttttgggtctttctctgcctcgaattgtttgtcttctctccatctggtctactctcctcactacaaagtctaccggtcttctctctacatgcccaaaccacctaagtctattttccaccattttctctacaataggcgctactccaaccctctctctaatagcttcgtttctaattttatcctgtcgagtcttaccacacatccaccgcaacatcctcatctccgctacacctactttattctcatgttggctcttgaccgcccaacattctgttccgtacaaaatcgccggtcttaccgcagtccgataaaactttccctttagcttgatcggtacctttgcatcacataacacccccgatgcttttctccatttcatccatcctgcttgaatgcgatgattcacactttgtatatattgttataaaattaagtgtgagaatgtttcattcaaacttagggagaaagtacgaaattaaaattaatggaaacagaagagggctaaaaagaaagaaatgaagaaagaaaaaaggatgttattatgatagaaacaccgtatgtttgttgcagaattacaaggatgaccttccctttctacaaaatggaatgctaacacactcagcagttcttgagggacttcacctcccaagtgaaaggccctaatctcttgcaaatgacaaaatgatttgtctcctgcccccctccttaattttgtaggcaacatgccttatttaggctatctgactaactcaccaatgtaactagctaatgggtatctaacctatcataactaaatgctagcaggtgttatccaacatattctctagttgcaaatataagttttttgcttcttatacagttaactagagctaaaaaggactaaaacaagttgcagtgttctgcaagtggcctaatttttttcttgataatttttatttgtgtattgacatttgatagtaagttattatatctcatacctcataatccttgagagaatttgggaaattttctttatattgaaaaatgagaaaaatgaattcaaggtttagagtttgagtttacaactgatatttgtagtacagggactgagagcctatctgaagtctaatctgtcagttacaacagtcaaaaagacagttttgactgatttacagtcagttaacagtattacatgtaaggaagaggtgacacaccaagtctatgttaaagaaaacagagaaatgatattctctcacaatccaaaactaatgctgtcaaatggaaaatacatatatttttgaagaagtgacataatctcttttatttgtcttctcccatttgatccatggtattctctaaagtctaaacttctgtattttgtttctttggtttgctatagatacagggaaggttgatttggtg

SEQ ID NO: 3671 - DNA, 1482 bp, Glycine max
  Intron number 5 from transcript Glyma18g29520.1 (locus Gly ma18g29520) derived from phytozome v7.0 (chr-ID Gm18; pos 34125998 to 34127479)
gttacctccctactaatcagctggtccatcacagaggcaagtctttcatgattgctctttcatgtgacattaaaattatctatctggctttttgttattctgtttgattgtgtttttattgtcaaatgttagcaattagtatattatgttagtgggggcattcgaagccatgacctccttactactccaacccttatgtccctccccccaacaaccaaaccaccttatgactccatgttattctgtttgatgttagctagccacagcaaatacgttggcactggctgctataggatggttataaattatatagcacttcctgcatgatgatattacaatatttttccccaaaaaaaatgattaggaaatcttaatgagtgttaacaaaccaaggatttgtacttattcacttgtttttgcatgtcctatctgaaattcgcaatttcaactacaatacttgatggaaaaagtacggcaaaaagccactgtatatttcttacctgacattcacgattgagtggagtttccatttcggaacccatggtatagaagaagacaacacattctggggaaaaattctcttttaagagctggctattaaagcgaaggaaactaaaggttgtagagtgtgtgggataacatttttcttaagtctgagacactagtccagcaagaaaagaaaacactgaattattgtcactgcaaattatcttcagcttgaaacctttcttcattgaccattacacaaagttacctctgttttgacttctgttccttcacactttataagacttttttttccgtgtgttccattctttcttcttcctttagacttcccacttcacattctgctacattttatctgatttgttatgttctttttctattaatttcaccatcatctttcatttttggtatgttcttattgctcctagattgatggtgattatgtgtctgagattgatagctatggatagagatataattgcattaagtgattagagatattgaaccgagtatcgtggcatatactatttttacatttgtaaatgcatatatgttttcattttctgactgaaatggagttggtggtgcctggtggtctctcattacaattcacaaattcctgtttctactgccaaaattgcaaaggaaattttaagatgtcataaaaagccctctcccaaagcagaacaaatggaaatggtgcacctgaagattggccatgtcaataattagttacttgagtatgtctgtcttgcataaaaatattgataatctgaaattttaagtattggctggagtgacagcaaactttttggcttggtgattttcccctgtaatttctcctctgcttctggtataatatcctttgtttccatggtgaagtcattaggaaagagaaggactaatgaagattaatattcatcttctttgttgttgcttagatcattcgctattctttctttggctttaaagaga

SEQ ID NO: 3672 - DNA, 1865 bp, Glycine max
  Intron number 4 from transcript Glyma20g01530.1 (locus Gly ma20g01530) derived from phytozome v7.0 (chr-ID Gm20; pos 1054666 to 1056530 reverse strand)
ttggcattgtcaccttctgcttatttggattgcaggtaacctgattattaataccaatcatacatttatgccttctattattttggtagaaaatagtttatggtaagggaggttgtcttgtgactatgtcatgggccaaattgatggttatggctaaatctgtcaaatgagtccatctagtctgtttcgatctgactcaaaacttttagcgttttcattttgttggctttgcttgacctattggcttattggactagactaggtcaatttgacctacttattaattttgttttgaattcttttttaaaagatttttttaaaaaaaaaacagtagtaggactaataggatcgataccattgaggtctaaatttgattggcatgctaaggtgggtcaaattggtctaattttatttagacctctaatttatggttcattttgatctagttcgttaggtcatccaattgaatcaacacaattagaaaatagacttttaacattggttattaatcatgttaaaattattgacgctaaaagtatcaaagttaagatcggtttttaaaaatcgattttaaactaaactacacaacatctattttttttaaaaaaatgatggtgtataaaaagaaataaccaaaaaaatgtaaaaaatatataaatcaacatcggttattagaaaaacggatgttattttttgaaatttttttaatattctgtatatttttttaattacctcaaattaatctacaaattaaaaaataagatcaattcaaacagtttttataaagtttttattaggccgttcaaattttatccataataattgaataattactatcaattaaaagaaatatttaaagtaataaaagtcaatacataaaatcatttgtaacctaatctaaattaacataactctatcattctaaaattacataaagtgtttcattcttactttttagataaaatcttgctcaataaatatgaattgtcttcattctttttaattccaatgatcttgaattagtaaactaagatataataaaacataagttaataactatataacaattataactagttatgacttgtgggtagttttaatttgtggttggaatctttccgttacactatgattagcaagatcatgaaaaatcacaaacattacaagtgaaaaaattataaataaatggtgtagtcctaatgaaacatttattttctaaatacgagaaaaaaaatcaatttaaattttcattatctctgtaagattaaatcaatacattaaaaactccaaatattgttgctttaattgcaattatggaccactattaaataccataattgttaccttcaattgaaaacatatatacggaatatatatatatatatatatatatatatatatatatatatatatatatatatatatatatatatatatatataccgtaaaattttaaaagtatgcatgatcagtgtgaagatttttacagtgtcaaaataagtttgcatctaaagtatgacttttacattaattaatacataaattaataatattatataaattataataagttgatatcataaaaatcactaacattatattctagttaagaaattgttaaaataattttcctcaacaaaattgttaaaataatttgcttattatattagttttggaccggtccaaaactaatatagaacatcctataatgaccccctacaaataattgcagcccatgaagaactaatactatggttatttaatcttaaaagcctattaccaaaggacaagcttgattacacttttgacataactttcttgatgagaattgttgtttgcagtggctttttggtttcgttgtgttc

SEQ ID NO: 3673 - DNA, 3071 bp, Glycine max
  Intron number 2 from transcript Glyma05g32250.1 (locus Gly ma05g32250) derived from phytozome v7.0 (chr-ID Gm05; pos 37197794 to 37200864)
acagatccaggaagcaggtaattcatagctgaaattcacttgcatttatgttttgcttatatgctaagttttacataagaataccatataagctagatatgctaataacagaatatggtcttgttggagagagaataacaatctttatgaatatcatggtgggtccttgcattaaaatgtgcctttctctttgacaatattttttaattcagaaataggagacaatctaaatccataaagggggtaagcaggttgaacaggttccaggaacaggagcacttccatcccactgggatttcctgtttctggtctgggaaagtctaggttaatacacttaggggttctgggaggattgcgcttcaagttatgtgtaataatttatctaggaatggaacaaaaaattgactttaacaggttaaaaaatagaaacaaaataagaaataagctctagtgttttaatttcattatttctgttttctgcacagtttttgacaagtagtatcaaaacactgtttataacttttccttcttttccactttagagattagcatctagacattaattggtaaacacacttacttttgatatgcataaatatttggcttcacctatattttggtgaaagttttgcatattcttcttttcttcaaagtattttgggcctgacaattgctcctcaaaattgtataaatatttatcatgtgtatgtcaatgactatactattgaaatggtttagactcactattattttctaattttattttaccccatctttgaaagtgtattttattggtatttaatgctatactttccaaaaataagtgattgatgtggcatatttgcagtgaatgaatctgccggtcctgactttttcttctttaaccatgtcttatagtatggcacttaaacaatcaacattaatctatttactgttgcaccctcccatcatgttctcccttctatagttctattgattttctggctggcaaaaatttgatctagttcagctagttatgtctaaaaacccagtcggatgatagagggctaaatagacaaaataccaggatcatatgtatccttactgttatttgattgtaatcagggatccacagttctttgtcaatggagagggtttccttcaggaaaatcagtgatgtcataccattgattcaaatatatgaccaatctattatgtaaaatgactagagatttttattgtatggagagggggcatattggcttctaatccaaggataattcaactgccaggttgatagtagggagtcagtcattttgggaacgggccaggggtgtgtgtgtttagttcgtgattagattttgttaccaattaataatatggttaagttattttaattttctagaagaaacagagtttagaaagaaaagaggattttttttttatttacatttcctattttcacaaatatttaggaaagtgccatcttattttcatttgatttctgttttcaaagacttgcactggatatagtgaaaacaatatcttgttgtttcacttttcctatataggtctgtgtctgaaaacaagaaataaaatgaaaataaggtgacattttggcaattacttgtgaaattatgaagtgaaaataaaaaatgttttctaaaaccaaacaagctataagatatcctccaagaaagaaaaagaaaatataccagagtgaatatgataaatccaagagttctgctatctctttgcatagttgaaacacaacatggtccatgacatgttaagaggtggagaaacatccttgaagataggagcattctgcactggattggaagccatggttttggggatcatcctcatgtcatccatggaagtaggatgttagaacttttggctcattattaactttcctaacaatacatttgcctaaaatgtcaaccttgtcctcaaggttgaaggttggaaagtgccatttgattgccaccacatcttcccatgttgcttcccctagggttacacttccaattctgttggtagattagcttcaattgagtgtttccctactgtttttttaagctgggaaacatgacactggatggatttgggcaagctctggaagttgcaactgaaaagcaaaagccccaatttgcttttacaccaagtaggggccatagtatcttgctgccaactttgagtgcatctttgagggcatggaaatctggtattgcagtctgatgactgaaggcaaagacatcttgtggttttttgtatctgagtagaaaaagcatcttgattgcagattgtattggtttcatttattatttatagtaagaattagtttgcagatctggtgtctagtgttgcatgcttgaaaaagaatttgctagataaagtaggctgtttgcattttttgtagaacatcctgacttgatgtaattgtcactcactcactcttgtaaatctgtcaactgtttcctcttgtggtacattttatttgattgatcctactggcaaaacatattcttcatgtgaggtccgtgatgacagaggagctttagactactctttcgccaagtaatattctttgcaaaaattttcagtaattttgtgtatgcagtaatttatcaatgcaatagctttggtcccaaagaatgtagtcacacaatctgaaacttcttgatgcattccaaattgcatagccactctctatgtggtaggtacttttgtataatacattgttgcaaacaagaatcgaaatactcatgcatataacaaccaaaagtatttacatttacccaaattactctcacacggtacacatggtaaccagggaaaatctcacaccatcaattttcaattgaggtttgtgactcagttcacaacttcacctagatccttgtgcttattacaaattcatgtataatttctctatattgagtcaaacttcaaagaaaacaacatataatctggttatttttttcctttttctataagttatagatgacataaaatttgctagactgttttaatttagcaattttaacatgattccttgtgcataaccagagctgaatctcttgatc

SEQ ID NO: 3674 - DNA, 2592 bp, Glycine max
  Intron number 1 from transcript Glyma07g35930.2 (locus Gly ma07g35930) derived from phytozome v7.0 (chr-ID Gm07; pos 41322703 to 41325294)
cgtcaccggcaccgatcaccgccctacgacaaccggtaatctctctctctctctctctctctaacacacgcgcgcttgctttttgtgtgaatcttacgattttgctgttcctgttgttggatccctttctttctttcgccgaaacgacgatgcttttcgagatccaactcgtcaatagtcttttcccttaattgttcggatcaatttcttcgccttctattttggagttcgtgttgcgaatcgcgaaactgtggcgtgtggttgcttgttgtatgtgttctcaaccattatttttagtggaatttggttaattagaatgggactgtatagtaaatatttactcggaagcattaggtttctatagtttgttttgtatttgtttctgttcttggagaatagtgtgtttcatatgctgtaattagaaagtttcatggatctggtgtttgttacagtaagttgaggctgctttggattttgattattgaagtttcaaggctaatgcgattatttgttattaggattggactgttgtggtctctggttcttaagttttgttgttttcttttcttttttctttttcaatttctttgccttttaatctattgtatttgtattgactttaaatagatgctgattgatgcagtttaatttatgtaatggtactgataatgctaattttaagttattagaacttaatagggatatacgatgctagctcagaaaatgttatagcaggagagtaggaagtaggatgacagctattttagatattataatacaaactaaattacttagattatacttataaattctcaaaaaccaaaaaaacgcaaaactaaagaaattcattataagaacatagtaatgaagtcaaaaaatgaaaatgatggtgaaattaatagaaaataggaaaagaacataatacattagataaaaattagcagaatgtgaaggggccaggggggattctaaaggaagaagaaagaatgggacatggaaaaatgaagtcctggaaactgtgaaggaacagaagttaaaacagaggttactttatgtgtgattggtcaaggaagaagggtttcaaatcctgttatgtttcagaagcaaaaaatgcattagaaaacgtgggggaaatcacaattttaccaaaaaaaaaaactagacatcattgtttcataggtaaaaatgggtttttgatgcctatatcatgatatggcagatatagtgtgcagaaacccactattgaaaactgttcctctatttgaatctgataggcgatagcagcctagggccactcctgctatagagctactataccatgctattaactactaagtaaccatagtggtgtgatttatttgagttgactactttattttggctttattaattcaagttgaacatgtatctttgtaagggttaagactatgaggactttgctatttttcttttattaatccttgaaacatagacactagaaagtgggcatcacattggttcttctgtttcaacattggttccatgaattgactgattgctgtttttggcttgtcctttgtgggttgctgtacctgtgtgcagttattttttagtttggaaggagtgatgtggtgattgcatgatggtagaagtatgctaagtttgagtgggtgttcatgttttttatgaataattggaatgaggaatttggtgttcttgtagattttgatgagggaacaattgctctttctgatttgggaattatatttggtagttgctactatgtattaaactatttctgggttaagttcgtgactgaatgatgatggcctgaggtgtagttggtggagttattttggattttacacagtggatttttggtatgaatgatgatttgttgtactggggtagtcaagtgatttttgtttaggttccggttccaggagttctgattttctgaccattgttatgaattatggaggaatgcttgatggtctctgtggggggattttctaggttgtgtttttgtcaacctctaactgttgaaacttgtaaagagtgaattacttgctgcttgctttcttaattttctctcagactcatgcatgtgtgtgttattcctgctgtatgggtgcttcaaagtgactaaggattgaaaaaaagggagtacatgtttctgtatgcttgtggaaagtgctgattcgagaatgggtgtgcttctggcttctctatgggtgtctgccattagataacctttgattcaaggaggaagagagagaaagtgatttgggagatgaagaaggcattcacatgaaaaattgatgtcaatttccgttggaccaatctgacgtcaaccctattttctgaggagcaaaattgcactttcatctatattttatgaattttcatattaacagttggtttttctagaatttttccgtgttgagttgagatttatagtggctatgatgttgctgtatcttcttcttgagacaaactggttcaggagaatatttgtatgcatttcattgatttttattaactgacttattttcttctgtcatttgtttcagtgaaggcaagacacttggacatctgaatcattggtataaa

SEQ ID NO: 3675 - DNA, 3366 bp, Glycine max
  Intron number 5 from transcript Glyma03g06340.1 (locus Gly ma03g06340) derived from phytozome v7.0 (chr-ID Gm03; pos 6628841 to 6632206 reverse strand)
tcacctactcatctctggtgagcacccaatcaaagttttgtatgatatgctaggacgaaatattgctgatatgcccaggctaagctatgatatactccctctagtctcgattataagcaacaaaatttctttgttttatggtctcaaataaaagcaaaatttaacaacgttgtcttatttaatgagactatcttcaaaatacccttcatttaatagggtcagactttttttatgcttgatatcaagttccaatgaagggtagtttaggaaaaaaacatttttttaatgtgaattaacacaatttaatgaagttaactaacttccttagtaagtgtgaaatcaattttctgttgcttataattgagaccagagggagtaatagctagaggggaaaacatttattggtggttagtctagattaattttgttgtgcattcttaggacttgcggcatacttgtgttaaggattatcattcatcttaactgtgtttttatttggataatccaatggaaactctgccatttgcctgttttaacccgagtattgattccctggctcctgcttcccacacttccatgaaaacatcctcttctgtcaaatttggcactgtaaaaggaattactatttctggtttgaattttgattttcttttgataacatttcatctgattctgctgtgttaaaaattaaaatatattagcttggattggttcagttggtatgaatcaaaggcactgagcttggaaggcttgatttgattctctttgttagcaatttcccttggtaggtgatatgtaactatgttaagtaccaccgctgtacgtattttctgaggtttgtcacttgtcactagtcacctttggcttatcctagccaatggggtagcctcccttaaacttttaactacaatccatcaaaaagaaaaattgtattagctccctctcagaagtgaaatctctctaaaaggaattttagttgccacttggccattgacccagtgattgaatgttgtgtactaagtgccccctgctggtatgatacaggttcaacattgattcattgcactccttgcctggccccttcttcctccctccaattgaaaaatgacacctcagcaaaaaaaacagaatctgttttaaatggcaacattttctctgaattgttaaatttcttttttgttgaggtgtctctttttagttagagggaaaagaaaaggaatgggtaagaatagacaaatgatatgattctgttcaccatttcccttttctctaggttccaatatgggcggcttccacaaaccccaaaaaagaaaataaagttttcgatttttgctgaagttgtgtattaaagttggatttgatgtggcaataccaatggtgccaaatctgcattccaagtacatgagaggtataatgcatgtgacaagaaaacttgtcattgatactctgcgagtgttgaagaaaacaatacattatttgaacaaaaatattttcagttgttattaatggtgtataatattgttatacaatatagtagtttggaaatactaccattggtattgccacttcatatccaatgagcatatggcataatgtcattcccatattgcttattatttgccaaaattagtcttgctatgcatgtaacagtccatcaagttcttttaggatgcaaaccaggattttttcttttcgcttcttagaatcaggagttccaactttacaaagatatccatgacctccaaaaatgaaatgctacaaaggtatccatggccacaacaaataaaatgctgcaaaggtaacaatggccatcacatagtttgcgttcaattccatcctacaaattgaagtagacttaatttaatttgaacttcaaagaattaaaagatgttacaaagagaacactagaaaacaaaatactattaaaagtgtactaaactcaattctgtccaaaaaaacatataaaatactcctacctctggtttcaattctttgtgaatgatgtcgtgagtgcaatactttgagaccagagcctgcatcacacaattcagtttatgatatttgccattgaaagtagtatttcaacataaaaaatataaataaaaattgccaagttgttatgattgtttttttaccatttgtagctgaactttggataaatagtcattttcgtccctgaacatatagagcgttgatagattcgtccgtgaaagataaaaattcaaactttagtctttgaaagtaaaaaaaatgtgataaatctatgcatcctttaacttctatcagttatcgttaatgaaagagcttgtgtggcacattcaaggacgaatttgtcagtgccctacacatttagggacgaaaatgactatttatcctatatataatttaatctttatcttctccctttttttaatcgttgaagcataatattataataaacactttaaaaaaataacaaaataaacataagttggaacaaacataataaataataaacataatatgtttattgttccgaaatttctaatgtgacaacaccttacacaaagattcaaacaaaaatgcacggttaatccttacaaaaaaatgagacccaatttgatttcgtcactgtcacaataaaaatttcaaagcaacaaatatattatatttattaatcaatattatgcttattattatatttgttctaacttatgcttactttcctatttttgtaagtgcttattgtaatgttatgtttgcaataattaaaaaagggaagatgaagattaaattatatttttggttaatagtcatttttgtctctaaatgtctaaagcactgacaaatttgtccttgaatgtgtcacgtaacctctttcattaacagtaattgacagaggttaacggatagatgaatttgtcacttttttcgcttttgaggactaaaattttaatttttatcttttgggaataaatttgtcaacactttacacattcagagatgaaaataactatttatccttgaactctcctatagctttgaatatatgaagttagaattccatctaactaagaaaacttgagaggtataatgcatgtgacaagaaacttgttattgatacactacgagtgttgaagaaaacaaattatatggaaataaataatttcatttgttactaatggtgtataatgttatacaatatagttcccaaatacaactcatccaaatgattagaaatcttctcatatgattgacactcctttttataccctcataacattaatatatgaaattcaaacatctcatgctctatatttctctcactttattgaacactattctcattcaggagtcgagagtggaaaccaggaagcgagggaaact

SEQ ID NO: 3676 - DNA, 1087 bp, Glycine max
  Intron number 12 from transcript Glyma09g08690.1 (locus Gl yma09g08690) derived from phytozome v7.0 (chr-ID Gm09; pos 8026605 to 8027691 reverse strand)
acagtatggattctgatctttttttttgtctttccttcatcatgacatttccatgcattatatccatatgtattggctgagatcattttcataaaattggcctacaattttactaaagtatagatcagtctcctcttgctaggtgttcatattctttgaattctataggaatgaatagtaatcctttccttatcaggcatcttgcactttttgttgagatggatgctcctaatgtagtacattttgctcatatgaagcattcagttgtttatcttagttgacaactgtggtatacactacattctttaaaaaacatttaggcaactactgcattgtatgcaccgctttttcacttgatttctcaagtattaggattttgtgttcatattctcacatttccgtctcctattctgccttttgcattaatgttctcccattccttgtggggaactctgtaatttttccatgctggacagctggagctgctttattttttctattgtgttaattttactaatttttttccattggcaagatgacaaaagttggtttcctggctgtattttatctttgagaatccagtgatccctgaaaaatgaaattcaattgatgtagtaatgccctagtgagtgcctttataagtattaggctctctttgcagatgccgactttgatttggtgtatctaaggaaccaaatactcattgtcctgtaatcatgtacaatgcaagttgcatgatccattatcagcttttggtagggaaattaagccaaaatagtattatgtgactcctgcgttttgcatcagagtaatatttgaattgcatatttttcagttttataaagtgaaaaaaaaaaggaaattaccttgtgaacaatattatgtgaagtctatagagctttatgaataaatgggatataacatttcccttttagttgtgttttgcaaatacttgctttgcgcatgtactactttctcagctttggaatttcagaataatgtttgagatccatattctatgcattcttggagacattgataatttcctttttctatcagggtgttggcaatacactcaaaagacatt

SEQ ID NO: 3677 - DNA, 2965 bp, Glycine max
  Intron number 1 from transcript Glyma02g02190.1 (locus Gly ma02g02190) derived from phytozome v7.0 (chr-ID Gm02; pos 1571527 to 1574491 reverse strand)
tcccagattgttgttctggggtgaccaacttggaggtaaagcttcttctgttttagttcctttctattggatttagttgttttctttttcctttgaagctcgtggatgatgtttgatgtgtgcgtttggtttgacgttagagaattgattttgggtctaaaattgattttacatgtttggtttcatgttgcagaacatttcaaagttttctaggtccagaattgattgagttgcagcaacttagagtatcttttgtattggatcagaaaatttcaaaatttactcttaacttgattctataataaaaacatctgaacataaatcacatcacttcctaatcaattttaaccaaaattaattccattcaaagtcaattttgccaatgctaatccaaactcgcactaacttgttgttttgcttttgcttgggaggtatttatatttatgtttctagttggggctggtgaatttttgtgttaggaatgtttcaaatgaaaggattggtttttttgtctgtgagttcttttacaaaacttgtttgaattagtatataataaggtttcagttcattcacaaatcattttggggtaatattcttacagtgttttaaatcctggatagccgaatgtagtagtgtgtcccaaaaatgctatagctgaatagcagatagcgggatagtagatagaaggatagcttatttaatgttatactatatacatataaatgctcaaaactgataaaaaaaagttactcaaaattaatgacattcatagtgagtttgtaagtcctacctgttttgatgggatttcttaattatttcatttcaagtggattctgctcaattctaaagttgtggcattccaaatattggaccagtgagtttgtttctcctcaattttggatatgctttttgagcctttgtttgaaagaaaaactgaagataacatgtttatgttacatataggtatacgtattgtctgttgttttgcctttgctatggtgcaatttaagctgggttgctggagaaaacccatcaatgtttgcgacattaatcattattatttagggtgtatttagaatcaagttgaacatccaaggggaaaaagggagaaacttcttgtagagcaaatattgttggagtgaaatttcttagaccttaaaatataaagatttattgggagataaataaaaattttagttctaaaaatgaaatgaaataaaataaaatcagcagaacttttccattggttatttgtgacagcaaaggaatcgacatggagattccattgagctctggacagattttcgggacaagcaagtggcccaagatgggtcagaccctagtccacacaaacctcatcccaaaccatgccctcgggaacattagagccatgtggtgctgtgccatgaagaaaaacatctttgaaactgctgttgttactggcaaagtcaatggcagcataacaaatgaggaagtcttggaatccatcaaagtgacagcattgtttcctgtgaataaactccaggtgccaggggttaaatcgtcaacagaagaggctgtagagaagagactagaagctgatgccagagaacatttggattaaaatatactatagaggctttgctggataatttggactgaaaatttatgtatacgaaaatgaaagtcacgactcaggcagaaaaaaaatgatcatattctcacgtgggaataaattttactccttaaagagggaaatttaagttcctgtaaaattctcttttcattattagtttgccaaacatctcatttttaagaaagcttaacttcaaatttctccctggtttacccccaaaccatacttagcctcaatgataatatatttggtgttgggagggtgatgcttggattccattatgctatgtatcttgttggagtttggtaaagcttctgattggtgaataaaaggatcatctaatctgcatcccgacttattaaaaaggacccttttctatttgaagttacaccttgttgggaaaacaacagtgacaatctattgcctcaaatcctcctccccttttcaactatgtagtgtttgagtgggaagacgaagatctaaagtatagtttttgatcagctgcctttaaaaggccaccaatttttttttaatgtttttaaagaatgttaattcccagtttctagatgcttggcaagatgtttggagagtgtgctgagaaactctttgccaagataactctttgcaaaaatctaggtttgatggttggggcttgaggtctcaatgatcacaagtcgatggatggaacagtacaattgtgttggtgaccatagtgtggtgaaagggaagattattgagagttttttttttctttctttctagaagtgctatcatgatattatgaagttgcacattgtatatttgtgccaaaaactattgactttcagaaaacagaaggttgtttagaaatggcattgctgtttggacagtaactttttaggtaagggaatggaattctgaagatattgattaatcactagaaaaagcataaatgcaattacaagaaattgtgtttttgcttttgccttttcaactgatgcctggtgacaatttgctatatttgctagctgcctttcataaagattttgtgttgctcttctatagcatgccatgaaagtttaaatggaactttcaattaggataagctaaatgctactctgataaactttactgatcctctgttgcgtgttcctgtggattgtggacacacaaaccaatgtgttatgcaagagtggataggttgaaaggctctagtttattgtgtgcttatctgattatgttttttggatttcatacaaatatcttcaaagcattatctactaattgatttgtttcatataaaactagtactataattggctgtttcagagactgacttgacttttcattgcaccagctgtagattctaaa

SEQ ID NO: 3678 - DNA, 9447 bp, Glycine max
  Intron number 4 from transcript Glyma01g29360.1 (locus Gly ma01g29360) derived from phytozome v7.0 (chr-ID Gm01; pos 39445905 to 39455351)
agattggagaaggagggtttggtcctgtttacaaggtatatcctcttaaatcaaccactttttcctgaacataattgttactgatttatgttggagttatttagaataaaaaggttttagtatgtatatgggcttgacccaattccttgtatatgctgaacctagtattataaatatgagggtagctacacattgtagaatatgcctctctctatctttctctcttccttatctctttctacatagtatcatacaggtagggtttagcacctccttctacagtatctttctctctttgtggtgttttgggggcgttctgaggtgtcttttttgggtaaaaaaaaagtgtggttcgttgctgcgtaaggatgtctaacagcgacggaggtgccaaggggcctactgcggagattgttaccacttcctgcaaactcaccgatatcaagcttgatggcgacagtgagaattatgtggaatggaagcatttggttgaatttagtcttggtgggatgactaaggaagattatctaacagaaacatgtccagatggatctaaggcagtgatgtggaatactaatcttagcctttctcgtcaattccattgatagacagactcaatctgttatcacccattgtaatacagtgaaggaattgtgggatttttaaaaaaaaatcatctatggaaaattcaataatttgaattggacttatgctcttctgcaagaaattttccaccctaaacagaataagcggaaattgatggattacttcttagagttctagaagtacactgaagaattgacttttctccttgcttgcaaatttgtagaggagatggtgacccaacagaagaagcttatagctctaaggttactttttgatcttgattcaaagtttgtggtggtgttgaaattgctacaaatttcgagaatatttttaaatataatatgtatgaatatggtagaacaatctagaactatagtgtatatgaatatggtagaacaatctagaactataagtgtatgtacaagatagaagaatctagaactatcatgatactaatctatcatgaaaactctagaaagacttaaagtaatgtagaaacattcaccaccattgagcggttggtgacttgagcctataaataggcaattggtatgttgtaattgataatccaagaaatcaatgacatagtcttctttctaaaacaattctctaaaactatcaactatcaactatcatctaaccaactaccaacaatgacatcagagctacgttcggtcatacattgggcatagttatcttacctacctaccattccaaaatcctcccaactacttcaaaaatttcctttgtactattaactcattctaataatatttttttctaagctatggataacactactcaatcgtcaactatttctgtccctatcttcaatggtgaaaattatgatttctggcgtgttaaaatggaaacatatttttcatctcaagatttatgggacataatagaagaaggcttcaccattcccgcggatacttcagctcttaatgcatctcaagaaaaagagttgaaaaaataaacagaaaaattcaaaggcgttgttcaccttgcaacaagcggggactgatccaattttcccaagaattatgggagctaagactgccaaagaagcgtggaacacattgcaggaggagtttcaaggaagtgttaaggtacgtgccgttaaacttcaatctctaagaagagattttgaactattaaagatgaaggagtctgagacagttaaaggttactattctaaagttaaagaaatagttaatcaaatgagagcttttggggtagatattcttgacaagaaaattgttgagaaaattctaattactatgccccaaaagtttgacccaatcgtgacaacgattgaggaaaccaaagatctgtctactctatcagagatagaacttgtgagctctcttgaagcatatgagcgaagactgtataggcataaagaagatacaattgaaaatgtcttccagtcaaagtttaaatttcagccccaaaacaaagaaaatggaggaaagaaaaattatggagaaacttcccaaagaagacaaggttctaggaatttccttaagaacaaaatagataaaaatcctccatgcaatatatgcaaaaggcaaggccacgtagagaaaaattgttggttccgtaatatgccacaatgcaaccattgcaagaagttcgggcacgtagagaaaaattgtcgcaacaaaaataggcatcaagccaatatcgcagaggagcatgatcaagaacaatgtacgttctacgccactcaagactcaataaaagaaaagggaggaaattggtacttggatagtggatgtagcaatcacatggccaaggatgagattattttcaaaagtattgatgagtctgtcaaagtcaaagttcgactgggaaatggaagtgtggtttaatcaaaaggcaaaggcactgtcatggtggagacagataaaggtacgcgactcatccatgatgtcttactagttcccagcctaaaagaaaatcttctaagcattggccaaattatggagagaggctacacacttcactttgaaggaggtgtatgcaaaatcttagacaacaaaaataaaaggtctgagatagcccaagtaaagatgaataaaagcaatagaagcttccctctaaatttaaaatatgcaacaaacgttgccatgaaggtacaagttgatgattcatggctatggcatcgaagatttggccacttcaacacacatgccttgaagttgttacatgagaagaacatgatgagagatcttccaagcataaaggataacaatgaagtgtgtgaaggatgtctccttggtaagcaacaccgatttcctttctcaacaagcagagcatggagagcgaaagatctattggagctgatacatacggacgtttgtggaccaatgaggacgccatcacatgggaacaacaggtacttcatactcttcattgacgacttctctaaaatgacatgggtatattttctaaaagaaaaatcagaagtctttggagtattcaaaaagttcaaggcccttgctgaaaatcaaagtggaaaacgaataaaagtactaagaagtgattgtggcaaagagtacacctctcgcgagtttgaaagattttgtgaggatgaaggcattgagcgacaacttacagtcgcatattctcctcaacaaaatagagtgtccgagagaaagaatcgcacagttatggagatggctagatcgatgctcaaggagaagggactacctaacacagtctgggctgaagcagtctacactgctgtttacatactcaacaagtctgtaaaagacaagactccaattgaagcttggaacgggaagaagccatcagcaaatcacctaagggtctttggatctatatgctacattcatatttcagacgtgaagaggcacaagcttgaagacaagactatacgaggtatcttccttgggtatagcaatatctctaagggctaccgtgtctacaacttgcaaactaagaaactcgtcatcagtcgagatgttgaagttgagtagtacgcttcttggaattgggataaagaaaaagtggagaagaacgttcttatacccgctcaactacctcaagaagaagctgaggaagaagacccaggtgaaccaccttcacctccaccacaacaacaagatcaagaactatcatcaccagagtctactccaagacgagtaagatctttggtggacatatatgaaacctgtaacttgtccatacttgaacctgaaagctttgaagaagtggcaaagcaggaagtatgggtcaaggcaatggaagaagagatacagatgatcgagaaaaacaacacatgggagttagtaaatcgtccccttggaaaagatatcattggggttaagtgggtctataagacaaagctcaactctgatggcaccatacagaaacacaaggtgaggctagtagctaagggttactcacagcaacccggaattgactagaatgagacatttgcaccagtagctcgtcttgatatcataagagccctaatagctcttgcgtcacaaaaaggatggagtatccatcaactagatgtcaaatccgccttccttaacggcgtacttgaagaagagatctatgtggagtagccacaaggatttgtgtctgaaggcaaagaaaacaaagtgttaagactaagaaaagcactctacgatttgaagcaagcacctcgagcatggtatagcagaatcgatcagtatttcatggatcgaggattcaggaggagcaagagtgagcctacactttacatcaagtctcaagatcagtacactctcttactctctctatatgtagatgatcttatctacacgggaaacaatactaagatgatgatggagtttaaagaagacatgatgaagacttttgagatgaccgaccttggtttgatgagttacttcctcggcatagaggtaagtcagagaaatgaagggatattcatctcgcaaaagaaatacacagaaggcttacttaagaaattcaagatgtatggttgcaaacctgttgctactcctctcataacaaatgagaaactacagaagaatgatggagcaccagaagctgatgcatccaaatatcgaagtctaattggaagcctcctatatttgacagctacacggcctgacataatgtatgctacgagtctactatcaagattcatgcaaagcccaagtcaaatacactttggagcaggaaaaagaattttgaggtatctacaaggaacaaaagagttaggtatatagtatactaccgagaccaactcagaattacttggctacaccgacagtgattgggcaggtttagcagatgacatgaagaatacctctggctatgctttctcactaggatcgggaatgttctcttgggcgtcgaagaagcaagctacagtagcacaatcaacagcagaagcagagtacgtggcagctgctgaagcaacgagtcaagctatatggcttcgtaggatacttgaagacatgggagaaaaacaagatgagcctactaaaatcaactgcgacaacaaatcagcaattgcaatggcgaagaatccagttcatcacaacagaacaaaacacatagcaatcaagtatcactttatcagagaagctgaagcaactaaagaggtcaaactcgactactgcagaacagaagatcaaattgcagacatattcacgaaggctctgccgagaccaagatttgaagaattacgagctatgctcggagtcacagaaatttgcatcaaggaggagtgttgaaattgctacaaatttctagaatattcttaaatataatatgtatgaatatggtagaacaatttagaactatagtgtatatgaatatggtagaacaatctagaactataagtgtatgtataagatagaagaatctagaactatcatgatactaatctatcatgaaaactctagaaaaacctaaagtaatgtagaaacattcaccaccattgagaagttggtgacttgagcctataaataggcaattggtatgttgtaattgataatccaagaaatcaatgacatagccttctttctaaaacaattctctaaaactatcaactatcaactatcatctaaccaactaccaacaagtggtttgctctcagatattatctagttggcaggtggatacttttactgatgttttcttttgggttatgcagtcctcttttgagggctctcgctccactcttaagggtgattcccttgatcgctctgctctagtggttcaatctagaggtcatggccatggtcgaggtggaggtcgtggtggacaagtgacgtgctatggttgtgagtaagtgagtcactatagacaccagtgtgctcattcctctcagaatcaacagtactcacaatcacagggtcatgcagtgccacagcctgacattgccactcaatcagaggaaaaacctaggtggttatgactgatgacaagtcatctacaccttattctacttcttcaaccacatttgtcctacaccttcatctacttcttgacgttgggtcattgattctagtgccataaatcatataacaggggattcaggtatatgttcttctttcaatccttctagtatccattcttttgttacacttgttcatgggtctagtgttcatgtttaaggggactaggtgtactaccccaattcttactttttcattgtcttctattttgtacttgtccgaattctcgtgtaacctcctttccattagtcagttaacgtgatcgttaaattgttctataaccttttttccccaattcttatgtattttatgatctgcagacccagaggctattggtagaggaagagtatctaatggactgtacttactggatgaaggagtttcacatgcttttgcagcttctacaatccccatgtttcagcctcattgtcggctagtcatccatctttaggagttcttaggaaattatgtccaccattagagtctgtggagtctattttgtgagtctcgtcaattggctaaacatcatcgtagtgtttatttgccttgtttaaataaaagagctcatgctctctttgatattgttcattctgatgtatggggttcctgcccagttactccaaagtttggttataaatattttgttatatttgatgaaatctagatttgaattgttcaccatattttgtcatttttgttctaaaattcatactcaatttggttgtcttgtgtgtgttctttgtagtgataatgctaaagaatacttttctgaaccatttctcattttcatgaatgaaaatggcatgttgcatcaatcttcttgcatcctcattccacaacaaaatggggtggctgagcataaaaatcttccccttatgaaggtttcctgagccttattatttgcaatgaaggtttcaaaattgtttttggcaaatgcaatccttactgttgcatatttaattaatcgcatgccatcttctatattgaatggtgtaattcctcactctgttcttttcccctctcattctttgttacccttacccctaaaaatatttggttgtacatgttttgtgtatgatgtttgtcctcaagaaaccaagttggatccaaagtcattgaagtgtgctcgtgggttattctaggacccaaaaggggtatcgctttttctctccagatcttggtcagtaccttgattttgcaaatgtgtcttttgttgaagatcgttcattttttgttgagtatgagtcctctttgtatctgtatgagtcagatgatttgttcttaaatcacacactattatccactctgctcctccgactcatcttgatacaggtttccagttttttaaacaaacatatccttgccatcctaaataggtgtcacttgaagctaaagccacatgtgaagctccaccagaggatactcaacctctaccaatacttcttccaacatctgcagatcctccttcataacttgatttccctattgcacttcgtaaaggtaaacacacctgtacacatacttatcctatttcctcacatatgtctattgctcatttgtcatccacctcaaagtcctttgttgctacctagattttgtttctatccctaaatctcttctagatgcccttagtcatggtggctagagacaagcaatggaggaggaaatgatagctgttgagaaaaattgaaacttgggatttgatttctctccctacagggaagagggctattggttgcaagtgggtttatactatcaaaatggattctaatgggtctgtggctcatttaaaggctcgcatcattgccaaggggtatgctcaaacttatggagttgattttactaatactttttcccatgttgctaagcttaactctattcgcattcttatctctcttgctgctacacatcattaacctttatttcaattggatgtgaagaatgctttcttgcatggtgacttacatgaagaggtgtatatataccaatcacctgggtttgttgctttggggcagtttggcatggtatgccgcttaaggaagttgttatatggcttgatgcaatcacctagatcttggtttgggagatttagtggtgtggtccttgcatttggattgaagctgagtcaaagtgatcatactgtattttataaaaatactaaccttggcagcatcttacttgtggtgtatgttgatgatattgtgattacaagaagtgataataaaggtactgacaacttgaagagttttcttcaaactcagtttcagactaaagacttgggggccttgaagtacttcttagggattgaggttatgtactcgaagaaggggatccctatggacccaggggtttagctgactgaagatgaagttccattctctgatccacagagatgcagatgcaaatgaaaggtggaaaagcttaattatctttgtaccactaggccggatatttccttcccagtaagttttgttagtcaattcatgaggttcctgactaacactcattgggaagcatttatccacattaagtacttgaagaaagctttaggaaaggggattgcgtatcaagatcatgggcacatataggaggaagcattctctgatgcagatcagatttggtctcatatggaccgcaaatctaccatatgagctactgtgtatttttgggaggtaatttgatctcttggaaaagtaagaagcaagatgtgatgacaaaatctagtgtagaggtagaatacagggctatggcccaaacgacttgtgagttgatatgggtgaaacaaattttggagaagataggatttgctaatacctatcctatgacattgtagtgtgacaatgaagctgccacacatacggaatcaaatccaatctatcatgaaagaatgaagcatattgaggtagattgtcacttaatcctagagaaggttcaacaaaaccttatatgcacctcttatgtcaagacaggagatcaactagcagatgtgcttacaaaagctttgaatggggtgcgtagtgattttatttgtaacaagttgggcatgattaacatctatgctccagcttaagggggagagttagagtcatttatgttagagctgtttagaataaaagggttttagtatgtatatgggcttggcccaagtgcttgtatatgcttaacctagtattatatatatgagggtagctacacatcgtagagcacacaatcatagtttactcatatgctctatctctttctctcttccttatctctttctacaataatgaatgaaatattgtacttgtgttaatgtttaatgtaatactatttttcacctgtataaaattttagggtgtactatcgg

SEQ ID NO: 3679 - DNA, 2923 bp, Glycine max
  Intron number 3 from transcript Glyma18g46950.1 (locus Gly ma18g46950) derived from phytozome v7.0 (chr-ID Gm18; pos 56609786 to 56612708 reverse strand)
attttgagacaaccagtgaacagcttaattggcaggtaatatgaaaacatcatgtgctctttgtttgccatgccggtcattaatgaaatatgaactatagtatagggttctatgtcattgttttgtgctgagatcatacatcatggaaaaaatccttataaatcttggataaatttatttctcgaattatgtaattgaatatatgtcatcatgtgatattttttatgtttggtaactattatcatattttcttgtctaggccctttcatgatttatatgtggaaatcatggacggcacgtttatacattttttccctatgattaactaatgtattggtatttgttcataactactggttactatcttcttacctgttttcttggtttttggatgcacctattgatattgttgtattatatttaatattcatattgcaaatcttttattgatttttatttttttcctgttgaatatttttctctctctgagttcttagagagctcttttatggggtctccaattatggttgcttattacttaaatcttgccctgttgtcctccataatttaattcttgaataattaattttttcttaagtttttagagagctcctttatagggtctttaattatgatgtactcattacttaaatctcgctgcagaacttcataatttaactcttgaatagtaattttttaatctttttcaatgtgatgctgcaattctattaatgttaatccatgtttctttttggagaccatttatataattgatattgatatataatatgaatcataccaacaaggtccagtacaattagtagatagacgggttccttaggtatgttgttaggggttaggttcctggctatatgtatggagaagattttgttgggagatgcaaaacccattttagttatctttacgccttgaaaggaattagtttccaactattggttggggaatatccttggtgaaaaccaaacaaataaaaaaaaatatgaactgtagtagtcaatagcacactatgagattcaaatagtggagtggttttcagtagcggacgtagtggccgcaatagtggctttttgtgcactatagcggcactgccatggtataggcttcaaaaacccaattttaaccccggaacatcactgcttgtttttttttttggagtaaaatattccataaaagttacctctgttttgatctgtattgtttcacacattatcaaaagacaccgaggaaatttgttttcagcattcagaaaattcaaattaacatataacaaaatattaaaaattaattcatctctattttcttttgtgaggctctttattatagaaaagaaaaatgttagcaacacattctctaacacactttttattattgtttgaaatttatcaaaaattacaaaattttgtaggtttcacttttttaatgagcctcactcatgattttgtagtttaactagtttttaatttttttttaactactaatcgtgtgttagagagaagggttcattatgtttcataaaatatagctagttttatattctatttttttaacttgctatgttttataaaatatagcaagttattttgaggtgaatataccttttatgaaagatataattcaacttgttttttattttccttttaaaagagtgcttacattgtaaaatgatccatctatagcagtcactggtagacagcggtgtggagtggccaccccctaaaaacactgtagtgggagtgggttgatcgctattctgaatatatctatatattctagatttttatatataaaatatctattatataactatataatatatatttgtttaatagtattttatacatttgcttctattatataatatatacttacatattaatatttttttctatattttttaaatattatagagtaatttatatttttgtaacagtatttttttattaaaataaaactaatgtacctcagtgccaaaggctcctcgcaaggagaaggtatgggaagggttattgtatgtagccttacccatgcatatgcaatgggaataatatatggttaattataaaaaaaaacctcccctgcaaaaatagtatttatatatgattaatattgtttgggttggagagtggcctatttaaggtggtggtccaatgcccactctaaagtttgacccaaaaagcaatacctattttggcccaaaaagcaaaagaaagtttaaaaccctagtccttttctctttctcccattaggcaccacctatccaccattttctttttgttttgcctaatctctttctcttcgccggagtggtcgtcggtagttttgtcagaaaacactttcgctggagagaaaggtgggtcatggacaagaaattactccaggagtgggatagtggcacaccactgctcaggtgtgttcccactccactacagggtgcaattaactactattaaatgatcttaatatttatttatttattttttgtgaggttcattataattggaaggaaacggatctgcaagagtatacaaatattgattatcaatttaaatcttttgttatgctgcttatgcttagtttcatttaagcgtctctctctttagtgtgtgtgtgcgcgtgtgtttgtcctatattttttagcctgttcagtttggtgtttgctcgtgtcagcgtggatccagttgaagcaaaaaatacttgcttctgtgtcatttaaggttattgacttgaaatagttggagaacgtggatcgtaaaatcaaatccaaacatgctatttgtacattaaatgtgtcaagaatgtctatgtttgtgtcatgtctagtgtccatgtttctattgaaaattgaaaacacccttgtgtcaaattaaagacaaaatcttatgccattttgtagggacagaaa

SEQ ID NO: 3680 - DNA, 1973 bp, Glycine max; identical to SEQ ID NO: 2851
  Intron number 1 from transcript Glyma13g27650.1 (locus Gly ma13g27650) derived from phytozome v7.0 (chr-ID Gm13; pos 30808377 to 30810349 reverse strand)

SEQ ID NO: 3681 - DNA, 2647 bp, Glycine max
  Intron number 1 from transcript Glyma08g12560.1 (locus Gly ma08g12560) derived from phytozome v7.0 (chr-ID Gm08; pos 9199533 to 9202179)
cagaaccagcaggttacagaagaacctaagcgaatgtaaggatacctacaaacatatactttattttcttttatttcattttcatctattatctttttttttattattacatcatttatcatatatatttattatttttcttttctttttatctctttttccacaacttcagtcgcatagaataaatatttacaatttttataataaatttggagacgttccacttactgaatattaattttagggtgaacttgtctctacttttcccaaatcacatataaaaatttattcagaatgtcaccttaaaaaaatatttacatgtataacttttaataataataataataataataataataataataataataataataataataataggaatactatttggttatatcataaattaaaaattatttttttaacaaaatatgaatcacaattatacgtttaaagttttaataatgatatttagatacagaaaataaaatgtattagattggaattttaaaagattattttggtatataaaaaaaaatcttgaaaattttaaaagattttataaaaatataataactttttaagatttttatgattaggattttgtagtttatattttaatgaatttataatatttgaacaaatattatgaatttttaagattttaaagaattttgtaaaaattttaaaaacaattattgttgataaatacatgaattatacttcgctaacattttaaataaaacttatcttatataaagaatcttcaacctgatatataacaaattaatttctcctaacatatttccaagcaaaatcaattcattctccttaaatcattaatcatattaattgtatagaaattatatatcatactatttgtcaatagtatgaatatttgtaatcattatcacaataacaatcccatcaaacaaaatcatgtctaacaattatttcaaaccttatttatataataatttatcacgttcattaaaactatatatgtataattaaagatgtttcccaaattcaaagaattgaaaaaaaatatctcatatcacatgttccaagataagttgatcattgcttaatgtgtattttaacattaaaagtctcatgaaattcatcttaaaaaaattcattgaaatttgtatatttattaatactagaaggctttttttaagttgtaaaaaatcttaattgaataccaacaacttttattgaatttcttaaaattttttattaatcttgattgaataccaccatactctttttttgttatttaaaaatcttgattgaatatctcaatattttttacaaaaaaaaagtcttttaaaattctttaaaatcctaattgatattgcgacatcctaaaaataattcaataattatttagataaagatatctaaatatatcttttagtaagagaaaagatagattaaattattttaaaatattagattgttattgttattttgaaaagatgttagtatacaataatatattggattggttaaataggattataattaaaaataatagataaaaaagatcgattaaacaaatttcaaattacttacaattgttatatatgggcagaaaattctttcttttagaatcacatagataaattgtttctcttggtattagtaggttgcgtagggacggagaaaaaaaagtcaaaaaattcttttgacataattgataaagaagatgtatgaccaagagaacaaaaaatttaaaaagataagtgaaacacttatcttttaaaaaatttcatggcatgattcttgaaaaatgaatttagtattatgatataaaatttgagataaaaaaatatagaaattatagtagattttgaatatgtcttattacgactaagttaccctatttagcatggtttagttgtcatgacaattagttgctgttgtttcttgtacattaattattagcaaatgaattatgagttttcttgttatatatataaagaatttgatgaaatgaaaatcgtgtagcgtgtgtcaattctcttaaatttaacatgaagtcttttgcttttaaatctttatgttgttggtggataaatacacgtatggatgcatttggcttatattaggttctgtttctaagtttatgaattacatgacatttacatgtatatgtacatataattggatttaccttgcaaaattggatttattttgagcgtgactatgtattgcctttgacaaaatattaactttaggatgaacttgtctcttctccccccaaatcacatataaatatttattcataatatcaccttaaaaaaatatatacatatataatttttaataacaatacgaatactattttattatatcgtaaattaacaattaaattttgttttaacaaaatttgaagcacaattatactttaaagttttaatgatgatatttatatataataaagatttcttatggtagaattatttatttggattttaaaaattgaatctcttcctttcattgcattataattttgtaatttttaattagtataattatgatttttatgctaattgatatgtgaacagtttttttattttttattttttttatttttctattttacttccagcgcactaccggtcactcattg

SEQ ID NO: 3682 - DNA, 4341 bp, Glycine max
  Intron number 1 from transcript Glyma10g05620.2 (locus Gly ma10g05620) derived from phytozome v7.0 (chr-ID Gm10; pos 4405375 to 4409715)
attggttgattatttgttttcttttgcagtgggaggtaatctgagtgagccatttatctctgtagttctacatgctactagctatgtttttagtttttacttttttccatttcaaaagaatcaaaaccattttatgaaaagtatgtcaattatgtttttaaggatttaaggtggttctgcgaattcgttgcgccctgtgttaaaaaaaactttcctcacatagttttaggttttttgccgtgatttttcgttgaacgcaagtttcaatgactaaacacacttatttctgtatgtgattcatgtttgacttgcaagagactagtagaattcaagtctcaaaagttcaatctacaacaaattaaactgaaaattaaggttcacaatccaccatttggaccttagatttggttgagttcatattgtaatggatgtgcattggatggatggattaatttggatttggactagtatttaggtcctagtcattttttatcatgctcaaagctatccattataaccctttttttcacttgcccaaaataaagacccgaattaaacccaccgaaaagtcttttattttttattttttcaattttatcaggttgtctctacttattccaaagagtgtgagagttaaatacaacataactgatgtttacgagaaaattttcccatgttgctttggtatttttgtcttgaaaatccaattttctttgctgaacgtgttttggacatgtttccaaatatactacggaagaattgaaagtccaagatcaaagtaaaaaaaaatgtaccttctaattgtttttttcttaatatcttctaattgtttaaagttgctataaataatagccgaaagaaaaccttgatatagttttttaagtattgtttatgtttcttttaatcacattgaagttttacttcaacaatctccataatcatacaatgcaaatttagtattatacaaatgcaatggttatctcaaatgctttcacttcacatgcccctttacgacgtgccctaatgttatctgaatttcataggtaggttccttagtgagaaagagtagttgtccagtcaactactagtggaaagaagtaaatgtcaattcattaagattaagataatggctaagtttacggaataaggcctattaccgttataaattttctatgatagatagaggttgagataaaaccacaaagtcctattaccgttattatttgaaaaataaaaaaggggtcggaaggatgcaattatgataaaaaaatacaataaaagagtataaaaccttgggcttcatcctcgaattctaggcccaagactacctcacggctcacaagctgattatcatggaacaagatgcttatccttgaggaaggaaatactactatgcgtcaatttttggccctttcaagtttagaataatgtattcacaaaaacaagttattatatatatattcttttgaaaaaaaatcttaattaagtcatataggaacattatatagaacataactatcttttcaagtatatatgtactcaatgacaaagaaaaagaaagagtttagaatcatgttaacattgatgttttgggtttagctctcaaaattattgtaatcaacctgctttaaatttctgttaagagagtcaattacatttaatacttgtattttgaatttcatttctaataaaaaatgttatgataaaaaataattctttttataagaaaaaatacctatgaaaagagcaacatcgcaatcaatggagacctcatttcggatcaatggagcaagagcaacggatacttaattttggaaccacgtagcattgatttcataatgatttcttttatttaagtatgctataaaatgcatttaaaagttgcttcacaatctaaattaaagcgtttaattggtacacgtttggtaacatttacaaattataaatattatctatataatagatttttgttatttaaattgatttatctcatcttttaaaaaatatttatctttttggtgtagaatggtcatactaatatttaaatctacgaccttattcttattatttaaatctatgaccttattattcaagataattattttaattttatatataatataaaggatagaggaatttaatgatatttttaacaggtagaatatttgagcacaattaccctatgtgagaatgatagaatgaagatgttatgtttatcaatgataaaaacttacagtaaaaaaaatcaatgatataaactcatatccctcctcatattttaacataaacaaaatttcatactataaaaatcacatgtcatcgttatagaaagttgaaatgactagtaaaatgtaattaactgtcccttaatttcgtgaaagtactagaattttaaaaatgtctcataaaatataatttgtttgttctttataatcttgctgttaaaagatttttattaaagttaacacgtgtacctatatgacaattattgatggtgcataggtaaatgacacttgactagtcaatgcatatgtatcaatcaagttacaaaatgacaataaattaatacttcaactatcatttatcatccacttatatattattacttgttatgtatgtatcaagttatcataatgataacttatgcaccatcaattatcatgtaaataaaagtttttttttaatacataaacaaaagttttttattaataaggttaaagtgatagataaattacactttttattgaacttttgaaattttaatacttttaaaatcataaatgacaatgcattattgaattacactttctcgtatagaaatgattattcataaaaagataaaatattattataatgttcaatttaatttatttagttttaagtctcaacaataaaataatgaagatcgaatcaaactcaacaaaacaataaaaaaatattttttagttttattttcaaattttcaggtgatatttacctcaaaagattgatttgatgatttaaactacttttattaagttttgatcattctttatatatatatatatatatatattatcttattcatattttttattattgtattttttttattcgtaaatacaatactaatgatttacaataacattcacatatcttatttaacgaattgactaatacttttttgatttattatcctattttcgacttaaatgaaaaaaaattaaaaccctcctttgttaaaaaaaatagaatttcatcacaaccaaatttgtaaacctaatccaaaagcccaaacagaagtgatatatatagtataggtttgattgagaagtgcatcaagcttcatgcacctcactagcagaatatccattccttgttaattataagggattagcaacgagactaatcggtaattaacatcaataatcaccccacataaatatatttacactgtcatcaccctatgttttgttttccagttgcaagcgtgtgcaatcaccctttcttccttcccctggttttcttcaattcttattttttttctcctttttctattttttttcatcaatttacttaattgttcatcaatccattattttattgttattctctcagaataaacaattcggcgaagaagtaagacgaagaaagaagaaagaaagaagagtagcgtttccttaaaattcaccataacatcatcggtttgtttgtgttattttgttgatacgaaaactgcgtcttcgatagtaatttgaaactgttgtcgttttgagtcttcaacttctcgtgattgtttttgccactgatcgtgttctttttgctgtcattgtgtgtttgtttcttcataataattgctttgtatttttgtttccctttttttgtttattaattttttgtgtgtgcatatttatctgttgtggaaattgtggtgtttgatttgttcactctgaggtttcagtttttaaattgatttagtctttcgtttatgatgttgtaagaatgcatcatcggcacccacagcagctctgtccccatttttttgtgaataaggttttgatgagtaatttaactgagatgatgttgaaaattaagaaaaagaataatgactactacttatgatggttatatttgaggaaagctttgaataagagtttggttgttttggatcgcagttattaatttaccctttttttcaagttaaattacagaaacaacaaaatgtcagtttttggttcagaattcaaagttgtttgtttggtttatatgtggttaaggatttattatggtgatgaatgaaaactgattaaggttttgaactgtgcagggttctgtttccatttgtgtgtagaggcaattcat

SEQ ID NO: 3683 - DNA, 6258 bp, Glycine max
  Intron number 2 from transcript Glyma03g13060.1 (locus Gly ma03g13060) derived from phytozome v7.0 (chr-ID Gm03; pos 16667374 to 16673631)
gagacagcaagagtctacatctttaaggaaggtaatggatgcataactttgttaaatagtgaggttcataatgtataaaaaaaaattctggtataataatcttgtcaattgatgtgcatttcatgcagtcaaatttgaggctggtatatataattgagtaggataaaagaatcaccatatttgacaacaaagaagactctgttgtagcatatgcagtataaatatcttagtagattattttgtatccagaatcaattagtggtttttctgttttaatgatatataatgcaatctaatgaatctattgctgcataagattgtccatcaccaatatgcttcagctgagcataatctaggttagtaagaacaggccagcattttgaacaggatacactttcatttgcaatggctagaacatgagctaattaatagtattagagggatttgatgatatctttcttgtagatagtttcctgttttggcatagttgttgatcctggataatggcatagaataggaactaaaaaaaatgaaatagtagattgtggagtggctgctatactaaacattgtggagtggcattcttttcgaagaatgcccaagatattttttgctaatgacaatcagcgtctgtttgattcaactcaaagttgtttctcttcaacagaccaaccatgatatgatttcacacatggtaaagctagagctgtagttgaagaattaaaaggatttcttatgtgattctgtagaggaaatgatgaagaggcttgataaactatttatgattttgatcatgtggagctggcattcagattatgatcatgtatgtgatcaaattttgttcggtgatcatattccctcaatgaacaacttagtcactagacttctccatgtttctactttggtgaatggtgaaaatgcagctgctactgttgagatttcagccatggttgcctctcatggttggggtagagggggccattgtaatagaggaggaggacgtggtggtagaggtggtaatggtaagctatggtgttcttattgtggaaaagaaaaccatactcaaaataagtgtataacctacatggttggcctgataaggtagcaaatgtctctacatcagaaaaggcctgatatatatatatatatatatatatatatatatatatatatatatatatatatataacagtaccaggggtactgagaatacaaatttttgaagttcagcggacatatggtttcctaatacaaccttgaaaagtcgaattagctacccagatcctatgtatgcttccctcccctgattacaaaatccctctctcatattactcgaccattgattaaaatgcattccaaaacccttttccatattcctaaaccatgaacacaagaagattgcatcatccatcagtttgctagcattaaagctatcatttgagaaaactatcccattcctatgctgccatagagtccaggttaatgctatccaccaacactgccatctgtgaacccttaggccagcataccccccataagcatgttggagaaagtgatgtctcgggttttgtgggaaagcacccaaaatgtttaaacaagacattgattcccaccaaataggtaggattttgctgcagttgaagaataaatgagctgcatcctcatcattgtttctgcagaatgggcaaaggagaccattgatttccatgtttctacttcacaagtttaattttgttggcagcctgtctctgattaatctccaagcgaagaaggatgttttagttgggatctttagattccatagctccttagatactccatcttgattctcatctatcaattctcccaacagcagattatatgcgctccccactgaatattgaccacttggatctcctttccacagccacttgtcttgtcaatctgggtgaaaaggttgaatcttgattttttgatgaagaatatcaggagtacttgaggctgaaatctagtagctaagctcaatcctctttagtaccaagtgtttcaacaacctgcatatctcaatcagtggaaggtcaaggtccatggatagttaattcaggtgcttctgaccatatctttggtaacaattccttgttctcctctattttttcacctaaatttcctcaccttgttgcattagccaatgggtccaaatttgcatcccaaggagttggtcaagttcctctttcttcctccttaaatttaaattctgttttgtatattcctgagtgtccttataacctaatttccctaagtcaattgacttgttccttaaattgcttagtaatgtttgttgctgattcctttgtaatacaagaccgttgtacggactgagtgattggcataggacatgaatcacaaggtctttactacctggaaaccaactcttttgtgtcctgttttccttccttatctccaaaacttttgcatgatcgtctaggtcacccaagtcttgccaaattgaagattatggttccaattctcaacagattacaaatgttagagtgtgaatcttgtcaattaggaaaacatgttagataattttttccaaaacaaactgaaaaaagatgtaactcggttttttctaccattcacttagatacttggggatcaagccatgtaacatcttttgggtttagatattttgtgagatgactctagttactgatcgcttgatggtaggtggaaggcgccactcccagcaatgcaagataagccaaaggaagacgccacaagggtgatggattgcccctgataagttcaaacgggttcagtttggaacctagagaatactctcacaatacacaagtatttgtctgaaaattcaagtctgtccattccattgcaattttgtgtacatatagacagctagcctttaattattctaaatgcaccattaactgcaattatgaaggcaaggcttttaattcccagtggtgcacatgaaaagacaccaaaattatcagccactaaaataagtaaaagaaagaaaaaaaatgaaaatgaaagaaatacaattttatttaattctaaaaagaagaaagtcagcaacaacgccctccagctcattggtcttaaataataactatgcactgaaataattttggttcaatgtcctttactgcaggtacaacttcaaaatttttttctaccacttgttgtagggtctcctctgcctttctagctctagctctggtcataggtcctgcttgtccttgtgccggtccttttgcttcaatttcctcatcattttgttaccttcattgatgaatattctcgatgcacttgagtttatttaatgaaagatagatctgaacttttgcctatttctatactcttttcctccaaagtctttggttgtacatgttttgttcatgatatttctccatgtcttgataagctctcagcaagagctatcaaatgtgtgtttcttgggtattcatgcctttaaaaaggctacaaatgttactctccaaccacaaggagatactacatgtcagccgatgttaccttcttcaaagaaaccatgttcttctctaaataggattccaactcaatacaagtgttgcctattccttatctcaatctagtggtatctcttaccatacaacattcaatgaaggagaaattcaaccaccctcaactattaagctgaattatctccatcttctatttctacctcccagagcaggacacacagagctagttccactggacatgaagatccttttggttcatgttcttcatcctcagttattcctacaatggatcctcctccatcatcaccctctcttgatgaagactcaggttggcctattgcccttagaaaaggtattagttcctcttcctcctgggaagaagacagttggttgtcggtgggtgtatgctgtcaaggctggtcctaatggtgaagttgatcgtcttaaggcacattatatggccttgactataaggatactttttctcctatggccaaaatcactactaatcgtctctttcttgcaatgactgccatttgtcattggcctcttcaccaattagatatcaaaaatgcttttcatcatggtgagttggaggagatctatatggagcaacctcctgggtttgttgcttagggagaatctggcttagtttgcaaacttcgtcgatctctttatgggctcaaacagtatccaagagcttggtttgtgaaattcagtcatgtacaaagttttgggatgaaacagagtgaagcagatcactcagttttttattgtcgcgcttcccctggtaaatatgtttacttggtttatgtcgatgatatagtaattgcagggaattatgatactaaaatctcccagttgaaatgacatttgtttagtcactttcatcttagaatgtgggtttaattcaactccaaaagctagctcatagggtgatggttgctccccatttatatactctatcctagcactatctctagccgatatgagacttgggattttcccaatacaccccctcacacccaacacttttgagcttggtgtgtagataatatggtggaagacccgtttaacagatctaggaaagactctgataccatcttagaatgtgaattttgggtctaatttaactccaaaagctagctcatagggtgaggattgttccctacttatatactctatcttggcattaactttagctgatgtgggacttggatttttcccaatagaccaaggatcttggccacctgaagtacttccttggtatagaggtagctcaatccaaggaagacattattatctcacagaggaagtatgctttggatattttggaagagatgggcatgattaactgtagacctgttgatagtcccatgcatccaaatcaaaagttaatggcagattagggtgaaccatatccagatctggagagatatagaagattagtggggaaactcatctatcttacaattcccaggcttgatatttcctttgcagttggaattgttagttagtttatgcaaactcctcatgttaatcactggaatgttgttcttcacattctcaggtatataaagaagactccaggacaaggactgttgtatgaagacaaaggagactctcagatttcaggttattgtgatgttggttgggcagggtcccctatagacaggtgctctacaacaggatattgagtatctattggaggaaatgttatctcttggaagagcaagaagcagaatattgttgctagatctagtgtagaagcagaatacaggtctatggcttcagtcacatgtgaattagtgtagatcaaacaacgtattcaagagctaaagttctgtgaagttcagccaatgaagttgtattgtgataatcaggaaactctccgtattgcctccaatccagtgtttcatgagagaaccaaacatatagagattgactgtcatcttgtgaaagagaagctgttggccaaggagattagtacagagtttgtcaacataagtggtcaacttgcagatattttaactaagtctttaagggaacctcggattcagttgatatgtgccaagcttggagcctataatttatatgctccagtttgagggtgaatgttaaatagatatgtgtttattatattttatcttttgtttcttccttgttaagcactctttgcatctgtaatgtcttttcatgtacttgttacataatataaaatctgagctgagtgagagaaaacacttgagcttttccaaatattcttctctaaaagtctatagtgttgctattggctattctgtatttctgtatgaatggattatgatgcgtctttcggtttctcttttctttattcacctttgatctttacttgttttaatagctagcagatatgatatatcttgaaattacagaaaaaagtagagaaggaggaaaagagagatcaagctcacaattataaattataatactgatttattgtatgtgatggtcaaaataaaaagtagtaagttctatttatacactggtactagactcctaatcttaataaaataaggaaataaacatgaaatatactgatatattaaaatcattcctaaaggattatgtaactacaacaatagcaacgaaggtcttatcccactaggaaaggatcatgtaagatactgtaaaatattttaagatacaatgatggtatgaaatattttctagattttttaactatttttgttgtaggtgccttttgttctaattg

SEQ ID NO: 3684 - DNA, 1401 bp, Glycine max
  Intron number 1 from transcript Glyma01g29540.1 (locus Gly ma01g29540) derived from phytozome v7.0 (chr-ID Gm01; pos 39848859 to 39850259)
ggaaatcagtgccggagctgtgcggttccgttaaggttagggtttttctggtttctgaactgtgaaatgtgtgagtatgaactttcaattgtttattctcgttgtttcatttggttttggttagtgaaaaagttatggcttggagaatggtttgttttgtgtggtgccaccttgggttgtttgatttattattggtttagatgcttaggaagggtggagatgctttgcaaacttcattttgctaccaacgtccgtttgcaacggatactcaaacatgtttggaagttgagttttggagaaggaaggggaccccatatattttaattgtaaattaatagggttgtatagtgtataaaatgattaacaaaatattaagacatttattttatgttaatctatcaatttatttcttttattttttaaaaaaaatctttattaggaatgaaatcgtggactaaagaaatatagaattatgcatagtgagtatgatttgctaaatcttgcttgtagataaattttgggatgagataaattttcactctgatttactattttggtccttccactgtttgtatgaggcacacttatcttcctgcatcccttttcactctctgatatttttgtcctttctgggcttataacttcagtgcattgcgataataaaagatatttttcatcagtgaatgaagcatcttctacatgaacatgatctcttacaatgtgctagctcaaaattatataaacctcgtaaaattatacttgagaatgtggatcttctttgtactattggaagactactaaaaaagatttgtttatatattataacattgtgctattcttttatttttcctgaggttagttttgatccaacctcatgatagaacttatatgaggttctctattgatgcttagatattctacaactaagtttttgtgtgtagtttgttactttgtttggagttgaccatgattattccaactttattccttacttccatgagcaatgccatttcagtaaattgttgtactatttaaccaaatgagttaagttctttgagaaaggtgatttactcatctcattacactatttagtctaaagaaatggaaaaccattcaaaaggtcagagtaatcatcttaatcataactcactatccatgtgtactttacttgtcctttaaaatgatttgaaacaatgcagaatacaagcacagatgacgaacattattggaagtgatgtgatctcctgaaagctcctcttcacattgaaaatatcaatgataatttgctctggcacatgcattgaatcctaatctaattatggtcactattctccaaatttccagtgataatgatggtgttttcttcttggtaaaattgtctgttgtaggctggggtagtgg

SEQ ID NO: 3685 - DNA, 490 bp, Glycine max
  Intron number 5 from transcript Glyma07g29440.3 (locus Gly ma07g29440) derived from phytozome v7.0 (chr-ID Gm07; pos 34298780 to 34299269)
ctgtggccaaagtttgttgctcattactttcaaaggtatgggttaaaaaaatttctcttgacaggtcacctgggaattttttattattattattatttaattttataatttttctaagcaaaatatttggtttttccactgccaattgttatttgtagggattgcattctctcgttctctgttattttgatggttgttgtcctactctttcttcatgagcagaaagttctcctcaaacatttatattctgtgttttaaaaaatttatcacttggacctgagtgtgctttaaaattaaatgaccttaaatatatacattatttgatttcttctaactcacctttgatgatgttgatttgttgaatgccttagtatggcatcttttaatttaaatgtaataggatgatttttttatttattaagttgaatgactcttttagttgtttaattgattagttagcaggaagtgacgcaaacaagagtgcaattgt

SEQ ID NO: 3686 - DNA, 1078 bp, Glycine max
  Intron number 6 from transcript Glyma03g35310.1 (locus Gly ma03g35310) derived from phytozome v7.0 (chr-ID Gm03; pos 42575162 to 42576239 reverse strand)
gtagggacgcaatctggtggtggatttgcaccttggttagtattacacaagtttcttttgtttgccccttttttacactagctttttcccctctggcacagagtactagaatatgtatttaacgtttcatatatttaataggaagctatttgatgtaaaccatacacatttatgcacatgctattattatgggttattgctttgtaatcctgaaactggttttcctttaggaatagtcctgtaatgtggcagaggacctatcttttgggataaaacatatggacagtctcgtgaatatgatagtgtattatgatgcaaccagtaacattttagccgtctagagtagagcaatataacttatataagtatgtgtgtatatatatatatatataaccagattttgtttgaatttttgtatactctttaaagtaatatttaattttctcctttcttaacatcttggcttttaggagtgacctcttctctaatctctagtctatggtaaagtgtgactcttattatttatcatgaatttctttaattttagattttcttgttgttgaggatttatatgtgtagaataaactattcaatttgtatgatattatttaatatagtgtccatcctgttatcctggtgtagcatttttagagttagccgctacgggatgctcttgagatttgataactacgatctctaaatcatgtcccattgtttgcttgctgttgtctcacatttcccaagtcatcttatcttaaactcaactatgtattaaaatacttgattcgatggaggatcctttgatgacatttaatattctgatttaactgcgctttgttgttggtttggaatagattgaaatgccattgttggtttctttcaattattatgaaatcaattacataggtttgcgttaataatctattattcactataaaacttctaaaaaaattagggatagatcatttaatttttaatgcatgttttaattattaatcctttactttccagatattataaaattgtttattttcttcttggaatttcaggacacatctttgcactctttcagggtatc

SEQ ID NO: 3687 - DNA, 794 bp, Glycine max
  Intron number 1 from transcript Glyma07g11510.1 (locus Gly ma07g11510) derived from phytozome v7.0 (chr-ID Gm07; pos 9684962 to 9685755 reverse strand)
tgtccaaagtgagttatttttgctcatggaatcatattttttttgtgtgtagtaagtagtaacttctgcacatgaattcgtgaaatttcagtttttgcattttcacataaaatttgaaaggaattgttagtgcagaagtgaattttctccatccaccttgcatttaacttccaaatcaagcaagtgatctatcaatatcatctattgattctctgcaacttttactaggttaagagcaactagatattatagatataaagctttatcttaaaacgtgcagtaagaattatactttgttcatgcataataaaatttatttttggtttgattttttttaatgttagtattctttcagaagtatttttggctagtggatgagtagatttgttttataactatatcccttttgtcagtcatacaagttttttttttatcatttcttttctttttcctgtgagatagtttttagtgataatactaatttagaagaattgttgaccagtgggatggatgtatttgttttatttatacccattttgtgaatgattcaaattattttctaagtgatggtttttagtgatggtatgtaatccaaagtatttttggctggtcaatgattgtattgattttatatcccttttgttagtacacttcttccttatcatgaatattgatgatttaactttccacaattgttcgtgttagtggaaatgttccatgtcatttgaatcttaaattagatctcgacaacttaataattcaccgttaagagttttacccaaaatttcttgcag

SEQ ID NO: 3688 - DNA, 1645 bp, Glycine max
  Intron number 16 from transcript Glyma01g39830.1 (locus Gl yma01g39830) derived from phytozome v7.0 (chr-ID Gm01; pos 51682792 to 51684436 reverse strand)
gacgccaggtaaagctatttctttttaatgttaaggtcgccatatgtgggttattagttttaaacattttgttttccttttttttccatggaatcctgtttttcctgtgggtgggacttttatcattgcagtcttttttgtgaaaaactaaatttctacttttttcccctgtgttaatatactttaggaaaggcttttggcttttagtagataacttgtctttgatttggtaattgctgccgagtggtgcatttgacaaacccaacattcattgagtatatcatggtgtgaaattgtcccttattatagataatactcttttatcttatccttataattttggagtaatcttttatttgggatttgaattatgatcagatatgaatataaattcatacaggctgagaagaatttttaggcagttccaagtattctgaagagttcaaatgaaatcaaattatagaagaaaataagtaaaatgcgttttgtatgtattatttttcatttacataatttttgcagcttcttgagtccttttctttggtgtagatttatgtattattgtacccaaataaagacatgcttaggaaattttgaggatggaacaaaagtaataatatatcatggttgaataacattaaaattaagatcaagactgcatgttagagagtaaagtgcagagtaataaatattactgtttaatgaaaaatcagtggttcagattttcataaaatacaagcatctggataacaaatcaaatggcaaccattcttttgttttttttccagtgcttaccacttgcattttacatctaaagtgcacctcatccttcatagaaattaatgtggtgaaaggatgctactttctggttgaaagacaagaactgacttcaaaacaggttttttacacccaataaattgctaacaaagcaaaagaaaatttcatactttttcctagagtaagaagcatgcgattgtcatataaatatatcttatgtttgctgtcagtgtcacatagtcccagaactatggattatcttatatcttggttgaagattttgctagagttctatcgctgaaagattagctatattagtattagtagacaataattttataaaataaaaaataagtaggcttcacattagtgagtactggttttgtggcttttctctgtacaaatattctccatttgccccttctttttagttttatttttttttaatatttataatgtcattttctgaacaaaggttgtgctaccttatctgtagccatttgctactgggttatgtattatctaatatcatgggtttaaaatttaataatgtgtttgatctctttattaagcttgtcttttcaagttataaagtaatacatatgtttggcactgcaaagaaattacattcttattaaatttccatctgagactgttatcatatttattatcttgttctcagtacttgactcttagtatctgtaacttgatagattttccctttattaattttcaaattttcatgtttgaactttaaagcaactttttcagccaatcaatggttgtaattatacttgtattgttgatatttctttctttttaacatgtgtatatctctaattctgttaatattatttatcagcatcgt

SEQ ID NO: 3689 - DNA, 2815 bp, Glycine max
  Intron number 3 from transcript Glyma18g46170.1 (locus Gly ma18g46170) derived from phytozome v7.0 (chr-ID Gm18; pos 55938902 to 55941716 reverse strand)
tttcaagacccgtttttctcactttccaacatcaggtaaaaatttgtgttttgattgcatgatcatcagttgattgcccatttgaatagcttgtaaaatcaatttctcatataccgtgatttgtgtcccattgtaatatctatggttgagttgagattgctttagacacaggtaagtgagaaaataaatcctagataaacagtcacttcatactcaacaaaaccagatttgtatgtaaccaacgatgctaaacttataatttcaatagaagaatacatgcatacactctagtagtgattcgatttgtgtaataagattcagatacatccgcacaattcataaatcaagttatagatgaagctttgaagcaaagaaaaagcttatgttctgcagttttgatatgagaactgctaaaaaatgtaacatcgattgagccagtaacatagcttccaaagaatctcacaagaacataatcaatatttttaactgaatgaagaagagctttcatgtacccttttactaattaaatattttctgtagctgttatggtatacataaggttacagtatccaaggggacttgtcgaatatttgttggttgatactttgtagttttagattttagtatgatatttgaaaaattcattaactcaatttagttacatgtgctctcaaaaaaagataggtaccagagtaatccccaattattttaggtatatgaatactctagtcaagtatactagtttctaccttaaattgctcatgcattgttttctatcttcctggctaattggttatcaataataagggatttcttgagcaaatctaggtcactttcctctgtttcggaactctcttcagatccatcatccttgaatgcagtgaaatcggttaggcattgcacataagttatatgtatcaatattgatgtttagtatgtccttattcactcaataaatgaaatgatacattgaatatgaaaaagagattcaaacattatttgcagaaatcaagttgcaatcacatgcatgcagattaggagtaaggcaaaaaatggtgtcagtttataaattaacataatccctatcagcagttgtggttatgtaattcctaacactcactttacatgaagaagatgaaaaagcaattgtaaagctccagaatcaccacagacctcccacactgctgattggacatctgtatctgatagctgtctctccctttcaggtccaacaaactttatagaaaacatgaacataaacaattcaaattaataaaatgcttattacttaccttctaggtaaatgtaataaagtgacctcatattatccgagcttaaaatcagccaacaattaaaggaaggacttgtaattgacctttaattcactattatcatggttatataattataaaataaataaaagcaaataaatggaagttattaatgtattaatgatgttttgttgataattataaaacaactaataaaacatgtaactgcatttgatcttgaaaattaattgcattacaatggattggtttagtagttgaccattgtcatcaatagcactgttatattgacacatatgcagcagtgatttatacagccagttgttttccttgattattttctgtctgaatattgctgtcttctaagttgtaagcaattttaactatattgtctttaaaagataagaggttgtccccacaatggaagcacggaatcacatgtcaagtggccaagtcacttcacctgtactagtgtacagtagtagtcaactaatggaaggcatagcaaatgtggtaaatcttgatagggaagttgtaccactgaaaaacaaaacacagtttcagtgaaaacggtaggagctaatagttttacattccaaaggaaatatgaaaaacaaaatgttgcatagaaaccaaacctcttccagcattgacgaaaccttgaaaagttcatcttcttgcatggctatggccctcaaagtagtcatgattatctcagggaacaccaacttgtttatctaagatggtgcctttggttgaccactccaactatagttgcaaactttgtcaactttgcccttattattttctccattgttttgggtgcctagtaaacataaaacaaagaaacagaagggggaaattttagtatgcataaccagtcttccttttttgttttctccagggtaaccatatttcctggaaatctcacttttggtatcttaatcatatcaaagcacaaggcttataatctaccctagaatgtgtcaatctttcatctgttacagttaggagaatttggattctggacctttcttgtggtttctctaataagtcatcctttcgtgtcttaattcattttcctaattgaaaaaagttcaccattgataaatatatttgaaaatttaaagttccttctaaggagaaggcttttgcttggactgctggattgaatgggatcaatagtagtgattcttgcttgatcaattctgattttgttatacatttgattttacattgtttgtttgctaatattttgcagaatagctgaataggctctttcttggactttgtgatcatacttaattatgttttgagattaaataaacaagtttgtttatagttatcttccaaatcattttacaaccttggggcatactaagctagtgttataaatattctaatcatatgtatgtatgtacgtacgtacgtacttacgtactctgaccatactctttttttaacttcatcctttggtgttttccatttcagggaatatcaagttctgctcagttgctggcaaattc

SEQ ID NO: 3690 - DNA, 853 bp, Glycine max
  Intron number 6 from transcript Glyma08g13610.1 (locus Gly ma08g13610) derived from phytozome v7.0 (chr-ID Gm08; pos 9950947 to 9951799 reverse strand)
gtgctggatttcttgggcctattttcaaggtatcactcctgatcttgtttctgtttcatgttaaaatcatattgactattttctgcaactagatatatgtactacacaacctatttaataatataaaataggagttaaggtgtacagagcaattcacttgctcatttacaaaaatcaagggtatctctcagcaatctttttttttttcctctctcaaggggctgtaggcttgtaagttttttttatcaagtctgctgttggctaaactgctaaaatatggtgcatttggcttaaacaaaatgataaacattttcagagaagacttttatctacacaatgtttgtgggataggttgctttcttaggtttttgtgtgggtttcagttgatgttttctttaaagggggaaggggttctctttctagcttgcacaaggatttgggagttgagatattatattttcatttatttattctgtttacttaaattattttaatcaccctagaaaatgtctctttatgatgcagtggtactccgtttttaataaagttatagttgttgcattttatattgttgagataactattgtgctgtcttcttttttgcctttttttttttcttggacattttctggagaaactcagctgctgcttaattttccattgaacagaacagtttatgctcagttgctgtatgaaaattcatggaatctgacaatctaacataatactaatggaactaagtgataattgatttcttgttattttatttataattttatggtatttgcatggacatattcttccgttggaattatatttcttcctcattcgctaaaatatatttcaggttacc

SEQ ID NO: 3691 - DNA, 2440 bp, Glycine max
  Intron number 1 from transcript Glyma11g31780.1 (locus Gly ma11g31780) derived from phytozome v7.0 (chr-ID Gm11; pos 33140834 to 33143273)
ttccattttcatttatttatttccatacctcaaaggtcaaaacccacatcttttccaattttataattactttctttttttggaagaattttttccttctgttttaaaaaattttctttgcttcaaaatgattttatatttcatatcaaccccccctcgcacaccaccaccaccaccaacacattgaaccaaattaacagtgtagtgaccatataaatttaatacgcgtcatatcctaagcaaatgtcagtacgtagtatgcatccatgcaagtgtgaactcaccaaaaaccacatggagactatgagaaattagagagccattgaaatttggatcaaacatgcagggaaggtccaccttgaattcttataccccttattaatataccatctgtcatggtaagtaaaaatgtgacataataaaaatcaaacactaagcttcaagccaagtgggagttttttgtcgttgacatttgaaattgaaccttcgacctttctttcacgacttctcttcttttctcttttgggatgcttctgaatttgaaattggcacatcatggttttaaatataattaacatttcataaagtcttggacaaatactgatactatgtgattgtttaatttaggcatggatagtgtctcaaaggctagaaaaccaaagcagtcacattataatgcaataatgtgtagaaaaataggtgcaactagctggagttggtgccaattcaaccttggtcattgcatcaccaaatgcgaattttgactctttggtgctaaaagacagtggtaaagttcagatagcaccgtgatcatttgaggttgggattgcaattcttgcaaagtctcgattatttatttattcagctgatgttttttattcaacaaatttagaggaattcttcaaagccatattctatttcattgacctaatcgacacgttaataaataatggaattcttctaagaccttttaataaccttcttagttactgctcaaaagcttctatttaaattaaccatcagaacaagcaaaatattcaataacaatccaattcacatataaggagctgacgtagtttggattagaaaaaaaaaaatacaaaacaaatcattaaaattacatatatttttctacagaatcagtttgaaactagtttctaaacagatttttaagtacaaaattggttttaaaacttgtttggtttcaaaaccaattttgaaccatacatcaattattagaatcattcttaaacatggttatgaaccttaaataagttatgaacacaaaaactgcaatagaaactgattttaaactagacaggggcttcaaaatatcaccgttggctaggggtgtgctgcatgatttggttttatacataattattccttcacacagtgtgttgcttggtttgcttttatacaaattgtgttgggaattttcaataaatcttataaaatatcaaatgagcatcataacacataacatattacgttagattatcaagaggttttaaggaatacctgaatccatagagtttgattaacatgcagcggaatcatacaatggtcacgaacaattggtttaatgatcttcctcaaccaaatcactttcttccttatgggaccttcgttttctcttcagatgggagaggagaaactgtttattgatttggtgtattgggggccataatcatgccttatgttttaaaccttcccattattccctaatggaccaaactggtttccgctcattaagctcatatcaatttttctgtgagtctaatgggctcacttaaataaatcactttatgttgaacccatttaaatgtaaataactaatataaatattataatataatatgtagctcatattaattaattagaaattataaaattcctaacaaattagactttataaattggatttgataggagtttatatgaattatacagatatacagatgattaagattaaaaatttgtttttttatattaatattgatataaagtaattaccatcggaaataataattaatcattatcaaagatcgttaattaaataaatatttttcattaaaacttaaaaatctattttgaaacataaatttgaattccagattttttttttttttgaaatacaatagaagaatagaaggtgcatgattcaatagtgagaatacaacaaataaatgtccattttgtgttagggtgttgctaggggcacctgcaacattgctagttcacccagcaattttttataattcccaaaatactcctcatcgtgttttttctataaaaagctggtttatttcgttttggtctacattgttgctttctttgtatgtggtgaagttagagatctctgctgtggtgtgttatttttcgaccaaggtacatattttatagcttttctgggtatggtttttttttttgtatagga

SEQ ID NO: 3692 - DNA, 1027 bp, Glycine max
  Intron number 1 from transcript Glyma20g31200.1 (locus Gly ma20g31200) derived from phytozome v7.0 (chr-ID Gm20; pos 39853466 to 39854492 reverse strand)
gcttgttcaggcaattgtagcactcttcttggtcagttctccaacatttcagttaatttctacaaataacatttgtcctcatttttagttaatatattttttaagttgaaaaaactattcttcaagtttgtgctgtgttgcttgctgctgcttttcttcacatttgttgttaatagcatttttaaaatgaaacttttgttccatttactagttactaattcgattgattatccctatttctggttgttgcttttgtgttactttcaatatttttgggataaacgactctctattttttcttatcccccctttctatcttaagatttttagaatagattcagggcccctttgtatgacttgctaaatgatatggcgtcatttatggtaagctttaatgtttgcattaaataaaaaaaaaggtgttacttaaaatacatttgtcccaattgacacaattaattgattaaacaactataatacccaaaatgagaccaaagcaagagtgatattaggaaaaccgagccagaataagagcccgggtaacttttctattagtgcagagtgatatatattgataatatatattttcaagcataccaaatggaaagcagataaaaaaaacagacagaaatacacacagttacgcacacacacacacacactcagaagaagagagaaaaaaatgcattgacttcattaaacatagtaataattaagctgtaatcatttcccaccatgtaatgagtttgatttgtccatcacaaaacaattgtcttttgctagcactatgtccattttccttttgcatgaatttgcacagatttaaatgtgaactctttattgggtaatgcattttcagcatgggcagggtggcacaatgtgtctctatccataatatgtattccaccaaattgcatggtgtggcatatatcacgggtgatctatccaattgcttgatatgtgaatgggttggtgttgcatatgagctgcatttagacatgttaggtggcatattaacagtgaaggt

SEQ ID NO: 3693 - DNA, 3412 bp, Glycine max
  Intron number 1 from transcript Glyma08g12250.1 (locus Gly ma08g12250) derived from phytozome v7.0 (chr-ID Gm08; pos 8926881 to 8930292)
aaagagctaaagatatcgagcaacaagcttcttgagatgatatatatctatatatatatatatatatatatgatatgaacggtaaatttttcatattatatatggtgcacataattgttgctccaatttatatatgtttaatttttattcatgcaaagcatcaaccctttgaattgcttgaattacaaactaactcgcaacttgtatattagaataatatccattaatatatatatatatatagagagagagagagagagaaaacagattattgagaaattggaagcttttataactaaataggctaaaaaaatcgtcaattaagtgtgtttggagatgtcatttgtagcttacaaaaccctagaagcagaataagaaccctaatatttcattgtcgattggaaaaaggtttggctgaagaatattttactggctaaggctaagagtaatgatgagactagaaagaatagtgtttctctcatccctcctctttctttctctctcctatcattcaaaacactgttattgcagtttcctaattaaatactatcaggtgttttctttatgctaaatttgggccttttgtgattctgcgagatttcttgtgctccccatggatgtgtgagcttgatctatatatcatacgttgcatgtgattacatacacaacctgacgttgctatagagatcgatcataacatattggaagaattggaagtctttcacttcacatgttgtaattttaaagaaatacatatttttattaataactaacaattgtccttcaactatttgtatatgtgtatttgtggtccatagaaagtcttctaacattaaattcatggtttaacgagaaaaaaacttaattatttttccacatgaaggtctatttaatcaatgttagtcattcttttattaatgcttatttttgtttatgcatgtgaagagacaaggggccttggacataccctttttgtttgtctcgtgactttctctagctaaattgttatatacttattgtctcttattagtggaagctgactccactttatcacagttatctaataatgtctgtatttcttattcttgtgatataatagagctaaaaaaaatgtaaaaataaatattttctaaaagaagaaaattaaagtagagaaagtgaaatggtagatttgttttatatattaaataaaagaaaaaacaaaattctatagatagataaatagctagattactgatcacttaaacttacctgagttgttgtggcgggaaggatttgatattcgagtctagtgtttatatatgtttaagctttagtgcctgtgtgtacgtggatataccaacaaaggcttcaataatttgttggccctaccagaaaatacataactgaaagtgtttttcatatcatcaaatcaacaattctagcagcaaatacatcaaattggatcatgttgcagtgagatagaataagcttccaaccaagcatcaatacatacttgctttcatccaccaatcttccaccatattctcttcttaatttttcattcactacaaaggggtattaacaagtttttagccattcatatataccaaacttcttcaacatatttgttttaagcatatctcttttgactaatgaaaacaccattttcatcttgataaaccccaataccaagaaagtgttgtagcaagccaaaataagttatcttatacttttttgtcatctctattttgaaattctcaatcattttcatgctattacatgtatacaccagatcatcaatataaagtgctataagaagaatgtcattattaccttgatacttgacatgcaaagtaggctcactcatgcttctttggaattttttcttaatgaagtacctgtcaattttactataccatgctcttggtgctttatttcatctcataaaatttatatttatttatagacattttcctcttagccttcaatgacaaagccttgaggttgtgcatataggctataaattactgttaatttggctctagtttttttgaaagaagaacaagtggaggaggagaaacatatatacatatcctttaaaaatggttgccatgcttgtcaaaaatacatatccttcatacacactagattttctcaaattgtaagctaaccatacaccatcttttgagaaagcaacttgaggctattgtggttcaagtgccctagtcttttgcatgtgccacaaactagagtcatttaattacttcttttgtcatcaagatgaattttttctcataattaaaggagagaagaaaactcctgctcttgcaacttttacaatagtaacaactcttgttttttaatttaaaaaattgcactcttgatctttgtctttttaccataaaaactcatccagtttattcctacaactcccgtttgtccccatttttagtttattaggagacctagaaaccaactcccacacatcatttctaacaaattgattgagttactcttgcgtaaactaccatgcaaaaatcatcaatagtagtctcatccataaatttaggctcaatttgagaaacaaaacgcataatgacaaacatttctaagagaagatcgaatagaaactctcttagaaatttctccaatgttgttatctaatggattattcttcatttttctccattccttgggtgtatgcatcttatttttcacaaattttcatcttccttcaagatttttcttcctttcatcaatgtctacctcacaaatttaaaagttttcttctacaggtccaaaactctaaaaatgaaaaaaaaaacatcaataataagatccaaagctctacattcatgttctatgattcatgaatgtgaaccctattttcatctcaaatttaatgtttgtgtgtgtgtatttgtcaaaaatagagacctctctacttctgtgtgtctctgaacaagaagtctgaagccttttttgtaaataaataaaaaaaaagacatctcgctacttcctgcacacacacgtgtgtgtgtgtgagccttgaattttggcctttttggcattctatatattatgtccatgctggtatttttcatgattcaagaacatgaattctgacaccactttttttttgtgtcaaaagtaaagaatagtcacatttgtctcattacattgaatattgtgttttgatttaatttgtaacacacaaatttcagagtgaaatttgttttggaacttgaaacttcagttaccatcatgcatagaaagaaattactcatgcatgtttcgtatgcatgatatatcaaaatgatttatttttttctttttcgaaagggttaattttattgctttaacaagtcactttgctgaatattctttgcatgcagggccatatacgagcgagttaattggatatagcaga

SEQ ID NO: 3694 - DNA, 657 bp, Glycine max
  Intron number 5 from transcript Glyma03g29110.1 (locus Gly ma03g29110) derived from phytozome v7.0 (chr-ID Gm03; pos 37058209 to 37058865)
ttgaggtaacaagtagcatttttctgtagtttttcctatgtgtaatggaatatgatgcttttaactaccaatgctggaaattttcacaacttggttgataaagtcccaattgtattacacttggtagttgttttaaactcatttcattggaaatctatttgctttagatgctcttacatatgactgtagcataggtgctaatcttgagttatttcatcaccttttttttttgttgaatggtgttaggttattactttgtggatttaaagtccactgatagggtaaaaacaaaatgttgcgcaccataatgatccatatggggccatctatttgaaaatctgttggaagcttatagaagagtaacaaaaaaaaacggtggttactaaaaatggaagcagtctttgttaaaattaagatgacacacttgattttatctgcaagtacacagaatttgatttgttttttagaggactttctgtcttcgctatttagttctacttggtattgcctcttaagttaccattaaagctttattaaactacgtttctcacatttgatgctgcagttttcgatgatggaacctacccacgcttctcacttttttttttatctttttcttgacattcatttattcctcttctatgataggatcttgta

SEQ ID NO: 3695 - DNA, 853 bp, Glycine max
  Intron number 3 from transcript Glyma11g05300.2 (locus Gly ma11g05300) derived from phytozome v7.0 (chr-ID Gm11; pos 3709910 to 3710762 reverse strand)
atagctctatcaggtaatgcgcgtgctctgcactttccagccaaataattggattctaaacatgtgtcttcactcttcacacatgatctgtgttccccagtgaatcccattattgggtttcaaagtaacgggtacattttatgaatttaaatttgatccactatctttcaactcccaatcatgtcttagtatgttatttaaaaaatataatcaaatctaagtatgtgaattaatcaacatgttgttaactagtttaaactctttaaataaatttttaggttcgaatattagttactaacaaaaacaaaatcagtaaatatttgtattgcttttattcttattaaatgcataattataaataaattttatacttagtactaacattggacagaaattaatcttttgaaaaaggtttcgtagaaaaattttgaatcctcttattaatctctcaacttttttttatatgagaggtattgaatattctttacatttttaagttattgatatttttatttaatatttatttataagatggtagaaagttttgtagaagaatagaacatcacttagtttagtattcttgaattgctttattaaacaagaatgcaaaatactgaataaatataacttagtgtaggattattttcctaatggatatatgaaatttcgttcttgaaaaaattcaaaaagagatatcatgggggatgaatgaaaaagaaaagtcaaggtaatcatagtttgatttctttttgataaatgattcacactacaggtgctcacactgttggattctcccattgcaacaaattcacgaacagagtatacaatttcaagagcaaaagtcgagtggacc

SEQ ID NO: 3696 - DNA, 1809 bp, Glycine max
  Intron number 1 from transcript Glyma20g24640.1 (locus Gly ma20g24640) derived from phytozome v7.0 (chr-ID Gm20; pos 34285445 to 34287253 reverse strand)
tggaagactcttcacttaaagtgcgaaaagaagaggtacataatattttgttttacgttctgaaaatattaagactagtctgtgtaagatttctttctttaggactaaatattaaatatgaattttctgtacaccttgcactagcggagttggcataaaataattcaatatcatattgtatgtcacaaagtcttggttaatatcttcgaacttcaatgtcatagttattgcgctgtgttgcttttgcatagacacaagtagatttattttattcgatgtcacgggctcctttgaaagctattttagatatatttgtttttgagaaatgaaaattatgtacttcaactttcctcaaaataccaacaagatttctgtcaatgtctatgtgatgttctcaggaagactagatcaaggagcgtgataaaatagaaaatctatttagaatgtagagaagtgaaaatgctgaagtgataattgtgtcactgtggagtaaaattgatctatcaaaacgttgtttggtcgatcagtttaggattagagcaacgatagagaacaaagaaacagatagaggagtaagttgggaagagagttcagttactttagaatccaaggttaaaacacaatccttattcaaatagaaaaacactattctttaaaatttatatgaaaaacaccgaaaatgcaatataatttagagaaaaactgagtcaaataaaaatgaaaagaagaaatcctaagagatgataaaaccccatatgaaacatctatacattgaattgaagatgtcaatataattttttttcttttgttttcttctaaattatagtgtttaaagattggctgagagtagacatttcatgacaaatgagctagtggaaagttgaatatatgatccaatagctatttactatagataaataatagttttatgctacatttatattgaagtggatgcagaaagtgtgaaaaaggattgccatctgtcaaaaggggcgaggagggagacacagataagagataaaagtgagaattctatgttggttaataatacaagtgaatcttgacgaatgtaagaataatttaggtaagctgatattaaaaaggaatgaaatttaaaacttaactctcgaaaactactgatataattttacgttggttctttaatctgaggtttctttctttacttgtaagtatagaacactatggcattgtttgatccatggattggttattgtttttgtacatgtatattcttttctatttaacactgcttagcatgcattacctttccttctacgaatatcagaaacttgaataattgaattgtttggatggtgatacatttatagagaattggtgaacaggcggaaaggcacaatctactaacttgctgggttgtgaacaataaggtttcaggcaaaaattgaggtttactattttatttaacaaataatttagacttcaagatctgagatgttttgctggattcatcggtggcttgttttaacatacattttatatttttatgtagccagaactataaaatgacttttactatttatttaacaaaaaagtcagacttcaagttctcagatgttttgctggatgtctttgtttgtcagtggcttgtgttaaaatatgttggtattcagccagaactacacctgtaaccgaaaattttgcaatatcttactctttaggaaagtgaatatgcagatgtatgagcgtagttttagagctgtaaaagttgccttttcattttataaaacgttctgaataggcttttaaatggttttcctgttggcagaa

SEQ ID NO: 3697 - DNA, 1830 bp, Glycine max
  Intron number 1 from transcript Glyma06g30000.1 (locus Gly ma06g30000) derived from phytozome v7.0 (chr-ID Gm06; pos 28748169 to 28749998)
cttgttacttgaccaacttttccttatcccacgaggtacgcttctcctcattttcttataattatgttcttaaattaatttttggaattgtaaatatcacttattttaattcctgtctttttaaacttttatttagcaaaaaattatccactttaatgaatgatgttcagggttaaaatgaatgattttctaataaaataaaataaaaactgaatgagaatatataaaaaatgaatgattatataactatgtttgctttttaggcctgagtgttcatcccttccggtaaatcttgtcgtgacttgcaagaaaatataaatggtgtgtgcataaaagaataactgctctcatgctattgaaaagaatcaccatgtttttgttatttcggttgtgttttaaaatttctattatgcaagtattaattaaaatgtactgcaagatttttacactaaattgatatgtgtggacagatttttttaattttataatctaaatgatctattttttctaaagaaacattatttctaatttatataatattaaaattaaattcatttaattctaccaaagcaaatttaggtattttagttaaattttttcttgaagtaaggtaagatattgaatgggcgacgacgacgtgcagttgcattaattgatgtcttgccatacatacttcattggccattgccattggcacagttttgttcatggtttgcatacattcctcgtgctcctgctttcagcatgtctcataaatcataatgacgatttttactttttttgttttgttttttgataagcagcgacgacgattttttttataaacttaaaaaaaatcatttgtatcacgactttgaatatagaacaatatctttaaaaggtagtgttattaagaaaatattttatctaacaaggtgttaagatatctttaaaaaggtattgataaacaattggaatgagttttatcgtgctatttttttacaaaagaaattactagatcaatgaaacaatcatgctaataaataattattatataatatttttccaacaaaataaaacataaccgttattttggcataccttctaaaaaaaatagttatttggtatacagtacattatgtacctacatcatttggagtcttggacgacgcgcgaatagctagtacccgatatagctaaacgaattaacgacctataattaaaaacgaaaaagaaaatgcgatgtaattactgaaaaaattgtaaatgaatcatttaacgttaattaacttttatactaatactgatattttgtttgaagccactaatatttaattgataatacataaatttttttattttttgaaaactgaacaatatctcaataatttacaaagctatacagaaaattctaaaaacaggattgtgttgagcataagttatttgtggtagagaaaaaaaacacaaataattaactttatctttaaaagtaatacagtgacaatttaatcattcaaagaataatattttaaatatgtaaaaaatacattaattacgttctaccatctaacttttaatatcaaatcaatctttaaatattataaattaatgaaaaaataatttataaatatttaactatagttatcacatttttaattatacatcttggattaagaatgttcattcttgatgaattaaaatatcaccaagaaaatttaactagttggattaagaatgtcacccattatacttggatggacgaaagtgaccatttaaaacgataacgaaaaagcggttaacagaattagttgaacaggtgcgaggcgcgaggctgaaagacacggtggaaat

SEQ ID NO: 3698 - DNA, 1880 bp, Glycine max
  Intron number 2 from transcript Glyma01g01970.2 (locus Gly ma01g01970) derived from phytozome v7.0 (chr-ID Gm01; pos 1534008 to 1535887)
gccacgttcgcggatccacctcgtatcacatcgaggtggtttgtatattaatcacttaatgatctctctttttatgatatcttctgagtttcttagaatattttagaaaactattttggtactttttggtttcagttgattaaaacatgtgaccctaaatcttatttgatccttgcattaagttaattgatgctacctacttcagttgatggcttgatgctcagatccttgatttcatcatggtgtgaaatatcagtatttgtgtgtgttttcccatgatatgtatgcaattatacatttggcatcataagggaagctcactcaaggttccccaccctgttagattagggaggatacatgtgcacagccttaattcaaggtggagaggctgtttccatgaacctgtgacttctgactcacaaggtagcaaccttactgttgtgcctaggcttgcccttggccttgatattaaaaaaatgtatactctctgaatcctaaatcacatttataatcatcaactcagggatttttcacaaccccctggtttttagcttatttttgtatgcttttgcctattccttcactttatttgatgaacatatgaacaaacagaactcaactgagtgcctttggctctaccaactaatatatttattatatgatctagtaatgaattcttgaaagcagttactttcttggtacatggttgaaatctggtttggattatagatggttgtctacatgtgctgtgatatttacttaaaactcatctgttcatatcaaaattctgtgcaataaaaacttttgatgggaatctgataataactgtcatgactcatgagtactcactagttgttagaactgagtccaaacaaaaatctgtagcaggaaagagtttgggtttgcaggtttattataggaagaggaaagggtcaaaaagttgtaacaaacacttagagggataggagagttagttagttctgttatttggagagagttagttagttctgttatttggagaattataactcctataaataagagtcctctcttcagtaagagggggattggaaatatacagttactgggctattgccagtgtaaacggagaaagctcctttggaggtatactcgtataccttggctcttggtttgttctctctatttcagcaataagaaagctattccagtttttccccgttgtgtgtgattttctcttgtgggttctatttttcctactttagaaagaagttcctaatactagtcatgtattattagatttaagtgtaataataacggccagttaaggatagaagttgggacttgggagcagtaaaggattattagaatatgtgatagaaaatagcttgtcttgcattagttgttcagtattagttctgtattagaatttgaagctccctttagaaagtttttcatagaaaataaccccgatgacagttatgtattagggtatagttgctagtccgggtgtgtaattaagaaaaggttaatgttatttgtagtttgtggacagagaacattctctacaagaatcttttatctatggaacaacaattgtattgcaatatcgtgtgtgatttctgttttgaattatattttattagtttatgtttatcaattggtgttctatcagctttcaagtttggtttgcatgtttacgataacattgcattttcactatgccctgccttttccttatttgctgatttctttgacataagtagaatggtatgtagtaagtatagctctttttatggtcctcacatcatggtttgcctggttgagcattagtttcctttgtttctgtcgaacattctgctgcaggtggtcatctctataggcccacagaaatttcaaag

SEQ ID NO: 3699 - DNA, 4347 bp, Glycine max
  Intron number 18 from transcript Glyma04g32990.1 (locus Gl yma04g32990) derived from phytozome v7.0 (chr-ID Gm04; pos 38390903 to 38395249)
gccccgtgtctgaagtttttcgtaaggtgtttagtattcttgattcttcattatatcatgtaaagaatacaatacaatgcaaagaaagttatgtgtctaaactcaattcataatactggtttccttcatcatgaaggtagttgacattgtaattttattattatttttcttagaaattggtcttgggcctaactcaactgcacaaaaccaacttgtaagatgaagactacttaagctttataagatatattttatgccatatctctagttggtgagactaaatcaccacccttgaggctgcaattaaggtagcccccaaagagggcacaactatggcgggctaggggtaaccgcaattaaggtggctttccaacactttcctcatgctcagggttatcagcctagagagtgcaaatgcatgtagcttaacaatgaatctaggataaactttaataccatcttataaaatggtcttagggcctaactcaaccacacgaaattgacttgtaaggtgaggactacccaagctttatgagctctatctatgtcatatttctattaaggtagcccacaaagaggcaacaactaaggtgggctacgggagaccgcaagtaaggtggctttcctacattttccctcattagttaattccagtttacaatgaagcttgtagatgtggattaaggatccatcaatttttttcataaattttgtttcttgtatttatttgggtgcaattttggtctcaatctttggatttataaaattggatgtaaagtggccaacacaaatcttattttagcacctatttcccctaaaggggtgaaatcatggttccataaaatagaacacttatattagcatctcttttcccttgactaagtaaatggtgataattatagttccaagaaccactccataattggcaagtaaatctagagaagaagtcgatactcccttttggaaattaagcaacaattctgaaaagctcataattttttatacaaataggtaaaaattggagctgagttgtgttggaccactggagttaagaacttttctttagctaccagtttcaatgcaattaaaggcaatacatcagtgatttaagtgaaagtctattacaaatgtgtactactctaaggcctaaccctccttgagtttgtggtgttaggaagtttcacattgcctgcctcagttcttagggtgcagtttatatatctgttggacaatttcacttagagccaattggttttaagttgaaatctaacatgtgggatgtccttactttggaattgggaaaccttttctcccacgtaacttttcagaaagtgatgataaaaaaaggagtttttttaggattcccactattcataattgatcaatagaatcctagaagaagctcaaactgaaagttcccaaacttgcctctgaagagaagggaacagttgctgtctctttctcaaacaacttaccttgttgtaaaagaagtgttatgttcttccaaaagttttaactatgatgggtgccaaagaattctttggtttatgttgaagtaaaatgctcattcatatcatttatggcttctttttatgttctgctcatggttgcttaaaggcagtcgcaattcctgaaatcttatcagactttactctcctcatttctctctatcaattattttgtactgtccaaaagaaaattatttgttatctaattccgagtttacattccaaatgcttgctttggcttattttcaatttcacattggttctaagttttcccatctaaactttttcagcccatgtcaatacactcttaccatctactcctaaattataatggtaaaatgcttgtggagcagtgttgctattggccttttgtaagttattgagcttgtcatgtacctactctcccaaatgcttgagctgttaggtaaggcacatggatggttttatattacatctgtaaccccccacccccatcccctcgtgcaagaatcatttgggcttgaagcatgtattatgcaccagccttcctaccttgtgctaaattcaactttttattagaagaatgagtggtaaggatcaaatttcactcggtcatcaagtctctgaaaccatgtcatgaaatgactttcccaaaagcttaaactattaggtgaagacatatgaatggttttatatcacatctggacataatatctgggcctccggattggggcaaatccaaggcggtccaacacatgggatcctatagtcaagaaatgtaagagaaaattgacaaaatggaagcaaaagctattatcttttgggggaagggtaacacttataaagtctgtcctaaattctattcctatatattttttatcttttttcagggctccaaataaaattctggacaaattagagacgatttctgtggggcggaggtgtggaggagaagaagatagcatgggtaaagtgggagtcggtgtgcctaccaaaggagaaaggtggaatagggatcagggacttaaggaagtttaactatgcattccttggaaagtggaaatggagctttttctataacaaaggagaattatgggctagaatattggactcaaaatatggtgattggagacatttggaggaaccaacaaggggcaacagagcatcagcatggtggaaggatataaatatcatagatccttcaggtgcagatggcagcctttttgataaagggataaaatggaaagtggcatgtggagaaaagaccaaattttgggaggatggatggaaggaggatagagtaacatttaagttgaaataccccacacttttctctatttccaaacagtaacaacatctcataaagatgatgggcaatttcacagctacaggttgggaatggaactttaaatggagaaggcaacttttcgatgatgagatggagatggctgtaaagtttttacaagatctagaagatatcagcatccacccggaccgagaagacaagtggatttggaaggaagatgcatcgggtgtctattcagcagggagcgagtacaagaagcttatgtcagcccaaactgatgaaaatcaggatggtgtttttactgagttatggaaggtcaaggctcctagcaaagctacgttcttcgcgtggagactactcggggatagattaccaacaaaaatgaacctgcgtaggagaaatgtggaaataaatgatcccacatgtccattctgcaaatataaagatgaggatgcaacatatatattctttagttgcaggaaaatactgcctttctggtgggaatcagtatcgtggacaaacacttcaggaccacttccacagatcccaagaatgcatttcctccagcacgtggtttggaatcaaaatggctctagttctcagatttggaaatgctggtggatctccttgacctagagtatttggcagcatcgaaataacattatttttgaagggacaattttaatggtagtaagatactggaggatgtaatttttctttgctggacttggcaaaaaaatctgaataaggactttgacgtatcgtttcatcactggtccaacaatatgaaggaggcatttatgtgattagggtgggactctatatgtatgttgggtagctgtggaccaagcaaactgtcagaattatggtttcctaattcaatttagatactctgtattagggaatcatagtcctactaaatttggcccaatgtgtaatttcaacaatacaacttatactgattaacatataatacaatattatttttgctgagtaaaaaaaaaaaaaatctggacataatatatgtgatggcactaaatattttttttattacatttcttacttctgtcttgaacaaatattatgggtcactgtcaaaccaaaattaaggagtcctttaatttgttttagaagagaacgaactctccgtcatattgcattcatgaagctaatcaagtggtaaggatcaaattctacactacttgctcatcaaatctttgaaaccatgtcatgagccaactttcccaaaagcttaaattattaggtgaagacataagacatgaatgattttactttacatctttaacagaatgtatgcaatgacattttcaaaaaaaaaattgttactttagccttgaacaaatattatgtgtcaaaccaaaattaaggagtccttgaatttattttagaggtgaacaaatactccatcctattgcatgaatgaagctaatcgtagttaatacaagtctgtcatctagtgtatattttcaatgcatttgactctttaatgttttttcagacattgaaggaattcattgctgttgcagagtcaga

SEQ ID NO: 3700 - DNA, 4290 bp, Glycine max
  Intron number 1 from transcript Glyma05g04630.1 (locus Gly ma05g04630) derived from phytozome v7.0 (chr-ID Gm05; pos 3813389 to 3817678)
ttcctcctcgctggattcgtgctctgtaagtcccattctctcacatcattgccattttatttttatttacttttacttttattattgttaccgttttcttgtcctgtgtttgcaattggttgattttatttttgagaaagagggaaggatattttttttttttagcagtcgtaattaagattttgattttctggtaggacctcaaagtgtcctatgagctttgaaaaattgggtctgttatcgtactaacttttgtccagaacttagtagttgttgtacttagaattcttcgtggaacatccaaatattcttgcaagcttcgatatgcaagtcacagtgtgtttgattgagtaaagtgaaatgagataaaaattaattaagatagtaaaatataaaagtgtgaatcacatttttaggtctctttcgtctcaataaaacggagggcagtcatacttaaaatctttgtccctcgtcaaggatagagattgaataaaaggagaaaaataattggaaaatgaaaagggattcatgtcataaaacgaggatagggttggggaatcgggaccattagttcggtttgggtcgatttgattgtgtggtgactagtgacagcccataatgttattgctttaattaaagggtttgtgggcatggatgtccacgtcctgatctggattgaaaactctcaggtcccattaactaccttgcctgggtccatactcactttctatgttggggtagaactagggatcgcattttcaatagagtttaatttttatgggttttttttttttttccaacgtatttcctttgagatacacaaggcaaagaatagagataattctttttaagaaaattgtagatttagtcccactttaaagtttgagagttttgcccccactcaagctaatttgaattgataatttctgataaggaaaaatgttaagaatacgctcttaagttttttgtctgactaatgaatatttttttgaaaaaaataattatatacagagacagtgtagcattatatatgataattgttaacttttaaaataattatataaaaataatttaaataataatttatgatgggataaaagtaaaaattattttactctttacatgtacatggacataatttaaataataatttatgtttacatgtacatggacattagattcatttcctggtcttgtattcaattaaccagtgtacgttgttacgagttacgactcctcttgtatgattgtccaacaattgtacaatcttcttcaataaatgaagagttatatctggtataattttttttctaaagtacgtaattataaaatgacaaattattattactatgaaaatgtattatcaagtagttatttataattttattatatatgatgatttttaattaggtgataagattaataaaaaatttgcactatttagtacaattaaattaaaatctttttcaaatagtgtagtaaggttttttgcccttctttcctaagtgcaagttgtcacagtatgttgtgaggggcggtggcgttcttatcgactttaaactgcgcgtgaagttcaagagtgtttgacgatggtttcaacgtccttggattgttgttcaacgttctttcgtgtcttgttcctatttggttattgtttctggcggtcggcaaatactactctagttaccaacaactttgatgtttttatgcattgaattttaataggataaaacttagtccaaatatgttttaaggtacttcaatctaataatatttgaaaatttactttaataatttatgtaataaaaaatgttataaattaatattaatattagttattaaagtaaaatttaaatgaaaaataatataaaaaagtatatttatattttgtcttttataaattgtacttcattaagaaaattgtttgacgttcctttaagatatatacacactatggaaagaagaaataggaagttcgcaagacaaaaataagagatcttattaaaaaaaattactcctttctttattctcctaaaaatatatataccttgttaaagtgtgaaaacatcatttattctttacaaaatataaggtggagcttggtttagtttgagtattttctatttttatttttgaagtaaacaaaataaaaataaaaatgtttgtttgaaatttagaaaatatttttttaaaatatttataaaaatagacccaaaataataaatcaatattttcagcctttttaaagaaatagaaacgcaataacacctttcttttcaatacatgttttttaaatcttaaaaatttgtaaaaattattttcaaaaaataaaaacagaaaataaatattgaaatcaaccgtcacctttttttcccctaaattatattaagaaattgttgcacctatcccttatcgttcaattccatggttaaaaacaaagaacccttgtcatactattttgttctctattgtctgatggtggtgctacgtcgtttgtaatcgaatcattgcagaatttgtcacttcttaatattagaactaatgtaatcatgcattactgcattttcgttgacatcaatttattataatatgtttatatacaaacttactacgaaggtatattagaaattccgatcaagtgcattatttttttaattttttttataattttagtgtgttagtagtgttcttgaaatacatatcaacatagcattaaccttccaagatttaaacgatgttttgattttataattttatatcatttaagtttcggctcctattgtgctttcatattaggtccgtataatttttactatttaaatagacatctgaataaataaaaactattaactatttattctttgctataacctataagacgaactgatacgagttggttgttgggagaattctagggaaataaacatgtttggatttatattaataagtcataaataatcacataacagaatttataccatattttgatttaaaatctttagacttaggtttataagtcttcttctcacttatatgatattcaactttttcagttctatttgatgttgtattttacctcatacttgtactccaacaaatagatttaaaatagttgagttaaatcgggtcggtgtcattagattgaatatttaaaggaatataaaaaattgtgaaaattactaaaagaaaacacaaaaaaaaaaggaaggggaaagtgaaaaattctaaatattaagagtaaataattatttaatttcaaaagttaaatgtaaaaagaataaataaataaataaattaaatatttattataattaaatataatttttattttattttaatgtggttagattagattgaatttagtcatatgtgaaatatttgaacccgattacttttggttcatcaattttaaaaaattaataattaataattctgaaataaaattaaaatgctaaatatctcttgtttaggaacgtaggaaattagaaagattttagatgatattaacgtgcatactaaataacgtactagtgctatttaatgaggcttcattatgagttgtgacaagcttaatgaaattgatggctagggttttagacggttgtgtagtggtccctactttcatgccataataaattacttagatgaacatctccacaattgaaaggtgagattaatactcgttgtttgtagagtacgagactgctccttcttagatatgccaacaagggttctttaatccttgagcacaggcttactcatcatttagttttatcaattactccaaagcatggaggaatcatgaagatgagcaagatggtgcctaatttgattaccggctatttgtcttatctgaattttcacaacttgagccaacaagtatatagtgaatgactaatcatattttgatccctagtcccttggctagtggaactctcaacacctagttttaaagttgaaagttattactatattataccagtgttagttatcagaacaattagtcactcaagcgactttgtttaaaacaaaaggtaatcgctcaaataaaataataagagagaagaaaaggatgtttataaatattggacgcatgaaaatcagcaagaaaaccaatttgttggagtacccctgagtatgaccgtgtacaagttgaagtataattacctctatttttgtattggacaattgcgttgcgtgtatggacttattattggcattattaattgatgaattgaaaattgacaaccctttttgtttttattggtggatcgtgtagtgaaaaggaag

SEQ ID NO: 3701 - DNA, 3763 bp, Glycine max
  Intron number 4 from transcript Glyma18g16890.1 (locus Gly ma18g16890) derived from phytozome v7.0 (chr-ID Gm18; pos 17603315 to 17607077 reverse strand)
caattgcttgtcatgtcttccatctactgatcaggcatcattaagttctagtcctcctaatagtacaaggaagaaggaaaataaatacgaagaagatgtacagtcttgaattaaataacaaaataagaatagcaaaatatatttaattgacaacacatgaataatgcattatgacatacaataagcacaaggaaaaaaaataaattagggaaagaaagatatagcctgggttgaagcgcgtaaatgctatccttagagagaaaacgcctccactacatgggtaagaaattctgattgcgctcctctcccaagatacgacaacccgtcggttccgatcgtgtgcagcgaaaggatccccaaaccttatgaacatcaatgctcttactctcaagaaataaattattttataagaaaagaaatagaaaattttgggagaaagagatgagactgtagctctgtcatgtttttagaaaggaggaaagagaatatataggcattttgcaacaacaaaatatgaccgttggaaatatgaccgttggaaaatcaacctacagttgtcacaacaaacataacaaactagttgactcattaaaacaaaatcttaagaaaatctaaaataaatattttattttataaaatagaattaatatatatttataaattttaaattaaaaacacaaatatttaccaacattcccccacataatttaaaattttaaaatatattttctgaaagataatttgtataaaaatataagagaaagagcatgtgatattgtatttcggtataaggaaccttccgggtttgagccttatacctagtgtttatgaacttccatccgagaaaaatgtagtgacttgattgtcttgaactacatattctttaaccggactttagtacacaacccctacaatattggcgttcaattaggttctaatcagtggtagcatgttacacggccttgcgcttgtatcttgtttcgtgagtgtcacttagagattagcccatatctcacagtggcggccccaccaccacactcactaggtgaatcctcaaagagtgggttgtgacacccactcctacaataattgtcatcggattcattaagaggtattttttttaccaaaaatacacatatataaatacctcaaccttaatattgccacaatttataatacacctcgtcataggaatgagaaacggaacaactccgccaaatttcattttggtgtactttagtcaacaaacaatttcgttgttacccgttgaacttcattcatgggatcaccaatcacacggagacgggtgtccattgttgtaactaaataatgggttttaatctcattcccctcgatgactcaaatacttgttgacgcgtcaacccttttgtaagcagatccgtaatattattttctgacctgacaaagtcaagagaaatgacataatgagaaatcaaatttcttatagacttatgtctcactcttaagtgtcttcttttttcattaaaattttgcttgtcactttagatataacaatttgactatcacaatccattggaattggaggtatacgcttatttaacaatgacaaatcgcataatacatttttaagaaattcagcctcattagtagcagtatttaaagcaataatttttgctttcatgtgaaataataatttgtctagtagattttcatgatactgcacaaccagctaaaaagcaaagacataaccacttgtcaattttatttcatcaaaatcaaaacttcaattttgtatcactaaatccctcaattactttccaatctaccaactgcatatgcaatatcagacaagcctagagaagtttgtcaaatgcaataaagaaccaatactttgagaatatttatgtgaagaaaatcctttactcaaatttttctttaacttgatggatgagtcataaggagtagaaacatgtttcacatcaaaataattaaacttctttaatatatagcttttcaacataataagattgggtagaaaaatcataccatcatttttctctataagcttaatacccaaaatcacatctacacaaccaaggtctttcatatcaaaatttctagacaagaaaaacttcacatcatttatgaaattcatttactaccaaatatcaatatgttatccagatacaaacataaaatgacacgttcgttattattaaattgtttcacatacacacatttatcactatcattaatttgaaaaccatacaaaagaataacttaatcaaacttttgtgtcaatgctttggagcttgtttcaaaccatacaaagatttaacaatttatttttcaaaaaaaatattttcaaagaaagtcacatctctagacttcataatagtaccattagaaatttcagatacttctgaattaataactaagaatctataagtagtattatgtaaaaaatatccaataaaatataattaatattttttttcaattttcctttttttattaatagggatattaacctttactagacacccccacactttaagatatttcagatttggttctcttttactccgtagcttataaagattttttttataaggtactctattaagaatatgacatgcataatataaagtttcaccaaaatgtttattttattgtttttgtgttatattttcccaggcttatcttttatcaatgagttatatataaagaaataatcagtcaacatgtagcaacaaaatatttgcagtaataataataacgttaaacaatagaaattaaaaaaacctaacaacaaatgtcctgattttaaagacttgtgttcacatgatcatttgatcaagtaaaagataacttcctaaggcatgaatgaaagtagtgagatgtttttagttttttttttttcacacaaactaattctaaaagcattttatcttaaacaaaaatacaattgacaaagaaaatatttttcaacaatctcatactaatgtaaaatttcaggaaatacataatataataaaaacatttttaatggaacatcatgcattgtgttttcatccattaatttttcatgcttactagaaaggaacttaatcatatccattatagatattttgatacaacatcatgctactgcagaaaagactatgcaagaagaaagtataaaacatttttctttcttaagactgttggaaaataaaacaaaaatgaaggaaaataaatacaaagaagatgcacagtcttgaattaaataacaaaataagagtaacaaaatatatttaattgacaacacatgaataatgcattatgacatacaataagcacaaggaaaaaaaataaattaggggaagagaaaaatgtataggcattttacgacaacaaaatatgatatgaccgttggaaaaccaacctacaattgtcacaacaaacataacaaactagtttactcattaaaacaaaatcttaagaaaatctaaaataaatattttattttataaaatagaattaatatatatttataaattttaaattaaaaacacaaatatttaccaacagatgccacaaattctcatggtaaatgcgacaaaagagtaaatgaagcaaatgaacctgtttttcttgatgaattttcctcagtggatgcaggctcgaaaagggatgatggagatttgcacaactgtgggattcttccatgcaattgcttgtcatgtcttccatctactgatcagggatcattaagttctagtcctcctaatagtacaag

SEQ ID NO: 3702 - DNA, 1224 bp, Glycine max
  Intron number 8 from transcript Glyma13g30750.2 (locus Gly ma13g30750) derived from phytozome v7.0 (chr-ID Gm13; pos 33283660 to 33284883)
cctactggtatgtcagctttggtgattctaacttcctttaatattgttaatgttcatgtgcacgagattgtgtgttgtaagctgtaaggcttgatatcgtaatgcttatgatcattttcagctcattttggaaagatacagtccatactcatccggagatttgcagctcatgattttctagacttatattatttcgacacttttacatttttgtgcttttcacattagttttggatcgaaattttgctggatagaagcaatactacttattactgcttttttccttgttataaccaacaaatttcataatttagttatggcacattttcttgttcttattttcacttttctgaagaagctgtaaacaaatatcaaatcctttatagttccatgtgtctttatttgatgctatttttttattgttagatatttacacatatgcttctttctttttgattttccttctgcgtcaaattcagtaaaaataattccatgtatgaattgggtttacaaactctgaaggatgtaagaacttccattgatctgcctttgagcatacgtgtctcaaatcaaagaaaaacatcaggaaagaaaatacatatatatttattaaattactcatgggaatatttagtagtatccccaaccctttttgttgggcagcctatacgtaggctatcagcttgacaaatatcattttgaatgaaaatcatagttcacatcattttttactgccataattcataattaattgtatggaaaatttaattatcgtgtaatttggctataatgtgaacttatagattaagttgtgttccgtgcttagtgatggaatacaagtttgataggaattgtttcagccaaagttggcttgtctttgaacactaattagtaactggagagcttatttgcttttctccttccagctgccaacaacatatctctttttaagtcctacttggcatattgtatattgcaggtcaatgattatcatcgtttttaatattgttaattctgtctaagtttcatgctcacctttgttttgtatgtcaacttgttaaactacaaaagatttgattgtattcattcataatggacacggcggttcctatatgtcactaccctattgttgattatgatttattctgagatgtcatttctatagtactatgatataattgattacagccatatgttctttatcatttttacaggtaaggtggg

SEQ ID NO: 3703 - DNA, 1628 bp, Glycine max
  Intron number 1 from transcript Glyma15g31750.1 (locus Gly ma15g31750) derived from phytozome v7.0 (chr-ID Gm15; pos 35192127 to 35193754 reverse strand)
aaccttatcaccggttggttcttgctaccacgattcgtttctaactatttgtctttgggtgtgtgtgtgtttggttacttattgttagagatcccacgtcgacgagtaatatggccaaagttagtgtatattggtgggggacaatcttgatcttacaagtttttgatgatagggtcaaatccataggatcaccattatggggcagttattggatcatctgcggatgttcaggtccagtaaactttaagcatgatatgtccaaccgttggcgtgagggggtgtgttggagatcccactaattaagtgagggacaaattttctcagtcactttagaagttggctttgtaggattgacttaagctcaaactcacaatttaagacttttgctgtgtggttatgaacttataaattatgattgcttttttatttgacgggcttttcttgttttgaattaatggaattaatgaatggtttgtctgtttgtggtgctgtgttttgagatgaagagaaaggtgaagttgatctagactgatacgtgtgaaaacatattagatttgtgttttgatttgataattaaacggttgatgaagtgaaatgcacccaattagtgccttggagttaatggctgaaattataaacttcgtgttttaatctttgaaattgataaaaaggataatttcttattagttgaaggttttagtgtatagaaatgaaactcttagtcattaactaaataatcttaatctatgcaatgattttatattgtcattgttttctgataaaaaattgtcatacatgataaatttgtagacttttacaatgttaactaagaaatcatactaacaataatttctgatctgacaaaaaaaaaacaataattcctggtctgattggttgacagtgtatttacactcatataatgtagggaaaaactcttgctgtcttttagtaatgttacccatacattgacaatgtgaagcttttcgatactgtcgtcaaacaaactacggattgtcggtatatcaaaattaaacttctattactgatgtttgtaatgtcatagattaatttaatgtattacttcctagtgttttactttgtaatgggtgaatattacgtttgtggacttacccacgagtcaaaatttggtgcacggatccgttttagcgaatacaagtgaaatgaaaaaaataagtttggatctgtttaattagtaaaacggtgctataaattgatccgtgattttctttttctgactggtgcttattctgtatttgtgtgagtaattctaatatttatagcaacttaattggaaagcagttgtattattctgtgggtagaaaaatgttgcattggcatgatttatgtggtgggcaataaataagctaatctgtttatgtctgtgcagacagatgatgtatgtattcagggaatatgttgaaaaccgattcatgatattatcagatcaattaattctcccaggacaaatgcatccttaatgttgatgtaaatagccaacttagttcaaacatagtagaagtaatttggtgttttcttttgaatggaacattgttacattgccatgatttttgtagaaagttagcttattgtgtatacctgtgaaacag

SEQ ID NO: 3704 - DNA, 1881 bp, Glycine max
  Intron number 7 from transcript Glyma02g00790.1 (locus Gly ma02g00790) derived from phytozome v7.0 (chr-ID Gm02; pos 588285 to 590165)
aagcaaaggaatttattaagtccttggcagataaggtatcttaattctatattttgacatcacagttaaactcaatttatgtaaataacattttcctgcttgagccttgaaacaatgtttcatccaaagtgacgagaaacaggaatgaaaaatcatacaagtggggagaatgaaatctttgaagcatttctaattgcatcttcacacacacacacacatattcaatgtaattaatccttaagaaaattcaaatcatgttgatgaacttgttattggttacaagtctcttgtctatcaatagtacttaggaataaactatgcacaatgatctgctgcctttgattttctcttctgacttctttgtagctaaatcatattccccctgatatatattattttcactatcctagccgtgcaagaatcttataaaaagttgggaacaacttgaaatcttcctttcataccatcagacaattaacaccaattttgccaaaaagttgtgcaaaagttgcctctgtaccccatactgcattattccccatatagaattatatttttatatatgagaactcaattaaatgaaggataagcactcattttggaaacttaaataattatgtgtgactattatgcctgaagaaatgaaggaatatatcattatgttatccaagtgcattctacaataaaattgctagatttttgttattgtgtatggggcaaatatcactggattattgtggtactaaaaaaatatatattttaaacataataatgatttgtaccagaaattttgagttactgtaaatgacattttcatcattactgtgttgtgattcattgtcaaaacaaaacctcaatctaacatttagcttattcttttaaaactaactactaatttcaacaacaaaaattggtgatttgaatgcgtccaaaattcttattatccccaaatgacaataaagaaaaaaagtataagttttagatttagttatatggttgtatataaatttggcaaaacaagtctggctaaattatcttatgattgtgcagatgacaaaccttttaattttccaaaggatttcagcaacaattaattgatgcaacaaaatagatgactatcttcattgaatcttgacattccctaaaactgaataatggaagcaatcattgagttcatggtgtcaacaaagaagtttaaatttaggctgagatttacagatatatatttattgttacacttattaaaactatattatttgcattatttatgtatttttgataattgttatcttctcagactccataaaggagcaataactctcaagatagtcaaaccattatttattttgtccactacctcacctttaactgcaagacatatgcttaatttttcaatctgaataactcggaacacatatggaccttcatcctttcatcaatgtactcaccttgactgctaatgaatagggttaactaaagagttattgcatgtcataataagctaatctttaaacctggtgggaaagaaaaggaagttgatcaggatatctggttcatcataataaggcctagtttggattagcttctagcttacgagagcttttcaatcccaagtatttgattcctaacatacaaagaagcccttataaatttataggtgtttacggagaagttagccgtgagaacttatgaaaagctaagatacagaagatgatatattttaccttatgcaagaagttaaattcattttatgctcttgatatattttattttctttgccattagtgcttgttgagaagtttatatcaaaatagctaaactttcttctccatttggttttatttagttgagggaagtgactgagaagttgccacctgagat

SEQ ID NO: 3705 - DNA, 9430 bp, Glycine max
  Intron number 4 from transcript Glyma16g01980.1 (locus Gly ma16g01980) derived from phytozome v7.0 (chr-ID Gm16; pos 1511737 to 1521166 reverse strand)
cacagaagttctttacaaaggtcaatgggtaccttctcaccttggtttatatgtttaaaatttccttccttttgtttttaacttatgctttaaaagacttgctgtcgatttatgtatcagttccgtatctcttttgattcactttgatgaataaaaatcccttctaactgctcaaaatagttctgtatctttttttttttttgggtacagtaaatagttctgtatctgatctggttgatttcaactatatcatgatatcaatttaaaaatataaaaaaatcctaactaaattaacaacttccatggtgatattcaaatgtcatgtaaagtatagtacttcttcagtatcagaacccaaaataattttgttgataaaattgtgaacacgagtcaagggacttgtgagttgactttatataagggattgcaaaattaaagtaattattgaagggaatgaaaatccaataaacttaccactaaaaaatggagataaatttattgagataatgataatgatattggtttgtaaaattagcattatttaaatagtgaatattatccttttattttaagagtattatctttaaaatgattttttttttcttatccttttctcagcctcatttcttatcctcaaattgaatagaacccccactcctaaatgctaaattgacactagaacttctgtagagtttggactaatttgaacaaagaaatccacagtagtcatgatcatagtcatgatcaaactgattggcttgatcttgcaatcccaaatagacactacgcagaagcatgctttaacttgcaccaataaagtaatattatataactctagcttcatacctaatcaacaaatggttcatctttggcatagtatcagtgaaaagcggtagcactttggcaaggcaatcattttctccttttgttgctgatttcgataatacaaaaatttgcaatgctactctgggggttctagcaacaatgggttttatttgtcataatgatatagtataggtgttctatatgttaggtagtgccttgggttgggctttttttgattgagccaacttggagttaaaaaaggaaggtgctagtgtggacatgttatgcatttgacatatttgggaggagagggttttaaaatttgcctcttccttgcctaatgaggtgcaacacctaacgtttgattataaaagaaattggtcttgatgtttgagcaatgttgtatgtaaggaaaagttgaaactcaccatttgtggtgttgtgtgaggttggaaaaaattctgtgtttctagtgctttgttttaatgagatttttttttctgagattatgtgtgttagagatgttatataaaaccattaatgtgtccgtataagttttttgagatagtttgttcatgacatagcatcaaagcttctatgaccatgtggtctagagtttcattcttgttggccatcattcttctaaattgtgtatagcctttggcaactagacgtgccttaagtgataagtcacaacttgactgtcaaggccaagtttcacagtaaaaatatcgcgacgaatcaacaatagacttgcctagtgggagaagaatgaggtccatttgaaggggacacatttcatcaagcatagcttgttgtcatccaagataagataaggcatcacctaaagttttaggcctaaaaacagaagacaaagaagaaatgcaagtgtagtacaagaaaaataacgataacttaaagaagtgacaatttggagaaagattacaagttcaacatatacctttacgaagtgcaatgggaaaatcaagttcttgaggaaatgtctgaggttacatgatgattggttttggaggagagttgttcccatcactagttgctagtgtctttagggaaaatgatgactttgaagggggaaaggtaatggggacatacattaggggaggtagtggtatagttgtggagtctgagttaggtgtggatggtgaagacacacaaatgtaacatcatttgagactaaataatgatgaataagccgagagcaacatactaacattaataactttgagactgagtgcatcctaggaaattgaaattgaggccctaaaaattgtagggccaaactaggctcttaaaattgaggtcctaaaaattttagggccaaactactgggcctatttttgcccaatattttcttagtttttccttttatatttatataaatatatatttagataaaaaaacaaaaggggccaatttggcccagtttgatggtcgggccaaaaaatgcagtctacaagaaattcagctcaatttgtatttcataccttggcctgctatgctgggtggtcaaatttggcacctctacgttggaagccataaagctttggaattgttgagatagatattcatgggtagtatcactttgtagggtgtgaatgagaacaccaaattgttttttatttcttgataaaatgatgtaaagattcaaaacaactcagatcgatttaccattaaaaatagccaagtctgtcaagaataatcttctataaaggtgacaaaatatcttgactctaaagtaggcatgccatgacataagccccatacatcagagtgaaccaaaacaaaaggaaacctatctctacaaatgacacaataaggaaaagaactttgaacatgttttccaaattgacaagactcacaagacaaggttggtaacttggacagacttgacaccatttgtttttgcttgtaagactaggatgacccaatttataatggatgagaataggagaatatgcaaccaaactagaatgtagttaagtccccatgactcacgtatggcccaaactctaatcctgcaagaaaacaaaatatttagtgaatcaaaccacataatcaagagaacgagcaaaggcgactactggataatagattaatcgaaaacttgaggacatggaagacattgtcaattgagagagaaggaaaggggtggacaatagtaagcaactctgtttaattttcgccttccaaaaaaaaaaaaaaaactctgtttaattttcagtactgttgattacatcacagttttgctgtttagaaagcaatgtgtaacagataaaactttatgcctactatgagggggatgactagaactatatttgtttgatgaagtttgagtgagttattcaagtgtgaagatgtgaggttcagatcttttctttctacaaatgcagatagtggtgtgtggtggttttctttttctggagcccactgtattatgcttatgcctttcatagggagaaaattaatgggtcagtcacaatgccatattaggtttcatgagaagcatgataatttgaaggcacctgcttctattatttggtggtgagagaacaagcaatttctatatgaagagttgaaaacacaaagagaatgtatgtagaagcattgaactttattgaatttatcaggcattttaagtggtggaagaaccaaattcaatattgtgatggaggatttgtggtagagcttagaagggctatctagcattgttttgctttgattcatcgtatacataaaactactgtttcagttattcaatgcccttgataatttatttcatgctttccttcggtgatctttttttctttacctggatacaagtactatttgtgaagataaaattcctctgtttttggtaagctttttttctttcttcctaatttaattatcatttgtttctgaaacaatttttactagagtatatacttgtataactgttaaaacagttttgtaagggctgttagcttttgctaacagcacctccctaacaattttgtataactgttgaaacagttttgtaagggctgttagcttttgctaactgcacctccctaacaattttgtactcagtactctgttcagaggtctataaatacctttctgtaactacctctgtaactaacttttgagatattcaataatatctgttttctgtcttttctctctcaatctatcgaatatggtatctagagccaatttttcgacgcgttcttcccttcgcaagttctagatccttttgtctatggcttccgcatctccgagtttcgtttctcaatcatttcctaattccatcgccgagaagctcgatgatttgaactatctccattggcgacaacatgttgagcatgtcatcaaatagcataaattgcagtgttttgttgtgaatccggtggttccaccgcgttatctcactgaagacgatcacatagctgatcgtgtcaatcctgagtatgaggcatgggaagttcaggaccaaacactccttgtttttcaaacctttaagtccatggttgaattacaacttaatactaaaattaaaagtttccaaggggggaggtgagtacaaaaccttttctgctctcctagcctctcatggcttctctcacagattcatttgtcccaacactcatcaccaaaatggtgtggttgaaagaaaacatagacatattgttggcttgggtcttactttattacatcatgaatcttacccatacaattttgggattatgcttttaccccagctgtctatttaattaatagacttcccattgcttccctcaactttgctattccttatgtcactctgttccgcaaagatcctgattttcagtttcttaaaaacctttggttgtgcatgttttccattattgaggccttatcatacacacaagcttggctttcgttctcaagagtgtctgtttttagggtattcgtcttctcacaaaggttataagtgtctgtcttcaactggcagaatctacatttgtaaagatgtcttgtttaatgaactaaggtttccatactctgacttatttccctcttctcctaactcagtaaagaatcttgattcctatttcagcctttgtcctaattggtctccaccatctgtgagtcttactccccaaccatcctaattgtctacttcccactcctctcctgcaccttgcattcccctgatttttctcctattccagtcaaccctccctacagtctcccattttgtttctcaacaatcttgaccctctgagtccacttctttgcatcctcaaacatcagagtccaccacccttagtttaccatcttttgtgtctgtttctgctgttaactctaccctagttaacactcatcctatgcaaacaaggtccaagtctgggattcacaatcctagacttcatccttcattatttcttgttcattcctagcctaaaactgtcaaacaggcccttgagaatccagattggtttgctgccatgcaacaagagtatgatgctcttctgaaaaacagaacttgggacttggtttcattaccttccaacagacaagctattggatgtaagtgaaattttagagttaaggaaaatgctgatggctctattaacaaatttaaagcaaggctggtagctaagggtttccatcaagtctatggttccgatttccatgagaacttttcccgtggtaaagcctatcacaattcatactattctcacccttgcactctcacatggttgggagctgtttcagctggatataaacaatgcctttttaaatggagttcttaaagaatcaatgtttatgacacagcctcctgactttgaagttggggataggtttcttgtttgcaaacttaacaaggctctctatggcttaaaacaagccccaaggcagtggtttgataggttaaagtctactcttcttcagtttggttttgtgggcagcaaatgtgattcttccctgtttatctacaagcatcagactcacactgtctatcttctagtttatgtggatgatattatcatcacaggtagttctacctctctcattcagcagctaactactaaactccacatcgctttctctcttaagcaacttggtcatttggattatttcttgggcctagagatcaagtatctgcctaataataactctatagtgatgactcagaacaaatatgtgatttacttcacaaaactcacatggcagaagcccattctatttcctctcccatggtttctaattgcaagttatccaagtaaggtgctgatttatttcaagatccaactctatacagatcagtggtgggtgcactacagtatgctactttaactagacctgaaatcagctttgctgtcaataaagtctgtcagtttatggctaggcctcttgaatctcattgggcagtatttaaaaggattttgaggcatctcaaaggtaccttgtctcatgggttacttctttagcctgcttctcttgccaagcccttggctcttcgtgcgttttgtgatgctaattaggcatctaacgttgatgacaggcattccacctcaggagcagccatctttcttggtccaaatctgatatcttggtggtctcgcaaacagaaggtcactgcacggtccaacactgaagctgagtaccatagtttggctcaaaccctgctgagttgacatggattcatgccttactaacagagttgcaagtcccttttaccactcctgttctttactgtgataatcaggtgctgtgtcaattgctcatattcctgtgtttcatagtcgcactaaacatacgtagattgatgcctctttcgttagggaaaaggttctggccaagcagctttttatctttcatattccaactctgaatcagtgggctgacgtgctgaccaagcctctgaaaactcaatgtgaagagtttttcctccgaaaactcttccccttgagtttgaggggggggggggggggggggtttagagtatatacttgtataactgttaaaacagttttgtaagggctgttagcttttgctaacagaacctccctaaaacctcaagggctgttaaaacaattttgtactcagtactcagttcagaggtctaataccctctttgtaacctaacttttgagatattcaataatatctgttttctctcctcaatctatcgaataatttaaaatgtgtttatttccaaagaattaatgcaatatttccttctatgtactcaattgaaatgttcccaactttctgtctttgtgttctaggaatgcttagctgtcaagatggctattttacgtgatccctttaattaaatgttatgtgtttgttatttattatgggaaaataatatgaaacttttaacacaaaagttgattactttaacaacaacaacaacgttgctttttatttatatcccttccaagttgactttctgacaattgaaaataacgaggtgtgaatttattatgtttgctaaattagctgagggaagttacacgattgtttgattcatcataacaagagtgcagtacctattttgggaacttgggagtttcaagacctagtaaattgtttgatactggaagataactatcaatctatcatttgatgtgttgatactggagttgaatttttaatgatggatcatgggagtaacagctaggtagattagaacaattattgtgttcaaaattaagaaggattcttcaagaaggactagatgattttgaggactttagtgttgttaggttataagttatgattattgatttctatataaagaaaagttggtccttcaaacccaaaagggtggatggaattccagcgctaggatgctggcatgcattgccacacagatgatgtgtttggtttagaggacgaaaatagaggagaatttttttaattaaagtagagtgtaaaaggtgtgggtccaacatgggacccacaaaatttgtctcctatttctgtcctccctcccttaaccaaacacagccagaaagaccaatctacctttatattaatgatctcaaccttagtgttaagtgaaccggtttattggaatattaacattggtcatgctaatttctagaagagcttaatgtctatttgagtactgaaagttaaacagaggtgctaattattagttaaaagatggacagtgaacgtgcaaatgctctatctttctccctctctcccttggaaaagaatttgcatatttcaatgatggggggctggtgtaatcaatttgattatcatggtcaaaccagcaccccgccccccccccccccccccccctttatttgactgtgctaggattcatttatcctgcatagaatcaaacttcttgtcaaatctatgattagtagcagcaaaaatgttcacccatccaactccaaatgagtgtaggggcctgggataacagttcaaaagtacccctatagccacaaatacaactattcacagctgatcttacatggaattcaaatagagcctagtagaaactttcagatgagctcaaacccgagaaataaaagcagaagcttacttaatttgactgggattacttgtggggtccaagaatgaacaaaaccaagctttgacatcaagtttaacttgaccattatacagctcacaggaaatgttatcgtcttatgttatggataatgttctccgactaatatggaactttcctgattatgcagaagtgagaaattgaaaaagaggaatttacaccctgaaaaaaaatgatgtgacaacatttttttttattaatggaatacattttttatttactatttaaaaaagggaagagcaattgaagccaaagaatgagtattttaatggcctgataataggtcttgttagttgttactaatgctacactctactgggctcaatgaaagtttgttaaatttttagaattaaaaataaataaatgattattatcactaatctggaatctataaattgcttccaaacagagaaacttcttgaaatgccttttgtatatttctgtgaacaggaatggccgaaagaatcaatccaaggcttaaacataatttgatagaacattactttcacatataaagttgctaacctcttgcagtgacagtggatcaccacagaaacaagagtaatcagtggtgacttctgcaaatttttgggaactgctaccatcaatgtagtttcatagaactgtgttttcgtaatgacaatagcttcctacatctttggagtctactacgaatcagtgatgttgatatacatctttttatttgaaagacaaccagtttccagctcaccaaatccaaatgcatcttgattacatccacggctaatttttccccaacttgattgaaaaatatttctggatcttttcttttctaagatttcttgcttgaatacactgaaatgtctgttacacctatttttattttcgaaaaagtattttggaaattctgcattaggaacaaacgtgctactactccagtaagtgcttttaatggtttttgtgaaacttcacttgctgataataccatttggaattttacttccagctggagaaagaggcccttgtaaagggtgttccaat

SEQ ID NO: 3706 - DNA, 3741 bp, Glycine max
  Intron number 1 from transcript Glyma08g40620.1 (locus Gly ma08g40620) derived from phytozome v7.0 (chr-ID Gm08; pos 40358253 to 40361993)
ctcaaggtgtgtgcctacgttccattctactttcttgattttactattattgcatgttcttaaatttttacatctttagattaaagtttacatataagtttggattaaactaaagtttacaaattaagtttgaaaaaatattataggacatgattgagtaagttttttttttaataaatactttaaagaagaaaaaaataaaatatttttatataaattaaaatatgctcgatctttattaaataatgattaactaatttataggtttttttcttaaaaatgaaaaaaaaacatctacaaactaactaattattaagtaataaataacttatttaacttgtaaaaaaattgttttgtttttttattttattttttatcttataaatatttttagagaaacttatactgaaataaatcctaagtcttatttctttcaaagtgaatttttaaacaaattgttactctcaaacatacttttgagagctactaatatatgattttaaattgactttactataattttgaaatctaattctgaccgaatattcaagcacagccttaattggttgaaattagattgtggtttaactgatttagtttacgttgattctgttgacctgtattatgtattataggttgaacctttaatttaggacaagtgatcgaattaataattgtgtttggtggcaacgtgtttggattgaactcggatgggtgttgttgaccaaaaaagaaaaataaaacagacgcgtgttgccgtaaatgaaaatgaaaatggctatatatttgaataatttttgaattaaaataccctattttgaacaagtaaatccaaactttcattctacttcataacaaaacaaataaataaatatttcatttttgttatatgctttaatttccatttgtttaagattattccatccaagtatatatatatatatatacacacacatataattagattgaactattgcagtaattatatacatgaaattcaatctaatgatgaatacacatagaacgtaatgcgcgtttgtgtttttcgtaagaaaatagattaggagagtgcaattatatttatttacatataattagattaaactattgcagtaagaaaaaaagattgaactattagagtagtatatgcaaaaaatagtcataactataagtagaaaatttatagctcatagcaattttgtatgtaaaatactaacaattcgtcatcactatttaattttgagatttctacacagaatattataaatacgttcacgagatcctctgcagttatactttcaactgcataaatcttgacctttaaatttttatgttaaattatagcatggacatttcttatgataattccatacgttcataggcttataaatgctgatcgataatttattctgatgcgaattaagtgacgctcatcattattatgctgttatttccttttccggattgaggtgccatcctgatccgtgatattaactaatattaattatttttcctgtctttaattataagatatttttaattaattattttttaaaataattatcatattaattttatcaattaattttatcaattaattatattatgattttaaaattattttttttattcacttacttgtttcttattattgttaaaaaaataattaagtaaatatatgtaaaaaataattaatacatctaaaaattagacttttataaaaagggataaatcattttttttaaaaaatattataattagaaatgaagggagtataatattttgaccttctttcttgctttgctattctagagttaggggtgatttaaattcaaattaatctaaaataaaaataaaaataaaaaatagtgaaaaaaatctaaaaaatgaatcacatttttttttagatttgtgtggataattttttttggttaaatatttttttaatttattatgtaggtttaatttagtcgtttaattttttataggttcaatttgattctttaatttttaaaattgatttagtttgatcttttaattttttttattcaatttggttctctaattttgaaaactaatttttttttgcttcggaaaatgtgtattttgtgacaaattaaaattacttagtgacgattttgaattgttataaaatgtgatttcttatcatttaaatttaaggatcaaattgaactaatttaaaaaattaaataatcaaattgaatctaaaaattaaattagagaataaaatactaatttaaccatttttttcttctcaaatcaatcggtttgattagatttgtagtttgaatttgtgaaattgaatcaaacctaatacttatttatgatttatgtttgtatcacttgaatttcactatattttgtctaccaaatttatataatatatatttttttttcaaacaatatttttaagatatgattagtttaagataaataaattttgacaattttttattataaaagatttaacatattaacaagttttatagattgctattaacaatattttcaatgtaatttaatttaaaagatgaaaagaaaatatactatattttaataaaaatctaatcaaaccaaattacaaaatattaatttgatttgatccatattttattttaaatgaaaactgaatcaacttacatatatcttttaagtttgatttaaatgatttttttatttttaatgaaaaatcaaatgaaatcgagtcggaacagctcttcctaaagtctgccccttcacctccatgagtgagttttgttattcttgggattcttccgccttatatagttaacacatgcaagacactttttattttgtttaggattagatatatttttggtgtatgaattgaatatttttttatttttataattttttttatttcttataatataaaatgtgtttattttatttttgatgtttaaaatacgttatatgacacttttattttaacattaaaaaatacattatctaaaatatttaaaatacctggatgaaaaataaaacaaacatattttgtaaaaattaaaataattttttataaggaaaaaaacaaaaaaaaacactaaattagcttagatcaaaattatgtttaatttttttttcataacagaaatttagaataaaaaaatactatatatcatgtgctccgacaactctgaatttttaccaactgggtcccgcaaatcgccgctcacgcggagcttcaacaatacacgaaccgcgtgatattaattttgctgcctctgctctgtctacctacacacttgccacccactatttgttcctcattgttaccccatggccacattattaattaaatatgtttttttttatcaatagaaataaataaatgatgatataaaaatttataataatttatatattaaaaaatagtactattataggattatacttttttaatattaatactattattatttcttgatattatagaatttaatttaaatacagtaatagagtaattttttttcaactttattttcttacattacattaatataccactataccaatacccaaaacccaagtcactcttcattcatctctgatccaaacgaagtaacgaaccaaccaatcaccctgtctttctgacccaaaaacatagtcccaaatcgaacaaaatcaatcaactaactcctccaacgttgttgttattatgcagacaacaagttccaacacctccggcgccacctcgat

SEQ ID NO: 3707 - DNA, 6694 bp, Glycine max
  Intron number 1 from transcript Glyma09g19730.1 (locus Gly ma09g19730) derived from phytozome v7.0 (chr-ID Gm09; pos 24470751 to 24477444)
taccaatacaggttagtccctcccaatcggtcattctctctcagtacatttttttttccagaattttataacactcgaacctgttcaacacttagagggaggtagactcacttgattctctcaacacaatttacctcttctacttttttaacatttttattttgtaatgaaaataatgatcaaccttcattttataaaataaataaatatctagaattattcatatttaatgttcaaccctattaaaagatggaactgcattagtgtcgaacatgattgctattgagaaaaaaaaatactcgtaggaactaaaaaataataagaactgatttttatttcggtcaaacttgattttgtaaaagtatagatgtttaataaaattaattttgttttataattttaatttatctagaaacgataaaagatttcttgttttttgattaaaaaatttatactaaaatacttttaaaataaaaaacatccaaaatttaattacatctctactatattaattttacaaatcaattcaatttacaatcaattttgtaaatattgatccaaatacaccattacttattgataaaacaaaaacaccgttacttactgagataaaggttagcgagataagaataaaacatacacacccttacgaacatgtcagtttgtatattttatattttaaaaaactatcacaaaattataatatatataaaaaatttcaaaaaagttcataatatatttacttgaatatttgtaaggttactagttagatcgactggcctggttatcaactcagtccaaaaaccagctgttatagtgagtcacgctgatttcataacattttcgttctaacaaccgttttagaccatgatatcacccatttcctataactactatcagacttaccttttctgaaaaataattaaaacgaaacatgcattggatagttgggcgtatggtaggacaatttatgtggtccaagtttaagaattgaacttttcttgtaagtggtaaataaaattctccttcgcgaattacttcgtgcatccagtatatttttttgcatctaacaaatttttgtaaattttagaaaaatccctctacaaataaacatatgaattcataatttcatatgatttatatagattcacaattcaaatgaatgattaggattcataatccatataaatcatatggattataaattcgataatgactttagggattgataatctgttaatacacatgtaaagttggagggaacgggatggccctggcagtttccaaagttggatcgagaatgtcttaatttaatatccaacaaaaggaaaacaaaaactggtataaagtaaggctataagtaacttggacaagtatattatagttttttcagtaaaaaaaagtatattatatattttaggtttatttctattttttatattttaatttatatgtgattttgattgtttttttgttttatgtgtttgcattatttaaatattctcatagttgcttaattattaaaattaagtcttttactttaaatttgatgaataattaattttcaacaaaggtgtaatgatattgattattttatggggaaaatctttctttacccatgaaaattttgtaggtagacattgtttagatctatatagatttttttttccacttacatgagaagggaataagacaaaataaattaaaattctcaactatccaatttcttttatataaatttcacgttgatgaaaataatctctcaagtcgaaattaacatatgcacttttatttttcgagttagatgaaaaagcttttattaaacttgatgcataaatttattttagcttacgtgagggttttaatttattttattttcttattttgtatgatacagcttatccaaacggatgacatcatgttttcaacattatattaagtagttaacatatctttttttcagagaaaaatacatatttcttatcatgaataaaaatgacctcacgccctcatttaagtcatatttccaataatattttattttgaaaacagaatttaagaaatagaggcacaatcgtggtggcatcttgatttctctttcaagggtagtcttatgtttgatttttcaaaacatcaaaatcttacttctaatatatgcacgagtcatataggtcataactgttaatttgaaagcagcgcatgctgaatttatacgtgtgcttgttgtgaaataaaattgttcaaatattctttagactctttcaaccatttccttttccgtaaataaaagaatacaatataaatatttttctattgaaaaaagtacagttaatttatatatacggtcaatataaaacatttttatatagatatttaataaaatctgattattttattatgtctttttacttaattattagtatgatgtgatgattcctataaaaaaagtattatatgaggataagatacttttttaatgaatgtatatgtaaaaaattatattcaaataatgaatatgaatataaattaaatccaaaatagaaatagcagccttttttttataatagtaatagttaatgaaaaatagtttgctgaactgtataattagcatatgctccacatttataaaattgagtcttttgcattttttgtttgttttagttattagtttttttagtgaagagattgagaacaattttttctctatttcttctttcttactaataagttaaccttataactcttaatctctgtttagtcaaaataataaataaaaatgtcaaatagattgagaaatgacatttatggcatggtattaaagtagctttctaaagcattatattatatgttgcatgagaaataatttttttcttaagcacgtggtctggtttacgtgtgtggaaaaaatattaagtttgtgtgcatggaaaaaatctattgaaagattattttactaattaatctcctatcactaggccatcgaccccaacagtttagattataaatgaagtgaatgatttaaaataaataattctattaagagcatgggagttgtttaatgaattggttaacaaaaaaaatattattttgatgtgtaatattattttgaattgtttaaaattgaagaaagttggttatataagtaagaattcttcatgagttattcaactttgtattaaacataaaagagagaaataaaatatttgtgagttaaataatttattaataaaaatgttcattaatttaaaagattgacatagtgatacaagacctgttacatgagtgagaacaatttatttaataaaaaaatctgtgtttaatttttatgtaacggatgaaattagtatctaatcgagtggatggagagacactatggtcagatggtctcttacctaggacaaaaaattaaaaatatttattgcagaaaaaattaattgaattatttaatattagtgtgacataaattaggttgattatatcaacatcattatagatgctaatttaactgaattgaatctaatttaactgataaacattactgattgaagtgcaaaattaactgataaacattactgattgaagtgcaaaattttaataaactcctcccatcgtaacttgtaaaactatctccactaacacacacagttcatatgctaagagtagaatgaagaaacatagattctatatttctatctagacatttccaactgaatcggactttgaagaaccacacaggcctacaagaaactttagtacgtaagtactggaaaagagtaaagttgggaaaaagaaattctcaactgatatcgagtaagcatgtaaaagtttggtgaatccaggtaccttattaatttggaggatatatacatgttgatgttagacataacctaatacttggttggtgaccttaactctcatgtaaggtactaaggtgtatctatacaccaaccttttatatatagccctccataagtcattattttcattagttgatttaatttttagacaaatattaattagtgtctttaggatataagttaaaaaacttaaaatataaagtttttttttattgtaatgcataaaattaccctacccatcaaaacttattttgtgttctataattttcagaataaatattttttttttataatttctttaaccaggaccccaaggtaccaattaacaagaccctaatctttaacataatcaatgcttgtaaaaagcggagggtgcatgtaagacattactaactgctactcctaacattaattgttgggagaaaacacgtacctcttacaagcattgaattctttcccaacattacttgggtggtgtctaacaagctttttttccagttaaggtgcatccacgcacgcgtcaacctcttacagtgtttttataattcacgaattttagtcattgatctatcttttaaggcctaattaatggttgttaaaggttggcgcatccatgcgggtacatgtctgacactacttgagtttttactttctagccaatagtcgaagaaaattattgattttcagttttcactcttgtcaactcccactgttttttttttttgttttttttttatcgagtacactttttcaattagaagttgatcaatcacaagtaagcagtagcacaagtttctctcttggagttgctggttcttgaaatttttgtatggacgggttttcagctctcaaacccgttgattagtccacctaaactgaaactaatcaatcagtgtgtgaactaacagcctaaaactacgaccttgtcctactccttaacctcttttcattccttaactctattatcttcaaactagtgctgattttgtctattaatttcactattttcaacacagctgcaccgtatccactaggaattggattctctgcagttgaaatttcaactgcacaaatccccaccttctaatagactttgcatactaaataatgaaagaaatgcgaatttgaactttttgaatggtcagagataaaactgcacgactctgcaattctgttagttcatgaatcttgacctttcatcggtatattcttttggtttctttctcttttttaattaaagagggttgtgcatacaccagagtcacctcttcagttgcattaaacacagaaacagttttttagaatagagtccaaaaagtcaagttctttcagattggtagaaaatggatttagatcctcttatgttagtaactaacatgacaaattcatgttagagacagaaagacaaatgaaattaatggaccctacacaaaataatggtggctcctactataactgttttacgttttttttctcttagaacatgagattgtcatgtttgttactaatacgagaggatcttggtatcttaatcttttcaatatgcaaaaattaagctacaaattatttcatgttcatttcaacaaatcttccttagtcatatgaagcagtttgaagttggtgttctccaactgcaattaacataagcaacatatctcatataagcttcctaaatccatgggtatcagtactctgagaagtgatgcagatacatttgcttgacattgtctcatgtcatagagttcaaaatagaacgaagaagttccaaagatatacaaaaccattgcattggatattgaataagatggattgataccatagggatggcatggaaactactagaatgagatctataagagcctaactgaatgatacatacacagatcttacagttgtagagaatagaaaagcttaactacctgtctaactgaatactaccaactgtgataaaactatttctgcgttaataagttgtgtagcattctattatattagacaaccacccagttttggcgttgcttttctacatctcaaattcaattcaaccatgtttaagtgcaattgcgccttccatgtcaagcgcccaaaagatttttatggcacttatactgcttaccatgattttggtttttactatggttggacccttttggagatataaggttggttgggtggtttgggaagaagggaaggagggaaaggtcacgagtttgattcctcgtactaacaaaaactaacaaattaacaactcacatttgttaataaaaatggttggacccttccatcactgatactatgactgcatgcacaatgatccacctttcaataaaagacactcctgattctattgatctatttatatttgtaactgcagatattttcactaaaataaaaattgttagatgaatgtgaaagttgtcaccataagatagaaggccattgtcaactttctgggaaaaaaaaatgctaccaatatttccttctaaatttattggagagtggctgctttttgtagaatgctacaaatctagttcttgtgtatatacaaatccagtttttgaagaattagacttatctttgaatgactgtgcctaatttaagttactaatctgctattttagcgtttacttgctccttgggtgactttcttatcatctcgaataaagctatggcttgtttattaactattcgacactcagaactagaacaccacttttttttttcctgtataacttcgtcatcatacttatatttctctattgctcaatctgagtttattgtttcttcaaactcctgctgcaggtacaaaggggttgagtaaggcaggaaaactagtc

SEQ ID NO: 3708 - DNA, 1517 bp, Glycine max
  Intron number 1 from transcript Glyma05g13110.2 (locus Gly ma05g13110) derived from phytozome v7.0 (chr-ID Gm05; pos 13639099 to 13640615 reverse strand)
cctcctttcctctccctcctcctagatcgagtcaggttgttttcgtgtttctttctctttctttttttctttttctctttcccaattttgtttctgcatttatcgttttctgacacaatgaaattgttttcttaatcaactttaccatcaattaccctttgaattttatgattgatttgggtttgttgcaaattctccatcttttttagtactatgattccagggttttctgctattttttgagcttgattagtggatatgtcattgatcggttggaggatttttgtgtgggggagaaatgggattgtatcaatttcgtttttttttctgtcggtttgaattagaaatggaaataacgtcgtttttcatttttgggtattgataattcccgaagaaaaatgcaaaattcgcatgcgccttgattgccacaattgatttagtcgttgcaattgcaaatttgaaaaaacaaatataccttttttttttccttttggttgtgtaagtcccttgctcggaaatgagttgagggattgccttcactgggttcagggttttctattatgtaacctttttttacttgtttttggtagcatattaactgatcacttgttcattctttctcttttagggtatcctatttttggtaaccttcacttgatcactttttctgcctctttagaattgaaacctttagttggtagcttcacccttcatcaagattcatgagcatagaaccccaccgttcacctaccagaccaccaccgcttgcatcttcccaatctctgctcagtagtgattaatttgacttctatgcatggagggaagggggtttgactgtgtgtgtgacttgtgtgtgggaatttgggaactaggggatttgactgtgtgtgtgcatgagttgggtgtgcccatgaagggtcaagggttgggggattatggtgaaagcttctttctttcaatgatgtatggtctataacaatatttagtctcaaatctgttccgctgttctgttttctcttcttgcgtctgtttgtgctagttaaaaaattgtgcccccttgtctttttttattcaccaagttggctattggtagatttaccttccaaagttcattccttgatggataatttggcgacaactgaaatgtaattgctgaatgcataaacttgttagtagacaattttcattatcaggggttaatttgattaattactgagaaataaatgaactctatctgtctgcgattcatcttatatagttttacaagaaagtataggcaaaacacgtaaagtttagcattgttttggatttgctttcatattatttgttgatgttattgcatcttactctatatctcttcatagaatggatagcactgtaaaaaatggtttatactgaattaatagaaagaaaaggctaataatatttgaaatgttttcctagtagacttgtgtttattcttattacacttctctttctttaccttgaggatgctttattttcatttgtgtagaatc

SEQ ID NO: 3709 - DNA, 1481 bp, Glycine max
  Intron number 3 from transcript Glyma04g09290.2 (locus Gly ma04g09290) derived from phytozome v7.0 (chr-ID Gm04; pos 7458156 to 7459636 reverse strand)
agttatcagggaaagagtggcgccaggttcttgaggttggtccacccacccacccctttttcagcacgtgtttttagtgtgttgatcaatccaatcataataattatatgcttgctgcttgtgttgtgtctatgcttttgattctaactgggatgaaaaaaaaagaaaacattggaaaggctggtcaacgactagcttttttaacttgctgcctggcataatttgcagagtgattattcctatctctcattaaacagtagttgaggtcgaggcctcaaggttcctgcaagggaggatgttactactttcatggccttctagctgattttgtcaggttttatttggcaaatctcttcaaaagatttttccttttgaactcgattaagtaggttcatttctcctgggtgcaaggatagacttgtggctggttataagagaaagatgacttaccactttattagttgcgttcttagcttcttatattgcaatcttttatgctgtagtgtttgctgtacttcttaacgggatataggaattatagtgacctaactttgcaagttactactctaacttttctgatcaatggacataaattgtggtgactatctcatgcatttcatttgataataatgcttcccgatctatgataatactcctcaactgtactgtaaacacagatttgctgtaccctccaaaatattgtgtctacaagtctactactaattatatgagtttatagcaagttctgcatctgattgaaagaaacgacaatcttccataataattacctgagctgtaataatagctacttttcctgctgtgctctcgttactaattaaatgattctgtattttgatctttgtcttttatgttggaattttgagaagtatacctgcaatatagaaaactcttatattagaaaagctgacagatgcaagagttttgcattaacattttaactttactgatttgttgcaagtaggtcttttatcattttcctcaaagcttgattttctggatgatatgctttctattttggttcaaatatcatttatgcttaaaattcaacccatagtttacagagtagttgttgtgggacttgtatgaattggtactttcctatttacaatatagatggggacccatttccctgatatcttagtcaaattaaaagttataaattcattctgtaaggtcttcttagtaatttgcttaagtcactatttcatgattatatattaaaattcatgattctatgaatgagagtggaaacaagatgccctctatgttctgtactcggattttattgcagtgtgttattctttaggagaaaagcaattttggatcctgtttggatttatttgcagtttattctatgtaattttataatatacagagaactggtaacctctttttcttagtttctaactcctgtatatattttaggattataggctgtcacatccggaagttactgttct

SEQ ID NO: 3710 - DNA, 1170 bp, Glycine max
  Intron number 7 from transcript Glyma05g37610.1 (locus Gly ma05g37610) derived from phytozome v7.0 (chr-ID Gm05; pos 41173269 to 41174438 reverse strand)
aagaagcccattcatttgaaattgatccttctcaggtaatgtatgtgtgagcttctggagaagattacagtattttttactctcttactcttgatctgtttgttttttattttatgctaagaagcacaaatacttattaatagtaccctttgtgttggacagatgtcaaacactgcaaggacactttgaatatttctagctgcattttatattttttactttttattttaaacttctgtaacaataccataaaatttagataaactatagcatttttgttatgtttacaatgaatcatagtcattttggaattttcacaagtcattttggaaacatgaatcctctcgtgatttaagaattttattttatgcttattttagattaattttgcatgtattatagctgtattatgtgctatgattttaaaaatttccatatttccatgttcatgttgaatcatgtctgtgtctcgtgttatatatccatgatatttagattttacattatattcccaagtcagacctcaaaattgttgtcttgggaaatgatgctggattaggtcattcatgtttcagaaaaagaaattggatgagttaattgtattaaatttaagaaaacaaaaatgaatatatacatttattaaaattagagctagctaaatacactttttaatgctacattcttacttctctatatgatgcagctctggcattgtttggagtgcttttggttgccagtgataagtgttaattcttatcactgttagtagttcatgacttatattgtagaattctcctatacttaaataatagtgtcaaaatattccattagtttcactacaagaatattcttagaaagtttaaattttgtttggggaaaagttaatgagagctatttcaaagaatagactagatagttatcataaatcagattggagttttttcttataagccaagaaatattattaaactaagtgaaagcataagaaatgctcacttagctaaagacattaatacatagaaaaggggaaaagtatactcaatagaattttcaacctgacccaattacatatatccataaaatgctgagggagagcaataaaaaactgaacccattaggatacatcaaactgttatatttaaatttttctcatttatatgcaggttgaaa

SEQ ID NO: 3711 - DNA, 1820 bp, Glycine max
  Intron number 5 from transcript Glyma18g23280.1 (locus Gly ma18g23280) derived from phytozome v7.0 (chr-ID Gm18; pos 26952978 to 26954797 reverse strand)
ggaggaggctccagttgcaggtaatttgtgtcttttcaatgttattagagaacaccttggatcaataaagtttatatgtgccttctacaaatatatgcttggtaaaaacaaaaggaataactttacattgtgagatttcgtgactgttttattgagatttttattatattgttgattgaaaatttgattcaattgattatccttttatattttcccaatataccaaaaaaaaaaaactacccttttgtgcttcatatggaacttatcaccttatattcatgtttagctttcaggcctttatgctatgtgtcaatttaagattattagacactgcaaatgacaaccacaatgacagaataatagggttatccaacttcaaaatttggaggacagttctgttaaaagccaaactgtttttctgtgtgtatttggaatgttattttattgtacccctttttataaattttttagaatagtttaaatccttattaaagagcaggcaatggttggttatcaatgttccaatccatgttctcagggtcaaccaaagaactaattggctttctttgaatcagttggttaccaatcttttcctggtttgaactttggaccacattcatctggctggtgttagatggacttgtataatagtagctggttttctaaaccagttgaaccctgccagtgtggtctaataaattatgtaaggggatgcattgctgtaatttgctgtgactttgttttattaggctgcccaaattgttaatacacttttaaggatgggcatgggacaatatagaagaatcttttctttgtttttggacaaaagagactttgctaattcaattgaggaccaattttatggcttgcattcatgaattattggggttaaagagtatcaattttctgaactcgtaaatgtgaaaattaaatgttcctattgggtttgggttactattatgcttggttttcattattagttttggggttgatgaattaccaaagtgacattgacagttgcaacattggcatggtgtaatggcaatgtggctatggtaaaaaaggtaagaggaaaacttcagatctataaaaatgggatgatgtaatacaatccttgttaatggttttgattagaggtggcaagacaattgtagtggtaggtagctacggatgatgatggcaatagaggtgataatgactgtaattataggttgaacatgaatcaaagtatacatgttgaaaaataataatttgtatggtgagaatctaaataattttccttgtttatgtgtgaaattgatttttaaacttaaaaatgtttttagtcgatctaaatataaaatcatgaaagcacacaggagagtattctttgcctttaatgttaattaaaactatcatatgccattgccagaaggctccttgctatgcgaaggtatggggggaggtatattgttctcagtcatacccttgcatatgcaaagaggctgtttttggatttgaacccatgacctccagcaaagtaatgtaatttactctgaattatattataatttctaaccttcctcttcatctccaagccaagaaatcatatatattctagagccaaatgttaaaatgttggtgatggtctatataagcttgtttattgtttctcctctcacttttccgaatgtgtcaccagaagcactaacattgattgtccccgtctgaatttcgtttttatgaatttttactcccctgtgcttgacatcttggtatacaatatgttgtttttgtttcctacatttgtttatatgggtgctttcatacaggtactggaa

SEQ ID NO: 3712 - DNA, 1764 bp, Glycine max
  Intron number 12 from transcript Glyma18g53540.1 (locus Gl yma18g53540) derived from phytozome v7.0 (chr-ID Gm18; pos 61832503 to 61834266 reverse strand)
tcaattgctttggcacttggctgcattcatcgcaggtcatttattataataccaatgaacacttagtagtttgcatgtttattttatcagtttttttaattccctcaagttatcatcctttcattctgaatcacggatgagttttgatttgtttgagctgtgtttgtttcaacatttgtctagtttagttttaaagtataaaaactattatgctgagtttttgaatgcgttaggctaaaataaagggtgattaattaggattttatatgataaaagattagtaagaaagtttagtataaagagagcaggatgagaaatcctccacgagaacaaaaatgaaattacaatgaaatttgttttgaaagagagagaacaagaggcatgagatggattccataagtttgaattgctatgcggagcatacatttatattaggagtcataaatacaagtgattgcacaattacaagaatatacagctattctaattaacatacttacataacatataatctgccctagttacataattactaatttctataattacattatttctaacactccccttcaggttggagcatataaatgatatgccccaagcttgctgcatatataacaaacttgagtacctctaaatgactggtaagaatatctgccagttgataatttcaattgatgaagttagtggtgatgtctctggataaaatctacagtgaggaggtagagagaagattgtaatggaatttcaatagatggcagtgatggaggggaggaagagatttgagaatcaaaagggagagagtaactgaaaataaggggggaggagggagtctgggaggcaagaaaaaggtgggttaaggatagacggtcaactgcacttcttggtgacagtctcggtgatttttttcttttcctcttttttaaaactgttttttatagtcaatattccctagttgtaaggggcttgctccctcatctctatcaaaatatattgttctgctattgtttctatcacacttatggtgccaaacttgaaataacttccaatcaggctctttgggaaagggctcgttataccatgtggaaaaacgaatgttacttccttgcgtcattcagggtgaagatagcttacaatttaaagggtgttggccacacagctttgaccaatcaaattccataaaaaaaggaaataaagacattaaaaactgaatcacctagttaaggatacctcagcgggactcaaattcagaaaattccctatcatttaagttactaaaaaatgaagaattaattaataacacgttgtaagttaattgattagcaattgagatgcaataaaaggaaaaaggtggttaatatgaacaaaaatagaggaaatgagacagtttacacaatacacatttacagtagtttatttagaaaacatgctttccaattcgtgagacaatttaattctttggaggttgagattatgaaaaaccacattggatttggtagatgacttacatgatggttgaaccctttccgtttccttattcttgtacattatgatctcagcttagatatttggatgagcagatctagtacctattcgaacttatatgactgattataggttttacttccttttcctatatatataatcaggcactctgagccaagtctacaacattatcttttctctatataagttttgacagttcttttcttatatatattgactgcagtgctggagggattgctttgtcaactttagtgcctg

SEQ ID NO: 3713 - DNA, 4413 bp, Glycine max
  Intron number 11 from transcript Glyma12g34250.1 (locus Gl yma12g34250) derived from phytozome v7.0 (chr-ID Gm12; pos 37420930 to 37425342 reverse strand)
ttgaccagaattacaattggtggcttatttttaaggtttgtgtttttgtgccctatctgaatagcaactactaaaagaattcagcaagctttgcctgtgtgtatgggcaggtgtgggcgcctatgtcaatgcattttgtgctcatacgatttgattgaaagctgggagtgagaaactactaatctgaatatattggcaatagcaccacccactacttttatggttagacgatagatatccagggttaaattgggataagttattgcaattgaaaagtgttggaaaataaaacaaaaaatgaaaaaaaaaaaattaatatgaagaagatgcacagtcttgaattaaataacgaaataaccgtagcaaaataaatttaattgacaacacataaataatgcattatatcatacaatgagcacaaggaaaaattaaatcaagggaaagaattaaatagcctgggttgaagcgcgtaaacgctatccttagagagaaaacgcccccactgcacgggtaagaaattctgattgcgctcctctcccaagatacgacaacccgttggttccgatcgtgtgcagcgaaaggatccccgaaccttatgaacaccaatgctcttgctctcacaaaaattaagttttgtataggaaaagaaagagataaatttttggcagaaagaaaccagagctctcagtctgtcctttctagaaaagaggaaatagatatatataggcattttgcaacaacaaaatatgaccgttggaaatatgaccgttggaaaactaacatacagttgtcacaacaaatataacaaactagtttgactcattaaaataaaatcttaagagaatctaaaataaatattattttataaaatagaattaatatatatatttataaattttaaattaaaacacgaatatttaccaacattcccccacataatttaaaattttaaaatatattttctgaaagataaaaatataagagaaagagcatgtgatattgtatttcggtataaggaaccttccgggtttgagccttatacctagtgtttatgaacttccatccgagaaaaatgtagtgacttgattgtcttgaactacatattctttaaccggactttagtacacaacccctacaatattgacgttcaattaggttctaatcagtggtagcgcgttacacggccttgcgcttgtatcttgtttcgtgagtgtcacttagagattagcccatatctcacagtggcggccccaccaccacactcactaggtgaatcctcaaagagtgagttgtgaccctcacccctacaataattgtcatcggattcattaagaggtatttttttttcatcaaaaatacacatatataaatacctcaaccttaatattgccacaatttataatacacctcgtcataggaatgagaaacggaacagctccgtcaaatttcattttggtgtactttagtcaacaaacaatttcgttgttacccgttgaactccattcatgggatcaccaatcacacggagacgggtgtccattgttgtaactaaataatgggctttaatcccattcccctcgacaactcaagtacttgttgacgcgtcaacccttttgtaagcggatccacaatattattttatgacctgacaaagtcaagagaaatgacaccatgagaaatcaaatttcttatagacttatgtctcactcttaagtgtcttcttttttttcattaaaatttttgctagtaactttagatatagcaacttgactatcacaatgcattggaattggaggtataggcttattcaacaatggtagatcacataacaaatttttaagaaactcagcctcactagtagcagtatctaaagcaataatttttgctttcatgtgaaataataatttgtctagtagattttcatgatactacacaaccatctaaagcaaagacataaccacttgtcaattttatttcatcaaaataagaacttcaagtttgtatcattaaatctctcaattactttccaatctaccaactgcatatgcaatgtcaggcctagagaagtttgtcaaatgcaacaaagaaccgataatttgagaatatgtgaagaaaatcctttactcaaatttttctttaacttgatggatgagtcataaggagtagaaacatgtttcacatcaaaataattaaacttctttaatatatagcttttcaacataataagattggataaaaaatcataccaccatttttctttataagcttaatacccaaaatcacatctacaggaccaaggtccttcatatcaaaatttctagacaagaaagacttcacatcatttatgaattgcatattactaccaaatatcaatatgtcatccacatacaaacataaaatgacacatccattatcatcaaattgtttcacatacacacatttatcagtattattgatttgaaaaccatacaaaagaataacttaatcaaacttttgtgtcaatgctttggagcttgtttcaaaccatacaaagatttaacaatttatttttcaagaaaaaatattttcaaagaaagtcacatctctagactccataatagtaccattagaaatttcaaatacttctgaattaataactaagaatctataagtagtattatgtaaaaaaatatccaacaaaatataattaatatttttttttcaattttccttttcttattaatagggatattaacctttactagacacccccacactttaagatatttcagatttagttctctttttctccatagctcataaagatttttttaattttttttataaggtactctattaagaatacgacaaacaaaatataaaacttcacgtttatgttttaggcttcgagcaaaactagtccacgaaggaggcaattttgaaatcatgaaagccacaagcataatgtcaggcaaaacaattcctttcaatttcatgtcataaaataatgttttcaaattcatggatctgatctgaaatagattttccatcaatcatttgaaactcaatcattttttcacaagagtaacgacttaaacctttttcagcagatccatatttcaattcaagtgcttcccataactcaacagaagttttggtatggcaaaaaatcttatatatgttatcagccaaagcacttaaaatgcgtccatgacataaaatatctttatcagaaacatcatgcttaatagttgcatcagtttgaactatatcagtagaggaagttgaagtttttatttctcttttagaaatcacagagtataaatccaattcagtaagccagaatttcatttgttgttgccaacagaaaaaattttcacccgtaaatttttcaggcttactggaaagggacttaatcatatccatggcggacattttgataaaataggatgctactgcaaaaagactatgcaagaagaaagtgaaaaaataaaacctttttctctctaagactgttggaaaataaaacaaaaaatgaaaaaaaaaaaattaatatgaagaagatgcacagtcttgaattaaataacgaaataaccgtagcaaaataaatttaattgacaacacataaataatgcattatatcatacaatgagcacaaggaaaaattaaatcaagggaaagaattaaatagcctgggttgaagcgcgtaaacgctatccttagagagaaaacgcccccactgcacgggtaagaaattctgattgcgctcctctcccaagatacgacaacccgttggttccgatcgtgtgcagcgaaaggatccccgaaccttatgaacaccaatgctcttgctctcacaaaaattaagttttgtataggaaaagaaagagataaatttttggcagaaagaaaccagagctctcagtctgtcctttctagaaaagaggaaatagatatatataggcattttgcaacaacaaaatatgaccgttggaaatatgaccgttggaaaactaacatacagttgtcacaacaaatataacaaactagtttgactcattaaaataaaatcttaagagaatctaaaataaatattattttataaaatagaattaatatatatatttataaattttaaattaaaacacgaatatttaccaacatccactacttttatggttagacgatagatatccagggttaaattgggataagttattgcaattgaaaagaagtggaggacaacaaaaatttcttatattcttaagtagcagcaatatgccctacttgatttgtcaatttggtggcacttgatagttgaaatgacccaataatttttattttttatgttgacttgactgtactaactgttacaatggaactaagttgtagtttgtgcatattggaatgcagggacaccttctgtagccctcc

SEQ ID NO: 3714 - DNA, 3352 bp, Glycine max
  Intron number 5 from transcript Glyma05g36350.1 (locus Gly ma05g36350) derived from phytozome v7.0 (chr-ID Gm05; pos 40188953 to 40192304 reverse strand)
cactacagagtagaggaaacaatctttctaaggtcagatataatgccagaggttcacctttctgttcatcacttgattatgctgagtttgtgctatatgtatatcagatggatagcagctctatatgataatatagtttaacttgcactttcactttgattatgagaatgatggtacaagacaacttttaagttgaatatttatgctctgcagtttagtttacttagggcttaaaaattgttaactaaaaggcataattacccccaagttcgatgttctgtacattttggggaaagggatccatccattctgtattgatattatctaagtatgaaccttagtagcaagaggttattgtcaacttccctatgagttctttggtgaaactctaaaatcaactagcaaatcagactgaagctattttttcataattattatttttactgtgcttataattttaaaaattcgttatgtttgtagttaaaattaattctgtgaaattttattattcaacaatccaaaaacagtgaaatttggatgattagactttctatgctaatccttaaatttgggacaccactacaagcaaaaaagacttggtagagaaaactgaagaggcaatagtctgcccactttaggctccctcgctatcactttccctaatgcctgatcttgcataaaacaaccaacatgaaagaagttaacattacaattgttgtccatcagttgtcctattgaaattaacttcaaaacaagtccaaggaacactaacacgtctcaaaaggagggattaatgtcttcaacagaagtaatagaaagagtattaccatcaacaatttgaatattttggtgtcattgtaagtgcgaacattgttcaaatgttcagggaactagtcatgtgattaaagaccacagaatcaacaaatcagtgtcgagataagatggcattggacttacctcgaatgccaaggcagaaagagcagatagtaccagttgctgcacactctccacagtcaaagttcctgcactggaggttgcatgagtagaggttgggcccattgaagtagtagtggtctgaaaggttctcctttgaacaaaaaagcttcattagaaattgatcttgtttgctgaattcatagaattgttgaacaacaataagagagttttggaaacatcaacatgtaaaatagtggaacgatcaacctacaattataatcctaaatagagagacttccttgatggtaagtagctatgcccctatttggataaacttcttcataagcacttatagaagaagaaattaagacgataaaatgtattaaactcctcccataagttaaaatcaacttatacatgttagcttttggagaagttagatgagaaaacttttataaatgtttaagtgcataagttgattttaacttataggaaaaacttgattcattttaccttattattttctttttcgataagtgtttatgaagaagtttatccaaatagagccatgtcaagctccaattgaattcgttttgcagcattgtcctggttgtaagtgcttttggtaatcccacatatctttagaggtagaaaaaggacccaagggtgcttcaatggaagtgaggatccaagttacaatctaggcatccttgatctgccatgcctctagtgtattgtctgctggagcagttgaagtcccatctagatggccccacaagccttttcctttcacaaacatcttgaattgaaacttcaaggctccatagtttttgccactaaagtggacacaagggttctctgttgccataaggaacctacaacaacaaacaagaatcgggatcaaaaccagaaaaccacgaatagcaagaactagaaattgtccccattgagcacaagacgagttgtatcaagaaccacaaaccacaactaggaatcacgaactaaacaataaacgagaattagggattgcgaaccagataaccaagacactgttgaacgacaaaaaaccaaaaaattgcaaacgaacaacatcattgttgtcacaaaaccaaaaatgcacaagatagtaggcaaggaacaaggaagagtgatacccgttgctggaaggtgtacaactctgtcatagaaggagggctaaagtctcaaggtaggagatccgtgataccatgtcgagaaattttggcttgatgccttctttgattctattctcctctataaatagtccagattgattttcaactcttaatgacaaattcattctaatccctgattcggacaacctaattaggaattctaaatgtataaaattaataggctgattatatttctaattgttacaacatataatataaacaagaataataatgggttccctggctaacaatgtgatctactctcctcatttgtgcctccggctccattagtcttctttgcacatatccaaaccatcttaactaattttcagatatcaatatctccttgtacacaatcatttgtattctatcctttcttgaacgaccacttatccatcttattttttgctactcccacttttttctcttatccttttaaagtatgacattcactattatagagtatagttggttgtatagctggccaactgaattatacaaaagaaagaaaatagcttgaaataaccaagggattattaagattttctgtaatcagaaagtactggaagatgtattatgtttgtaggttgcttatttttgttcaggacttcatggaagcaatacagtttgtgatattttagttggctgctttttcaacatgctttcagattttaagcattgcacaaggttgtcatgtttagcaaagtttggggtcattagatcctatgtctggggtcctgttatgagatgttattttggcacatcccatttttttttaattgttttaaagtttagattagttttttttttttttttttaaaacatcagccgtagcaactaaaagttaaattattggggaaagaatatttattgcacttttgtatttctgatgtaataaatactttccttcccaataaaacctttttgttgttgttgttcttcaagtaagattattgatgatgacatttgatttactagaaaacaaaatggaacttacctctgtcatcttgatcttgtataggactggttctcgggtaaatgttagatgggtgcaactgtaaatatcttttctccaatctcatggccagaaaataagaaactgcttgtgttgtatttctggttttcttgcaatgaagatcactgcatgcaatttctttctgttatttcaaaatgtattcccacccatcctttttacaatgtttccagggtatcattggatacat

SEQ ID NO: 3715 - DNA, 5234 bp, Glycine max
  Intron number 12 from transcript Glyma13g11750.1 (locus Gl yma13g11750) derived from phytozome v7.0 (chr-ID Gm13; pos 14613425 to 14618658)
gagctgtacaatcagaggtgacttctgagactatccatctgtctctattgttattcataagaaacacagagcagcagctcctcagtgggagaatactcacaatcacaataacacaaattattctcataccccttaagttcctaatggaaaaagcccctcataaaattccttctcgttaactagcagacattgcccactcaaattcactctttttctggaacatttgttttcttcctcctcacacaacacttcagctcctttggcctactgtcaattgggtttgtgtgtcagcttaatatcttaaattcttaacattcacccatctatttcctcctttttctttgtctgatttgaatgtttctttttaatgactgatgcagacccaagatccacaataactaaagtatatgagaggaggcccaatagaagggtgcacctaatttggtctgcaggtgcaatgcacctaatctgaattaggagaaaaaggtgcaactaactgcatagctaggtagtagtgggtagtggtgcggaagttgcatcgtgtggtgagaagagagagaacatagtctaggaattagtgggacttttggtagaggctagcactctctaattgcctaggttttgcttcttatcttgttttcacttttccttttgtaattcagaaacccaggacctgctatcaccctgatacatgcctatatgtccattaatgaatccagactcagttctgtttcattttctgatacctatcaattggtatcagagctctcaatcctgggagcttcaatagtgattatgagagcaacaatggaatctagaatggaaggataggagtgcagtctacaggagcagagaactgagagtatggtgcagataaatgaattccagcagatgctgcattacagagagattctgttcacaagggcaattgtgatggacatgggttaaggatggaggaagtaatgagagccaaattggctggcttctgcgcttgtaatcttgaaggaggaaggagagtggacttgatgtccaatatatggcacgagggagaaggatggaggttttggtgtttaagggagacgacacatattcattggtgggccagctggagagatatttcaaggtaaattctatgagaggaaaagaatcttgacacagtagtgattgcattggaggatcaggccttgaactggtacttatgatgagaggaacaggccacacatgtgaactgggaggaattcaagagcccagtgatttggcagattcaaccatcgatgaaccctttgttgagtatcaaataaactgggttggtgatggagtacaaagagaaatctgggctgttcatagctccactaaagaaagaagagtgagtctgctggtgagcattttcttgaatgggctgaaggaggagaattgaagatgcatgactcagtctttattcaagttgatgaaaagcgccttgctattggaggagaagaatttttcttttttgcagaggtgggctagcagcagaagagaagaaagggtggaagcggaagctccatgggaatttttttttaaagcccaacaaaagcaaagtggtcacttccaggctagagcaaagaggaagagtagctctggaacccaaaccattggaaggaggaaatagtgagaagaaacagtttggaggaaggacgttgacacaagctgaactacatgatcaaagctgtaaggggctttgttttacgtgtggagaaaagtggggactagagaacatttatatgttgaagcactaccaattagtattgatggaactcaaggaggaggtcggtgagatgtgttctctttgacaagtatggagggattaactctaatcgattcttaagacacagggacatattggagaaaggagggtgttggtgctagtggattgtggagctactagtcttttatatccaagcatctagtggaggaattgtgccttaagatagaagatacccctaaatatgtttttaaagtgagaaaaggagctaaggtaaggaatcatggaatttgcaagcaagtaaacttgaatgtaaaatgaggtatagaggtaattttggggatgcattggttagcatgtttagagagcataggagctaatttcagaattttggccattaaatggggagacaaagggagtaagtgttgagaggggatccttccctttgcagggcacaagcttcttgcaacattatggtcaatgagctgcagaatgaggggaaaaagcaattttcctgttataaaaaatatattagccaattttgatgatgctttctgagaattgagaggcttgcctcctaaaagggattgggatcatgctatcattttgaagagggctcaaattcctaatatttgcccccacatgtatatgcattatcaaaaaaatgagatagagaagattgtgaaggatatgctttgtgctgtaaggcccaacactaaccctttcagtagccctgttatacttgtcaagaagtattgtgtgtggagattttgtatagactatcaggccatagacaagtaaacaccggataaatttccaattcccataatagatgaactactagatgtattgggtgatgcagtgatttttgtaagatgaactactcttttgctaacataaatccactcttaatggtcttaaacagttataggactattccccttctttttaacataacccttcatatttctttgactaactaattactagcacaatcaactaattaactaactaatgagtatctatcatgtacccatgaaggacaatatgagttcttttggttatgtcctttggcttaaccaatgcaccttccaccttccaagctctcatgaatcaggttcttgggacacattttcttggggcaatgagtttcaacagacctactaaaattaagagtatgttggactggcccattccctaggatgtgaaagggtgatggggttcctaggattgactgattattacagaatatttgtgaagaattatgggaaaatagcttggcctcttgatacaactacttaaggataatttttcatggggtgaggaggctcaacttgcttttgatcagcttaagacaacagtcgcaacacttcctgtctaggcagtccccaactctgagaaagcatttgtaattgagtgagactgatgcatcaagaaaggacattggtgcagtgattatgcaagagggaaggctggttgcatatgcaagcctaacgttgtcagagagctcaaaatagttctgtctatgagaagaaattaatggcagtagtgttgactgtgtagaaatggaggcatgacctattgggaaggcattttgtggtactacatacacataaaaaagtctcaaatgtctatctgaacagatatttatgggagaggagcagcaaaggtggatctcaaaactattgagattcaactttgaaatcaagtagaagctgggaattgggaatacacagcaaatgttctttcctgctgactgcaatattcagcccttttggccgtgcaagtttatgagttggactgtttggaagaagacagaagaacaccaagatgacaagctgaggaagataatgcaggaattgttgtctgatccctgtgctcataatggattcagtctcaacaaaggcagattgtactgcaaggagagattggtagtttctgatgcaaaactgaaaccaaccatggtaaatatagcagaacaaaagaaagaatatgagatacgtattattagaatgctgaaaattacagtagcactagcagactactgccccagagcatagctcctgtagagagctagagctctccattcatagcaaactaaatgattccccaagatactccacgaccctgcccatcagctatttgaacccttttcccatgatcagtaactaattctctctctcctcctttttctttctctgccagctcactactctcacccattttccccttatttcttctcatgtaaactttccagaccctagtcacgagataactcatgggccaattgttcccctggtgtgcgtgattcctttcggggcctaacagtttccaaaaactcctctaagatgcccttaattcttagggaattccacgattctgctgcgtgggccattctgggtacttcaaaacttacaaaagaattgcaaggctgtttttctgggaggggttgaaaaagatgataacagtatgtacaacagtgtgaagtgtgttagcagaataagcttcaagattttaattcagtaggactgttgaaacccctcccagttcccactcacatgtggtcagatattttcatggacaagttaactaagtatgctgattttctagctttagctcatcctagagagcttattgagataaacttgaaatagtttatggacatatcataaactctccctaatacttgcataagtgcttatgccatgagataagttcaaataaactgtaaataagctcttccaaatggacgcttaatggaagatgaaaagttttccttctgcttggtttgtaacatgtgaattcaccgtttgcaatagaaaaaccattaaacaaccgggctactgataacaagaatacaagaacagggtttcattaattgttattggactgttcatctgcactgatttataaatattaaacctgaattataatatttgatggctatagatggctctgtgtggtcattgggacccaacttaactttctttattagagtatatgttagaataactgtgaaaacagtttgcaagggctgttagctaacagcacctcactaatgtttggctgttagcttctattaacagaatttccctcctatttgttaattctgttttgtacttagttcgaaggatcataggcctataaatacccaattttgtaactgacttttcagattgaataatatcagttctcactctaaactctctcattttctctcactttatctaaaagtcttaatatgtctaagataaaatatttattgccacagtaaattttaatttgtttagcttcataatggagtgcataagaataatatgaaatagcaaatttatattatatgatctgtgactggtgtgcaaataggaaagccagaaaaaatgatcatgtgcttatcatgctggtgcaattgttatttttacagccataatgtgaattttgttttgtgctttgactgatcatctatatggacacagacgctctgctgttgtag

SEQ ID NO: 3716 - DNA, 617 bp, Glycine max
  Intron number 21 from transcript Glyma03g32540.1 (locus Gl yma03g32540) derived from phytozome v7.0 (chr-ID Gm03; pos 40265675 to 40266291 reverse strand)
cttttgctcaggcaagaaattccacattttaaattcatgtcttttatttgagtaatactatatatacaccctcctaaatcataatctcccttctccctaaatctcaataatgataaatagatgcacttgataacttaaatacataaatcaatgaagcttgcttgatttagttatttggaagattattattgttggcacaaaatgtttctataaaatcagaaaaaataatgctctcaaaagacgcttaaggttattctctagagagaaatctgatattcattcatagaacacagctgcagtatgctacctggtttattaatacagcttacaaaagtcatagctgaagttgcttctaccaaacagcttaataactcatctacccatcataaattcaaagtctaataacacactccagcaagtactagtaaactgcataaagcgtaataataaatgcacatcacaaagtgcaacaactacatcagaaatttcagtgcattaacaattctgaggatttgaaatttttgcttctagttacttcattatgtgtaaataatttacgtctgcgttttttctttctaatctacattttctgttgcaggttctgattgagattccat

SEQ ID NO: 3717 - DNA, 1556 bp, Glycine max
  Intron number 5 from transcript Glyma17g35850.2 (locus Gly ma17g35850) derived from phytozome v7.0 (chr-ID Gm17; pos 39825054 to 39826609 reverse strand)
gaaggaaaaacatcaggtattctaaattatccaagaatttcttataactctgtcctgattccaaatgcattcattataagactattctgaattctgcttgtcttctgtatccataaccattgactacccaaggtcagcgacaaggatcataaaactgccccttgagaaaaaagaaattattaaatgggctgttgcacattgtcctcaatttaattgtcaaatgccaatatgtcttcacacaacaatgtttgcttaactgtaatactaggtaatctaataaggaattaggaggtcctgtgtagaataagcttatgaatcctactaccctgatacttaaaagaacttgcatatatagcataattcatcatgcttctgatccaaaaaactgcatttttttgggatgatatagtttgattgagaaatcaagggaagaaggtaactctatacttgagttttggattcaaactttggaacaaatggatttttataggagtaaaacaaagtagatgcattgtaatttgagcaagaaacaagaagaaaaagaatacttggaagtaaaattggggaaatataccatactataggttttagatttaaatatctgttatctatattacggaatgatggcgaaatcaatgaaaatgtcacatacaagatgtaaactagatgattaaagtggaggaaggcattgggctttagggttaattgtgatcaaagtacctaccaaactcaaaaagaaagtctatggtagtaaatgttggactttaaaggggcaacaagaggaaaaggtggtagatttgaagattttaagatggatgtatggtcacacatgaaaggataggaaacaaaatcattataataagatattggtgtagcacctggtgacggattcataaattttaaattgtgggaacaatattcatatatgtgggggcaatagtaatattatagattgatttttattacagcatttaaattatagggacaatgtataattatacaagtatatgatattaagaagaaaaaaaaaaacatgttcgtgcagctgcctccaaatttcaaaaagtatatctgtcctttgtggcaccaattaaagaaaaaagataatagaaaattggttaaaggggtttgaacatgtgcagagaaagtcattggaagcatcaatgagagtagattgcatgatatctagccctgtaaaaagggggagagggagctcaagaagggcattggaggaaattgtttggagggatctcaagataaataatatccctgagaatttgttttttaatgacattgtgtaatccatgtagctgacttcacctaatgggataagacttttgttattgtcgtcgtctaaaactcactagagtttgttatgtatctgtgctagaatcagttctcaagaattttagcctttcttgatgctggattactgatgtatttgtcttttgccaatgatttttgtattaggttttttactccaataatgaaaggattgatgatgcattttttggtttacaggttcgaacatcagcctcaacttgtggacgctccct

SEQ ID NO: 3718 - DNA, 7118 bp, Glycine max
  Intron number 5 from transcript Glyma17g25940.1 (locus Gly ma17g25940) derived from phytozome v7.0 (chr-ID Gm17; pos 26973449 to 26980566)
aggtaagcttgaacttacgactgtgttaggttaccaattaagcaagtgtatgaatgaaggaaacatggcaagtataagaggaagtcagagcaagagccagagcagctagaaccaggattaggtagctgactaagatcagttacagttagtagttagccttgtaactattcaagttagttaaaggcagttagttagttagccatcaactataaatagagatggactgcctggaattacttaggtgggagtaatcacggtggttggttagggaggctaggctccaataaaatgagagattgggctagtaccaccatcactggtatcaaagcaaaatttcgatcctgagacgtgaagctattcatggtttcaactcgaggaaacatggatacgagtgtggaatttttggaacaaggttttgaaggtatgatcaacacgtgaggatgtcacaagtttgaagcgattgtttgaagaggaacacattgagtgggcagagctgaaggcgcaaatggcagagctaatggcgacggtgcggatcttgtcgaccactgatcggggaagcggcaatcgcgaccatgcagaacaacaaaattgcaatcgagaggtaaagtggtagaaacttgagattccaattttttacggaggagatgcatttggctggacaaataaggtggaacactattttgagattaaaggtgtagaggaagaagatcgaatccaggcagccatggtcgtaatggaaggaaaggcactaacctagtaccagtggtgggaattttgtgcgaaaaaccctaattggacagatttcaagaatgttgtgattcagcggtttcatccttcgatgaaccaaagcccctatgagttactactcagcctgaaacacgaaggaacaatagaagaatatcgcgagaagttcgaattgtatacaggtccgttgagaggaatagaacctaagtatttgaaaggcatatttctgaatggattgaaagaggtggtgagggcagagctaaagttgcatccagtaacaccctccctgaactgatggactatatgtaaaggatagatgagaaaaattcactaatggaaaaaggtaatgttggaggaaacagaggtggtccaactagaagttatagttcctcaaaaactgaaagatgggatccaagaaacaaagacaccacgacaaaacaagagagacaagttcgagctcgaaatcaaatagtgtgaagtccactagggcatacagaggcaggccttttaggaggctttcaaatgaggagttccaggagagagcagaaaaaggactttgttattgttgtgatgggaaatttggccctggtcatatatgccccaataaacaattccaagtccttattttgggagaaggacaagatgaagaagatgaaaaagaagagggggcaagaaatgagaaacaactgcagagtattcaactatccctgtatagcatgtcaggattgacttcaaaaaaatccattagactttgaggcaatattaccgaaaacagagtcattgtattggtagattgtgggtcctctcataatttcatttatgttgcagtatagaaactgttggatcaagtggcctcagaataattaagaagggggggttgaattaattattaatgtgtcttgactaattaaaaaattatccttcttaatgttactagattcaagtaggcttttactacaaagttaagaaagtaaagaacagaaacagaaacttaaccaaaagtaaaagcggcaattaaaagtacacagcgaaaattaaagagtgtagggaagaagaagaaaaacacaagatttatactagttcaaccacaatccgtgcctccagtccccaagcaaccaacagttcttgagatttctttcaaccttgtaaaatcctttacaagccaaagatccacaaggtatgtgccctcccttgttctctttgaaaaaccaagtggatgtaccctccacttgaactgatccacaagagatgtaccctcttttgttctcagtataacaacccaagtagatgtaccctctacttgtgccacaaaggatgtaccctccaatgtgttaggacaaagaattctcaggcgattagtcctttgaatatttgtaaggggaaacaaaagatatctcaagcggttagtcctttgaaatcttttgtttaaggggaagggaagaatcaaaagaattctcaggcggttagtcctttgaattctcttggaaagagagaagggagacacaaaagaattcaggcggttagtccttctattcttttggcaaagggagaagagaagaaaagataacacacttttgttttctgcagaattttcacttgcagaaaaacaaggtttggaaaaacaaaacttagaaagctttttggcaaaggaagaacaagaagaaagatgagtagaaaggaattcttataagtttctcaaaaattgttaaagagttgtaaaagttcttttgaatgcaagtcaaggtcttacctttatagactcttcatgtctggtcaagaaaatcattggaagagttataaccttgagaaaattaagtcaagagttacaacttttgactttttattcaaaagttatcactggtaatcgattaccataatcatgtaatcgattacataatgcattttatgaaaagttgtgactcttcacaattggatttgaattccaatgttcagatacactggtaatcaattaccaatatagtgtaatcgattacactatttgaaaaatattttggaaaaacgttgcaaatcagttaaaaacattttgaaatcaaatttggtcattggtaatcgattacatgaaactggtaatcgattaccagagagtaaatactctggtaacttagttttgagaaaactcttttataaaacaaaattgtgctatgtttgaattttttgaaaaaaatacttcccttgtgaagtcttgactgttgcttctcgatttgttctcttgaatcttgaaatcaacttctcttgaatcttgttcttgattgttcttgaatcttgaatcttgaaacttaattgttcttgaatcttgattctttgagacttgattcttgaagcctgattctttggaactttcttaactcttgattctttggcatcatcaaaataatcttggaagtcattgcttccacaaaagcaacaacaaataccaatcacacctactaaatcacatactatggaagtaggggatggacgaaaaattaggtgtgaaggagctacaagaatgtcaaattgtagatccaaggcatgaaaatccaacaagacttatttgtctatgaaatgacgggagtggatgtggtattagggatggaatggttggcatctctaggtgagataagggcaaatttcagagaattaactctaaagatacctacaactaaagggtcattcacattaaaaggagaaccgacaatggccagatttgttgcttcgctgagatccattgttaaggtcctacggaatgaagcctgcaagttgtaccggaagcaagcctaataccagcatggatggaagtcattcttgaggaacagaaccctagtggtctccctccttcaaggagacagaccatagcattgagttaaaaaatggagctgaaatccccaacataaggccttacaggtacctcattaccaaaaaaatgaaattgaaaagctagtggatgacatgctgaattcagggattattaggcccagtatcagtccttatgcaagccctattatattagtgaaaaagaaagatggaggatggagattttgtgtggattatagggctctcaataagataacggtccccaatacatttcctatacctattgttgatgaactcttggatgaattagggggtgcagtaatctttactaaacgggatcttaaatatggttatcatcaaataagaatgaaggaaaaagatatcccaaaaactgcatttagaacccatgagggccattatgagtttgtagtaattccttttggtcttacaaatgccccttccacattccaagcattaatgaacgaagtcctgtggccctacctaaggaagtttgccttggtattttttgatgatatactcatctatagtagaagtcaagaggatcataagactcatgtgaaagctgtcctatccctgttggctgagaataagttgttggtcaacaagaaaaagtgcagttttgggcaaagtcaattagagtatttgggtcacataatttcgggggaaggtgtagtggcagatccccaaaaattagaggtcatgcaaaactggcctactcctagtgatgtgaaatcattaaggagatttttgggtctcacagggtactacagacgttttgttcaaaactatggtaggattgcaaggcctctgtataacttgctaaaaaatgatggttttaaatggaatgaggaggctgaggaggctactagaaaattgaagaatgcaatggcaaaaattcctgttctcactgtacctgattttacttaaccctttgcagtggtgactcacatgtctaataaaggattaggggcagtattaatgcagcaggggagacattccttaatgggccgcaaattcactatattaatagatcagaaaagtcagaagtttttaactggtcagagattacttgcagaagatcagtttaaatggacttcgaaactaatggggtttgattttgatatagtgtacaagccaggatgtgagaacaagacagttgatgcattatctagaagaatgacatatttgtccatttcaatgatcagattttctgatgaggaagagtgggagtctgaagttttggctaacctgaaattgaagaaaattatgcaggatttattggtaaatggatctgcacatccaggatacgccttataggatataaaattaaggtataaaggaaagttagtaatttctaaaacatctcccaaggtgcatacactaatgacaaagtatcacaactctgttgtaggaggtcattcagggtttttcagaacatttaaaaggataacaaccttagtttattgggagggtatgaggaaagacatattacggtttgtggctgcatgtgaaacttgccaacaaaataaatatcaggccctatccccggctggtttgttgcaacctcttcctatccctacacagggtctaccgagagcacaaggaaagaatgaaattctggttgtggtagacagattgactaagtatgctcattttatccccattagtcaccccttcactacaaaggacatagctgatctatttgtcagggaggttgtgaaattacatgggtttccaaacactatcatttcagatcgggataaaatttttccgagtcaattttggagggaattattcaaatctgctggaactaaattgaaatttagttcagcatatcatccttagacggatggctaggctgaggtggtcaatagaggagtagaaacatacttaaggtgtgttacaggagaaaaaccaaagcattggccttcctgcttaagttgggcagaattttggtttaacaataattacaatagttcctctaagctcactcctttcagggctttctatggtagagacccaccttaattgcttaaaggcacatctgttcctttagcaatagaggaggccaacgggctgacacaagatagggactctttgttggaccaactacgaactaattttcttaaggctcaggaccaaatgcaagtatatgctaataagcaccgtagggatgttaacttggttgtggatgattgggtttacctaaaattgcaaccgtatcgtttgaaatctttggctaagaagttgaatgagaaattaagcccttgattttatggatcatattagatttctatggtcattggtaaagtagcttaccagctcaacttaccaccctagagtaaagttcatccggtctttcatgtgtctctattaaagaaagccattgctcatgcagtaaaaccaacccttgcctccaatgctgactgatgagttggaactaagggtagagcctttagctgtcaaggctgtcaaaaacgaccctgcaggcacaaccgaagtgctcatccaatggaaagatttactttactttgaaactacatgggaatcggttgatgttatgaagcagcaatttcctgcatttcaccttgaggacaaggtggctctcttggggggaagtattgttaggttaccaattaagcaagtgtatgaaggaaggacacatgacaagtataagaggaagtcagagcagcatctaaagcagccagaaccaggattagtagctgactaagatcagttacagttagtagttagccttgtaacttttaaagtcaattaaagacagttagttagttagccatcagctgtaaatagagatggactgcctggaattacttaggcgggagtaatgacagtggttggttagggaggctaggctccaatccctagatgtgcatttgtactacaagagtaataaaacaagagattgggttggtaccattagattgctgcttgaacttacgtctgttaattatttgactataattttagactcccttgacatagaatcaatcacagacctcattacttcatgcactcttgacattcattttattattaatatagactattaaactgtaaagcaagaattaatggtaaaggaaaattagcatccaacaatggcatacatgaatagtgtaaaatgcagctttgtgtcagactcttctagaacttaccacttgccaacctttttatccatatttccaatgtacaaccatgcctccaggttcttggtgcaattgcattggttcttgattaaacagtgttagaaacttagaatcatgtgtcattcagtttatcattttttgtttacagtctgctacatggtaaaggagttataagttgtaactgaggacaatatataatttggatctattgctttttgcctctagtttccaaatctttttctgagttaggtgtttatcaagtttattgtgtcaagcatcatgcaattgtcttataaatttttcgctgaaagaatatatgtatcccaccttgttactcatcatggtgaacatccatatcaggtgttaaatttg

SEQ ID NO: 3719 - DNA, 1465 bp, Glycine max
  Intron number 1 from transcript Glyma17g34820.1 (locus Gly ma17g34820) derived from phytozome v7.0 (chr-ID Gm17; pos 38810227 to 38811691 reverse strand)
cactcgacatcgattccttttctccttcacctcaggtatataaatataatcattatcattattgttattctacattttattttctattatcgatttaatgttacacgcaacgcaaccgcaacgagaataatgattataatctgctttcaatcaacctcgtttagcacttttcatttgccgttttccttcgattcgtttccttttttttttttttttttttttaatttccgatttctgcgtttttgtgttttgagttttgactcttttgtttcttcccctcccaagcggaaacggctttttcaatgtcgtttttggtttctgatatcgggtagttgagcttgatgtaagaataataatttgagcttgtgattctggatggtgtaggtgttaaacggttactgcaaatgtggttagttactggttcacttttggatgttaattgagggttttttcataattggtgaagacgtttgtgtttgtgttatcacgccttggatgggttaaataaattggattgtggttttagacttttctgtctttgtttatttatttttttggaattggaatcgtgaaagtcaacaaatttacgttccgacggtttctgatcggattggataaccgttaaaaaatccttttcactagtagtctagtgtaaaattcctttatgccgtcggtgcataaactatttacattttttccctctctattgaaaaagagtaaatagtgtctgcatggatctaatcataaaccacataccttacacgattgtacttttatattaattatcttaaaaatcaatgacttttataataattatcttaaaaatcatattaatgatgatttctgaatggttcacattacaccgacaatatattggaattaaacttcaactaatttacaaatctttcctaaggtaatcctttaattagttgacagtttatgagttatgacagtgcatgaagttaaacttttttttttcttaataatgttgtgatctgagtaaaataatgattttcttcaaaaaggtgtatcttcacatgcaatctacgatgttgccgccttgaaagattttgtgccttgttatgggttgtttctttgcatgtgacctttgtctcgtgatttcattttgttgccccaaacatgttcacgtctttggtgcacatgataaatgctcatacatgattaacggcttgttttgttaaaggaaaagaacttgcttccttagaaggaagcttcaaagttcaaacatggtattctacacatttcaaactacgaactcaaacttgctataaaacatcttttgctcactttcctgattccctccccatttgttattataaaaaacataaaggcaatggtatataatgaacaatttgttatctgtttctgttaacttcatcatgtgctgttcctgatttttatgctactgatatgtttctgcaggaacatatcatcagaacacgtc

SEQ ID NO: 3720 - DNA, 1732 bp, Glycine max
  Intron number 1 from transcript Glyma16g24560.2 (locus Gly ma16g24560) derived from phytozome v7.0 (chr-ID Gm16; pos 28541685 to 28543416 reverse strand)
ggttagcattattaatgtatttatattattatattatatcttctgaatcttgaaaagctttccatatttctcgatttcgtgaattgtccttttatttttatcaaaaaggaacgaagtgttacatgccgaattgcaaatgtagaaactgatttttttttttaaatatcagggataaaatgtacgatttatataatcccgaagattaattcggatatttatatagaaactgattttttttttttttaaatttggcatcatgttctttctttgttatgctttcatatgatgggaatttgattcaaacttcaaacattgctctttttttttaaaaaaaaattaaagtaatttttgtatttaacaattagcataaatatattaaattgaaattaaagtaaataataatatggaagagtacgatacactggggagtcaattaagaaggtttgataaatttcttttctaaaagaaaaattattgaatcgtttaatgtaacaagaattataaattattatagaaatgtttgaaatattataacattgctaatgcttatttgagatgtcattggcattctattttagcattacttctcttgctcaatacttatgggtaaatggaataacatgttaatgcttatataaatatttgggagttttagttcccgggaacttgtgtagttcttggggttcgggaactcctacaattctcttatctacaaaattatagaatacgtagattgacttattagattatgcccaaactctgtttagttcaatgggtgtcttcaaagattctatgaagaatttgttcattcttgaggattatcatagttttttggatttggaaactcttactattctcttcctcttgaatatctaaatatgatgcaaaaatatattcaattcactagacatccctattttatatgaaagatttaaccgagtatctttaacggagtttctgcccaatatttttatataccgtttcacattgcaatttcacaacttccatttgggaatttcaatgttggcatcatgctctttcttttttatgctttcatatgggaatttggttccaactttaacttatatggttgaaattaagataaatagtaaaatataaaaaggtaggatacatggtggagtcagttaagaagctttgataaatttattttctaaaagaaaaattatttagttgtttgatgtaagaagaattatacattttaatagaaatatgtaaaatattataaatttttaaaattatacctcacctcacgtgagttgttccatttgagatgccatgtaggtgacaaaatgggttatcagcccaatgtgagctgagctggtgtgggttgcaggccataatgagttgggccaaaaaagttcgagtttagtttgagactaccaaatgaagttcaagtctaagtctggttttgtgggcttttaatggattttttgcaggcttaacccgcattaagccatgattgaatcaaactaaaatgtgcatctagtttggactaaaaaatattgggtgatgttaggtgtaccagcattattgtttgtgcatccaacaattttaattaattccataaatgcttctgtgtctccttcctttttaagttgctttctctgcttttttcgtttacgcgtgtatggtttttgctttcttttctctccttcgtgttggtttttcattgttgagagcagtttgtcgctttggtgtaggtggaagtgtt

SEQ ID NO: 3721 - DNA, 2331 bp, Glycine max; identical to SEQ ID NO: 2312
  Intron number 7 from transcript Glyma19g18330.5 (locus Gly ma19g18330) derived from phytozome v7.0 (chr-ID Gm19; pos 22208822 to 22211152)

SEQ ID NO: 3722 - DNA, 7908 bp, Glycine max
  Intron number 1 from transcript Glyma11g16220.1 (locus Gly ma11g16220) derived from phytozome v7.0 (chr-ID Gm11; pos 11944416 to 11952323)
acttcatcttcggagttgccacttctgcatatcaggttcctgccaatccacattaactgtccaatttttcatcacccaagcatcaatcaatgccttgattgttcgttttgccttttttcttttcctattacattatttattctgttgttctactacatttttagcaaaagaaaaatagaaatcaaaatttaaaatctagggtgagagtgagaccctattggatccatgagagtgtatagtactgtcatgagggttttctttttgacaaaaaaaaaagtgtgacttaaagtaataatataaataaggcttatttttgtttcccacaatttagcgattttttcatattcgtcacgcaatttttttttctttctgctttaatccgtataagatatgtttgttttgtttttccgaaaaaaatgctttgaacattcaaaaaaatgctatctaaatcactttaagtaacaaaaacaaaacaaacacattttaccatgactaaaacaaaaaaaaatattttgcagggacaacaatgaaaataacattaaattacaaggataaaaaatgtatttaaccctataaacaaatgtttaatgaccaaattgacagtaattagttatgttttaggacttattttgaatttctttagatttagagactaatgtgaaatttataagagttgctctagttttaatttttttttttattattgggttcctatggtgcttttatgatagttaacttcccccaggcattgtgtgaaaatttgcagaaataatattcggccaatagagtaattttattgttgttgttattgaacttattattttaaaaatttggttcaagagctctatgtgttttggttttcactggattagtgttggtgtttgggatactgtaagaagtttatgttgcagtttattttatttgatttactttatttttattgttttctgttttcctacggagctagttctaaggtttcagtgcttgggcacaatttttggtacagaatacttgaatttttatactgtcaaaatgatcagggtttaactttgatgtgttttaacaaaaaaattacattatcatcacttaatttggctttgcaaactttgacttgacctcacctaattgttcttgctgtctgaactttgaaattcttggtctttttatttttaaattttgtagttctttggttgcagatcctctgcagtgtttagtttgttcagtttatcttttgtaccttttttttggaaggctgaaaatatatatattattaataagagaaccagtggtaccagaaaaagagattacaaagcaccaaggtgctaccctccaaaaaaaaacatcaacaaatcagccaaaaaacaaccagatccaaccccactaagcaacgaatttggatatattagaggaccaatgattgaaactagtactaaaatctttatccttagcctttaaccaagaccaagctagaaaaatagcatggtccatgactttacaaggatcaaaaggttttccttggaaaatcaattgattcctatgctgccatatagaactagttaagacaatccaccacccacaccttgtactatagttcacatttgtcccaaacccatcacagaattgatagaagtggtgaacaggattaatggaaagtggacctgctacccggacccagctcaaagattcccaccacaggccatttgtctttttacaattaaagaacaaatgacccacatcttcctgcacataatcacataaggagcaagtggcttcctgagtaaaaacatttcttcttaagaggttgaccttggtagggagtctattcttaagaagtctccaacagaaaatgactgcctgagggggaatatgcaactgccagattgtcttaaaaatcttgtcttcagaatttactgagctggtgttcatacataaactataagctgacctggtagtgtactgtccattaggttcagccaaccacaacatattatccttgacctgactttgaataggcacagagctgatttcctccaaaaactatacagccatctgactttcatgatcaaataagttcctcctccacctcaagtcccagcaccagctattattgttaaaatggcccatttgtgagatgagagcctttggctgtctacttatgaggaatagctggttgtacttctgctgcagggtgtattgttcccctagccaattatcagtccagaatttgatattttccccacacccaaccttccaagacaagttatctttaaaaatactgcagtccagctgatgatacaagtttctaatgtctctccaccaatgggaatagccccttttgtctctattattttgaagttctgaccagccaccatatttagaggttaaaattctaacccagagctgttgttgatcagatgcaaaagcccataaccatcttcccatcaaagctaagttgaatttcgagatatcttttatccccagtcccccatcagtcttaggcaaacaaatatcagcccatttcacccaagggatttttttatgatcattgtctccaccccacagaaaattcctttgaagggatatcagttttttgacaaccttttgaggtattttaaagaaggagaggagataaattgggagggcattgaggacagaatttatcagagtaatcttcccagccatggatatatttttctgagcccatttggctaattttgacttgaatttagtgatgataggctcccacaccagctggcttgagggattagccccaataggtatgcctaaatagaggaaaggatactccagctgtcggcagtgcagggtattagctgcttccaaagcccaattgacaccaccaccaataatcccaaactgacttttagcaaaattaatctttaaaccagaaactaattcatatcctcttaataaggccttaataacatgaatgttgtcccacacagcctctccaacaaaaacagtatcatcagcatactgtaaaatgttgataggttccttattctttccaaccaagaagcttctatagaaatttttgtggactgcttgtctcatcatactagtaatgccttctcctacaatattgaaaagcaagggagctaggggatccccttgtctcaaaccccttgtaggtgtaaattccttggatgggctaccattaatcaaaactgatatagaagctgagtggaggcaagctgatatccatgatctccattttgggcagaaccccaatctaaacagcatgtagtccaaaaaagaccaagacactgaatcgtaggccttttcaaaatccaccttgaagatcatcactggtttcttgtttctccttgcttcctcaaccacctcattgagtatcaagataccatggaggatatgtcttcctttaatgaaggctgactgcctttcatcaattaacccatccataacagacctcaatctattagacaacaacttagctataattttatacatacaacctatcaaggatataggcctataatcattgaaggactgaggatgattcagtttaggaatcaatgccacaaaggaagcattactgcctctaggaaagctgccatggacatagaactcatctacaaatcttctaaactctgggctcatgatatcccaaatttttttgataaaattgaagttaaggtcatctggcccagggcatttgtcacctccacaactccacacagcttctttgatctcttggtcagagaagggggcagtcatctgctctctttgcctttgagaaatagctctaaaaggaaccccatccaaataaggccttgaataatcctgttcagtaaatctggtctggaaataattaacagctgcattcttgattgtgttgggttgctggacccacaaaccatcaatagagatacctggcatagcattgaaagctctcctataatttattattctgtgaaaatacccagaattgcaatccccctccttcaaccaagatatcctagatttttgtctcaaaagagattccactgcagttgatacattccatagctcctgctgaagggagtttctgattttgagttcttgatcagtcaagatacgattagaagctaagtcctccacctcatttaacttcatctgaatgctggatatcctgttaacatcaatattcccctctcccttactccactgttttatggcagctttcaagtttttcaacttatttttaagggcaatactcccccaacctccctgctgatcattagtccaggtctccctcaccattttttgatactctttctgctgcagccaccaatcaaaaaccctaaagggcttaggaccccagtccaccatgttagtttgcagaatggttggacaatgatcagatatatccctttgcaaaacatgttggcagctctcaggccacaaagacaaccattggtccgagaccaaaaatctgtcaagcctactcttcacatacccattaggccttatccaggtatatcttgatcccacagccttaatttcttggagctccatatcagaaatccaatgattaaaagctgagatgtcatgagggtctaccctgctatgggacaagcttattctttcctctgcactcctaatgttgttaaagtccccaagaacacaccacagaccccctgggttagaggccttcaactgccttaattcatcccataacactttcttcccagcaaggtcacaaggggcatacacatttacaatcagcaacctctgattgttgatgatgcatctcccttcaagcattaaaaagctcctacctttctccctcctacttacttcaaaagtggaattattccacatacatagtagaccacccgcaacttgcacagaagggatataatcccactgaacagtcgaatccccccatatggcatgacaaatgtttttattaacattctcccttttagtctcttgaatgcacacaatgtccaccttgtgttttgaaataagtcttcttatagcagtccacttaacccccctccccatacctctagaattataggaaagaatgttcatggttgtggttttttagctcccttctctgctactgccatcataacatccctgttctccatgcataataacatccctttaagcttgttatcatcttccccacaggataagcccatttcctttaaaagggcatattgcatttgtatagagtccttcgatataggagtcaaaggatcatctgtagaggctgggattatttctgtcttctcttgtaaaggaggcaaagaaagaacattaggatctgtagagcaatccaccattggatccatcacctgctgggccttggatttacttgtcatcacctcttttcttctcacatacaccttagtgactgaggagattgggctaggtagatggcccatttcgtcatttaccaactttgaaagctgttgactacttgcatcattgtccttatccgtgacctttaaatggtggggcaaaacttcccctttatcccctacgtaacttttttctgacctagattgaatatcctccatagtgtaagtcaaaggggcctggtctataagcctgcccttgacagagtgcttttcatttcgcgtgattccctgcacagcactttcttcaaccccatttagaatgtccccatttcggggaagtttgtcattggggagtgtcaacgccacctcttcctccctgccctgagaaatttgaacgttgtctctctgaactgggtccacgtcagcaagagtgtcggactggtcactgcatcttcgggcaagggtccttacccactggtccctgcgagaggtagatgtagggaaggcgtcccagtcttcaggataaccgctgatgaggtcatcggaagctccatcagagacttcgtcaccggagaaagcccatgggtggagtacaccccctgttacaggggtgtttggctgggtcgaaaatggtgaaggggggaaccaggctgggttgcagtgaatcttcttcgacacatccagactcgtcgtatcctcagcaacgtggaggacgtagtcacttccgtctatggtggccggaatcgtcgcctgaaatggaggtttcatctgcatccgaactaggactcgcgccacgtccaatcgctgcttggcctccacatacgcgtctacttccaccacctcaccaacttccgccaacaccttcgccatggactcctcttcccatactgacagaggaagaccctagatgagaacccaggtgagcctatatgtcggccgtaactccggagaacatttctggagctccgatataggagtagccccagtctccttctcttgatgtatgagtcgagcagccttggattcatccatgtaaggaaaaataacccaatcatcgacccagtaacatggattattgtcatcttcaaccacccatttcagttcctcctccaccctctcaaacattcctctattcttcagtcttgctatccatgccttagaaagccactcagaggtcgcctcgtttgagtgcaagatgaccgggctatgattcgcctttacaaccccaggcatagctacccgcgaattcgtagagttcatttgacgatatatgggttccttcaccacctcagcatatgatcgaggtttgtcactggctttgttttccttctgggctcctttatccccgtcgccataactagagaaccctttctcacgtattccaaccaccttccccctatcaaacttcggtctgttaacaagcaatttcaccccaccaaggaagatattgttatcgagttgcctctctagcctctgcacatccaccacttctttgaacctaacaaagccaaacctatggcctagcttgtttttggttctgggaatgaagacttcccacacctttccccacttctgaaaaatccgccacatgtccttctccatcatcccttcagggaatctagagaagtagaatgtcgtgacgccggccttatctctccatgtcaccttcctttcttttcgttgatggctagtattttccggtctacctctattagtcaccatgttcgatttcttcttgcgtgtcacttcaacccagtctccgtgatttgtgttgcaaccggactgatacgtgtcatcgtatgcaatccatgaggatgatcctcgttgacgtcgcatgtagtcatcatcagtccaccagtagttccgtgttttgctccgacgtccccttcgatggtagtcattcctgtcaccctcagctactctctttgtgtctactctcactcccggtctaccctctctctctcttaccctgtctgtctccctcactctcagattgacgtttctctctctcaccaccctctctctctctctctcacctctctctctcattctctaccctccgcacagatttaccttaatatagctcttatgcgttcttggtcctttaaaagataagtataggaaagacacctgaaattattgcaaacttcctggaatgctttgcgcttgtccctctcctataaaaaaaaacatcacacatagtattattctatttgactatcttttgtaccttgatttctcctttttcttaaacatatgtttccttagatttcagctaaatttggctttgatcaagtggaatttcatgatagctatagagccaaactaggtaaccatttattcaaaatagcttgtaaattgcaatcaccataaagacaatgtaattaagatataagaaattctatgataggacagcttagataaatgttttttgaccaattattaggagaatggcatatatttagttaagtaatgctgtgattataactgatgtgaaaattgttcaattagacatttaactgcttgtagctaatttctagatagaaggtgcttgtaaggagggtggtagaggtcc

SEQ ID NO: 3723 - DNA, 4261 bp, Glycine max
  Intron number 3 from transcript Glyma09g02310.1 (locus Gly ma09g02310) derived from phytozome v7.0 (chr-ID Gm09; pos 1527051 to 1531311)
gagaatattgaaaaggtacagatgcactacttagttgcattaatttaagaggataatatcatagaaactgaagagaccagttggtacaagaatcatttttgccaataaaataaatatgattgtgactgtttggtggaaaaagatggccaaggcaaggggaataggaacgaaaatcagaaaccaataagttctccattcacattttcatattgaacacagttcccttgtttgctgtctaggttttaagaatctgtgatggttttaataggctgagccaagctacaataaaagaaggtttactagaacccatataactgagtgttgtcacgtcattacaagaaaacagataacaggcactgttttgatagagaatgaagtggttgatgatgttaggaggaaagaaaatgctgtctagtctaagtgttggattgtgaaactgctcatgatcaggtgagttcgggttcttagtttagatggacgaagtgggcagtgggagttaggtaagggaaccttttacatactttcttgtctcctcagtagtaactcataagtttttaacagctgttgatacttgataggaatcaagggtattagagtaggttgagaggtaatgttgtcttttgttagaggagcagtgatactttgtgaattttcagtctgtccattagagatccttgtggctagctaaaagtaatgaggctaatttaattattttaaaaaccagaaaatgtgcaaggtaaatgatagaaagtgtgagaaactaagagtctaaaaaaatgaggagggaactgagatcggaatctgattctttggcatatctttgaattgcaatccttggcctatttcattttgggatcaggccaatcactatatttgaatgctttgatagttggaagggtttttttaatttctattccttaggctgttggattactttttagattcattattatatcttactatttcgttttgtaatggtaatggctcaatggtctgagcctggtggttagaaaatatgtcttgttatttgggggtcttctgcaaacctaaaaataaaggggagggtggattaagtattggaaatttgattctaaaagtaggtggctaatgtctttgacttccttatggcagttacttattcaaagtattatattgaaatgggtgagatgtcaatccatacaactacgacaacttatgatccatatgtgaactgttaaatactagtaaaagagtattattgggtaccatacaatgagatgcataaattccaacaaaatattactattgaaactagaaaacataaatattatcacaacaaagacgcaataaaggcattctactttacaaagagagagaaccaagatgaagtcaccatttttttttgatcggcaaaagagtatatatatatatatatatatatatattataaataaaataaatcagtacaagaggtactgtgatatgcacatcccaagattaccctgctttgagctatggtagcgtaatattagcaattgaaagcaaatattaagcaaccatagatctatatctatgctggggtacccttctacaaagaattctaaagaccaatcccccctatacaaaaaaagcagctctgatgttgctggaccataaatagaaaggaatgtcaaatcctttttccagatttttgagccatgaccagcagaaaaagagagcatcatccttcaatttttgaccatcaaagctgtcacctgagaaaacaatcctattcctattacaccaagtcagagagtacaccaagtcagagaggtccaccaaatctgccatctatgttgagaaataccattcagaatgcattgagaatgttggagaaaatgttcttttggtctttctggaaaaacaaatagcgtatttatccatgacaggatctcccaccacaatggcataactttggtgcatccaaaaaacaaatgacctgcatcctcgttgtggtttaggcagaacgggcagcagacttcatccgtaactacgttttggcttctaagattcatccttgttggcaatctatcctgaatcaatctccaagctacatgagacaccttgctgggaattttagtttccaaaggatagagaaagccctctcatcatcttcaattataaactgattaagtgcccgatatgcacttcccgctgtgtactcccctgccagatccccctcccacgaccaactatcttgatgctggacttgaactaccatcccctcaatatcctccatgaaatttgctgccaaatccatctctccctccattagcattctcctccactcaagctgccattcccacactccacttgacgcgatcccatctgctgaatataatgttgttgctgctttgaagtacagtacagtctaagatatttttccagcaatgggaccccatctttccagccattttcccaaaattttgctctgttgtcgcttccaattttccaagttacttgatttttgaaccagcttccctcctccattgaatgcaaacaacacataaatcctgctaccagatagaatctttatgatttcttcttgtctcatccaggttccaccaacttccatactttgattccagcacttgagcccaccattttccaagcaaagcataattgaacttcagcaaatcttagactcccaaacctcctctctccttaggtagacagatggcctccctacttacccgcactagcttctgatgctcagaatctccccccctataaaacgtcctctgcagcctcaccatcctatccaccaccttctttgggaccctgaaaaaagaaaagaagaagataggaatcaagtttaggactgactttatcaaagtcatcctaccctagaaggaaagatgtctttgattccactttgaaagttttctctcacacttatggacaattggatcccaagtctcacttcgcctttggtttgccccaatgggtattcccatgtacgaaaagggtaacgataacaatctgcagtttagataagtagcagcatgatgaacccgttactccatcatcccaaacgccccaaaacaacttttagcaaaatttatctttagacccgaaaccaattcaaaactcctcagcataaccttgatggccttcacgtttgacattgttgctttcccgaaaaacagtgtcatcagcatattacagaatgctaatgtccacattggttttccccaccaaaaatccttcaaacagattcttctgagcctctctcattaagcccgccaacccttcagcaacgatgttaaaaagttaaggggctaaaggatccccttgtttgagtcctctttgagggaagaacttgtcagtggggctgccattaaccaacactgaggtcgaggataatttcagacatccctcaattcatttctcccatttgtcgcaaaagcccattcgtctcatcatgtgcagcaggaagttccaacaaacagaatcgtatgtcttttcgtagttaactttgaacattagacagctctttttacaccttgcctcgtccacaacctcattagcaatcaccacactatgcaacatatgtctcccctccataaatgtgttttggcattcatctctgacttttgacagcactttcttcaaccttctggataaaatcttagccacaatcttataaatacagcctattaaagagatagtaggtctgtatttgtcaaggccctgtgggtcttgaaccttggggatcaaggctatgaatgatgcattgccttctctggggaacactccattagcaaagaattcatctaagaagtgaaggatgtcggtcttgagaacgttctagaactcctcaatgaacttaaaattcagttcatcagggcctgggctctttgtactatctacaccagttatctacactaaaactaatgtaacccagttctaaaaggattcttggcttattatgctgcctttcctttgcatatgcaaaatggctgtttcgagatttgaacctgtgaccaaactggtcacaaaaggcaactttagcattgcgttagggctccaatctcaatctcatgtccaaagcatgagaatgaaaatgtactccttgacatcatcataagttcattgattgtagttgtatgattatttcatattctttgttgtatcataggtttaatatgtctaaagtataaggacatttaatcaaattatattgatgtgtataatttaatgtataggttctggacaggggtgacaagatagaacttctggt

SEQ ID NO: 3724 - DNA, 1749 bp, Glycine max
  Intron number 13 from transcript Glyma09g36260.1 (locus Gl yma09g36260) derived from phytozome v7.0 (chr-ID Gm09; pos 42061746 to 42063494 reverse strand)
cctacagccttgtcttgctagttgctcggagtaaggtaacatgctcattttaatatctataaatagattagaaacaaattgttgatatcaagtcactttgcttaatcagcatttttgtttggcattttatatatcttgttcaacccaaattgtgctggcgttaatgacaaatgaagctgaagctaacatgtgacatgtttttgacacattctttgcttgctataaatgatgaggaaatctaatatactcaacttcaacaagtggtagactgacaactgcagacataacaagcagcaacttcatgccctatctctttcaattatttaaaaaaatctccctttttcagttggataattatttttttaacaaaaaagcttctctattgacctttttcctaggctaatgcacatttcattatttattactttatttgagagtgatacgttcacctatttgagcctttaatggtgatatacttaaccgtctttttatgttagtttctcctcatattagaataatatattgataatatcttcacaatgatcttgctttacacttccgggtttattcttctgtgtacaatatctttcacttggatttatcttttcttgatttataggttagttttcttttagttggtatagtgatgaaaaataacaataaatacgtttttcaaattctagtgtaactaattatttataaaaattctcttccaattgttttcttgttattgtcatcctaaaaattaatagaaaaaaacacctcatacattattccaagattagactcaaacacatgactttgacatacttgtattaacatgaaggctatatcaatgatcaaaattgcagttacatattttaattctggcaggaatttccatattaccttgataatttaggagttatatgataaaaatgtttatgatcaatgcaaaaaaaaaaaaaagaaccagcctactataaaaaagaaatatggtttctaaaactgtattcgcttcattgattaaccttcataacaaaaactgataaatgtaaccatttgtcctatagttatagcaaaatacaattttagaagtttgattggaaaaggttaagtgactaattaaaatgtaattataatcaatattgaaatataaagaattctagtaaagttataaaatctttgggatgataaaaatttatatgtaaatttatgtgtactgcattgtgcaaacattcaccaggaaactgagtgctgtacttgaactgttcttttgctaaattttatatgctactcacaagttcctttgatatccctggtgtatattgctccatttcttttcagtgtggtggttaatcattaccaacattgtgtgataaaatagcaacgtggtctaacgcagcatccttgatttggaagttaaaattgattagatattaaatttgctgagcggtccctttttatgattaatgactaaccatctcaggtagagaataatttgatgaagtaatttatatatgattttgaaaacttcaattaatttttcaaagtgtaattatatttctcttaatattctattgagttttggtattggccatggaagtacttatacacctctaataatgtttagatgtttttatcaatgcttcacaatcaagtttgtagttgaatattctttgaacttttgaacacacaagttatcttttaagtgtagcttttattttatcctcatatcttgtaagtttgatctcctgcagaattcctcgc

SEQ ID NO: 3725 - DNA, 5505 bp, Glycine max
  Intron number 1 from transcript Glyma08g36350.1 (locus Gly ma08g36350) derived from phytozome v7.0 (chr-ID Gm08; pos 34135484 to 34140988 reverse strand)
gagtggattgactttgcagttacctcgccacacaggtaaaaacttgtcattgtttgctttcaagttgcacttgcatgaaaatatgttaatattgttcatataatatatttggaagcaccgattaaggttgataggctgaatttaaatttgaatcatttagataatatttaagtttgatctttaaaggaaataattttttatcaaattttatttaccttttaattgaaattcaaattagttaaaaaaaatttcctttaatgaaccgaaaggtttaagaccaaaaatatatttggaagcacaaatttaatcaagaaaaaaaaagtgtgccacaatattatccttacaccccttgctaccagtccccgcctttacaaaagtcaaactccttgttatttgaaaatgttgttttagtgtatggttagaatgaagtctgcaaactttcatgtgtaaatgtacttttgaaataatcaaaacatgtcattaaaatgtttattctttaaattgagtttgaatccccccaaatgaaaaatcaaatatagctagttgtcttgagataatactttttgaattaatcatttgtttatctactattcttggggactagcacagccacttttttttctttcttaatttggaactcacctaaaccttttcaagagagaattacaaatagaatatatatcgaagtgtcaagtcgttcatatcattatctactgtgtttatatttaataattagtttataacacaaaatcatcgcgacatatgatgcacatatctatgctaattaatggtacaacacgagagcccgacacaattaataaaattagacatttatcattagtcgaaaacgccctaaagaaatagttgaacagaatatcggtccggctcacttgtgcagatgattaagaaaattgatagggtagataatcagtcaaaaatgggacagaatgagtgtgaaaaacctgttttaattggtcatttaaataaatatttttttattttaaaatgtttttaaataaacaaaagttattttttattttttataataaaaaaatattatatataaatagagatactctcacccatatacaaagagataacaatcatcagtttaataacaaaagtttttttaactatttttttttagtttttcatcttgcaaaatgtgtaacacctttatatacatttaaaatatcatctatctaacataaatctttcataattttatgttaatttatattacataatattaaaaatctatattttattattaccagttttatttatctcaacttttttttataagcggccaaagatatgttattgctaaactcagcacaaggaatgctgtagatagtacaaaatcttatgacacattacccaaagtccaacaatgatagaggaaaaagaagacgtggcattaaatccaccaccacaccacataacataaccacccaaaccaaaatcacagaatccaaaccataaaacatacaaccaaactaaaaggaatcctactgttcttactctattaatgtattgcaaaaactagagagaacaatgcaatattttcctagactcaacctgcaacgatttcaaactactatagactaatcctgcaagcacaaaagaaataagagatccctttcattttgtttatcaaccataaacaggtctaaatttagtcatttccgtaaaatactcaaagttaggttcattgcgcgtctttaaaaataatgttatttctatgtagtcatgaagaccaaatagaagcaaaccaaacaaacaacatccaggttattaattaatttgatcccaatttaatatcatgattaaattaacaaaccataaataagtgtaaagaaaattggaacatgatgttttgtaaataaaaaagaatatattcatatatggcacaacaattaaaagaaagttctaattttaggcatgaattgcagacacaaaatagttacaaaatagacagaaatgtaattttggaaagatacatattggctgcatatgtataatagttgcacatgatatgtagccatcttgtggagtagttttttgtgtggtttggtcgggttacccacatcctgtggtataattttgttttcgtttcttattaataaaaaaactatttagtctttccaaaaaaaccacaaacacgaaaaatagttggagtatttttttctttaactctccagttcattcatcacttagttgagttggagtacttatcatacttttatagtactatttaagtcaagttagcaaaaaatttgaaaaaaaaaatatagtattctaggtaagaagtaattgatagtttatgaataattctgggagtaatatttaatgcatataagcatgcatgcagcagctattcctctgaaaataaatattttgagatgaccgtactccattattttctaatgcacttgaaattaatagcaattcctcttctttatgaaggggcaagttgatgaaccaagccaggctgtgtatgtgacgttcatacattggacctttttctttcgacttttcttttattttatttttaattatattggtacaaaatatttattggttggttaatgattaatttttattgaaaaatcatgattgattatttttagtgagattttttcttttcaatcatattttttcattcacaaaatttaaattcaaaattttatttaaagagtattaagttcaatatcaggcgcaccaataatttgtttggttatttttctttttatctgttaatagttatccatcattttcagtattagacaattatacagatgctcatttattagggttggacatacggatttcagcctcagggttggcccgcgagacctataaagttgcagccttgtctaaacaaaactggcccatttaatcatgggtctgttagaagttgacactcttaaccccactcataaatgaattgagtctataaattcgtgagtcaatccgtttttcttttttttttaagattaagatcagatcataagatatgctatgaataacaaaatcatctaacacccaccctcttaaacccgtactagtttctgccaacagatccagctaattacaaccccacatgcatgatgctgccaaattacacgatcaaccatgtagatataatctattattattattaatattattattattattattattattttcaatccagcagacaatggcatatattgtaatgagatgctagtttcgtttttattatatatttcttttatttgttagtaaccaggttatttggtataaaatatttatcaattttattgataattaattttataaaaaatatgattaatcatatttaatgaaatctcatgttgtaatcatatttttttctttttaattataaaattcaaacttaaaatcttgtttaaggaatgttaaatatgactccactcaaactaatgtgtttgttggtattttttttttagtataactcaatgcataaacatgacaccattatttggcattagtttttcttttaatttcttttgtatttctccgttgacatccatttaaaaatagatttattttttatattaaatgactcaatattttattacagatgttaagggtgcaaaaaagatggaaaaagtgtcataaactcgataatattacataaattctctgatcattcataaatctagtgaaactagtcaaaggtctcagttactctaaaccatatttgatatgaaatatttaatattataaatatctattttttatatttattgagaatagttattaaatatttttttttcattttaatacaataaataatttattttaatttaatatttttaatttttttgtgaataactaggttatacgtcccatcatttgagtccaagaaactcaataatatttttttaaaaaaaatatctttataattctatcaagtttttactttccgatggtttaaagtctttaaataaggttattatatttttttaactttataattaagttcccagaaattaaaattgctaaagtttttaagacaaaatataattgaattaaattgaaaatacaaattatgatatcttcgatcatcattatgcttcattatacgctggagttatcattagaatttttttaacaaaatcattagacttttctaataattggtttcgagttctttaaatttaagttaagccagattttgcatttggccccccaaaaaatggtagtgaattttttgtatccgagtcaagcatacaataattatatacatctctacgaagcctcaatgatactactaacaaatgaatgcattcttctcttaaaaaaaatgcattcttattctttttttctcacaaaaaaatggatggaacctggaggatggagattatacgatcacaactagattggtaccccttgaatctccatccaaacacaggacatcctgaatccattaaaccagtaaaaggaaaaaaaaaaaaatcaaacaaggaattaaggaaagaccaaacaaaacccatgcaccaaacaaggttagactagaactacttaaacctgtagttaggcaaaaatgtcctatcatttacaaaatgtccaaagttgttgccatgatcttagcaaaaaaataaaaaaaacaaagtcgttttggcagcctacataagaggagaaccctcccctaggaaatcaactctatgattcctaaaaatagggggatgtcatgtaactccaccctacatcggtgttgcattcttattcacttcgcctcgccaattaggcaattactcaatataaaaagttttgtttataaaaaatactaattcatgaaaataaaagatacatctttccctttcattttttcttattttatttctcaagaatcaagtatgcatgctcactatttattttgaaaggttaaattacagttttgttctcgtttcattttttatatacaattttaattttttaatttattctttttataattttagtttttcagttttaaaaagtctacaattattcggtctaattcttaatattgcatatattttatttcttatttcggtctaattgaatcctagatcttaagacatcgtaaaaaatcatttcattaattaaaataaaatatatatacaatagaaagactaaaattagatgtaaaaaattaatggagaaataaaattaaaatttaagccagttagaaaatcatatattagttcatattcattgatcaacttatgccaactctacattactaagcgtatcccccaagaaagtctaacaagaatggatcatcacgcccaaatccttattgggttgagacttgagaggtcacctaagaccaatacgagtattatgtttgtcacctattcacacaccatgtatgtaatgtatgcagagattgcagaatatttcacaattggaggcttttcctccttaattatcccttggtgtaaaaattagtaaatttgttcttttatgattatgaaggaacaagaaatt

SEQ ID NO: 3726 - DNA, 5610 bp, Glycine max
  Intron number 2 from transcript Glyma13g26280.1 (locus Gly ma13g26280) derived from phytozome v7.0 (chr-ID Gm13; pos 29489062 to 29494671 reverse strand)
agcttcaattctgagttacccaattccaattcgtaaattttgtctttccaatagttcttagtttagggtttgcatatgtggagaaatcttattcatttcttcaatcattttgtttactttctgctgaattttcgttgtcaatggtttgttttacttattagttgctcactcgtgtggtacataagatgtttcttgcggttttacattgagatgtttttattagccctttaatgatgttggatgatacttagaatatttgtaacattgtgatatttgtggttgcttggttttctttttttatgaataaggaataaaatactaaaagggtgatacttagaatatttataacattgtgatatttgtggttgcttgggtttcttttgttatgaataaggaatatatactaaaaggctctgttatacttatcagtttgcttgaataaatctatataaactagtggcgctcaaaatggacttatgctcttgtaattggagattagtacctctcttcttgagtccccaatctcttgtgaaggtgggtttcggttcaagatcctaggtgatttgccttggggtaattttaggaaaccatatagaaactgcactcacagatgcaggagttgctcaagttaatgtaaaagcctccaacttcagttggcgggcctgtactgtggtaaatttttttagtaccataaacatacatacagtccatgatgggcccattaagcccttgtaattttatactcataggcagaaggttaaaattcagccatactgtaattagaaaataatgagaggaaggagaacaagttagttacaaacagagagaataagccagtataggtgaaagagaacatgtctttatcattttcctttggaatttcattgggccagaggtgtgatcctgggctgggagcaggtattgctcttgcttttctgtgctttctctattttcacaattaatataattctccctttttcaacagatagttgctagtacctatcaattggtggttttgttgagacttatttgaggttgagagatttttgttgtaagcaaacttgcatggcttcacaatgcattgatgccttggaatcttgtgtggcaatgttgagacttctctcaaaaaccaggatatgttacagcagagtcatgattcaatgctaaaggaacacacaactcgtttgaaggatcatcctgccaatctggggtcttggctgaacagggttgaggatgttacaagagtctgggatcattgctgaccagtgaccaaggtcgaggatgttaccaagagtccaagacccttgctgctagaacgtatgcagcttttctttgtaaatgaatttgagctggttgttagattgtcacagtagttttctgtgctataggaatttgttggttttgagccaattaatgaccaatcataatcttccagactgagaggtagttgatttgttgtctcttttgatgtgtaggtcaaggtaaagagaaacgttgttagttagtatccttttaaggtaaaaaaaaaataggaatctaaacgtagtttagatgtcagatttgattgaggatgtgtgttatgatatagaatagaagtgtgtccaatggttttttgtttttgcattctatgttgtgtcacactgtcacttgtgtggcagtgttaaagaacaaaatttgggtgattgcaaataatagatttcttctttgatattctttattctgttaaaatcaatatatcgacttggatattgttaaagttgttgtttgataatgttttatatttctagcttgtatattaccataggctaggctgtagccttcatcatgaactattttttgtactatctatcaactctctctctctctctcacacacacacacacacatacatctctcaacaaactaaggttgacaatctttttgagtgtgcatattttcatactcaaacatttaaagttggtatcagagcgggatgatcccgctttgcgcttccgtctctgtctattgtcggccatcgtccccaacgccactggctgttgccggcaatcattgtcggcaccgccgtcctcccccacacctatttccgatgatacctagatttgggtcgtctatttcagcatgtcccaaacccgaaggttttgaagttagaaacctcaacacgtgcactcacgtgccacttctccacgcatgcatcccatgcgctcgtctccaatcaccggaacttcgacacaacacttgggttttggtcgccggcccctcttgctatttttcagccctcagatagtcgttttggtgctgtttagacaatgggtttgtacacctacgtcccttgtcctatatttgtttcctcatggtttgtgctacgcgtctgttattggatacttgtccttgatttctcaaaataacatctacgaattccactcacttctactcttctcctctctctggaactcccactattactactcagaaactcaactggaaaaatgatctatctcagtctgtctcagttgagttatggttacaaatgttattcaccacaaactaaaaagtgttacatgtttgttgatgttactttctttgaagaaactctttttttctcatcctttatgcaggatgctggttccatacaacaagttctacctgttccatcttttggtcctatgatacttcctacccaagacccttttgactaagaaggacatcagcctcagtctcctattcctagttcagctgatagagagctagttgttcagtgcctggaggttttcctgattcatctccttcgccattagctccccatacgacggatcttcctccacatcacatcctagtgaaccaagttctgattggtccattgctattaggaaatgtattaaatctactcaaaattctcaccctatttacaattttttgagttatcatcgcatatctccttcatatttctccttcgtctcttccttgtcttttgtgttactattcctaaaaatgttcaagaggcacttgatcatcctggttgacgacaagccatgattgttgaaatgcaggctcttgagaatagtggcacatggaaattagttcctcttcctcctgggaagaagacaattggctgcaaatgggtttatgctgttaaagtcgagcctaatggtgaggttgatcgacttaaggcttggttggttgccaaaggctacactcagatttatgaccttgattactgtgacaccttctctcttgtggccaggatcaaaattgtttggctcttcctggctatggcagctattcttcattggcctctttatcaattagacataaaaatgtctttcttcatggtgatttagatgaggaaatctatatggaacaacttcttggttttgttgctcaatgggagtttggtttggtgtgtaaattgcatcgatctctttatggcctcaaacagttgtcatgtgcttggtttgggaaatttagtcatattgctcagaattttggaatgaagcgaagtgaagaagatcactctattttttgagtcatacttctctcaggaagtgtgtttatttatttgtctatgttgatgacattgttattagagggaacgatgctgccaaaatttcccaactaaagcaacacttattcagtcattttcagaccatagaccttgacttcctaaagtacttgcttggtatttaagtggctcaatcaaaggacggtgttgtcatttcacatcgaaaatatgctctggtcattttggaagagacaggtatgactaattgtagccctatggatccaaatcacaaattaatgttagattcaaggtgaaccttttccagatccagagatatagaaggctggttgaaaaactcatttatctcacaattacaaggtctaatctgtcatttatagtccgagttgtcagtcaatttatgcaggatcctcacattgaccattggaatgctgtgattcacattcttagatacatcaaaaagactccaggatagagattattgtataaagattatggaaatacccaaatttgtgggtactgcgatgccgattgtatcctttggagaaaatattgtctcttgaaaaagcaagaaacaaagtgttgctgctcgatcaagtgcacaagaagaatatagagctacggctcttgttacttttgaattggcgtggattaaacaactttttcaagaattaaaattgtgatgttcaccatatgaagttgtattgtgataatcaggcagctcttcacattgcttctagttctgtatttcatgagagaactaaacatagagattgattgccattttgttcaggaaaatatgcagtccaaagaaatcagtactgaatttattaactccaacaaccaacttgcagacatcctaaccaagtcctctagaggttgtcagatccactttatatgttccaagcttggagcacacaatttatatgctccagcttgagggagagtgttaaagttgttgtttgatatgttctattaatgttttatatttctagcttgttgtattagcttgtagtgttttatagcttgttgtagaagctgtcctgcaatctgtcaccataggctaggctgtagccttcatcatgaattattttttgtactatctgtcaattctctctcatatatatatatatatatatatatatatatatatatatatatatatacacacacacacacacacacacatctctcagcaaactaaggctgaggatcttttttgtgtgtgcatatttccatactcaaacatttcaagtgatattcttaaataagttatatcatcttgatttaagaaaatgactttcataattctttgaacatgtttttacaaagtgtactgtatgccaaagatctcataactcacttttgtttccctttccaatttcagtaaaactgctctcaagtttctccttttaatgaaaatctgggttttgtttaaaaaaaaattaaaatataatatgcattttagaaagattgaacagaatgttgggcggtcaagagccaacatgagaataaagtaggtgtagcggagatgaggatgttgcggtggatgtgtggtaagactcgacaggataaaattagaaacgaaactattagagagagggttggagtagcgcctattgtagagaagatggtggaaaatagacttaggtggtttgggcatgtagagagaagaccggtagactctgtagtgaggagagtagaccagatggagagaagacaaacaattcgaggcagaggaagacccaaaaagactataagagaggttatcaaaaaggatctcgaaattaatggtttggatagaagtatggtacttgatagaacattatggcggaagttgatccatgtagccgaccccacctagtgggataaggcgttgttgttgttgttgttgtatgcattttagaaagattgaaagaaaagtcatggatttggtaatttggaaacctgattgtgttctacttcttttagatgacttctgttttatgctatttttctctaaaatgaaaatactgactgacttgttttagcttaattctgaccaagtatggttttcagctatacagaggggaacacaattgattcttttcgtg

SEQ ID NO: 3727 - DNA, 2831 bp, Glycine max
  Intron number 3 from transcript Glyma10g11680.1 (locus Gly ma10g11680) derived from phytozome v7.0 (chr-ID Gm10; pos 11901254 to 11904084 reverse strand)
gacagacaaacaaaggttctgaatcacgttgtcgaacaatacttgcatgctttcattcataagaagccgacatcgtgggggaaactgcttaattgggtagaatggtcgtacaatacttcacgacattccgggtctggagtttctccttatgaaataaccgttgggaagaaacctcttacctttccctaatatatcactagcactttcaaggtggatgcagttaatgaattgctaactaatcgcaaagcagtctttgctgaattcctcaagaagttcctaaaggctcaaatagtcatgaaacaaattgctgacaacaaacgaagggacatagctttcaaggttggtgacttggtaatggttaaactccggccacacaaacaatcctctgtttttgggcctcaattagttccttcgaagttagctaagaggttctacgactcatttcagataatagacctcattggtaaaattgcttataaattacaattttttaagggagctcgcatccaccaagtatttcattgttttgtgctcaatcctttttatcaatctccttcagacaacatccctacccctttacctttgccaatagacatggcaagaaaacccgtaaccgtgagtactcgttcgaatccatcccgactttaatgggtaatacccgagttgaccaagtatgcgttcgggtttgggttttccccaataaccaaaagtcgggtacgggtatgggtataggattactacattcgctccgaccctgaacccggacccaccccgccacttaaattttttagaatttttgcataatttaatcaaaaggcctagaatttttattactagttaattttattttaaaatttttacataatttaatattcttttcttaacgatttttgtagatacatgcattataataaatttattgatatataagtagttaaaaataaatgtttaacaatcaatttattttttctaaaatcaaatttttaatattttctttacaaaaaaaattatttttctaatttgaatcgggtacgggacgaggtcagggatacccgatacccaacgggtacgaagataggataataaattttaacccgtcgggtatcggatacgggtatggggacatgttggggagtcggggtcggggattggggagacaatactcgtccctgccccgtcccattgccatgtctatttgccaactacctcaattgataatcaactcattatctctcctctagctatcgtgagcactcgcaaagaatctacttttccaaattcaaaattgcaagttttggttcagtgggatggattatctctagatgacaccacgtgggaagattgagagcagttgcgctctacttatcaccttaaggacaaggtgcttttggaagtcaacggggatgatagacataacgacatacaagcaacaacgtgggcaaggccaaagagacagagtaatacccctacatacctaaaggactttgtttaacggcatagtgatgagctgacaactttgtctgccactgcgttagaccaccttgtcttagaccaccttgtctgccaattttcattctgttaggatttttatcaccttgtgatcacataattacaaattttgttattgcaataccattataaataccaactacatgtaataaggcatatatcaataaaattttcatctttctaatcctttcttctatgtttatgggaggcaatggctctcgaagtccaaagttgtgagtgaagagcctaacaaccattttttcgagattttttgtttcccttcttgatttgtgtttgagatctcttgattttagtattgatttattttatttttattcttgattttttatatgattcttgatgagattgtttgataaaaaattgagattttttgttttcctttttattctattttgagatctcttgattcttttagttttgatttggtgttgatttttgtataattcacaaacaagcttcaactttttttttttaattttgagaatgaaaccgcacaaaggatgggagcatggacattttggaaataaaaaatatttaaatttcatgtgtcagtcacatgcacaattcataaacgaagttagaagagttagggactaacggtgaatcaatgtaataagaacacaaaagttgggaaattttctggtaggtaaaaaaaaggaaaaatatatgtaattaatgaaaatcttcggagtgtcaatataatttgctttagataatatctttatatcttttggcagaagataaagtttcactcttatactaaaaattatttatttatgataatttaattgtattaaataaatatttattaatgcagaatctaaaatacaatatatatggaaaaagaaaaaaaaaataatgcaagcgttgtattatatcttttttctcacggggagagatcacatccatcaacaaataatatcatccaacggttgaaagcaatgccggagaggactggagaggggagccgcaggatccgcttcccaattactgaggtctctgactgtatatatatatacacgtgaagctttcatctctggtctcaatactattcacacaaactctctctgactagtgatatctatccatggaggccaagaacttgtggcgcttcctggttctttcaatcggtgtggtactagttttacttgtcacttggctgcccaacaaggaggctctagactgcaacctttactctggatggtgcacctcaaagaaccggttctactcttcagcacatcctaataatccgattaagaaaccatcattttccacatatcatcatcacaagaaccaacacc

SEQ ID NO: 3728 - DNA, 894 bp, Glycine max
  Intron number 2 from transcript Glyma09g32830.1 (locus Gly ma09g32830) derived from phytozome v7.0 (chr-ID Gm09; pos 39371104 to 39371997 reverse strand)
gtactgaagaatttttgaagaaataccaactaaaggtaataaaataagttacttttaatgttatggtgatgtgtttgattgtcttggtggaatatatcaattctaggctaagttaacatataaaatctatagaataactactcataagtagctaaaatatcgaacactctaccaatacacatttaagagtcagcttcataaagaacataaagaatgcacctttattctccatcagttttttttaatcagtgtaaaccaactggacacataagtatgtaacaggttaccaagttttatgtgttatgttattgacttattgctaaagctaagttgatcatggtagaaaagtatcaaagctttgaagtactaacattaaagaaagcaaattctgtttgtgtctcacatgtattccattctttggtatttgacattgaaactacctttaaacagtaatttttagattaaattagtagatagttttcattaattgtaaatttattataaacataagcacaagtgaaatagagttgtattgttgtatgtgttaatttttttgtacttatatacatcacttatttttgttatttgtataattctttgtccttattggtttagattttcattgtgttccatgtccacatatttgcttcacgatccaagctttacatagtgtctaacttattatgatttagcttgttaatacgagcaatcaggtgtgcatgttactctgaaccataaatgtttaatcaattacatggctaaatgcttgcctactgtttttgtctcatggttctgtaatatcctgtgttttattgtttaaaattattgctgatatatggattgtcacatatatttttaattttcagttgatcatcaggtcacacgaaggtcctg

SEQ ID NO: 3729 - DNA, 1101 bp, Glycine max
  Intron number 8 from transcript Glyma15g40060.1 (locus Gly ma15g40060) derived from phytozome v7.0 (chr-ID Gm15; pos 46886252 to 46887352 reverse strand)
attcaactcgaattgcttttgtggaatttgcagtaagtctttgactatactagttgccattaattggctgcacatagtttatgagaataactgcatcacgaacaacttattcaacctatgttgattattttatggattctttgtggttctattcacttttgtaattcttggcaactgtaactattctataatttttattttcacaatttttatcttatgcattttgagccccatgtctttcccaatggatagtttctttcaagctatcaccagtatttgtgttagggagagagggagacctaggatcacattaaaggaaacttttatgagagagctcacggtgaataatatccttgagaatttggtctttaactgagcccaatggtatcatgtgatccatgtaaccaacttcaccaagtgggataaagtttttgttgttttatgcacaagtatgtgttaaagttctcacaaagtgtatctgttttatttattgtatagacatttactgattcagtgatttgttaatttacgactgacttccccctgcacaggtagaagggcagtttatattcaaccaacatgtggtcatgaatctaccaaactttcattttcgtgtttttgatttgtaatatgtaaaagagtaaaatgttcaaggaattagtctcttttaaaagaatcagctattactaagaatttagtttttaaccttgcaaatattgtttattgttttacttttatatacctaaaaggggtatggatgagttagatttcattgagctcctgtcctgttcttgtcttcttgaagcatagttgttaactaataggggatttcacaaaaatggtcttccttggtacaagcatgcacaaaattttggtgatctatgattctatgaaatcatcaaaattttctctcctgttttgtaaaacatgtcacaagaacatttacacatgcatcattaaagaatttaatgatttctttcgtgatgtgctgttagtggcatttaccatgttaacttgcacaagaggaaccattatcttggctgactttgtttttcttcttgagcaggctgaaagtgctattattgcactaaactgtagtgg

SEQ ID NO: 3730 - DNA, 885 bp, Glycine max
  Intron number 1 from transcript Glyma11g18900.1 (locus Gly ma11g18900) derived from phytozome v7.0 (chr-ID Gm11; pos 15499154 to 15500038 reverse strand)
tctaaacaactagtggagcataagttggttaaaaggtgagcccaaaactagtacagctagatttttttttttttgataaagcaacgatcttttttttaatattttaaaaacgttcgagcattaatcaaggtttatatatgatattgttattacataaatttttatgatgattttatttcataaaacatgtagtaagatatttttatgttaatttaaaattttatctgatatttttatgtttagtataaaataaattatatatttacacattcatctcatcataattcattataaaaaaaattcattatttattttccaccatacatatccctaattaaaatctaaacgtgacatttgcaagattcacacatgacacatcctaattagtaattagaatccaattgcaatatctccaagactcacatcaaaagaatctactaaatagaaaagaaattgcagaccagattttacatgtgtggctcgagctttggatacttgtgaaatgtaagttggataaatgacacagaagctctctccaccaaacactattattgctcttaactactgttgcgctgtaaaataaaatttccacactcttctcttctcttcacttcaattctttcccaccactttctccccacaccatcatcttcttcttcacttcttcaacataacaaaaaacaacaactcagctaatgactctcacgttccacattgttgggcacccttttcgtagatccaactccaaaaaaataacaactttccttcttttcagttgaaaaaaactacttcatttttcttatttctttttttatattccaagaaaaggtctttcttttttggtttttgttttttgttttttgttttagtttttcagtggcagca

SEQ ID NO: 3731 - DNA, 4379 bp, Glycine max
  Intron number 13 from transcript Glyma16g01760.1 (locus Gl yma16g01760) derived from phytozome v7.0 (chr-ID Gm16; pos 1316795 to 1321173)
aagaagaaattcctatcagagtgaatatcattcaggttttacactcacttttttttaaaatgataatttctagatccaattagatgttcaagaaggtaattactatcaacatgatgtaattaatcatatgttgatgcttttgtatgtttacttggtagcttgaaactcatctttaaattattcatcgcatggccacgatcatacggaacatcaagtataacataaattttgtgagtcgagttattctattactgttgagatttcctctgaagtctgaacacttgttaattgtagagtttgtttgctctaagtttacatagcatagtagtcatttaatttcaatgccttttttcattttgtgtatttattttgttaatactgccttgtccttcgtatcagtaacaaagaatctcaactatattagctatccgtcattaaataatgttataggaggaatggagatacggatgcagatataacagctataagtattataaaaactggaatgtactgtgtacaattgaataaatctaacccattcattacatgtttttacatcttttatatgttaaaattattaaatattaaaataaaggaagggttaaggatttatccagttctaaaaactggagaagatctatttcggatgagataagtgtttaaagccaccttgatagttttattgtcaatagtaatcttatttggttttgagcatgattgtttttagttaaagataaatgtgatttctatataaaaaaaaaaaaaaaattacctccttcgcatatgtgttttgttttttccttttttttttggggcaaaatcaaacacatgaatcaatataatgggataattaaactagaatagatttaaaagcacgaggagaaagagacaaatgatgcatgtaagctaaggaggagcaaccgaatatgaaagaagtctttgaagggaatgaggcaatattttttggtgggagaaatgtttacatttaatagtcggtcgtacctcaaaaatggttactttcaaaggaggatatatgtgaaaaataaaaaattgactgaaccttttcttttatttgatagtttcccatcttcgagaaattccacttctcctttagtttccttttttttccccagcttcccttcccttatgatttttttgtatgatattttctgagaattgaaatttgtaatttgttttattcagataatacacacgagaaacatgcatttctttctcttttttttatccactaaattcttttaacaaaagatcattaaatttaaaagtgctgcaagggcagaacaattataagcaacttttgatagtgaacataatgtaacgcatgagggtttcgttgaccaactttgctgacttattaaaagactaattataatggcaaagactttatcttcacaaacctctcacagtgaaagactcacctgggccattctgaaaatgtcgaagcaaaaagagcatacgagagatttgtaatagtagcattttcctaattaaaaatgagatccacatgacttgcttattttagaagcaactactagttcatgcttggttgggatgttgcacctaagatcttgtgttacgaacttgcaataacaaagaacatggatcaagagatatgcttgtccttgcagggccaggcaatataatggaaatctagactagctagagccaatacatttgtgttgtcaaatcaacctttcgtcaaacattccatgatgcctccatataagttgtcaaagcatcatcttcagtatgttttgtatatgcaaagtgaaatattgcaccaattttcgttgctcgagattgttaaccccaccagcattttatatattgttgactatgtggtcctttaaacaaggttagggacagtgaaacctttgtccccttaagtagatttattcaacccaaaataataacttgaatctggctatgttttgttttccgtttgaggagttccaaacttagtttcgaaagtaaactcattttcatgatatatttgattatcctacgaagtaggtttgcacatgaaaattttgcctgaaaactttgctttgttgaaataagagtttagttgtttttgcaaactcagtttgtaaacttatgttaatttgatccaaatttgtgcttgcaaacttcaattcaaacatgcactaagagtcttaatttggacaaaatgcttgcccctaaccctaagcctatccctcatattctcatgaaccagccattataatatttctcaaaatgaagcaactttattatgaataacggtttgtgattttacaacttgtcttctatgtaacatactacaacatttgagtttcccttatgtatttttcaagctagcagaggttccaagtgctagttatatattaagtcatgatgtcattagtcatagaaagagcaatatatctaatacaaggaaatgggttttggtataagggaaaaaaggctaaagtacattccaattattctagcatcagctaaaggacgtttagttaatcatcaactccttgccagcttcatattgtggaaaaagcagcactgaaggtatccataaaactctcctttccccgtaaaaacccattgggtttttccaaatgggttaaaaaaaatgaaggaagaaaagagactaaaatgacaaacccacagtgaagctagcccaacccaactgtgctggcaaaccatgcatggcaaggagcttccttcaaacaaagatgtcaccattttagaagatggtaaactttatgacaatatattacacatagctaaagaagaccaaaagagagagtgaaattataagagtggttttttgtgaacttaatcatctccttgaatataccaacaaagtagcatggtggcacatcgacgtaggatatagagacgagcacgttgctccttcaccaaagaagcacacttgctgctaatcccatatccctttctctttgcttgaacaaccttattagttacttgcttgcacttgttgtagttttgaaactcagccatggaagcttatagttgtatgttataacaataaaatataaagcaatggtagcaattaaaagccttctattttctcaaagggaaacccctaaaaaaaaggctctctacaacccggaggaactatacgtgagggctacaatatgcatatatatatataagctaaggccttacgcaaaggttgactaggtggagtaaaattgaagtgattaggtgaacgtgggcaagctcgaaaactgagggatttgcagcctttaggggtttaaatttcaatgaagtgaagggggaatgaacgtgggtgttggtaacattttttttttgttgatgtaataaaataagggtgttgctaacaaatctctttggcaggttaaagaattaaaaaaaagtatttattataaaaatcataggagatcataaaaaaaattattgacaacacaataaattttatgttttccaataaaaatctttttttattttaattttttaatcaatatcttaagaacatttattagcatttatcataaaataatatactacttgtgttaccgttgtaactcggagcttggtggggtacaaaaacaatggggggttaattagaaaagtggcaaaggagagcatgaaaagagggggcattggtttataataatccagacaaagcattgagtggagtgttcagccacgggaacatgcacccggcaaggttacctcaactctgaggtgggttggaggttttgttggattctatctttgcctcacgttgctaagttccaatgcaacaacgtctttctttcttttttacttcaaattattaaggcaaatggccagctgtttgatgagagatttttatctgttaatgacaatttgttaataggatgaatctttgattatgtttttatgtttggatttaatcctctgtcctgtcctgtttttttagctagtcatgttaagagagaaagcataatcgttaagcgcatgaattaactagtttaatcaatagtattaagttgaagtcttgaacaattatattattacttacaaatcataatagttctatctcattcaagcaaaattatcttttttaaagaatatctgttgtctgtacaaaaaaagagaaagaaaaacatatttttttttattatatataattatctttctcttcctaagataatcatgtaattcaatcacaaattctatttatgataaatttaatgacttttatagtaattatgttaattgaaaggaacatcattaaattcatcatatataataataagaaaggatgattcaagtttgatacgtttggatttactttcccttgtttactgactttatctaatctattgtccctttgtgagattacattg

SEQ ID NO: 3732 - DNA, 1200 bp, Glycine max
  Intron number 11 from transcript Glyma13g00670.1 (locus Gl yma13g00670) derived from phytozome v7.0 (chr-ID Gm13; pos 425371 to 426570)
ttacgcaggttagttactatttttctccccctgttaattgctatgctgatttttttagcagtggggggtggttatgatgcataatagaaactgaatcaaatcaagttggaggtatagacacaccctttttatgattttcacctaggctccccttcactttattctaatttgtacttgtatcctaaaccctctttaattttcagtttgccagatcacttattaacatggtgtttaatctcaaatttaatcataagtttccatatactttttctacttggatttttgtttctgttgatttttaatatttctaaatttctagttcaccgcgtcttgtatttcacctcatataagcagttaacctatttcaaagaaattccatataatttatacagcttttgagttttgttggttattttagggtgagggtaggtagataacattactttgacatagtctctgttgaatcaagaaggtcataaagcacctgttatttgagccattggatgcgattttagctaattctatttagcccatgtaattgagaaagcatctatttaacaagtttagatattgctgttaaatatgaattagattctaaatttcaaaaacatgaatggtattttatggcgatcatatggttaaggtcgtctggtacatgagataatgtaatgagccaaggtttgaaatagatggtgccaatgacatataaattgtaggatggcctttgtattgttactccaacttattgtctttcaaaatattattacaaagtggacttatacttgtgcatgcttatgttaatgtgctcaactgtgagatagggaaatgctgatgactagagttaataaaaatgtgcagttttgggagggaacaacccaattcatttccaagcacgacctacaaataaaattttgcagattctctgtatttgtgtgtgtgtgtattttttgttgaggggatgaggtcctcttctactgtccttggcctataaatacttgttttgtgtatgtgttaattgataatgccttttcaaacagctttatctaatatgcttggaatgatatatagttaaattctggggtttacttgcctaacattaactattttgtacatgggatatttttatggcttgttgacctttaatgtctaagattttatttcatttatttagttatgatgctctgcttatctctttacagc

SEQ ID NO: 3733 - DNA, 2152 bp, Glycine max
  Intron number 4 from transcript Glyma20g38470.1 (locus Gly ma20g38470) derived from phytozome v7.0 (chr-ID Gm20; pos 46051722 to 46053873 reverse strand)
tgcaaggttccattcctttctccaattatttttgttctcattctatcaaatttaacacacgtgcttcatacgttacacactcttctttttattgctatatatttatttatttcttgaatttattttttttatacaaaatcaatcacttctaattttttttattgatataaaaaagttaatataattattcaatcacaagtatataataattttattgagttttgacaggtaacaggttaatagtataattttttttacgtagttattaaaatcttattttaattagaaaataaaaatattgcatcgtcactcttttttatttctccttttgggtgttgtttattggtcattggtgcgcgcattccgtgatgttcagtgccagcatatttgggcccaatcaaattaagtagatattttttttttatttttggagaaaattaagtagatattgacatatagttttttttcttttcccttttatttatctctttgattttaaagaatatatatttttatttatctctgagaatatgaaagacaatataaagaaatttgcaataactggtgtatcataagtcagatttgtttttgatagaatacatatattctttcttcttgggcacatgcacatcttcaatatccatgtctttacctactcccccaccaaaaaaaaaaaatccatgtctttgaacatgttatctaaaatgtctatttccatcctgtgattatctgttaacataataatataatattattaacaatctgaagtgtctgttgtaaactgcatatattatacaagcataatatctttttaaaagaaaaaatatcacaatttatattttataaatggtcggtttgatggactgttgttgatactcttatctaatggcatattagttgacaataccgtatccaacgtgtgatatacgtatatatctgcaactgcatttactgcttcaagattggcttaacttcagcacatcttcaagtttattttacaacacaatgttttttgaaataatcaagagatattctatattaattgtttgcgagtcaatcacgtaagatatacagaaagataaaaaaaaaattataggcatcacaattcctttgtgcacaaaattgtttgcgagacgatcacgtaagcgttacaaaaaagaaaattaccgtgggtcacgatttatgaagtgtttattttgtgtattactctatctagatgaggtgcatcaaaatccttttttattgaattgtgtgcatcaatattttatcatcaatcattattttttctctataatatagaatcggaaaatatatctcaagaaatacatatagttttttgttttaactattgataaatggataatttaaatttcgttatatgattatttgacaatataattcaaataaaaatactaaaaatagaaaatgttcttaaaccttaatcttacgtcatgcttaaatatgaagtagagctatttttatatactatattttagttgattcgttaaagcaaaataattcagtgcataaaaaaaaaaaaatcagtggatccgtttgaccgatactactatttgacatcgaaggcgtctgaccatttagatccgttgaattttctaagctaaaccgttataatagtcgtcccgtccccacctattgcgtcacatgtagaatacatagcctgacttatataaacaatttaattataatcaattaattcaaacaataattttaaataacaaataaaaattattttgaatgaaatataattacaaatagactttaatatgtttttaattcctgaaaattttctgaatattgcatttgatttctaataattttttcttgattttttggtacatgtatgtttttaggtaaaacccaatcaagaatacttatgcgtcctctaaactgatttgttattaccttttgtcgatgctgaattgatttatttgggtgcatacaactgccacggtgaattttttccccctcttctacctaaatttaatgaaaaataattattttttaatagtataattttttttattctgtcaaacaattaaaataatattttgattgattttcaagaccgttactataaagtaatttatttgtaattgaagtatatgtaaatgttatgcagatttcagaagaa

SEQ ID NO: 3734 - DNA, 1523 bp, Glycine max
  Intron number 12 from transcript Glyma15g09900.1 (locus Gl yma15g09900) derived from phytozome v7.0 (chr-ID Gm15; pos 7117267 to 7118789 reverse strand)
ttcccattacaggtacaggagttcagctacttaatttgtcttcactttcactgcactagattctattaatacagatatgctctcaggaagggtaattaaattaaactagtgtatcacattgcagtatatttcttcccttcctctccctacctttcatttgattccttccttgagttttatgtaattattggatttttacaattcatgatttgaattgtactattcagctagctttgatttatattataagatgaatctgaaatcattttgaatctttatgatacatgaatgaaacagtgcaatttcgtatgatacggtcattatacgaatcacacaatacaacaattcattgttttttttaaacttttcttttaccaattctcatgaaagaaattgaaaagtcatctaaagcttaaatagtaaaatgaaaaggaattgaaggatgcactgtgttcgattattcaacttatttgtcactcatgcaatgcatgtactatatttggctgttccattgcttcatctccattcttccaaaataaaggcttcacaaacttctataaaactaataattttgttttaggaggcttatggttaagttactttatctatttctagtttaaaattattaaatcgaacactatatatcatctatatgatatatttaaagcatagtttttaaaacggtttggactgggaaccggtggtacattggattggaaatgacattgacctgctgtaacctggttgtactcggctgggtttccgaatcaaccgctgaaccgctgtttattgactcgtagcaggtcccgctgtactcaattcagctttcagtaaaaatacaaaaactaacactcagcctgactcgaatccaggacctgtagcaggcacaagcacactttgccactaagctagagagtatttgttgacataagattaaaaaaattgatatttatacaatatataattatttatagtaacttttaagggaaaaatttgttaaaatctatctcagtctccatgatttgaacccttaacattggatagtatcaacatagctccttacccactacactcccataattatttagttaatgtattaacacaattttttttatcggctaatgttaattgttagttttagttttttttatcagcatatatatatatataacattgtatcactcacatcggttcatgcggttttttaaacattgatttaaagttatttttattctttgaatcttatgatttgatataattaaaaaaatttcgtggcattctcaattttaatctcaatttgataaccttcaccccatcaaggtagtgaggtattctgatataagtctacttttggaatcagcaaataagtatctttcacaagttaataatctagattagtagctgtttttgtaggttgatatcgttggtctgacctttgtgtatcattatgtaagcttactgaaaacacaaatttctgactttaataatgtgttttgtggaagcagacatttatcattagcaga

SEQ ID NO: 3735 - DNA, 785 bp, Glycine max
  Intron number 3 from transcript Glyma07g03680.2 (locus Gly ma07g03680) derived from phytozome v7.0 (chr-ID Gm07; pos 2550092 to 2550876 reverse strand)
aaatagaccatcccgaaggtccattcggcacaaaggtcagtcttattaccttttcctatttaaattgtataattttgttgtgtaagagaataactataagagtcacataccgttgattgtgcgaatggattcttttttttttttttccaatgtattttaactgtataaatttcgtctctcattgcatctcgtgttctccatttgtgcatttccagatagtttttattttgaaatcgtggaaaactcataatgcatagtttgtgtgtatatatatgtgtttaaatgaatgttttgtaaaagtaccttccttcatttgcaacccaatcaccagacacaaacctctttatacctgattggattgattcagtttgggttgaatgcaaaaaattcatgaaaattgaccctacccaaccaaattatttggtttggacacaaaattctcccaaaaatcatgattgaaattcatttagcaaaacttggatagccgttttgtagttaaaacagtgactgatttgcttgcatgaattgatggaatctaagtatctgattcatttaccctatcatagtggcttactcgagcttcttattatttcccttttcatttttcatttaatcggatgcctatctgtctatctaagtattcagctttctttctttgttactaaatggtttgtctatctaagtattcttctttattaataatggttttatatatgtttcatctttatctgctttcattgtttgttttggttcataggaagcacctgctgttgtcaaatcttact

SEQ ID NO: 3736 - DNA, 2003 bp, Glycine max
  Intron number 1 from transcript Glyma18g53990.1 (locus Gly ma18g53990) derived from phytozome v7.0 (chr-ID Gm18; pos 62244208 to 62246210 reverse strand)
cttactgcggtgacaccgctctcactaccgtcaggtaggtttttctccaatttcaattcaaatcatcttatctcataacaaattactagattcaatttgcaatcaaaatcgctcttcttttattgttattagggttaaacaatttttttgctcattctattattatgattttgtttcgtccttattattatttttttttttaatttagtatgtggcgtcaagggattatgatctagtcatggcgtatttaaaagagattggatattggcttgatttggaatgaaaggaaaaatgtacccacaaatatccataggtaaaatctattaacaagggtctagtttatgcttgagttcaattccttcctatgaataaaaaaaagaagtaagtggatgttttgtatcacatattaatgggcagcgggtagaaaccagcaaggtactcattggtgaatatcccaatctgaaatgattcaaatgttcttacaaaccaaaaaattgtttaaatacttacaagcgtcagcgaattcatttttagcttaaatatatatttcaaatttatttatttattattttatttttatgtaaataatatagatagatatttgtagatgcttgtttaatgtataccagtgtgaatatggagcgattcatcaacaggacaggtgatgagagttattaggttttttatcttatatataaaatattaaaactaatcaacggttcagatctcatccaattttaaaaaaactgaagaggatcctgcccgagttattaccggtgctcatcctgtcctcctgtcattctagtaaaatgagaatcttatatgtttttggttcatataaattaaagttttttcatgtttggtcatgcaagttcattttttaattttagttctgataagttactcgttttttaattttggttctggtaagttttttttttttcagttttagttcatgtaagttaatgtttttttaattttgattcttgtaattttttttgttcatttatagtcttgtaagtttgtgtttttttaaaactttagtccctttacagaaccaaaattgaaaaaacacaaatttacagaaataaaaaaaattagtaaaatatcttgcggggataaaaaattagtaaaatatctcatcggactaaaattagaaaaatgaatttataggatctaaaaattaaaaaaaaaatgctaacttaccaaaaacgcatttaagccatcttttaatataagagaaatttttataaaagttcacaattttatagagattgaaatgataaggtgaggaactaaaaaaatactacgtattgaacagggacacagatagaaaaaaaaaattaacaaccaaaaccaaaaaatgcatatattttaggtactaaaaacttagttaaaaccttttacagcacagctattgaccttctgttctgttattgctaacaagttcaaattttgatcctgtttcgctgtttatcttgtactaactggctgtatgtgtgggttaaatgattcattatgccaattagcaattgaaaaagagcatcttgtttgagatgtatgtgtaacaagcatctgctggagatgatgcaactcatgatgatggttttccatctttaggttgggcaagagaaagaattattattcacttgttgatgtttcaactgactggatacaatcagctgagtcttgagatttaaggctcggtcaagtttgagttgacttgcagatacttagacacacaccgaggaactatcttgacaaatgttaatttgggattgataagcatggctaacattctgtaaatttgtcaattgtaaaacgtttttcttgattttattcattccctagattaagatttaagcataatatgtaatataagtagttggagattacatccaattttgaatttttttacatcatacaactttgctcggctctgttttcttacgatgttttgacctgaaaaacagatcaaagcccagtctagcagcatttgttgg

SEQ ID NO: 3737 - DNA, 6222 bp, Glycine max
  Intron number 5 from transcript Glyma08g39080.1 (locus Gly ma08g39080) derived from phytozome v7.0 (chr-ID Gm08; pos 38333618 to 38339839)
agaacatatctgaggtttgcttttatactttctctgagaacatatctgggggacatattttatgaagagtgaaaattgaagaagaatgcagcataggaggatcaggaattccttcaaccagtcaaaaatggaaaaaaataaatgaattaaaaagagcactctgaatatctcacaaaggaactcccttaaaaaaccacacatatgaaccaacatgtaagcagggaagactattggtttaaaagaagattcaatggtgctgaagtttccagtggcaagctttctggtagcttttatggcaatctcttcaagcaagttgtcaccactggcaaactctccagtgacttttatggcaatttcttttagcaagttgtcactgccagtgaactttttgccaaacttccagaatttttttctgacaatatttcacgcaagcttcaactctgttacttttccagcaacttctggcaaacttttgactatcttttttgacatccttcaagttccgttgaacttcttcagagaagttattccccattacctcttatgtgatctctttcataatttctcagtttgtgtcaatctccaactgcctccccattttatgtgttgtgtcaactccagatgtgtggacatgtgtctggtgtatttgatcttatttctacatttgttatcgaattctctgattctgtttggttcctgtcggctgcatttttccatttatactaagatctgatatgttatctctttgcaagatttgatgtgtttttagttctttgtaagttagttatccagctgtccttgacagctggcacataactaactagaagcttgctgtgaaagtcttagaatcttcctctagaagtttgtgtaacttgctctgcaagtctcacagctctatataaactacagtgtaactgaaaacagttgggaataatatcagaattcataaatctcacaaattctctctctctctctctctctctctctcgctttctttctctttttgattatccttttctaatttggtatccagagccaaaaagatccttcgatggcagaatctcctcctcctccttctgctactcctttctcttcatcgtcagcgttctcgcacttgatttctgagaagctcactgatttgaacttcttgctgtgaaagcaacaagtagaaccagtgatcaaagcgcatcaactacaccgttacttggtgtgtacgattcctcttcggtatgcaaatgaagctgatcagaactttggcactgtgaatccggtgtacactgcgtgggaaatacaagaccagatgctcctgacatggctacaatcaattctctccagctcgattctatcgtgtattctaggatctgttcactcctttcaagtctgggaaaagattcatgatcactttcagaagctaactcaagcaagagctcattaacttcatgtcctacaactaatagtacttggttcccagattcaggagcctcgtatcatgtaacagctgatcagaacaatatttgccaacttggctcttttgaaggtccagactaaatttacattggtaatggacaaggtttgcacatttcatcctctggttcatcttcctttcaatcacctattaagtcaaatgtctctttgtctctacacaatttacttcatgttccttgtatcaccaaaaatctgatcagtgtcagtcgttttgccaaggataattcagttttctttgagtttcattctgacttctgtcttgtgaaatctcaggcaactaaagaggttcttctttgaggcacagtgggtcctgatggcttatactagtttccaagcctccacttgcagcctcagtccaagctgttttttccagcacattgtttagtctctaattctagtttacaaacaccagttgtaactaattctagttcacaaacttcatgtgtaaccactgctgtttctcctagctctaaatttgtggcatgtttgcttaggacatccaaatgatcacaccctcaaacttgtattgaacaattgtaatatacctgcatcaaataaagaggctactttcttttgttctgcttgtgctattggcaaatctcacggattgcatgctccctcgtctaacgccacgtataataagcctttggaacttgtttacagcgatttgtggggaccttcccctatgatttcctttggtggcgttcactattacttgtactttgttgatgcccactcaaggtttacttggatatatcccttaacgtctaaagctgacactttcaccttcaaacagtttaaaaccgtggttgagctgcaatataatcaccctcttaaagccttgcaaactgattttggggggggggggggggagttcagacctatcaacaaatttctcacagatttaggggttattcaccaacttgcttgtcctcacactcatcaccaaaatggtgtagtggagaggatcgcattgtggagttaggtcttgcacttcttagtcatgcgtctatgcctctaaagttttgggatcatgcctttatcacagctgttcatcttataaatagactacccactgcctctttgcggttttctgttccttacattcttaactggtcaaaatcccacatatcagcaccttaaagcttttgggtgtgcctcttttccttttctcaggccctatcattctcacaaactggattttaggtcttattagtgtctttttctaggatactctacaaaccataaaggctataagtgcctgtctcctactggcaaaatattcatctccaaggatgtggtgttcaatgaaaccaggtttccatatactgatctgttttctaaatccatatcctcctctaccccaacatccttgtcctcctttttagcaaacattccccttgttggtcctccacttgtcactcccttaccaaacactgtacccaactccccttcccctcctcctcaaacttcccaaactcatgttcttgattctggttctgacattcagtcagttcccacttctcctattcctcaaaattcccaaactcctgttcttgattctggttctgacactcagtcagttcccacttactcttctcctattgattcctcttccactgccactgtgtctagtccaacttcctctgagtcagcctcccaatatcccattcctcagaattctcaccccatgcaaacaagagccaagtctggaattgtgcaaacttgtctacatccgtctttatttctctcacacactgagcccaagtctgccaaacatgcccttcaagatccaaactggcagagtgctatgcaagctgagtttgatgctttagttagtaacaagacatgtaccctggttcctcttcctggtcgtcaagccataggctgtaaatggatatttcggatcaaggagaatcctgatggctccattaacaggtacaaagccaggttggtggctataggctttcatcaagtacaggggtatgacttcaatgaaaccttttctccagtggtcaaacctactaccattcgtctgattctcaccttggcactcagtcatcactggaaactacattagctggatgtttacaatgccttcctcattgggctccttcaagaaaccatctacatgcaacagcctcctggcttttactcccaagataaatctcttgtttgcaaactggacaaggcactttatgggctcaaacaggcccccaggtaatgtttgaaaggcttcaaagcaccttactgcaatatggttttcacaccagtaaatgtgacccctctctatttatctacaaaaaggacagaaatttggtgtatcttttggtgtatgttgatgatatcatcataactggccgctccaattatctcatccagtctctggttcatcacctaaattccaacttttctctaaagcaacttggtcaactagattactttcttggcattgaagttcaccatacacctactggttctgtgttactcactcaaagcaaatacatttgtgatctactgcacaaaactgacatggctgaggcaaaacccatttcttctcctatggtgactaacttgaggctctctaaaaatggtgatgatcttctctcagatcccactatgtacaggtcagtggtgggggcccttcaatatcccactatcaccagacctgaaattagctttgctgcaaacaaagtctgtcagttcatgtccaagcccttggaatctcactggactgtggtaaagcaaatcctcagatatctgaaaggtactctgcactttggattcagatttggaccagcctctcttcctcagcttctcagtctgcaggcttactgcgatgctgactgggcagctgaccctgatgaccgaagatccacctcaggtgcagccatcttcttaggtccaaatctgatctcctggtggtcacgaaaacaacaagtggtagcttgctctagcaccaaggcagagtacaaaagtttagctcagacttaagctgacattctgtggcttcaaaccttacttcaagaacttggcatgccctcttccaaacctctctctctgtgataatcaaagagctgttgcactagcacataatcctgttcttcatgcccggaccaaacatatggagattgatctcttttttgtcagagagaaggttctcagcaacaagcttgctgtagttcacatacctgctcaggatcagtgggcggatcttctcacaaagcccccctcatccaccagatttcagtttatcagggacaaactcaaggtgtttgagctctctgaagctcacccaccttaagtttgggggggggggggggggggttatgtgagtattgtactattgtactcggttcagaatatgtaagttagttatccagctgtccttgacagctggcacataaccaactagaagctttctgtgcaagccttagaatcttcctatagaagtttgtcacttgctctgccagtctcacagctctatataaactacaaagtaactgaaaacagttgggaataatatcagaattcataaatctcacaaattctctctttctttctcttttcgattatccttttctaattttccctatttataggaaacctcttgcatagagtttctatatatatgaaagggtcaagagactctctttcctaagcaaattttcagtccattatttgttccttcattcttgtctccgtttcaagtaggagtttctactgctttacaccttaacccattatccatttgtctagaacatatttttctggtttatgaatatagctcctttaaatctagcaaattatttcctcaaaatgttccagtggatccaaatccttagtttcaaatagacctcctagcttcttcttaagggctgtaagttcagcttcataataatccattaatatatgaacattcacatagactattggtgctgcaattttcccattggctgagagtttaaagaaattggactggccacatgcatatgcattcagggaggagattttagtggtgctattgccagtatgagggtgtgatgaatctggatgttctttcttcctattggttctgattctcttctctcgtagtttcctactattcctttccctatttgatgggcacggtaattgtgctagttcatttcagcaatacaaatgattaattcaagttgtaatttccattccagtaattctattgttattatattcggttgctctgagatttcaatacgactcattccatttctgaaaaacagttcagtttcaagtaatcttacagctagattatataaattgattgctcctatgtgacatgttggtttatgggctagtaccagctgctcttggctttctggttactattttgggtctatttatatctacttgtgtgtgtgtgtgtgtgtccaatatttctgaaactgttgttgtattttgtccagctaaaatttgagaaatgctaatgaaaataggattttgaagtattttgttttctgttactgattagacatgctcagattgatttgttcatattcactactgttaaaaattttaggagctggtgctaaacgatacatgattagagaatagttatattgcagataagttcaactacttggctcattttagattctacttttacagttgatagtggtttggatttaggaactctgtacgttcattttgaaatatatattaatctaatcaaattctgtgcttgagtgttgcagtggt

SEQ ID NO: 3738 - DNA, 1706 bp, Glycine max
  Intron number 9 from transcript Glyma16g21930.1 (locus Gly ma16g21930) derived from phytozome v7.0 (chr-ID Gm16; pos 25275374 to 25277079)
aatataggtacctgactctagtttttaactactctagtataatgagccaccaccaagaacatgcttttaatagtaattaggattttagtctctctctcaaatttcaaaatattccacaagtttttattctttagtttgcttatcaaactaatattcgattcggaggttaattatactaaaaatttattttctttttaaggatatattatgtgatgatcgaatatgttcttccacaaatttaacctaaagttgtcaaatgaactatattcattaaatccaccacaagaaacatgattatttatatgttaacatttttattacaagtataatgctggtcaacaataagaaattattattaatataacttttaaaataatttttataaaaattaataaatttaatgtatattatgatatgtgatttaatgataataggttaaattactcatttagtccctataatttcatgatttttacctttttagttcatatagtttgaaagtgatttttttagtccagtttacactttaattctattttagtcctgtagtttaaaagtgttctttttagtttctatactttacattttaattctcttctagttcctgtaatttgaaaactataaggactaaaaaagtaacaatcatgaaattatgggaactaaaaagactattttcaaaactacaaaaaagaccatttttaaactatagagactaaaaaagtaagaattatgaaattatagggatcaaatgagtaatttaaccatgataatataaaagattgagtgaacagctattttctcttttgtttggtataattcttataaaggttcccttgaatagaaagtatgacatgttaaataaaaagtaatacgtaaaccatttaatagaactaatgctgattttattcgattataaaaggagtgatgaacaaaaaataatgatgtgttggtagaatttctgaatttataattacttcatgctaactactaactaatttggttagtatctaaatatcatgtcattttataattacccagagttttgtttcacttctaagacgtataccaaaataagagtaaatcatatcaaaaaattacttttaaaaaaaattacttgtggatagagaattttaattaaggaaagtaatttattagagaatttgaatttctgaaatttagaattcattgtttgaatgctttttatgaagaatttaaaattttggaatttcaatttccttttaaaaggtgaaaaattgaaattctcttattgcagttttcttcaagaaataccgtctgagttcttaaaatatcgatcgagtgtgagcatagaggaacacgtataactagcacaccaatcatatcttttctttttttcattcattttttttatccttataattttaattttttttatccaaacataaaattttaaaaataaaaaaatttcaattaaagtatttaaaattcttaaaatttaaaattttttaaaattttaaatttctccgtccaaacacactcttagaatttggatggacaaaggttaaagaagccattccttcgttgctttaacagggaaccacttttcttttgtttcaactgttttcacattagaaattcgttagtcttggtattcataataaacccaattttgttctcactttaatttttcaggcaccattgctcaattgttcggagctggcgaaagt

SEQ ID NO: 3739 - DNA, 1574 bp, Glycine max
  Intron number 3 from transcript Glyma06g19690.1 (locus Gly ma06g19690) derived from phytozome v7.0 (chr-ID Gm06; pos 16030523 to 16032096 reverse strand)
ctctgacagttgttgttgttgcaggtagcagtcttttaactctgattttgatgaaatgagtgagggtttgtttggggtttgtgatttgtgaatggaagttgaaagacttttgatgtgaaaaaatggaattgtgaggggtgctttattctatcaaggattgaaattgcttgttaatgagctgaaaggtttatgtttgtttgagcggactttgttcttacagtttatgtttgttgttaacaagctgaaagatttcagactgctgatgaagcagtctaaagtttgtagtctggtagttgccagaacattagtgagcatcatgattttttctgtgaatgttgttttgtttcatttcaaatttgttggccttactctcattctcatatcattgtagtcttaataaactacaataaccataatagttttgaacaaaacttagatcaatgtttttatattcttgccatcaagttctcaaagcaggtaatgacattgtggatgtttttgtttccaacatcaatagcttccagccttccattgacactaagttgcagaatttcagaaaaaatccatgtaattgcttaatttaagaatttgatctaaagttttttgaaaaagtcttttataatttaatcttacctggttattcgaggagggcggtgagggatggggtggtgtttgccaaactaaacaaaccagttaaatgcacgtaagggattctggtgttggtaagcttcaaaggaaaaataaattgttctaatctgtgtttgaaattggtttctccgtggtcaaacttatgaacagcttaattggaaatggtctgagccagatttgatgtttgacttaggtaaagcccttggtgatttggaaatccagtatgcctctgcagtttgattactgaaacatattcacaaataaattttggttgctgagtatgatagattatgaaatgtacgtcatgaaataacaacattgaaaagaggacgtggtcctttaatcctttggcagtggagcattttggtttttggatattgctttgttacagggcctgtttgtgatagagtcaataggtaatttttcttgctgagtatattatgtgtataaaatatgtttccttctacacttttcatttcctcaagtattagcaaatagcaactctgagcaatatgttacttgcattattgtttgatttttagtgtctgcttggctttgaaggtctatttatataatcactttcagcagtgaaaaaaatattctagcatttgctagatgttaagaagtttcaaatttttgtttaatttttttagcttgttgaaatcttgatttctcagttctttctttccatggacccctttggctgtgtttggcatagtccacaaccagaaacagatgtgaataatatcaagacaaccctcattaattgacaattttgcacacactgaaaattttgtgatacctatttatgtatatttgaatatacactagtttgtaatgtcacttctcttgaaacaatcatactagtttctcttcctgttccatctttttcaatgttcttgtttgctattttattatgtttcagg

SEQ ID NO: 3740 - DNA, 6580 bp, Glycine max
  Intron number 4 from transcript Glyma08g13160.1 (locus Gly ma08g13160) derived from phytozome v7.0 (chr-ID Gm08; pos 9599118 to 9605697)
gaaagggatttgagggaaggattacaactgtataagtaagacttagcaattcaaaatcattatcttttgagtgaaatttattttgcaatatatatagggcgtattaggagaggtatgagaagagttaattttgattcttgaccatggaataatatttggatagctataatcagatttaagtaaaatcaatattgatcatcaatgcataagcataattggttatatgctcaagattagcttcttttacctttcacattctcacttgatacaccttatatatataatattcaaggttgtgctagatttattaaatttttcctttaggctaaattactcacgtggtctgttaattttattttaagttgcagtttggttccttatttactaaaactaacactagtcgtttttgattttgaacttttttattgatttaagttgggaaacttatcccattaaattcatttacgtgaaaactatgtgatatttggacaaaaaaggacataaataaggtgaaaaagcatgaaaagtgtcttatgagctcgtggaaaaccgaaaatttcccaagatcaaccggaagattgctcgtgagactcatttttcatgtggtttttatcatgtttatgttccttctttggtctgaaaatgagtttgattttataattttattgtaggtgaatataatagggcaagtttcatgttttgaataaaaaaagttcaaaattgtgtcccaaaatcgaaaataataagtgtgttacaacattacttagggatcattttacaaattttagtaaataagggatcaaattgcaacctgatggagctcaaattataagtatgtatgtaagacagaaatatagaactgtaattgtattaatttggaaatggagcaattatcattgatgaaataatatgaaaaactgacagtaagaaaatgacaagattgatagcaagctaaacaatcctccaaagcactcaggctcccaccattcacgtatggaatgattctgctaacagaaaactctctaccccgttctctcccctctaactaacttatatggacctcataacacccctcatgcatcccatgcatcctcctcttattcctgccacatcatcacttagtaactcttttcccacgtttcctttcatacactctccacactttgggcttggggctgtcaaggcccaattcctcattcacgttcctatcattaccaccctcttcagaaagagccttgtcctcaaggctaaaatttgggaactgtcctctgatcacagcattgtcttcccaagttacatcatcaattgatttcttgttccactgaatcaaactttgaggaatggaaacccctccctgcacagtaactcttgagccaagcaccttgactgggtacatctcgtcatccccaatgacctctaactccttgggtaactcgccctgtacttgataatctccaatagccttctttaacagtgacacatgaaaaacggggtggattctagactgttcaggcaactgcaccttataggctacttcccccaccttagcaataatttgaaatggcccatagaaacgagctgcaagtttctggtttatccttctgacaacagattgttgtctatgaggccttagtttcaagaatacccaatctcccacctcaaactgcacatttttcctcttcaaatcagcatagtatttcatttgctgttgagctttcaacaactgtagtttcagttgattcagtgcctcatctctatcctgcaactccaaggctacagcagccaccttagtctcattactcaaaaatctcatcagattaggtggttgcctaccatatacaacttcaaatggagatttgcctagagatatatgatacgttgtattgtaccaatactcagcccatggtatcaaatatgaccaagtcttaggttgatcagcagcaaaacacctcagatagctctcaaggcacctattgatcacttcagattgtccatctgtctcaagatgataagctgagctcatcttgagtgtagtaccctgcaacttgaataactctctccagaaatgactcacaaataatggatctctatcactgacaattgagttgggaaccccatgcaatcgaaccacctctttaacaaacaattcagccacagtctttgcattgtacggatgtttcatcaaaatgaagtggctatacttggaaagtctgtctactacaactaaaactgcctcaaaacccttagactttggtaacccagttataaaatccatagaaatgtcctcccaaatagcatttggtaaaggtaaaggttgaagcagaccaccaggggacgtagcagcatatttttgcctctggcacacatcacaagccctcacataatctcttattgttttttgcatccccacccaatacaaattttctgctatgcgcctatatgttcttaagtaacctgagtgcccccccataggagtctcatgaaattccttcaacagagcaggaattgagggagaattctttcctaacaccaaacgcccttgatacaataataccccttgctgcactgagaacccaggtttagcactaggattcagctccacttctgcaataatttgctgcacagatgcgtcttgcttcacctcttgcagtaactgtttgctatccacccaagtaggaccagattttagtgcagttagttccccttcatcataacaacgtgatagtgcatcagctgccttgttttctggccctggtttatacttcacttcaaattggtaacccaataacttggccagccaacattgttgatccggagaagagatcctctgctgcaggaagtgttttaagcttttgtgatctgtatataccacaaattcccttcctaacaagtagtgcctccaatgttgaatggagagaaccaatgccataagttccttctcatagacagattttgctaaatttttgtcagataaggctttgctaaaataagcaatgggttgcttattctgcattaagactgctcctattcccctcccagccgcatcacattctacttcaaaagggatggaaaagtttggtaaaaccaacactggggatgtggtcatgatctttttcagctgattaaaagcttctctagcagtttctctccacagaaaattatccttctttgtgagatcagtcaaaggtctcgcaattttcccataatctttgacaaatttcctatagtacccagtgagacctaggaaacccctgactcctttgacattcttaggttcaggccactctaagatgcattttatcttctcagggtccacagaaactccctctccagagatgatgtgcccaaggtaatccacttgcaaacaaccaaatttacatttgcttctgttggctacaaagcaatgcttcatcaacacagttagcacttgtttgaggtgagtaaggtgctcctgctcactgctgctatacaccagaatgtcatcaaagaagaccaatacgaattttctgagaaaaggtcggaatatatgattcatggtagactgaaaagttgcaggcgcgttcattagtccaaaaggcatcaccaggtactcatagtggccattgtgagtcctaaaagcagttttatgcacatcatcctcatgcacccgtatttgatggtaacctgacttgaggtctatctttgagaaaacagttgctccatatagctcatccaacagttcatccacaatgggaatagggtacttgtcaggaacagttgccttattcaatgctctataatctacacacatcctccaagagtggtccttctttttgaccaagatgactggacttgagaaagcactcatgcttggtctaataactccagcttgcaacaattctgccacctgcttctcaatctcttccttctggtggtgtggatatttatacggtctgacattgactggaccatggttgggtagtagattaatctggtgtacctgctctctttcaggtggtaatgttatttgttcctggaagatttgtggaaatgagcccaggacctctgcaattcctttgttaatttgttctttccccccttcaatcttcacattaggggaccaccaccactcattactaaactctctttttctgtcttccaaaaaggagttcagaaaaccctgttgcagctgtctcccactttggccctgcaaggttaccatttcatccttatgccagaattgcatagataaatccttccaatccatcaccactttccccaacgtgctcaaccatgacacccccaaaaccacatccaatcctcctaactctaagaccaacgcatcaatcacaaaattctgggttccaagtgcgattctgactcccctacaaacaccttcagacatcactctatgaccgtctcccagtttgatacttctcacagtcgtgggcgtgactgttagtcctaaggccatagtcagcttcggagaaatgaaattgtggctagctccactgtcaatcagcacctctacagttacattagcaagcttcccttcaatcttcattgtttgatactcccccatcttccccaatattcctatcaaattgcactctgcctcctggtcttcttcttcctctgacccctcagcttccatagccacgatttctccatcatcgttcattgtctcaccttcacccagaattaacaaacgcaaggctcgttcagggcacttgtgcaaagttggatggtacttacctccacacttgaaacatagacctttagcccttctttcctccatttcttcgttcctaactcctttccacttctcggatcctccagatcggcggtcgtattcacccttcttgcctgtcgaactcaaggacgaggtcgatttggaattagaaccaacagaacccgtttttctactcgggttggcccaacccgaattcgtagatctggacatttccttctggcccgggttaaacccgcttcggaacttagatccaagcccactgggttcactgcgccccagtaatttcttgccataggcccgatccccatcatcatcttcttccttcagctcttcctccacatctttcgccatcctcatcatctgcatccgattctgtggattaagagttctcaccctgcgtcggattggttgcttcaatccactcataaagtatcccaaatactgctcctcaggcaatcgtcccacctgagatgagagaagctcaaaagcttccacgaactcctccacgcttccggtttgtttcaatgttgataactcttcaaacggattctccaaacgtcggccaccgtaacgagcaatcaacgacttcttcagtttttcccacgtcaactgatcctccgtctccatcaacaaattgaaccagtgaatggttgccccctccatgctcaggcgagctaacttcactcgcatctcctccgaagtgttctgaacatcaaagtagatctcagctcgcgtaatccacgcaactggatcatctccctcaaaaaccggaagtttcaccttcttccccgagaatcgagactcatagtaatcatccatcgatttctcgctttcattagagttctcgttcaccttctgaccaatctgcttgctgagttcactcagtaccaagctctgttgttgcatttgttgagctatcgacgtactctgttcttgcatctgtaacgccaatgcttgcaaggtggatttcacttcacccatctgttcctccaacaaatcaagacgatcacccatcttcggttttcgtgacggcgccagcggtgtaacgatccggcaggtcggaccaattgatggagctcaaattataagtatgtatgtaagacagaaatatagaactgtaattgtattaatttggaaatggagcaattatcattgatgaaataatatgaaaaactgacagtaagaaaatgacaagattgatagcaagctaaacaatcctccaaagcactcaggctcccaccattcacgtatggaatgattctgctaacagaaaactctctaccccgttctctcccctctaactaacttatatggacctcataacacccctcatgcatcccatgcatcctcctcttattcctgccacatcatcacttagtaactcttttcccacgtttcctttcatacactctccacactttgggcttggggctgtcaaggcccaattcctcattcacgttcctatcattacctaaaataaaattaagggaccgcatgagtaatttagtctttcctttatatataaaatgtaatgtaatcttcacttagtatctggaaattgtcttcaattgataatatatatatatatatagtccttcattagcaattattttggaaatttcagtcttagaatcctgaatgtcgtcctttctgtttctcagtcatttatctaactgattgaaaccccccatgcttatggtcaaaaactggttaataaaaagacttgcttctctttccaagcatccaatttgcattatatgtaaattaaaagactaacaataattgatgctatctcactgaatacttataatactactgtgcactcttcctgaattaaatgctgaagga

SEQ ID NO: 3741 - DNA, 693 bp, Glycine max
  Intron number 2 from transcript Glyma17g35930.1 (locus Gly ma17g35930) derived from phytozome v7.0 (chr-ID Gm17; pos 39894485 to 39895177)
ctgcacctgtttcagttgctcagggaagtcagccggtaagaaatttaactctgatttgatctgttgtcttttgtttctgcaaattgcatgacttaggaagcttatcaatataacttatcatacatgatacatgtttggaaatgagacacaggaacatatcatacggttttatttcaaggcaaaacttatatgtggtattgttcatcatcaatcaaaattggagttttacctcaattggtgacctttactgatttttaatgcaaacttttatcttacagattagcgaggtgaaactctaattctggttaaagaacaacacctaaagtaattaagggactgcatttatgttttttcatttattttatgtttggcatattgtatgtggaacattttggcttttataaaagaggtggaactgtggagaatagaattgaaccattccttttcgtattattatgtgttgtatgattctgtctccgtgttaaatactaccttagtgagaaagcgttgttgctgcttggttgtgtttcattttattatgctgcatctacgtttgacactatgaaatactgctgggaaggctttgtgtgttggtagttttgtgtgtgaaaccagatagttccattgcattcatttgaattttttttttgttttgcagttgtcaattgcaaacttctgcatcagcaattgcct

SEQ ID NO: 3742 - DNA, 783 bp, Glycine max
  Intron number 6 from transcript Glyma16g05570.1 (locus Gly ma16g05570) derived from phytozome v7.0 (chr-ID Gm16; pos 4886314 to 4887096)
caagcaaaaagaaactgtgtgtgttggttcagcatattttaagaaaataatatcttatttttgcaacttcttgagagaactttttaaaaaataagctattattccctctgagaaaaactttcctaaacatgcactatataagatattcagtcctttaagtaaagggactacttttcaaacacataaactaatgctggagacctagtgaaagactccatttgtaggtcgtttgtattaccagacagttgtctgtctcagcagtgagtaacttttgcatagttgtaggtttctagacgttttcaatgcttcaaatcataagcataattccgtgcttatgttcttctctttgaatcattgatgagaaatgttcatcaatttcatgtcatttacatataatttcatattatttccattcatctctcatggcatttatgctacattgttttacgtcttttgatatttttgtggatctatctcattttcttcctttaccatataaatgtttcatcccttagctagatcttgtctatgattctttttgtcatttttccccttctgcattcctttcatgatataatatttaaatagtgactagtgaaacaagattttcccatattttgtcacttttgcttatttttaactgaacatttttgaatcgtagttcttttctttagttattaaaatattaaatcagcaagtacttaacttcaatgtcatgagggacttaagctaagttctctacttcaagatccttaaacacagaataatttttaggaaaatatc

SEQ ID NO: 3743 - DNA, 1427 bp, Glycine max
  Intron number 7 from transcript Glyma09g04270.1 (locus Gly ma09g04270) derived from phytozome v7.0 (chr-ID Gm09; pos 3140520 to 3141946)
ccttagctgaaaacgaaggggagggtcttgccaaggttatatttctgtatctttcccttgatactgttcttgtacaaaagcttataaagtgattgtttgggtagattgtagaggaaatggttttaaaacatttggttttttaaattttttcgggcgttgtaaagtgcaatgattttgaagtgtgattaatatagggatgtttttcgaaaaattactggatcccccttgctaaaattgattttgtagtctagatcttgtaaccatcttacaaccttgaaaaatttaagaattaatttggtcaaactactacccaaacattattatggaccctccaaagatcaggattatgctcctggaagtgagagattgggtccctccacataccttctcccccttacatcccaacaggagactcttggtcactcaaaaataatctaagagtccgtttggatagaaaattttaactgagaaaaataatttatcagagaatttaaatttctttaatctaaaatttattatttggattttttttatgaagaatttaaatttttgaaattttaaaacagaattttaaatatataaaaatgtgaaattttaattttcttctaaaatgtgaaaaattgaaattctcttcttgatagaagaaccttccaaaatgttcacgtatttcttttataaccttcatcctctctttcacatgaaagttttcgaaattccgttctcgaactcacgactcttctcttacactgatgattctcttcttcaagaaacaccggctaaactccgcgtccatgggtgcgggcgtaggaggacacatagaactacactcgccagtcagggagcagccatcactgcccatcacgcggtgaagatgctcgccggtgcggagggcctaggtcatgccttgcgtcgttgactaaatgttgtggtcgggtgtggtgatgtatgccgccgtgtcccggttcccctataactccccctgcagcattagtattcttctttttagaagcacaccaatcatatattttattctctttgcattcattttcttttactctaaaaattttaattttttttatccaaacacaattttgaaaatgaaagaatttcaattgaagtatttgaaattcttaaaatttaaaatttctcaaaattttaaatttccttatccaaatacactctaaagaaattggagctagcaattagatgctgacaatgagttatctactaaggaatcattacttaggtgatatcaatactatttggtttagagcaggcagtcctggtttacttcttgaccgtattcactcttatgcttttctctaggtgcattgttgttgttctttacttgtctcattgtttactaactatttttaagctgttttcatgcagttgatatacagacctgacactggagagatattggg

SEQ ID NO: 3744 - DNA, 3415 bp, Glycine max
  Intron number 2 from transcript Glyma08g11630.3 (locus Gly ma08g11630) derived from phytozome v7.0 (chr-ID Gm08; pos 8473108 to 8476522)
ttcctggactcatctccaagaatattgagaaggccttggttgaagccttccaacccttgggaatctccgattacaattctatcttctggattgcacaccctggtggacccgcaattttggaccaagttgaggctaagttaggcttgaagcctgaaaaaatggaagctactagacatgtgctcagcgagtatggtaacatgtcaagtgcatgtgtgctattcatcttggatcaaatgaggaagaaatcaatagaaaatggacttggcacaaccggtgaaggccttgactggggtgtgctatttggtttcggccctggactcaccgttgagactgttgtgctccgcagtgtcactgtctaatccatatatcttgtgcaagaccaagtccttttctttcttattcattctttcatgttgagtttgaaaaatgtattctttctcttcctttttttccctgcttccctcacatgcttctttttttatatcagtaaataagaacatgttatattactattaatgcaattaagttttcacaaaattcatctatatattcagttgcaaagtgaatatctcttgtccaatttcatctttattgaaagattctttgtgacttgctataaaagtgactgtagaactttgcaggtttatggcttaattgtgtaaagagaatagtgccaattaacgtagtccacttaggcttaattttttttttttttttttgtgttgattgagttatctaactgtgagtctgtgagaaaaacattataaaaaagggattaataagtatcaagtaaacctagtaggtaagaaattgcacttcctaccttgattacttaatgaacaaaatctaagtcgacaaagtggttggactgctcttcgcattatttgccttacaagagttaactacttaaccacaatagataacatttatccatgacttcgtattaacactttaaaataaatgttccataccacctatgaggtgtagtatgggctctaaggttagaatttatgtttcagttggtatcatgctgcagcttatggtgtgcatcaatatgtgaaatctattactcaatttgtttcagtttgtattacattttcattgtgtgcttttgatttaatatatgaaatatcataacgcagtttatcactttaggtagtttttatcatattccagtttatcttgtgcttctggttgagtatcagattgcagtttttatcagattgtagtttatggtgtgcttctgattcaatatgtaaaatttgtgacacaatttgtttcagtttttatcttattgtaatttatgatttggttctatctgtgtatcatttaggttttgttgttcgggtgatggtgtgctgtgaaatttatcacaatctcatggggtgccaatttggctctgctgctctggccattgtataccaatatgattctaatcatggtatgttagtttgtttctggttatggtgtgtcaatttttttttacgtctgtaccaatttgattctgttttaggggccttggtttattgtgaaatctgtcacaatttagggacatttgttagtttgtttcagtcatggagttttgtgatgtattaataccaaccaatttacttatgtaatgagcattttaaaaccgaatgaccatttaaaaccttgcacataaaagcataattttgatatctcattagcatttatttgtcattagcataacctgtcacaaccaagttgtaattcttatcacacccttaaaatctgacaaactataaatatctagtaaacctagtagctaagaaaatgcacttctatcttgattacttaaagaattaaatctcagttgggacaaaaagtatggtcatcatttcggattattgattttacatcagttaactatttcaccacatataacacgtgtgtgtaggtattaacacgtttatggggggatatccatatcacctaccaggtatagtataggctccaatgttagaattagtagttattttctgataaaaatgttccttatcaccgacctgttttagtcataaattataatatgtttacaaatacaaactatatataatatgataaaaacaatactatcatattattgaagataattaattgtagaaaaatgtatcattgcttactttgcaatacaatcatgactcaagagtcttcctatttaggcaactgataatcaagaataacaggaaatatgtggttggtccaataacaattcaatagtgggtggcccaataggctaaaaaaatggtaggatactttcttagtattagggactaaatcaaccccaaaaaatcgacgttaaatgaagatcgtccaagttttatttaaaccacatctttaattcgatgtgggactaaaccatcatccttgaagtttcaattaaggcaaccccaaagaggccccaactaaagaaggataggactgacggcaattaaggtggttttccaacatatcccttactgaatctacataattttcgtccgtataaatctccatagcaagacttccacctcttttgagcaagagtcctccggagatgacgtaggaagtgcattttcttagctactaggtttacttgatacttttttttttactgcggtttacttgatacttattgatctgtttcatataatgttgtatatcacagtcaaataactcacccaagacagaaaattttaagctaaactggactaagttaatcggcacaactctctttacacaaaccacataattccaaacagttctacagtccaatttatacacaatcacgaagaatcttttgttggagatgaaattggtaaaaataaaatagaagatattcactttgcaactgtatagtatagatcaattgtgtataagcttaattgcattaataataagatgtgttctcgtttagtgtttactggtatacaaaaaagaagaatgtgagaaagcaaaagagaaagaatacatttttcaaactaaaaaagcaataatacataagaagaaaagaaggatctgtgttcttgctcaatatatatgattagacagtgacactgcggagtacaacagtctcaacagtgagtccaggaccgaaaccaaatagcacaccccagtcaaggccttcgccggttgtgccaagtccattttctattgatttcttccgcatttgatccaagatgaatagcacacatgcacttgacatgttaccatactcgctgagcacatgcctagtagcttccattttttcaggcttcaagcctaacttagcctccacttggtccaaaattgcgggtccaccagggtgtgcaatccagaagatagaattgtaatcggagattcccaagggttggaaggcttcaaccaaggccttctcaatattcttggagatgagtccaggaacatccttgaggag

SEQ ID NO: 3745 - DNA, 1221 bp, Glycine max
  Intron number 8 from transcript Glyma11g01740.1 (locus Gly ma11g01740) derived from phytozome v7.0 (chr-ID Gm11; pos 1038042 to 1039262)
ttttccgtagcgtaaaaaaaaacaatccgtgaaagtgattttattttggggacgtgaaattctatcctggcatgcctgattctactaaaaagggagagcaatgtaaagtaatagagaaaaatatactcagtttctaatggcaagatgtgtggaaaaaaaaagtttctaatggctagaatccaacattgggtgtactttctgcaaaggttgagcatcaattgcctttgtcaagtggacattgggttttctttcttcaaagatcgattcttaagaatacaatcaatacactaacacaataccattaagctcagcaacgataacttgaggctaaaccaacttaaatatagttgtgaaacatttcattagaatccgttaaacaagaactacaaaaatcacataattcaccgttaaggcatttctcatgccccataatgtaaaaagactaccataacctgcatgagaataatataaataggtcatagagatctcacgaatatctttaatttttacgctcttattattcacttaaaagttattttgaaacgaacaccattgaaaattgacttgagaaactaaagaaaattttatttgattgttcttctctttaaagaccggtgatgctgaacatctgaattgatgtttataaactgtatttcccctctatctttaattcaatacaagacttggggtgaaatttaacaattaatacataggggggaaagtacattttaatcattgtagtacttaatatgtttgtcccttttatagggttcctcggtagaatttttttaattttgattcatatgtgaaaaaaagttaaaatagcattataactttaataaataataaaaaccaatttttaaatactatttcttttatgtaaatagtatacgtcaggtctttattgggttaatcctaaaaatgatttgacaggccaaagaaccaggatcctagtggctatcgattttatcttttatctataattctaatggttagaaagagtttgaagtgcattaggaggagtagaaaatatgaattaaaacatgggagggcaagggtataagtatgtaatacacttgatgttctagaggccattccgggaatataaaaagtaaatgaaaatatagtactaaacagcaataataacagtgttgacttatgattttgagttgagtggtgttttgccctaacctaaacctcaagcattggcaggcagtggaa

SEQ ID NO: 3746 - DNA, 1467 bp, Glycine max
  Intron number 1 from transcript Glyma02g40430.2 (locus Gly ma02g40430) derived from phytozome v7.0 (chr-ID Gm02; pos 45677875 to 45679341 reverse strand)
actctcttgcttggtcccctcgtcggaacctacacgtaagtctctctctctctctgaattagggtttcgctctatctctgttttgcgcgatgattatgtatgtacatgcctgtggttgtaaattcgatcgaacgtcgatgaacaattcaacgttttgttgttgattttggaaataacttgaccggaattgatctggttgaaggaacaaaattggagaggattcgggctttgtgttctgatctgttagggaaaagggaacgaatctgttttgataaatatttaattaatttattattctgttgagtttgatgtacttttcaatggattggcgacctcttcaggtgttaagaatttgtttgtttatttgcttgttttttccccttttgttttctgtgtcagaggaaatattaggtgattaggaaatatttgtttctatgtttttccgcgatgtttttgtttttgtttgtcgttggagattagtagctttgcttgttgcagaaaccatatttgaagcctaggtcaatttttaacctacattgtgcttacaaatcggcagaatacaaggttgttgtgattgagattggaaggggaggataagcaacacataaccagataataagattctagctaattaaatacaaagtttagattttttgaggatgggattttttttggggaaaaaatgggttgctcagccctgccacttaaatggccggtcgtttagatttatgaaaaatcaccccattcagtggtttgataagcctttccctatggtcatatatttttctcaccaatttatgttggtgtgaataattggattgaagctcccacacaaaagtgcaacattgcaccatccttcgaggaagattgtgatctcaacaacattggttcttttttttactattaacaatgcaattgtgcaaaatttgttggacatcacttgtaacttaggaaggaaataaaaggttttgggtggaatcaataggttcattccatgccatcctatttttaaaatttaaacaattacaactagtgtaatgtatgtctttctattccactgcattatatctctttccctcaatctgatttaccctcagcaactattgcaatttctatctattaaaagttcaaaggaagattaaaaaacagaatttggcttggtatttattttcttgaaacaagtctgttaacttagcatgagctcaaatccagaaaagcctctttgcatatgcaagggtaaggctgctcgaatgaccctcttccatatctttgcttagcgaggagccttatggtactggggtacattagtgcttgatgttaagtctgttagcgttggttgataagtaaaataggtgctggaattgaactgaaattagctacagtaattctctggagaggtggatttgaaacggagaaaataaatgctggataataatatatgctgccatgaatctcagagtccaactc

SEQ ID NO: 3747 - DNA, 1673 bp, Glycine max
  Intron number 4 from transcript Glyma05g02660.3 (locus Gly ma05g02660) derived from phytozome v7.0 (chr-ID Gm05; pos 2024748 to 2026420)
caaaaaggtatggttctttttccttcaatatttgtaattgttgtaagttagcataacaatagaaaacttgagaaacttatagtggggagtgcatgggcagcatgacatatagaagatttatcttttttccctttgttgtctttgctatctcctgttcctttttgcatgttaacgagacttgaaaattggaaggtaaaagagctttgctttgcattgagattaatctgctcaaaattttttgaacaattttgtgggacataaccatgaaacaactgaaatgacttaaaacattctccagattgtctttttttttttttttcctgttactatgcttgagagtaaatgtctctgatttttgtatggttgcacttgatgttgaatactgagacttgacttcctcttaaacaaaatttactagttgtaacgaataataatgcaatattatgaggagcagttcagtttacattctcaggaagtaatgatggtctttagtgtcttcatgtttctttgcaaattttctagtatttagtcagaatggagatgatttgaagcaatactaatgttcaatgcttaggtaataaaaataaaaatcaaacttgattaagtgcgtgtttggattaccggttccaacctccgtttccgagaagcatctcttccttgcttctgcggtgaaagtgtgctgtggttcatgccactgcatttgaaatggcgaagcaaacacgccctaagctactcacagacaatgtatcctattactgtatcaagctaatgttaactgatcctgttagttggctgggtgggtatttaatgtgcttgatcagttaaagattaattaggatttaggatgctggttaatgatactaatactgattctgtataactcagcaacttactagtttcagaacttgatttttacatagcaatgaaatcattcatttataagatatgccaatacggcacatgtagattattcccacttaaatagcttgtatttgttattaaggatgattcagatgttttctctcaaggtttgcctataaggctataactttgcattagcataacactttgacgataatctttacactcacagtttgaaggattacatattgagaggtaaaatttctcaatatttaattttggtaaggtgtcattccccggggcaggattacctggctatcaaagggatgagacacctgctctaatatcacgagcatgttctcctcaacaattgcactttaattagtgaaatttttgtgacatgacatggagaaaatattaatatatcatgaatgattaatatcatttactttaatattaaatatttatagtataggttgcagattataaatggtttaagtgtcagaatcacccatgaagaaaaaaattgagttatacacataagctcctgattagaacttcctaacctatgtttaaaatttcaagattttgccatgcattcgtgtaatccttagcaaaaaactagaaagcaaattgatttcaagattttcccatattatgtcttgtaagctttgtagtcaatagcaatcatgtatcttggttttaaaaaagagaaacaaggcttgtgaaaagtttccccttaaatccaaggctgaaatattgataatgattttgtttttgcaggactagcacatttgcacctgatataggtg

SEQ ID NO: 3748 - DNA, 1513 bp, Glycine max
  Intron number 3 from transcript Glyma08g47890.1 (locus Gly ma08g47890) derived from phytozome v7.0 (chr-ID Gm08; pos 46672180 to 46673692 reverse strand)
atttgcgtgctcactcggtaaccactctgctcaactctaaataatggcttctttgttgtaactttgataaattgtggggttgggttactgtaaaatcacaatgttttccttgcatcattactcatgaaacttgctacgaaaaccgaaaatacatttacctccatgaggatagtactctctcaacctaccatcctccctgtcatttttggttttggccagaaaatgtaattcttttcatttaaatcaagcaaaatgtaaggcatgtgaacaactattagtaacggatagggtatcactcaggggcggatcttcattaggacaggggggagccatgcccccccccccccaattttttttagaaatatatgtatattataattataatataattaaaaagtaagaaagaatacttagagaattatttcttgactgttaggagatataaaatatctcgccctcttagtaaaaaaattataaatatacatccatattatttttatttatgcattgatttttatatacttcttttatttaatttatgataattatgtagatgcattttctctttttccatgtaattgataaatttatattagaaaaataatgatttaagagtgaaagaaataatttctttaaagagaaaaactagtgagaaagatgaacaaaattaacttcgacatctatttgaacccaacaattatcttgagttcacaaggattgaagcaaataagaagcaatttttctaagttcctagtgacatatgatgaaattttttataattctttataatgtgatcttgacaattactttcaatttagtattattcatctatattaaatttatgcattaatttttattagctataatagaaattgtgtctctaagctatattttatgttccaatttggtcactttgagtttaaaaagatttattttggtctcttataatgtatctattagaccaaaatgaaccttctataagtttttggcactaatggtgccaaattttgttggcgtgacgtttctcacattttgtcacattatcaggttgactaaatttgtgtaaaaattaatggaatgaccaatttaatatattgaaaaaactttaagagatcaaaatgaaactttttagacatgaatgactaaattcaaatctaaaatgtagataagtgaataaagtttcatattatttaattttattttgactcccacgaagtttcgaagctccgccactggtatctatcacttgaccatctctaagtttggttttaagtgtgtggagtctaacttgcatttgatttgactaaaagttaaacttttacttaaaatgtatcttacataacttacattgaagttgaagaatgattatacctggatggggtaaaatgtatcttatataatatagtattaaaacaagtaaagaaattctagtcatgtaatgttagagtttctgcattctcacaatgcctgtactttatatcgcaggataaaagtggtgttccgttagtggctc

SEQ ID NO: 3749 - DNA, 2506 bp, Glycine max
  Intron number 1 from transcript Glyma16g08220.1 (locus Gly ma16g08220) derived from phytozome v7.0 (chr-ID Gm16; pos 7461737 to 7464242 reverse strand)
tcatcaccggcgtcgtcgatttgccttattttctggtaatttcttttttatttttttgcctattttgtagatggagtgcggattaattaattttgacttttgaatggtcattaattaattaagtactattaattatctttagatatatctcattagaagaaaaaagaaaatatagtgagaaaccattaaaagagagaaatattaaagatataattttggaaaatattataatttaagataaatttattgttttcaactaaattaatatttttttaattttaataaattaagtaattcaataaaatatttaaccaattctcttatacataatgtgaagtttattaaaaattataaaaaaaaataattttataggtcttataaaatttaaccaatattataaaagagtgtgttagaaaatattacaaaaagagtgttagaaaatgagagaaaaaaattgttacaaatttatttaatatactttagttaacatttatttgaaattacaacttcttcacaattgaaaataattaatctattcaatttttttaaataattgaataaaaaatgagatttataaaatttaattttttaataaattttaactaataataaaaattgtacttaaaagagtagactatattattaactttctatcccatgaatgtataagtgtagttcacttaccaacacactcatctgaagacaaccttcatattatagaaaaataaatgattgtatttgtattataggcattattttaaaaaaattatatttggtttataattctaaaattttctaatatccaatatcatcgtttttttttccttttcataatagtaaaaattttcatattattttctggaggaatatttattttcaactccaaaaataaatatcatcattgcgtgtttactttaactcgttttgatattattattatttctaaaaaaaatggattacaaaaaattatatttatattttgatgttagttatatattaatataattcttaggttaatatatccttatttgagaatatttaaataaataaaaaaatcattccatataaaccctgtccgagtatgaaaatgctgtgtttcttggaatagttattaacttattattctctgttccaccaaacatttgttggaaattaagggaattttttttcccaacgattgagtgatgatgttattggtattttgattctggttaaatgatactctcgagaaggcagtagatgaattaaaaacaataaaatagattatagtaaataatcatatcataattttgatctgaagcaagcaattttttgcttaataaaatcttgaatcttagcctaggcacatatatttgaaacactgttgtcgtcaggttttacagtttgaaagggatgatattatattaattactaaatcaatattatacagttcacggttttcattgcttgtgatcctaattccaatcatggttctacaagcaaaataaaatagttctttttttaaaaaaaaaaaagcagccatattgtacagttcaaattgtccacaattttgatttaagtaatacatgcttaattttccttgttaaaagagctaactgtatcatgtcatgcatgttcttgattcaaataagattacatcgtgtgaagtgtgaacatacctatagccctaaaagaatctccacaaacttactattttcgatagcaacacatgattgtggcgcaccgtacggagtcatagaaagtatgattgcaatattactttataatcaacctgcatcagaaaaaacctgagtgatgacatacttttagaattatattccttaatcctgtttgttcaattaagggtataatcccatgtgctcaaatttttaatggattgattaatacatgttatcaaaatgcgttttctgctgattgcagaaagtattggcgaaaataataaccagtctcctttgtctttcattgcaaacctgtgagaacgaaaattgaatgagttgttatgattggggatccatatttatttattcaccattctgagatatacgaatgaatgtgttgcatatggcaagctgataaattcaactgtagcttgcatctttttctctcaatcaataccattctcacatgttttttcttataaaaatataatttgtcattagttatctgatttaatctagaagtatctataaagtctcatgctttataaaatacacttctatgatttctctgcaaagatgtgctgtattctatataataaaccatagtttaaaagaacgagattacatctggtaactaaaccatgagattcagtaaacagtaatacatctgaaaattctgaatcagtaattctgcgattacatctggtaactaaaccgtggctgatcagcttgtaaacttcactgaatcgtaatatacagaaaatttgtttaccgcccatgttgcattgactaccctttagtttttattggcaggtttttcttctgtgccttttaggaggctgtagcat

SEQ ID NO: 3750 - DNA, 3204 bp, Glycine max
  Intron number 3 from transcript Glyma02g13250.2 (locus Gly ma02g13250) derived from phytozome v7.0 (chr-ID Gm02; pos 11515460 to 11518663)
gccttttgtccaaggttgtgcccgcaattcatagatatcgggtttctcatttctttatcctgtttatgtgaagaatgatttgttctaagaataatttggaggaaagtgatatacttatagtttttgagcattaatctgttcttttctaatttaccttctcatggctttggtttcttctggtcttgccagttgactttgaaaattgaatagatgtttcaattttgagcttatataaagaagcttcttatataggctcaaaattgaccctttatagttcacagaattaggaggcatacatagtttactacaaatttcttcttcatcctcttttctttactttttcaaggtgtaggataggggcacagggttatataccaaagaccacataagtttgaattctcaaaaggatgctgtccataacttgtctttagtagaggaaaggattatgctgaaacttgaagggttatggtacttgacctgcaagattgtaatggtagatattcaatatttatacaacgagacagtttgatgggagtataatgatcattctttatgaacaaaataaaggagtctttcctgaatattctgtgtgtatagtgtataggtgagtgctgttgttttctgaatttactttacaccttaaattcttcatctaaagtgtataggagtgagattttttttcctgataaggattgactatgataacagctggtgctgataagcacatgatagctgacaaaccttactggcctccaaagggatccaggagattacttgcacctcaacttattgtttagtggtggcgagttgagttatggggtgtgccaactgccaagatgaatggatgtctgataactggattccaaatttcactgttgtggttccaagctgaaagcaggagggttatattaagattcaccagttagttggcttgaaaggccattggggttgagatataacatagcggtctgacgtgaagcaaatgtgtaaaattccagtggcatgtgcctccaattcttccaatttacttccatgtattgcaagttggttgtcaggtttgcttgaaggttgtagcattaataactacaataatccaataccgtgtaagcttcctaaagcggagaggataatctcatttagatgactcctggacattttagcttgttgcgtagttaacggatcatgtgtcaaatttgcaaatcatgttgattctaagaaaagcctcaatcagacaattcagtccagcctgaacatcagttgaatgaccttacactctgaaaccaattagatacatctttctgcatgtaggtataaagaccagcctgaaaagatacagaaaaattaatgtgaagtataagcttttctagtaagattaagttgagtagagacattaaaaagaaacagtttttttttttttttctgtatgctcagctttggcatgatatgaagagtgaaactgctgaaagagacaaactatcttagaaggccttattatctttatgttttagtaatgatttcttaatgacagttttattaatgccagctagattagttttaaagtaacagcaatatgttttgaaataactccagagcactgttcattgcacaatgaagattcatacagtatagcaagtatatagtgtgctatcaggttgctacgcaaaacacatcttgatctatatgtctatttcccatgattcagctgtattttatgaatgggtattaaataatgatgtctgcactctgtttggctatctacttttgtctcatttggttaatcccttaattaattatgtacattggtaattagtattctcacaatattgtagtattcccacaatttgtatttcccatgatacattgctttgtctcaaagagtccaagtatgattaattacagtagaaactagaatgtgattatcagacacggaaaatggatgtgttattaaattgaatttatgtctatatttctagttgattacctttaaaattagtcctattgttgtgaattttatgcttgctgtgtgctctaaattggctgaaatttattttgtggcctaatttctacttttctgccatctgcaatcccccttgaattgagatgcatgctgtcttctagccttcttggaatcatattccactttgaattaaaagtttccaagcattaatgaaattttagtcaaatacaaggcatcccttgatggtcataaagtacagaggtacaagggatagtggtgggaagagggagttctcaacatattagatagtatcccttcaagctgattatgtaatatgtatgtactgtgtcataaatgctttcagcatgcaagaaaattgtacttttattacaggttaaatagcaatataagatgcattacaatatcccaggggtgcacaacttgcttttcacgtatttatcccaacagttgcagcttgtaaatgaatacaggaaaaaggtgtggttcaactgggatgttgtaaaactttcttttttttttgtttcttaagctagatgattgggttgttctttatgctctacgtttcgtataattggcttttggttgaatgatcaatatactttgtatctgaagaattcaaataattctgcatagtaggatctgtaacattcaatattcctccgaattcatgtttatggcttcaccattatcttctgtgcatgtttctaggctgattctgttctgaggtccataccattcagcttgtgtgtgttgttgtcctttgctgcagttgctgcaatgcctaggtgttaattaagaaagcaaaactgtcattaagaaagtaactttgtcagtgttttcctggttgttagaggtgcattttcttcatttcaggcaccgttttgtaaaccctgcattgcatttttatccttctattaaatacatgttatgatggtggataaattgcttagcaggggaaaaagagatgattcaggatttcttgctttttatttaaatattgagttcaacaaatgcaatatgggagcctctgatataaatgttttgctttaatgtgtaaaaataattctccctttttatctctccatgtctgtcttttaatattccatgagattacttaatattcaatcataatcttctgctaatatgcttgttgcattagcaggtgcctattgtccctagtcatgtgcattcgattaacgattccgtgtcagcagaagaagctgccg

SEQ ID NO: 3751 - DNA, 5872 bp, Glycine max
  Intron number 4 from transcript Glyma20g03000.1 (locus Gly ma20g03000) derived from phytozome v7.0 (chr-ID Gm20; pos 2691865 to 2697736 reverse strand)
ggaagatctttccaggcagcggatgtaagtatctgcttattatatgtccttttgtagtctattaaccttttacaacctcatcaatctgtatttagtttgtctagaacctcatatagtcatttactctgatcacatatttgcaagaaactagatttacaacagtttacaaagaacttcatccaggtaagtgttataaagaatggtgctattagagtatataaatgtataactgttcaaacagtttagtcagagctgttagcctttgctaacagcagctcgtacttagtgagtgtacagctattgacagctgtactactcttagttgagaaagctataaatatctgctttgtaactaactttttgctgtgattaatgaaatgagattcattcattctgttaaacaaatcctctctctcatcttatctaagatggtatctagagccaattttttgaagtttttctctcttcgaaagttctaggtcttctcctcaaagctactctacaattcaaactacttccattggtggaaacatgttgagcctatgatcaagtcgcacaagctgcaacggtttgtggtgaatctggttgttccgctgcgatacctcaccgaagaagattgtgaagctgatcacatcaatcctgcatatgaagcgtgggaagttcatgaccaaacactccttatttggctccaatccacactttcgaagtctgttctgtcacccgtgcttggattgaatcactcctataaggtttgggtgaagattcacgagtacttcagtgcttagacgaagtctcgtgtgcgtcaattgtgaactgcgatgcacgtagttttgcttgaaggaaaaactattgatgaatatctgtgcaagatcaaaggttttgttgatgagctcgccagtattggagtgtcggtttgtcacgaggagtatgttgatgcgcttcttgaaggacttctgtccgattatgcactggtgatctctgttattgaaagcaagaagcgcatgccttccattgctgaaattgaggcattactctacggtcatgagactcgccttgttcgttacaacaaggaaactcagggacttagctctgcttcattgaactatactcagggatatttgaaccctaattcgtacaattctgggttcttgcggtttgtatggccgtgacggtggtaatcttggtggtttcactaaccgcggcggtgttagtggtggtggctccggcagaggttgcagtggtggcagatttgccaattttcagtgccagatttgtcttaagtatggtcataccgtgaatttttgccactttcggtcttgacatgagttatcaacctcatgaatccctcaccttctttgatccaactacacttcaacctattccctactcctctggttctgtcagaacctcttaacacttggattaatcccaattccaagtttggaaatgctgctccagcctctacacagccaagtgccaagcataactaattccagctctcatggcaatgctaacaacacctggattccagattctggtgccagtttccatgtcactggtgaacctcagaatatcaaacagtttagtcactttgatggactggatcagattttgataggaaattgtgaaggtttaagtatttctgctgctggttcctcttcctttgtgtctcagattttgataggaaatggtgaaggtttaagcatttctgctgctggttcctcttcctttgtgtctcctaatgactctcaaattaccattaaacttcagaaattattgcatgttccttccataacaaaatttaatgagtgttagccaatttgctaaagataattcagttttctttgagtttcatcctcacatgtgtcttgttaaatctcaggggaccaatagagtccttcttcagggagttgttggtgctgatggtctttattccttttgcaatctcaagcttcaagaccattcatctgtgttgttgtcttccttggatcctcttgttaactcagccacagatagttccttgcctggtgtagttgatactgctgcaaataaagcctccaatgtagtttcaaattctgtacttttgccaccgagcaatgtaagttggtggcatgctaggttgggtcatcctattagtcatgtcatgaagctagtcttcaaccattgtaatatttcttcatctaatataattgtttcagacttttgttcatcctgttgtatgggcaaatctcatagattgccttctcactcttctacttctatatactctcctttggaacttgtttttatagacttgtggggaccttctcatttaacttcctatgctggttttaaatactgtgtctttcattgatgccttttctagatactctcctttggaacttgtttttatagacttgttgagaccttatcatgcacacaaacttgactttagatctcaagaatgtttgttcttagggtactcctcttcccacaaagtttacaagtgtccgtcttccactggcagaatttacatttctaaagatgtcttgttcattgaacataggtttccctattctgacctatttccttcctcacctaacacaataaagattcttgactcttatttcagtcttagtccaaatctgtccccaccatcagttagtcatacccctcaaccatcccaacattcttcttcctgcacctagtgttccccctggtttttctcccattcctgtcaactctcctgctgtatcacattctgtttctcaacattctgagccctcaaagctcccatcctcaactctgagttaaatctcaggagacgggtgtaatgtttttattaatttttattgtcttttatataacttaaacaattgtcagttttgagattttattttagtgtagatatttttatggtaaatatagtaagattaggagggtcctattaagatacttacagaggaataactgtcatcccaattttatttcgtctataaaagatccagttatgtatatagtataaaaaacaacatatattttcagttataattgtgtcctggttattctgggtttctacctagagggccccaggttgcatctttaagaagatttcttaggctcattagttgatttgggataaggttaggtgattgacctctacatggtgtaaagcacatggtctttttaaagagtagttttactttcattgatgttttgtttgattgtagttatttttaaggttccattcttagaattttcgtgggcccaaataataggaatatttcaaagtagatctcattgcttttttgtcctcctctttatttgattatattgttataattttatattggtaattctctctggaagagattaaggctctgcctaaggtggaaaattttgtttggtctattgaacttaatctgattaaatgaatgatctgttatagataggaaggatatttaaagatctagcatgcaacatgttgcaattgaaatactgaatgtcaacttttcatctctggcaacagtaggttcctggtggagaacgactttcgttattcctctgtcaagaataagaataacccaagctctaataccatgtaacaatgttatttactgtgtaatgttgtgtgtcaatgtagatcacatctcatgctatttataatatggaaaagggaatcagtattgattacaagatcaatcaattactgattaatagggaataaaatattttaataataaatacaatatcaggaataatatcaaaacatagtctcacaatttcaaagttcataaataattagcttattacaacatcctcacaaactgatcaaaggcattccttgtagatcattccatccatatcttaatttcaaggctggttgcagctactttttttactctttgttcctataacacaaagttgtctttataaaatatcttgtacagttttgtgtatgaatacagtcaattagtgctcctacagtcctactattttaggagaaaattacaagtgtaacagtgattgtaaataataccaccctagtgtaatataccttgtgtggtctgttatatacacaattccaatgtactctttgttttctagtatcaaaatcaagttggtagctgagtgaatttcaatccatctctcctctgaccctaacttccaaatccgttaggatctctccctgcgatacctcagttctagaagttcctttcttatagtgtctcaattttagcaatgttttttgctgttgtcttaattcatagttgtatttgatgtcccagtctgtctaaactgtttttttttttccttatgaatttcagtctgcctaaacttgacaaatggttcctcacctatccactctacttttttgaagtcttgtcaaaaaaggaaagtgcttttgtgtccttttctcctatcttctaatttattgagctgactacacacctcaactgagttgtgtcaattataggtttgtgtctcagtagtaatctttattgacaattattcctgttgcccttggatatttttcatcaataatcattcttaattatttttaaaatttaaaaagaattatatgctgaaattagtacttaatgctgtacaacttttcctattttttcatagtgacaatgtaaaaaaaaataatatttgtactcctttttatgaattcatgaccaaactttggatcttatagacaaaatggagttgctcaacataaaagatttagtttttactcttgcttgtgaatgttccattttgtgtttggttgatggtattaaatcttattatttaattagctgcatgccctctaattggatcaatttcccagatctattttgtttcccgattctaatgtatattcttcatcactttatatttttctctttactagtcttcataatattattccaagtaaaggtatgttcactgtcaaggctttcaactgtctttcctggaatactatcttcttcagcaaaggttttgtcctacggctatctttgcttctccactttttattacttttcaatgatgacccgtctccggatgttccaatttctcaccaccttcacatgtagcaccagttaacccaacccaaacaacttacaggctggtttgggaaattgaataggtttggtttctttttactcaacctgacctcagttggttagtttttttttgtgttctcatgtttcaaatccgaagaagccaccccgaaccattgtgtagatatctttgtaaacaagatttcattttccactttcactatccactttgactgtagccatttatgcttgttgctctcttctttatccttcctcatctgcttctcccttttcagccttcttccccgtctctaagttttgagtttagggattcatctccaatttcaatttcttctatctctctattgtaaataagtttttcattttatgcatatcatgtgcttttgtttccccaaccaaggataatttatttgcaattctttccaaggaaagaaaatatttttttcgattcattcgagcctctctagtattattttctggtactgcatatattttttctccacacaaatacagtttcaattgaattagctcattgtccataatatttttgtttcttactgcaaagataggaggcgatgtttaaattttcttcgttgtttgcttgagtttattttatgtttctcattttgatgtctactcctgatccaccaaaatcaaactatctattggatgtttaaattcgttattttgaatatgatctggttatctttcaaatcctcatcatcttgtatatatatgttaatcttttacttgttttcccattggtgagtggggacatgtcctggtcacttctaatatgattaggtccttgcaggaagaga

SEQ ID NO: 3752 - DNA, 1206 bp, Glycine max
  Intron number 1 from transcript Glyma18g08270.1 (locus Gly ma18g08270) derived from phytozome v7.0 (chr-ID Gm18; pos 7045544 to 7046749 reverse strand)
aagaatcaaggtacccctatgctattcatttcaacaacttccatttccgtcttttgtcattagcaattggtagttacaatttatagggtactcattatgtgaatgtgctgaaaagttagaacattggttagagcctagtagaaattagaaaatgttgacaccattgtttttttggccgaatacaaacaacttcaagacagaagaatcttctgccataaaaaaaatctaataattgtagtgttgaactttaatttgttattttagtatttcaacaagaaactatggaattgctaaagatgggttttttattttttgatttgattttattttttcctgagggagagccctataattgtagtgggcctatgggagtgcacatggtgcacatggggaaacaagagaggaatgagagctggaaaaggggtcagagcattgatgaagatttaactcctgtagttttaataatgtcccacaagtttcatcacataaagttaggacatgaagacaaaaatatcattttaactttttaattataaaataatcataatttcatagtaaaagaaagggaatgaaaaagtaacttaattttttcgctgaaaaaattggttgaagcaggaaacaaacaaaagataattaggccaggccaccacaaatcataagtttattgattagcccaattattatatgaattcggctgacctaacttaacttctatggggtcaataataaggcaccactcctaacgtctgatacctttcattcaaagaaaaatgttaacacatttttaacacactattttaatatacattttgttgttagagtttaataggaaacgtctcaatataaaagtttttatactattgactactcagaaatgcataacttttaaaataataattattaaaattaataaatttattatatatgataaattgatattgaatggtaatgtacaaatattttcatatcgtttgatcatatatgattttattttgtgattaagtaaaattcatgtaggatttattatcaaatattaaagaatattgaaaataatatatttaataacaaaaatcctctttggtacgagttttttttttttgcacaaattacgcttgaaaaattttcttgttgcaaatttgaagaaaaagaaaagtaagttaacttagtcccatgcagtgtgtacaggagctcacatttgatagacaa

SEQ ID NO: 3753 - DNA, 1331 bp, Glycine max
  Intron number 1 from transcript Glyma17g15520.1 (locus Gly ma17g15520) derived from phytozome v7.0 (chr-ID Gm17; pos 12258094 to 12259424 reverse strand)
atttcagccattttcttgacacctatatattgcttgtttctatgaaaggtaccatctacttcactaaattcttcatttagttatgtgcctttggctacaacgctgatcatgtataaatggtctcctttctgattctgaatcaaagttactttaatttcgtccaattcaaattaacttttaatttatgaggaattttcacctaaaataagtatttgattcccaaaaaatctttataagtttaactattgatgtttatcaagaatttaaatgtaaaaactactgaaaaaaattaagatgttgaagttattttaaggtttaattattctacggttttatacttttactagatttcaattaggtagttgaacttctttcatttaattgggtttttgaacttttctttttaactagatttttctgtttaattgcccttatgaaaacctaattaaaacacctaattaaaagtataaacaatagactgatacttttgtaatgtgttatagtacaacttaatcaattataatatatttttgtagaatttcaatctctataaaccaattcaactttctcagttgtttaactttacggaaaacttttaataaaaaatcaaggattcaattaagaaaaaactaaagaaattaattgaaaatccatccaatccgagaaatattttgaacacctgtcgagtattttcaggaactcaaaagtgagtagatgatcaagtttaaaaattaaaatgataataaattattaaattcaaatcaaattgaaaattaactttttatcacataataattatgaagatgaccagtgacaatcacatgcatattacattatcattcaaagtgtcatgtaggtaaaattgtttgaattaatagaaaaaaactaacgatataactaatttgttacattttttataaatttaaaaataaaattttagttttttatcttttaaaaacctaaatattaatagccaacaaattcaatgatgaaaaatgatatttattctttagtatctctagaatgtagaaaagatattagatggtcattttgtggggtaggtactctataatctatacatttgctagctttaattgaaaagaaatattagtaagaagtttcttaatattttctttctgatattttttattagataaaagttgtgttagttttatcagataaatacgtgaactttatttttatatagtaatttttatttttaaattaatgaaactcacatgaataaagtatttgacatcgtactatagcaccctacttgttttgtttcattttcagggtaacactcactcaatccctgtaccttattggac

SEQ ID NO: 3754 - DNA, 1277 bp, Glycine max
  Intron number 5 from transcript Glyma19g00530.1 (locus Gly ma19g00530) derived from phytozome v7.0 (chr-ID Gm19; pos 303958 to 305234)
gggaacaaaattgactttgctggagctcaggtgaggaatcttttattcaaaataagtgcttgtgttgcattatctaccaggcagatataggataccgagcaataaagtgcttgacttgtgtaattggtatctaactcctgaggtttaattttataaatttagattttcttggttgaaagtccaaagaatttaactcatgaatcatcaataacttaagaaatactttaatgtcaataatcaagggacactgctatttctgacttccctattgaattcaatgttccagttgcaatatactgaacacaaaaaatatcaaatccatagtttcataacatcatatttagttgtgttttagtgatggttactgctttgagtagtagagtggggtttctcgttagaatcctcatcaggaaatgtgggttgaccgaatcagttatgtgctgagtcccttgagggtttaccttagatgaaagggacccatgggaaagacgaaggagagttggttacgtgaattgggagagggagtgacggaaagtagtgggaaagggtagttatagagggagagtgagtgtagtagaaggggagagatctgatatttcttggatagttcatctgttttggcctggaattaagagatttgtgcattttactttgttttttttgtagaaatcttgtgtaattggagattctctactttataaataaaagttgcatttcagttttctgtgtgacaatttccaccatttcttggggtccaataaggtttgcattggtttttggatagattttgtcaacttcacttaatcttcttcagattacttttacatttttttattagtatatagacactactgtggaatataaaaatatactgtgaggaagttcaagcaaattgttaattagaaattcaccatctactgtttcatttggggaggggggtggggactatgtatagttttactgatatacaatggcatttgcaagaatatgttgtcttgagtagttagaacattagcctgatctatcaaattcgaagtggtatttcttagttttaactatttgcactacaatcatgggttggcaccttgtcaaccacaaacatttttgacagcatacatagttatttgatttctatgatttgacagatcaagaaacttattgaactattttgtctattttgaggcttttttttcataaatgtaatatttttatcaataaagtaacctcatctttcttttgtaggtggaaatcaagaaggctgaaccaaagaagccaaa

SEQ ID NO: 3755 - DNA, 4171 bp, Glycine max
  Intron number 3 from transcript Glyma03g22210.2 (locus Gly ma03g22210) derived from phytozome v7.0 (chr-ID Gm03; pos 28225272 to 28229442 reverse strand)
attctcggaaggcaattcagttggacagcaattcagttaaggtttttgtgaccaatctccttgtgattttgtagttccttttgtggtatgcgttggctaataatttagcttctaagattggtttgagtataggcgcagtgtgaccaatctccttaagattggtttaagatgtgggatttccttttgtcttttgaattgactgtgctgcacgtgggataggccagatcaggctttgaaagacctgagcctagcctacgatgactcacacctaaattgtaattaaagtcttacttgattataggaatagaagttatggagcagtaacgtgtaatcaagtatgatagtttaaaaaaaaaaattaattgtatccaaaaaataatattatatattggtacccaaaaaataatatatatatatatatatataggccggacctaaccttttaattaaataggccagttcagactagactttatgtaaatcaggtcgtaggcccctgtaggccggcctgacctattctcacccctagctgcacgtttagttgtctttggcttgggatagatgtatttgtgcttggtggtttgtcgcttgcgaaacttcatgatggccatagattcttgaaatatgaactgtgaaacctggattctcaaaaaatggcaaatattggtgccagactcatatttgacagcaatacacgtgtgatagtattttccatatttttgaacttttatagtttgatgcaattgggatatgactttgatactttgagtgtcttttcttctgtgtactgtccttaaagatatagtgaatggcagacaattatccttaaaggaaaatgacaaagtttggtgctggacgcatatttgatggaaatatgcacacgctagtattttccatttctttttttttcctgaacttttattgattggtgcatttgggacatgactttgatagtttgttcatttgaatgccttttcctttgtatttaaagctatagtatatgttagacaattgtatagagttcaggcttcttttgaatagatgtatttgtgcttggtgatccatggcttatagaacttcgtgatggccattgatgtgaactatgaagctcagaaactaagaaaatggcaaagattggtgccggatgcatgtttgataccaatatgtgcatgatagtgttttccttgtttttggttgaacttatattgatcgatgcatttgggatatgacattgattctatgaattccgtttcatctgtatccttaaagctatagtaaaaggtagacattatatagaggccagtcttcttgtgataggattagtggcacctttttattgactttagttggggaaaaatatgtaattttttgtaacatcttcacaggggaaatgatttattctgatagggcaagaaaaagaaagttatataactagggattttttatatgcttgcgatttttttgtgtgtgattatcatccattgatgtgattatgttttattgagaaattatcaatgtctttgtacaaatatattgtgcatttatataaaatatgtttatttgatttatagtaatgtatttaagctgtataatatcttgaatttttaagaatttcctgaatccatgttgcattgtacttcacttgttagttattgaccaagggggtctaactcagttggttgagcagggtgcgtgagttattgtaaactccttagtatctatcttcgtttcctacgggtaaaagaaaacttagttattaagtattggggcttcagtagttctttgcgaaaatattgacagcacaattttagtgttctgatatgtgttgcatttctaactgaggggatagactcataccatacaaatccttttatttcaaatcttttccatgctacccaaaatttaagcaatttccttgggtgtattggccttggcttttaaatcaattccagaattctactattccgcatttcctaatacttctcaaagtgaaacctgcatgtcttgtgatagttgcctattgcaataggatctgttccattatgaaaaacttttttgggaaatctgtagtgatcctttttcagtggttggattgtgtaaaacaattgctaggttttgtatctcaagggttacttatgtacttggtagaggtaaaatatcaatgaaattaggtgccattttaaatgacaactaatgtgttttacttaaattcttgtttattaataaatggaaaaacctccattagtcaatttcaacactaacccaaatttattaaaggttttagaagttggcctagtttttaaaccaagtaatttttctataataaaattcttggctagtctggtctttatctttctggtgttcttttcagtatttcaagaattattgtcagggtttggaatatgagtttgtaagggttgtgatatcctagatgtgaaatagtttgaggaaaataataagagaaagaaattggaaggataaaactagaagagaaattgttaatatttttatattaattaaaaaattaaattaactttttactatattatttttaatttgaaatttattattttttaatgctacaaatttttaatttgatttaaagccaaaaaaaaaaaaaaaattgacttccatcccccactttctcccttatttatgggaatgttttttttttctcccaacctttttcccttattgtaaaatgtgtcatgcttttcatgtgatatgtaagatgctctaaaccaattttttttattagtgatgcaatgagagtgagatgtgtttctaaactgtttaaataaagacttgaaagaaaagaattaatctgaattgttttaatagagagattacatatggtatttataaacttcacctcacctaatcaagcaaataaaagggaagaaataatattgtacaaatcaaatcacatcaattctgctttattttaagaaatgaaaatcaaactagttataggaacaaatcttcagcttaattacaagaataaattaaatttttaggatttcatttcaaggtcagaagcgaaggtagtgatggaacaggcctcgaaggatagtaccgctctaataccatgtttaaagaaagactggaaagaaaagatctgaattgtgtttttaacttgtatttaccgagagattgcatatagtatttatagactttatctcacctaatcaagtaaatagaagggaataaataattattatacaaatcaaatcaaattagatcatatcacataaaatctgcccattctaagaaataaaaacctgcctaattatacggataaatcttcagcctagatatagaaataaattaagttttcttgattacatttcagcataaactatatcaatcttgaatagtggtctggagtggacaccactaaaatttctgtagcaggatgactgctatcgtaaataccatatggtacaaggcaaataatttatcataaatgctgaaaaataaaaaataattcacaaaaagagtcatattcataattaataaacgcaataggcaataacaacaaaaattctattaagttcaagcttcttagtggatgatgccatgaggccatgattgagtaggactggtcaatgaaattaaaaaacaaggccaaatcagaacagtgcacaaaggtagcaaagaggctgagcacttaaatagatagaggtggaacaaaaaaaaggatgatcaactgctagaggaaggacatggacatttcttttacagttctactcgaaagacatatgttggaactgtcatcttttttggtggggaaatggtctacctagtattcaagtgtactgaatgtgtatcagtacctggtacagatgtgtttgataaaatggagtgtgtgtacacatgtgtgcatcattgtttttgggttaattcgggaagcagtttcttattaacttccatccagggatatttaccgtgtattggtttgtggtagagctgtatagtattctgtaaaaccatgttattggtggaagttgttggcagcttcactttatatctgatatatgttgcgtattgatcatttattgttttcattattaatccatgttctttgtgttgattgtcttgtttccagctgagttttctttttgtatacatttcaggcccactatatattggggctcgcattgcttcagag

SEQ ID NO: 3756 - DNA, 1215 bp, Glycine max
  Intron number 6 from transcript Glyma03g41690.1 (locus Gly ma03g41690) derived from phytozome v7.0 (chr-ID Gm03; pos 47089622 to 47090836 reverse strand)
tatataagggctggcttccttcagtcattggagttgtgagtaacgtttctagaaattcattttaggaagttgatgattatggtcataatcataaggactggtataaaaaattataagattatgctttcactattggctttttgggaaattcatattgcatctggtagtaacaatgtaggacctgtaggctgcagttgggggagggggagaacctatacagcactaaagatttcaaatttgtcgagtgctagacaatgtctaccctccttaggggacaatttaataggattgctttctaaggctgcttatagatgtggggtatattggtaaggatgtgtgactaaatttttaatgagttattcctgattattatctgtagatagatagcgtctattcagtaagttgtgcagaacataggatccacatgggactgtaggattgatcataagactgcacctaaaactcgcatgttcagttttattgagttatacattttctatttaactatattttgtgataattgttcttctacttgttaaatgcttcatagaacaatttcttcacataaagacttatcattcttcaatgctcttgacacacttcatagtgaactctaataattagttctactgggttctgttgacaaggttttacctggttatggtaggttctaggtggaaaatagctaggtgcagaaacagtagacagtaaaatctcagtcatgcttcagtaaagtgctcaagtcttgttacaaatccagaaaagaattggggcaaaagaaaagaaagactttattgatagaatgaaaatgaacagaaaaaaggagaaatctcttctctaagggttccaccttcacaaaggatctctcctttcacaaagagcaaaagctcaatttacaaataaaatcggacgaatcgaatacccctccctcactcctatttaattatatcactaactaactccctctaactaagtaactattggctaatgtcccagcagtactaatttactacctcttccctctcccaactcctaaaagtttatagagatgtgaacagaaactcttcttaaatattctgtgttctttttaattatatttaacggactaaagttcgctctaattttgagtggaaaccctctttttgggtgctgtcatcagacttattgacttaatattctcttactctttattgtttgctgtttttcagattcctt

SEQ ID NO: 3757 - DNA, 1883 bp, Glycine max
  Intron number 4 from transcript Glyma14g00270.1 (locus Gly ma14g00270) derived from phytozome v7.0 (chr-ID Gm14; pos 58657 to 60539 reverse strand)
gcctggtactattctttccattttggctatatggtttttaccattttgtattttatgattggcatggtcagtttttcttctctgagatgggggatcaattatatctttccaagatgactatcatgggtctacaaagagccatttccaagaggaactctctttcctgtgtgtacctaatcatgagtttttaatatttcagaattttgattctagatagggaccataaggtttgctaactagtttgatgttaaagccctgtctcttcagttttttcatgttatcttaggagaatctctcagacatctgtcctgtaatctattctccagttctccattctctgtaagtaaaattcttttgttaaatatctgattaaaagaaggatgccatgggcacaataaatgtcaaatgcataggttggcattttagtttatcaatgtattaagtaaaatgaaagaaggaagagaaatgaaaggtacttctcttgcttgggagtttttttcagtaaataaaagataagtagtctacctctaacaaattttcaattccctgagagtggaggataggtccattccttgtgtttcaataatgctactttgtaaacatccaatcaagtgaaaggaaagtaatttttgtatctttttatttctttttttttcttttgctgatattcattgcattttattttattttttacatttcaagggtgtttggtttattctctgttttattttcacttgatatgttttcactaacaatttcaaagacgctactttcttttcatttggtttcctattttcaagattttgtgaaggaaatggtgtaatggaaaacaaaccttacagcctctagatttccaaacaaagcagtaccgtctattcaaactttactctggtgaaatcataaaacttattttgtgttcaattagctggaatgaatttacataattcttacaaatagcattatccattgcatttccaattatcaatagtcatggtatataatgatatggtttcagtttgttggtttcagaactgtcatctattaacattgttgagatctcacattgactagagatatgaccaatatattccttataagctttggacaatcctccctgtagaagctggttttgtggggttgattagaagtcttgagcccaaattctaaagatgatatcagagtctatcctagatttgttattgggttccctgtatttgtgtatgctctagatgtctattcctaggcatgaggcgttgttgttattgggccacctgcattatctatgctccaaatgtctagtcctaggcttgacaaggtgtgatgagatcccacatcgactaaagatataatcaatgtagtccttataagccatgggcagtcttctccttacaagttggttttgtggggtttagttaggtcctattgtcctaatctcaaactctaaaacaaaatgaaggcaataactatcaatttgaaattctgaaggaccgtatagtgtaagaaaatgattccttttatgagacaatgaagatatgcttttggataattgaagggatgagaactgctatagcccaaaaatgagcttgaccttgcaattacgctttgcttcttgcttctccatgtagcaagtttccacccaagaacatacaatatcctgaagtggaccttctatctataatggaccttgcataatctacattagtgtataactccatagtgagtctctctcttctttaacagaccagagcagccttcttgggattcctttcagatactgaagaatttattcactgcctacaaatgtctcatgttgataatgcataaatttgcgaactacgcttagtgcatagatgaccatattgaagttccttttgcaggttgga

SEQ ID NO: 3758 - DNA, 783 bp, Glycine max
  Intron number 4 from transcript Glyma05g21280.1 (locus Gly ma05g21280) derived from phytozome v7.0 (chr-ID Gm05; pos 25866955 to 25867737 reverse strand)
ggaggataatcgtggaggtatgttgaactgtaaatttcaacaatttttgcatattctactaaatttaaaagttttgcatttatattgacattggaaatgtggtaataatattggtagtatgacaacagaaaaggcaatggcaacaataatagctggggctgggtggtgatggatatattaggatgaatttggtgactgctcatgatggtgatggatgatacaatttagagaacaaggtcaaattagtggtgttaatgggtgcgaagcaatagtaataatatggtggcagtggctgcaattgtataattaatcttatcacacttttgattattggttgttttagtatattttattttaggagtatgaccgtaaactgctagttctgaggttggtaggagtgattgtgatgatgctcaagttggtggagttattaataggtagttagtgagagttgctgtatgtttcagatgtaaataaatatctattatatttttggtgattaattgcaagtttcacacgacattaaccatacctaggcttgggaatttcattttcattgatgaagattgaaaaatagagcaatgagtcaggttcatatgtatgggcttactagagattgtgatgctaggttgctattgctagtttgtcttgttcaacacttaagcttgtttctgattaggtgcttgtcttgttaaaagtgtgattttgttggaaacttgccatataataaaaaattaattgattgcaggtaaccaaaacttggaaggaatcaactctcagcag

SEQ ID NO: 3759 - DNA, 1882 bp, Glycine max
  Intron number 11 from transcript Glyma03g03250.1 (locus Gl yma03g03250) derived from phytozome v7.0 (chr-ID Gm03; pos 3022549 to 3024430 reverse strand)
cccacctcctcggctctgtactgatagtaatcatatattcttacctttgcttttagtagtgaaggcaaactctatcaataccgtgcttctttgcaaacttgacagtccaatgtcagaacaagtgagggttgtattagacaaccaatataaaaaaaattgccaatcttttattacatcatatggcttgagtgcagtgttaacttcgctacaacagctatatcggtactaggatatattgcaaaattggcaagtgatgtcactttttctggacacatgtggataaagaagtttgtccacaagaataagattgatgattgaaatattgaaatgctaacagttaaatatatggaagtagttgactgtattatcagaaggagtatttacccagtgtgtcatctagcaaccaagtgggttggagaaaaggctgaagagttggtctattagacacttcaagatttaaataagttaatccaagcacataaaaaaagaaccagtaacgtggctttctaacactccccctcatgctgaaggataccatgttagaatgtgagttttgacctaattgaccaaaaaaactgacttgtaaggtgaggattaattcccacttttatactttatctcgagtcaatgtgggacttcaacacgcccctctttgcccatggctacctgccacaactaaggtgagataggggtgaattaaggtggctttctaacaataatgaaatagttccttcttattgatagggtacaaaaatttacatgaatatagtgtcttgtggttgggctgttttaatgttagtttttacattttacctttcccactcaatatgaggaagaagtggactttaggggctctatggtactaattaagggatcaaaacgtatcaggttatttagaaatcacattttcccttgagaaggaaacaggtgccaatcaaacttgcactggttctgaaatttcatttacccatatgttagggcattgacaagattttcttgtatagatgaaatgtaatgctcgtcctttttctcacattcattctccttgatgctcttcatgaagataaagaaaaagaaattctccatttctcagttgtaataggcttccaaccagggccaaccttctcaggagaaatattcacatccaggacaccctatgccctctttgtgaatctcatcaggaggaggctgggcatttgtttttccactgcaagatgacaagaggaatgtggggggaatccatgaaatggatccgggctattggtgctctctcagctgatccggccagtcattttatccaattctgtaatggttttggtgcagggagtaggtacagcagggtgtgtgggtggtggatagccttaactcttaccatttggcgacacaggaattctttgcttttcaaggggaccccttttgatcctcatagagtgatggatgaggctctattccttgcctggtcttggttaaaagctagagtcaaaggtttcaccacccattttaatcactggtctaccaatctacaggaggcttttggttaattttgttttccttcttgttaggggactgctgggttttatgtttgttgggttttgcttttggaaggtggcaccataggtgccttgtattactttattaagtacctctggtactgattacttaatttaataatactatttttgccttccaaaaaaaaaaaaaaaaaaaaaaatatctcaattctctcatttgtagatcttttcgcaatccaaattagttgttgaatgaattttcatttcgtttatctatctttcttgatccattgtttaaaataccagattaggatggtactattttttatgcaacatatcttattagcttgcttttgaactgaataggtgta

SEQ ID NO: 3760 - DNA, 4861 bp, Glycine max
  Intron number 2 from transcript Glyma04g42660.1 (locus Gly ma04g42660) derived from phytozome v7.0 (chr-ID Gm04; pos 48350446 to 48355306)
ccaagattttgaaaactcgagagcatttattaaaggtttgttcttcttcccttatcttattcaacaaagtattccactatttcgtagaattaatttgggacagttcctctatcatactttacattttaatttcttaatcagccacaattaacacttaagaatttttatttataattacataaatttaattatttgttcaattttctgagtaagaaaacttatatactttagcttaattacaaggccatgaaatctatgaaatttgactgtaatctcttcaattattgaattacgggaaggaatagaagctacttcacacattatgtttaccgtttttttacattgataaataggaacagagagagacagaggattcacttccttttccaagcacggcgcctctttatagtggcataacttttatttttatgaatatggcataacttatttgagacgacactttggccaaaaagtcaagtccgttacacttcctttgcctctttagtagtaaatctcaacaattctattgcccttttctgcggaacacacaaaatctattactttccgcggcttaagatatattgccgctatcagttaatgtctcccccaaggacagacaattgaaaggtttaatcttatgaactcaattggtggaccatttaaacttgaatctgaaaaaaatggccttctttttgtttttaatttggttccttttaaaaaaaaccctcaatgttttacaaattttctttcattttgttttcctttctcccctctctcaatttatgaaatgtcaagatttttaaggtgtgttcacgtgtttttatcaacttggcgtacctgtgtgtttgtaatatgtgttcaaacacacactaacgtggtgttttttatttatttattaattagttattttaagaatttactttttttgaactgttacaacaaaaaatttacattatcaagccatcataagtcattttaaatatggctttgagtttaagtgaggtataacgttacccgatctacccaattacacacacacagttgcatgtttaattattttaaaaatatatatgtattgaagaaataatgcaggatgtatttttttaatattttgttgataaatctgattaccaaacttaatttaattcatttttttcattaaatttaattcattcttgattaagttgcttttattcaacttatgcattcaaaattatcttaacctaattcaatctattttgattggttgcgatatttctttgaaaacttgacccgacttgtgatttgtcttaatatttcgagtatgaaattgaccctcagccaaagttatgagtactcctcattcaaaaaataaagttttaacttttatgcactaatagtataattattttttacatgatcaaataattaaaaatgattttcgtaatcctatatgggccagttttccgccaatgccaaacacaaccgagattagatattatattttcatttctgatgaaaatgggtacggatttgatggtggttttaaggaaggagtgtgaatcttaacctttggtcgggtaagaaattaaagagaaaggtagataaaaataattagccgtgtttaaaagaaaagttaagatgaaaataattagatctgccatattatttttgacttattttcaccctttttttacacctctcttcatttttcttctaattctcttcaattaaatatatttaacttttacttattttcactcattatttttattttcatctattctatatcttttttctctatcaaacccaacctcattgaaatgctttatatgactatttttatttaaaaattctcaaatcttctgaagcaatgttcgatagttattgtgtgggatgtttttggtttagaagataaagttaaggaaatttctttaaattaaagtacactctaaaagatgtaagtcggaaaaaaaatacaaaattccaattcaaaaatattattttcatctcaaaaaacactgtctcattaatatatctggtactctttatgagcaaagtttgctttgccgtgaattgggccgagcacgttcttttaatagcgctagcctagggcatttatcagttcagacctagcctagggcctaggggtattaattcatatgccttttctacggttttagtatttgaagagaagagaagtcttagttatgcattaaaattaatcgcatgccattgccacttgccacttgtcacaagtataaagaggaagggaacaagttatttgattagaatcttccttttggtttattatattttactattattttattttaatattttatatttttaaaaattttattttaatctttcatatttttaaaatttttattttgatacattaagttttaaaagttttattttgattttttatatttttcaaaattttattttgatcttttatgttttaaaaaaaaattatttggtcatttcttctaatttttgttagtaaacacatgttagtgtgttgttaactttaaattttgaaatttgaattaattaatataaaatagtggcagttaaaaattattattatctttttaaaatgtatttaaccacttactttcttaatcttatgtcatcttttactacaaatttcataatcatcacaacataaacaatgtaataatagtgtactcaaatgtacaatatctcgatcaccgtagtcattatgaataagtgttatgtcataaatacgtcatgatttaacaccaacatagattagaaacattagatctcgatgacgatgaaaaaatttagatttgatgtcgcgataacaattttaggtctttcttcaattttatcatattattttaaattaattatttaaaaattaatagaataataacgttttattgaaaaaaatgagaagaaaagattaaaatgaatctttgaaaacataaaagttaaaaataaaaattttaaaattaaatatactaaaataaaacttttaaaatataaataatcaaaataaaacttttaaaattaaatataacaaaataaaaaatactaaaatttaataaatcaaaagtaacatttttattactatggtaggggccactggtagggggtaagccaacgaacgggtggggaatcttgtctacggtcgggtctaccatatccacatgcacatgcactatctttagaacttacacaaaacacacaaaaaggctaaagtttaagttgactgtcagatgagaggaatcttgctactactggcgagcgtagattgtcatttaagtaaaagttaatctttatttttcgtgtaacctaaaatcaataataccgtactcaaatacactagtattacattttcttaggtgtgtggatcatttcattcacaaatgataagcactattattaatatatttctatttgtaaatattgcttcaaatttattgagtttatttcttgattttatacattttctagtgtgttagaagagtgtgataataagtttattacaagtacttctctcaacaaaatgccaaaatctaagaaaagcaacaattatgtatttttatatatttgtataatatttttttcttttttaagttttctctttcttttttctttttatgatattatattacatcacttaccatttcttttaattatgtatttttatatatttgtataatatttttttcttttttaagttttctctttcttttttctttttatgatattatattacatcacttaccatttcttttatttttaattatctttttcttcttctacttctacactgcaaaaatgaccagtacaaaaatttttcatagtgagaaaatggaacttcctttcatttagacgcgggaagaaaacagtaaaaaaaagaagagtatgtgccgaagtcatgtaaaagtttttttttcgacgaaaataaaatagagaagagcaaaaaaataaataattgaaaagaaaaattcacttccccattgttatactaaaagtaaaatgatacatattcatttattatataatttcaattttttttcttttcacttttcttattaattaaagaaggaagatttttttttctttttatctaaataaaaaataaaaaataaaaaatttgaccttttttttttcttttcatttttatgtatccaaaacaagcagaagagttctctacacttctgttaactacagagttcattcttaatagagctgtggattaacgggcagtgactcaaacttaccataaccatctggtgaagagaaaaaacactggcagggaactccacattcttgttcttgtacaatattctaaatgcaatcttaagtgtctatctcattgagatgcggagactaatatatacgtagataatgagtttttatatagagttgttcaattataaatactgtttgaattgttttaaaataattatttgtcaataaatttatcattcatgatgaattataattcatgatgaattataattaatgaggataaaacttttttacactaaggtggataaccctttttctcttttagataaaacacaaaatttaacgtactaagtaaaaattttgaaaagttatagggtctaggaagatttgtcgtttaatactaaataaaataacaaatttatgaagactattgtgatttcaatttcaatgcaaataaacctgttgaccttgataagtttcattattgggaataatgggtttacacttgtcataaattgaactctacttatgtccaaccaggcttagtagtaatcttaacaagaacaatgtcttatgtctaataagtgataaccttgttttgtccataacagggaactgtaattctgttattccagccagcagagga

SEQ ID NO: 3761 - DNA, 1185 bp, Glycine max
  Intron number 5 from transcript Glyma05g04170.1 (locus Gly ma05g04170) derived from phytozome v7.0 (chr-ID Gm05; pos 3280546 to 3281730 reverse strand)
aggaaaacagtaaagaggtttgcttttccacattcctatcaaacttctgttttcctgacttggtgttaacatatttcctgtaggtttaattactcatttggttcctacacttgcccatattatgtgttttagtccgtatacctttaaactctatgttttagtcccaatgcaagcaatttttttgtgtcaatccctgtcacctgttaccaagtaactccattaactctaggttctctaaaattgccgcaaaaatgaaaccaccaaaaaaatttgtgaaaaaccaccacaaaagcaatgaactttttaaaatttttggcggttgcacaactgccagaaaatttctagcaattttacactgcctgtttcaattggtggcagttttagaaaacctagaactaatagagttacttgttaactaacggaagggattaaaatgtctagttttatagagactaaaatgcaaactttgaataagtgtagcaaccaagtgaacaattaaacctttcctttaaggatcgatgactggtatatatattattacgaaacactaaaacagtttggatagtgaattatttttttggaatcataaagtgtatggatgcatcatgatggctgactgttttcctctcaaatgttagtttgacagctattaccgaaattttaattctgctactgggggttgagtgggtaggaagatgcagacacatagaatacctcaatttcttcgtcaagctacaaaatacctttaaaacctcgtttttttaatattgaaaagggccgaaaggcctactttttaaacctcttctaccaattgatgaatgcattctctgccccctttgcctctactgacaaatgttttaatgcataacatgccttaataatatcattagatggtcattcctcattcatttacttgcagtctatgtccctagtctgttgtgctcatgcctttttgtttttattgttgagttctgttcttaccgatatagtaatggtaatttttagaaatcctaagtaagtttttagtcaaatattttagttattgatttgatttataaataaaattaatttccaaaacaaatcaaaattattttcaaattttaatgatttcaaacccaatttaacgaagcctgattgattggatcttcagccactgggcgacctgggaacactagaagctaacga

SEQ ID NO: 3762 - DNA, 2408 bp, Glycine max
  Intron number 3 from transcript Glyma11g20240.1 (locus Gly ma11g20240) derived from phytozome v7.0 (chr-ID Gm11; pos 17067050 to 17069457)
caagaggaggttggtgtttttttttttttttttcacactgctcatgtagtatatataatagtaacccttctggtctgtttatgatttattttacttttttgtctagtgtgtttttggtatatggcttaatgtctgccagtgatttttactcgagtaacataggtgaaaaaaggccaaatgctttaaaacttccgtgtgcaacaagaagtcatttttggtgtgtcggttactgtggatgcaaagctcttgaaaagttaggttgcaaagatgtatacaactaggtttcacgtcctgagaatatggggaaaaaaatgaaattgcatatttgtgtgttttgttgaattggatagttagttaatttcgacgtgtctctaattttatagcttgttgttttcttattcttattggtttgaattgttggtatatgcaaaatattatattcctaattgttggtaataatgctgttgttcttttgacattttggtttcggctaatgctgttgttttcctttcctcaagaagctctggtcaaattaagttttgattttttactttctaattttcttttgttgtgtctttgttattgttgctctcgttcttttgctttgtttttcaattttcattgttccggggtgtaatttatttactaccgaaagagtggcttgccccgcaccttaaaaagaagagtggaagttaactgacaaggtccaatacccatttgaattgattttggtatgtgttcatatagtatttgcgttgacggtgtcatatagtatttgagttttgatattttaatttaatttgaattagttgagaacattcttgtggaatgatgaatagatcctttttgagcttcctgttattactgttttttgtttctgtgtaagattccattgtgtggactgtggagtaatatgtatgtcatttgtcatgttattctttcctcgttcagtgattaattcatattctcataattgttctcttcttggtacaaatatagatattctcatatttgcttgttaattgaatatcttgtcatttttaggagtcaagtttgttaatttgctggactcaatctataatcatatccataaaaatatgaagtcacaacaatgaaaatctccgtaaacattttccaattaataatgaactatgttgataaatagttgcttgttaataactttttaatatattaactagttaagttgttcatagtttcaaaattagaaattagaagtaattttaagtttttcttttgtgtgtgtaattttctcaaacaaattaagttaatttacctccgtaatttggaactattatggaattaaatgcatttttgtaaagggaactagttaatcgtatgaaaatgactcgaatgctcttgcattgatattttttgtgctttttttccttctttgtatattttgagagaatattagagaacattccatcctctgtttccttgcttgctaattatcctttccctacaaaataattgcgtttgatacataataaattattattgcttactgaagagttttaaaatatactatttttcattcacgtgcatctacacatgttcacctgttcacgcccgcgttgatttagatgcagatgtactctaaagacattcttttttgttattttttgaaataaatattctgaagaaattgctctcaactcaattctcaatgcatcaagcaggatagatcttactgttttttcttgtaccttatttggtagcattttgatttagctgttgaaagaggtgatacataggttacgttaaattgcggtatttactgttgcaaattgctctagttttgaggcagtggaagatagtgcatgctgtgttttaatagtaggaataagctttgttgctcaagatggatgggattcgcttcttgtcataagctgtttataaatcctaagtctatatgcaaaaacagtacttgtagataataacctttcaactgtgtatatattccgctttccgaaagtactttgttccgaagtctctagctaagaaaagagtttgagggactatcaggctattaacttgttcaaattgggtgggttattagtggttagtttttgtcatctacttcagcacacattgaataattttttttttcctgaataattgtggttgttagaacaagatacaaatatcttgttatcatgtgttgtacaccactgctttacaaggcttgctacaactccccaataattatgaaatttttaagggatgagtttctgattttttgggtttagaataatacaattctcttgtgcttaattataatattgttagttagaatttatggagatgcttttaaacttgctgttttggttttgttgcactgagtcatgataggttactaggagatacaagcaataccatcaacaaat

SEQ ID NO: 3763 - DNA, 1014 bp, Glycine max
  Intron number 2 from transcript Glyma15g38070.1 (locus Gly ma15g38070) derived from phytozome v7.0 (chr-ID Gm15; pos 44159064 to 44160077)
atcgtcttcattctgaattgtctggtgattttagagtatgtcatggttgcttcacttggttgggtttttattaccttttgcttttaagaaaatagttcttcatcattgtgttttattgacatatttgatagaattcaactgaaataatgtgatgtccctttttagtggttatgataattttgatgtgtagttttccttgggacaatgcaaattggtcaattttgcttatgtaagttgccattgccaaccagcattgaccaatcatgtgctttgttgcattaagcaaaaacattaagggggtaaacttacaaaatggatttttggctggatttttattttttattttaaatgttcatggaagactggattgaattttttactttgtaggttttcttgcttgcctgaattcttttacaccgtttcaaatttttctccaataggggagcttaaggtcacataagctatatttgtctgcttatactcaatttttcaaaaagaagagaggttctgaagaagagagaaaatgaaagataaaatggattgtatattctgagaatctaatattttatcaaatatttatatttccttcttaattctaggttttgttttttttttttttcttttttgaatagccaaatgaatttcattgaaagaaaaacttagtgtagagcacaagacgtgacccaaccaagctataaagtattacagagcaataccttgcacgtcagtgcagattaatgtgataagcctgtgatttagatgcttctttatcggtcattaaggtgacagttacatagctcaacgaaatgtattgtttaatctttcaactatttaatatattgaatattgatgtttgtacctacaattgttagtcttttggctcattattccttttgtccatggttgaagttcattggattgtagaactttcagtctccaaagcatgccattttttcttgaagtaatcatatgatctactaagttctgtgacttaaacttatgatgcatgacaga

SEQ ID NO: 3764 - DNA, 1907 bp, Glycine max
  Intron number 21 from transcript Glyma03g41290.1 (locus Gl yma03g41290) derived from phytozome v7.0 (chr-ID Gm03; pos 46798571 to 46800477 reverse strand)
atcctgagaaggtttgaacttttttccctggaaacttattgcttaagatttctcctttaattttccttgtccatagagaataaactactattttaaaaaaattgtacagtaatatgatgtctttgccttttattttcaatccaatttcactttagattgttgttttcttgtaatacattgatatttaattctgcttttgccttttctgtgggtctcctatatattcttagcccatttcttttagaaagacaataaaaatgcattgaaagtggtcaaatccagagaacttatgttctgggcatgtgtaaattgaacactcttgaaagcaaagcaatgatagcgggggaagaaccaagagaatgctgagtgccgacataagaaatcaactgtacaattcatctcacgattgtttctgaggttgaaattggggattgctgatgtagactgcgccctctgtccctatttataagatctttttcagaaaattgtttgtccctttttataagactcttttctaattttcggatgcatttaattattttttgctaaagtacccttaatcaattaacaaatattttaaccaaaaattaaaaaatgctgagtgccgacataagaaccaagagaatgctgagtgccgacataagaaatcaactgtacaattcatctcacgattgtttctgaggttgaaattggggattgctgatgtagactgcgccctctgtccctatttataagatcttttccagaaaattgtttgtccctttttataagactcttttctaatttttggatgcatttaattattttttgctaaagtacccttaatcaattaacaaatattttaaccaaaaattaaaaaatgctagaaattaatgaaagcaactctttctctcccttcttaagattggggaatatagcctcagattactgttctcacttatctacattaattattctctctccaaatattaattaattagatgagaagtaattaagtagaaagagagatgattaatttttaaaaaataagggtaatttttagaagaacagtacaaataattgacaaatttaatgcaattaactaaattaactacttttcttgagggatgtgaattagttgaaagggttttataaaggatgaagggagtcttagagattagagatatagctaagtttgcatttcaaaatatcctagaaagtctatattttaatgatttgtagatccaattgttcagaactcaactgactggacctgtaaatggctgaattaattattttttactgacttggtcttggacatgatttaattagtttccatttcaaaatataattcatttttagagtccccccccccatccaccccacccctcccaccatccgttaattcagaaaaccaagaaggcaatccctacatattaaatttgagtcctcacaatcaagagtgaaaacctctgctaatctactcttttttcgtgaaccacctttctttttctttttgcattgcttatttctcgagtagctaaactgtctaattgtcttaaaaatgtgggtgaaagagttaaccactaaagttcttaattggcacgtgaaggtggcttttttatttgccattaagtctgaatgttttgttaactatacatgcacctgatttttaaagtcatgaaatactgttccacattatgcttaagtattcttagatatgaattctttcgttacggtacaataaggttttcatttactttgtattgctatagtatagtagcttttgctgatcgtgcttggtaattttgtactgtttcctatttttttattattttcatttaattttctttaacttgaactatattatgataagctaattcactattttcaacatttcagtcagttgctcaagtggcagaagacat

SEQ ID NO: 3765 - DNA, 745 bp, Glycine max
  Intron number 2 from transcript Glyma06g11800.1 (locus Gly ma06g11800) derived from phytozome v7.0 (chr-ID Gm06; pos 9111519 to 9112263 reverse strand)
cttgctcaaggtactttttttcgctctttaattcgaatccctaatttcaacttagttagtatgcgtaagtggaagctactagggcatcacaccaaaattagtttttttctgctttttcgttgtttactagtgaatgcattcggtaaccaaccctaagtcatgaacgagtgacctctttagcaaaacaattattcgcgctccaaattcgcagaattttcttttaaatcttatggttcgaagtcatgtgtactgtttgtttaacatttggtagctgaataaattgatttcgataagcacaactgtcattgcttggattttatgaggggcagttgttctctttatttaaccaggacctcaatgtattactatgtttaaccagatttatgtatgattggtattagtttagtacaattgacaagtgtatggtggatccggattgttaaatatctgttatagcgctgtcagaatgctataacatagcatttttcaacccctctgccataggcagtctgtgaagggaagtccgctatagcggtaccttaggctgcacaggcgtgtttatttggcagaaatttggccttctaccatattccgccattggaaaccttgatagcgtatttgtgttgcactttgtttaattttatgatttctgatgtcatgtagaatgcttggattttttcttatgtctttatatcaatgcgcgttttcttaccttgttgctggtagtgcttagaaggggttggag

SEQ ID NO: 3766 - DNA, 4581 bp, Glycine max
  Intron number 2 from transcript Glyma20g35420.1 (locus Gly ma20g35420) derived from phytozome v7.0 (chr-ID Gm20; pos 43694213 to 43698793)
gaatcaagcctttatctggggactctcccctcaaggtaatgtaaattttccttctaaacataattaccatgctcagattcttgtggtggacttttttattatattgtgttcacagtaagattatgttgcagacaaaaaaaaaatgtaccaaggagaataattatcttgtacaccagaaaaatgagattcacggttatcttgaaacggttattaagatgctacttagagagttaaaaattagaatctctgttgaaaagaattggtacttcagaagtaggcatatagatttttattaatagttttcccattccacaattgacaattcagatatgtttgcttagaagttgttagtctttttttttttattttgggggggggggggggaggggggttgctttctcctttaaccataacaatgcttacttttagttggattgggattttgaatgctatttggtgtatgtagctcagtaaataccagaagattcttttttgaaaagaaaaattgccgagtcacatgaaaccttttcagtttgaaatgatgggtaaatatcggaaattcaggtgtgaagtcaccattcatcaagagttgtgctttttgttgtgcatcgcagctgcctttctatattctctagtcttgtagaagcaacaattgaaagggatggaacagtctctaaatctggatggatagaaaaggacaattaacagagcaagcaactctatgttttaacaaacttgtctttaatactggatcttaagataaatcttaagttaaagatttggttttttccagattcagcaataaaacatattcagttctcgaggaagaactctaaagattcccacattttaaaaaagaaattattgctcatttggtaacagtaaaacgtgggaagaaaaaaaacaaaccaacaaaagattcatgaaaaaaaatgacaacatcagatcttctttgcaacagagagatccacgaaacaattttttttttttaagaaaaacatcacagagaaggggaaggggggaagacgaaggggcacgcaagggaggggaaggggagaagccagggggcccgcggtggagaggaaggggggaagaaggggcgcacggaggagaggaagaagaaggggcgtcgaggaaagagaggaagagaagaagaagagtggggaagacgaaggggtgggtgaggagagaagaaaaaaagtggggaaaatgagggggtgggtgggtgagatgatctgatgagagagaggaagagactctatgaaggtaaaggaaaaaaacgttgtttgtcgattgtaggtgtgcatagtgaaccttggctacaaaattttgtgattaaacagtaaaatttgtagactaatgagtcaaaaggaagatgaagaggaaatgagtaagaatatctaccaatcaatcatgtggatttgactggtccgaaggaagtaatgaggggaaaaaatattttcaaccccacttaaagaaaaagaattagaaaataagtactacaacattctaatgaaagacacatatacaatgttcgaaaggtaactctaataccataaagccttttgtaaaataattaggtaaaatctaggcattgcataattagttgttataaaactagtcgttgcataagtagcccttatgaaactaatcgttacacaagtagccgttataaaactagtcgttgtataatttgttatttaattattcaattctcatttactcttatacgtcttcttcaaatagtcttctcattctcattcaaacaatggatccaaataatgactttgacaaagtttggaaacaaattgtttatgaaatacttgatgatgatagtgatgaataaatcatgacctacttacgtgtgatgcaacaacagttgacggataaggcctagaaaagtgattaattgcaattgtgaagatgaacatctacaattgattaatgactacttctcataaaatttgatatacatagagactcaattctaacgtaggtttcaaatgtggcgataattattcattcgaattgtcaacgctcttagtaatcgcaatgagtatttccaaatgagacctgatgttgttggcagaatgggtatttcaccattgtaaaagtgcactatagttattcgtacactggcatacaaatttcctggcgattgtatggatgtgtacattagaattggagaatgtactacaacttaatgcttacaaaaatttgtaagagtatcaatgagatatttggacaagagttttgagaaggcccaacaaaattgacattaatcggctactacaaattggagatgcacaaggatttccaggtatgttaggttccattgattgcatgtattgagagtaaaaaaattgtccaattgcatggcaggaccaatatcgtagaagtgatcatcactaacccacaataatacttgaaattgttgtttcacaagacttaggaatttgacatgcatattttggagttgcaagttcaaacaatgacattaatgtgtttatccgtgtttgatgacattttgcatggtcgagcttctccagtacaatttacaatataatggaatttcatataatatggggtattatcttgcaaataatattatcatgtttgagtcacatttgtgaagaccataccaatgccccaaggtcctagaagaaaattatttacaaaatgtcaagaaacaaagagaaaggatgtggaacaagcatttagtgtacttaaatctaaattcataatcatttgcggtccatcgtgtgcttggaacatggatataatgttggcgtacattatattacataacacgattgtcaaaaactaatgtgatacattaagtggtaatgtcgatgttgattatgattacatagacaatgacatttcaaatgttgaagtatctcttggtgttcatcttgactctgttacacacttgcaaacaagatgcgctatgcatacaggagaaattcattaacaacttcaaacagatttggtggaacatatttaggaacattagaatcacaacaataaaaaaaattctttggcattaatgtgttgcatttttttattatcaaatttatgtatttttcatttgtttaacatttagtcattaataaaaattaaatttatgctcattttcctatatcttaatatttataaattttctccttaatatttttattaattaaatttaattacttaattaattatatttaatttaataaatatttaaatgaaacacttaaaagtaaagttccttttagacctactaaaaattatctaagatcccaaaataaaatttcactaaagaaaaaaatggaagaaatcttcaactctaggtgacgatgcaaaatctaccaaaaattgatttaaaatctcaatttgaaatctcccactaaagatgcttttacactattactcaagagaatcaatttgattctctcaatcaatatatgtgatcaaattaaggctgttaggtaacaatgtgaagcaatgagccaatgactttggtgctttagatatacactttaattaaaataaactattatttttacatagtaaattttaaggttaatttaatttttaatccctcaacttttttgtatttttgcccctcaaaatatttatgacaatttttagtctcattaattttttgttatagtttttagttcctctaaatttttttatccatttttagtccctcatttattttttttgctaaaaaataatcttaaatataaaataaacaagagaccaaaaattggaaaaataataattaattttgagcaataaaaaaacaaaggattaaaattaggcaaaaaaatttaaaaggactaaaattgttgattgaaaattaacaaaagactaaaattgttgacaaaaaattaatgaatgactaaaaattgtataaaaaaattgagggattaaaaattgaaatttagaaaagttgaagtactaaaaacttaattaacccacaattttaccacaaaataagttgcatcctaaaaagagtccattttttataagaagtaaattatactaactgcccttaaggtttcgtgaaattacataaatacttcctattctttttattcttatatcaactcccttaattatttttttaaaaaaaaaaacattacactgacgctacttatacaccatttatatatacttaattgttttgaaaaatattaaaggttcttgtaaaaaaaaaaatcgtgtaacctcacaaaactttaaggataattaagttacataaaaaaaacttattgaaattataagttttttaacaagatcaaataagctctctacaaactcttctaaaaactcccttatgcctattactttaggtacctaatgatgtagctctggagatttttgtagccacatacattttctttagcaaccagcattacgacattgaatctactattatatacactctaagatgttatatacaatgaatactatacaaggcaatgttagccaagaagtgtattactttgtttggaagcttgttttccctacttttttgaagtgtgattgtgcatgtctttgtgcagcttggtcctaaggcagagg

SEQ ID NO: 3767 - DNA, 1189 bp, Glycine max
  Intron number 3 from transcript Glyma07g27450.1 (locus Gly ma07g27450) derived from phytozome v7.0 (chr-ID Gm07; pos 30635101 to 30636289 reverse strand)
tcgtcgtcaagtccattagctttagggtgagaatacaaattgctttatttatttcattcttttgaagttttttttaatatttcaattcattcctgaaaaaaaaaaggttttctttatactttggccattcatattctactctcccattcatttttccatgaactgaactgtaatgaatagttttatgctatttatttatgctaactcgttgctacctatatatgaatttatgccatttgttgcaaagaaaatcttgattgatccggttaaatgtaaatgatgaaaagttctttggtctaagaagttttaaaaacccttgttaatttttattctccatttttctgagaatacatgtaaaatcctatttttagtagctgtagctaataatctataagatagtgcataagcctgtgtacagagggtaaattttattttacttgttacatattatttaaattttgcccatactcaaatgttgtcataagaaatcttcacaattcgttagaaaatataaagaaatcctacatttcaaagaattattatttataaatttataaatttacttttaattcaactaattaaaagtcgtcagttttttttaatctgaaaaaacaataaatttcgagtggtaaactatttttttgtttttttataagtggtcaaactagttagtcatcttcccttataacaatttaatttatacctagtgtattattgtgactttgtgagtaactcttgaatagacacaaacctaacacatcattcgtaggcatagtcaatacaataagaattataaaataaaatacataagaaatcaggttgatattctttccatttctttctgttttcttcttcctgattttttgttaaaaaattattatttacttgctattaaaatgaattaggatctaagaatcaggaaaaagatagcggtaagaaagagaagatttttttttcctaaaaaatatataaaatttaattcattcttgatattttttttcttttggccatttatatgtcttgctacgtattaattcacttataatgatatgctattttgtgttttgatttgtttgggcactgtactgggtttttatagcttcgaacaaaaaaagaattgattttttaacaaatatctaatttagctttaattatgatctggagcagaatacatacaataataacagaa

SEQ ID NO: 3768 - DNA, 7489 bp, Glycine max
  Intron number 3 from transcript Glyma04g16810.1 (locus Gly ma04g16810) derived from phytozome v7.0 (chr-ID Gm04; pos 17977816 to 17985304 reverse strand)
atttcaatttttatcagactttttggggtctacaggtaggtcttcaatgaaactttagttcttgaagttggaaaagaggtctcttccattttcttaggttgaagcctgtcttgctatttgacactacctattcgacttgctttgcaatgtcatatctataatacgatcttatcataaatacaaccaaatcatcaaatcaaagactgcatttacgacttccttctttgtaatcattgaggggaggttctttaattcttatgtgctctttgtcataatttgatgtgtgcacttttgtgtcatctgtaataggtttatttgttgcacattcagagggactggatatgcatacatatttttgttattgttgctgttaggagagttcctgatccattttttatgtttattctctgtttcatcaaaaaattcttctatcttgacaaatctgaaattcatggaaggtccttgtttctgtaagaaagttactaaatggtcacacttcagattttagaactctaggtattttggtaaagcttgagtgtttatcactcagccaaaagacttgtatatatatatatatatatatatatatatatatatatagacacaaggtcatgagtacaagacaagaaaggttgcagactgcacgaaaagaaaagaacagacagtacaagcataaagaaatatataagtacatatacaaaatcccaaaagacattagttctaacactccccccaagttggaacatataaattgtatgctccaagcttggaacatatgaaatcaatctgaggctcccttaaggattttagtcaaaatatctgcaagttgattatttgagctgacaaactctgtagcaatctccttggacaataacttctctctcacaaaatgacagtcaatctctatatgtttggttctctcatgaaatactggatcagagacaatatggagggctgcttgattatcacaatacaacttcattggctgaacttcacagaacttttgctcttgaataagttgtttgatccacactaattcacatttgactggagagatgggctgaatttctccttgattggatgttgtatgagttggaggtaccactgggctgagataaggaataggcaaaacctgttgtatagagttggactcttgtttggagaagaacatgttttcttcaaagaagctaacatcagctgacatgtagtatctcctggtggttggagagtaacatttgtgtcccttttgaaggcatgaataaccaagaaacacacatttgatagctcttgctaagagcttatcaagaccgggagaaacatcatgaacaaaacatgtacaaccaaagactttaggagaaacatgatacaagtgttcattaggaaagataattgagtgaggagttttattatcaagaaacgaggagggcatcctatttattaaaaaacaagcagtgaggactgcatcaccccaatggtgaacagggtcatttgcatcaagcaatagggttcgtgcaatctcaactagatgtctattttttcttttggctattccattttgttgtggtgtgtgggcatgtggaatgaaattggattccatgtgaggacaaaaaagaagaaagttctgaagagaaatattcctttgcgttgtcacttcaagaattttaatgatcttcacaaattgattcttaatctcatggaaaaaagacacgaaaatagacaaaagttcagatctatctttcattaaataaatccaagtacatcgagaatattcatcaataaaggtatcaaaacatttgaaactgtaagatgttacacggcttggtccccaaatatctgaatgaatggtagaaaaaatcgagttatatcttttttcaacttgctttggaaatgatgatctaacatgtttgtctaattgacaagattcacaatctaatatctgtaacttgctaagacttgcgaccattatcttcaattttgcaagatttgggtgacctagacaatcatgcaaaagctttggaggagctgaaggaaaacaggacgtagaagggctagtttcctagtagaaaaagtcatgtgattcatgtcctgtgccaatcagccgacttgtaccacgatcttgtatgataaaggaatcaacatcaaatgttactgagcaatttaaggaatgagtcaattgacttacaaaaattaggttataagggaaattagaaacatacaaagctgagtttaaattcaaggaggaagaggaacttgatcaattccttgagatgcaactttggatccattggttaacgtactaaggtgaggaaacttaggtggagagatagaggaaaacaaggaattattaccggaaatgtaattagaatcacctgaattaactatccatggaccttgaccatccacagattgaaaaatgcaggctgttgaaactcttggtactgaagaggatagagcttggcagctaggtttcagcctgaagtactccttatattcttcatcagaaaatctagattcagcctttcagatgtggagacatttgctgccttatcaggccaaccatgtaggtcataacacttattttgaatatggttttcttttccactataaggataccacagcttacctcaaccacctctaccaccacgttctcctcctctactaccacaaccccctctaccccaaccacgagaggcaaccatggccaaagtctcgaccgctgtggctgcattttcacctttcaccaaagtaggaacatagagaagtctagcgactaagctgttcattgaaggaatctgatcacgagacagaatttgttcatgcacatgatcataatctgaatggaagctctgcaagatcaaaaccataaacagtttatcaagcctcttcttcagtttctctgcagaatcacatacaaggaatactttcaattcttcaactgcagctatagctttagccatgtgtgaaaccatatcatggttggtctgttgaagggaaacaaccttttgggttgaatcaaacagacgttgaatttcattagcaaaaacatcctaggcattcctccaaaaagaagaacaagtcttgaatgatctaagtatctctagcaactcagggtctacagattgtcataaaatagtacatagcttacagattgtcatgtttcattcacatccttctccaaatgatcatagtatccttgaccaacaaaccacatctcaattgaattagaccaggaccgataatttttccagttgaatttcttagttgtgataatgggagttgtagagaagggagaaatagggcctgtggaggaattagttgcagaagatcctgtagatgccatttttcgagcactgcaaaaataccagtgagcaagaaacaaacgaacacggggtggactgtagacccacttctcagatgtgacaactggagccaaacaagggttggattgggtctagaaggagccaacaaagacaaccatgtaggtgcgactgtgtttcggcaacaggacaatggcacgcgagatttgggcgctgattgtaccggcgcgtgagaaagcgtgagagcttttgctctcgaaaccacttgggctgggttgtgctcaacgaggtgcatctaacgctgagttcgccggaaaattttttgggggtcaacaacagtggaccgatggttgacaacgacggatgacgatgagactccataatctaggccataaatctgggtataacctttggctaccaatcgagctttgattcccctgagcaacaaatcccggtggttgctccatataaatctcctcttctaattccccatgtaggaatgcatttttaatatccaactgatatagtggccaatgacggatggcagctatggcaagaaagagtcgaacataagtaattttagccacaggggagaaagtatctctataatctaggccataaatctgagtataaccgttggataccaatcgagctttgaggcgatcaatctgtccattggccccaacttttatagtatatacccatcgacagccaacaggtttcttgcctgggggaagaggaaccagctcccaagtaccattatactccaaagcctacatttcatcaatcatggcttgttgccatcctggatgatctagtttttcacagagatttttaggaagagaaatagaagataaagaggaaacaaaagaatggtacaaagaagagagacaatgataacttaagaagttataaataggataaggattacatgtagactgattacctttcccatgagtaatgggcaagtcaagattctcttcgggtagtccatggtcgggttgtctgctggagtaggacatgattcagctggtctttcattaccttcaagttttgcgttaggaattcgaggatgacgtcgatatacaatgggtgatctttgagtttgcccaagtcgaggattgtcaggaatatctatggtagaatctacagttgactctgattcctgcaaagaaggtgatggaccaagatagggaataggaaaaaattcttgaagagtattggacttaaccatgaagggagcaaggtatggtttttcttcaaaaaatgttacatctgcagagatataataacgattgtgaataggagagtaacatcggtaacctttttgtaatctagaatatccaaggaaaacacatttgatggctcgagcaacaagcttatcaagatttggagacaagttatgaacaaaactggtgcatccaaaaatacgtgaatcaacatgaaacaacggttctttaggaaataaaatggaatgtgatattttatttttaatagaggaaaaaggcatctgatttatcaaaaaacaggctgtcaaaattgcatcaccccaatgccggacaagtacattggcatgaagtaataatgtctgagcagtcttaacaagatgcctattcttcctttcggcaatgccattctgttgaggagtatggggacaagaggactgatggagaatgccctgcactgacaaaaaagaagaaatagcagaaaaaagtattctttcgcattatcactcctaaggatcttaattgtcttaccaaactgagttttaatttcattaacaaaagaagtgagaatgaacaaaatatcaaattgttcttttattaagaaaacccaagtacatcgagaaaattcatcaacgaaagtaatgaaatatctataaccaatagacgaaacacaactaggaccctatatattagtgaataaccgaaaaaggggaatcaacacgactttcaacatgcctaaaagaagaatgaacatgctttcctagttgacttgactcgcaaaataggtcctttattttttttaagactcggaaccattatttttaatttagataaatgtaggtgtcccaaacgttaatgaaggagctttgatgatgtggcggcactgcaaacccaagaaagattaggcttgaggtagtaaagaccaatcgtccgacccgtaccacgttcctgtatgacaaatgagttagcatcaaatgttactgaacaattatgagaacgagtaagctgactaagagatattatattgaaaggacaaccaggtatgagcaaaacagagtttaaagacaaagaagaagtgggtgatacatggtcgattcctgttgttgcaactctagaaccatcggctaaagtaatgaaatgagaaatttttggaggagagagggatgaaaataaagaactattatcagcaatgtgatcagaagcacctgaatcaattatccatggactttgattattaccagattgggaaatacaggcagtggagttatgaccacctatagcagatgatgtttgagattccttggcagcttttagctggagatactcttgatagtcagcctccgaaaactttatcttagatgtttcagactttgaaatattcactgactttctggggaatccgtgaatagaataacaagtgtcttgtatgtggcccactctcttacagtaagaacattgatggtgacatcctcttccagcttgtcctcctcggtttcccccaccaccttgtccccgtcgattagataccatggcagaagtttcaatattgtcaactgaatttcctcctatttttggtgaggggactcgaaggagtcaggcaattaaattctctagagaaggaactttttggccagttaagacttggtcacgaatatgatcaaaatctggatgcatcccatgtagtaccaacaccatatatagattatcaagtttcgcctttatgtcttcaactttatcggcttccaatgataattttaactcctccactgcaaattgagctttcgaaacaaaggcaaccatgttatgatcagattgtttagagtgaccaatttctgagcagcatcatacaattgttgaatgtcattagcaaaaacactgtgcctttttccaaaaagaataacaagttttgatggctctgaaatttgtcaatatagttggctcaatagactaccacaagagagcacaaagctgataatcaagtttcttccactgctcgtgtttgtcttctgaaatcttttttgaggattgctctagatgttcatgataaccttgaccaagaaaccaaagttcaacagaggctgaccatgttaaataattttttccattcaatttttctgaagtgattgttggtgttccagagatagagaatgcatgaccatcagttttctgagagtctgaagccatttcagcacttgtcaaagagttgtctaatcgaagaactaatcacctaggaaggaagaggagaggcggcgatttttggtgagggtgaccaaggcggccttggatagtgggcaggttggtggaagggacttttggatattgaagttgttgtttggacaaagggacaaagacgggactttaggttgtgctgaccagatgcagaaacctttaaagaacaaacaagttggctctagataccatattgaagaaactagaggttgtgaaatgcttgagtgcttaacccactcagctgatctatatttatatagacttagggagtaaatacaatgtgaaatttacaagaatattgatgaagttctagtacctatgtacatccatgtgaattcctagatacatgaatatgtgactaactaggtacattaatgactattctttgttggaacaactacccatataatgtgtggaacagctacccatacaatgtgtgtaattccaacagttctaacatttacttcttttagcaagtactctaataatttttgagataatcataaaattggtagcttgaaatttttaaagaaattaaacaagtggatgaaatacattgttttgagatgtgtctttaaacggcaaattataatgaatggttctcatattaaagccacagcatagcacttttacttaaaaaatgttaaaacaagtatgtttgatcagtcttattttatttgatgcaggaatatttttctaaccctacttccataagtc

SEQ ID NO: 3769 - DNA, 3794 bp, Glycine max
  Intron number 1 from transcript Glyma06g35630.1 (locus Gly ma06g35630) derived from phytozome v7.0 (chr-ID Gm06; pos 37536354 to 37540147 reverse strand)
ctcccactgcaggtcttccacaggccaggatgtaaagtttcctctctgtcactctgtgtgtcttgaatttcatattcttgtgctgcatgttatacacgttgtttcctttcagaaaataaaattctccctttctttattttttttcttctcactttttcattattaagctattaaaagtatttttaaagcttgttgctgaactaatgttcattttaaaacactattgtttagtgtatttctttttagtattagaggagatctatttgcttgtttttataagtaatatttacttataattaaaaatataatatcttcttttgtcgacaaaatagatattattagagtaatccacaatcagaaatgtctcatcaagatgagaaacagtacaaagaagcataaagtacattcataagaaaagttacattaaataacgtactattacatatataactttttattattatttatttttctttttaggtgcatatattaacatgtccatttaacatttttcatacctcaatactctctaaatgcacctttaatacaagtgcagaccccattacacaaccctatagatcttaaactccctaaaccccccaaaaaatcaacccgtaaacattgcagacccaaccagacacatgaagactatattattgaagtaaaatgtgcacgagttgtttaattatatatgatgtcattgtgaggactcattcataagagaattaaaagtcaaaataggttgtttggattgtatcgatgttctaagtttagtatttatcaaatcagattaagaaaaccacggctaattatttggatccatttggtagaataaagaaaaatgaaaaaaaaatgaattgaagtgaaagttttaaactaaaatataacatgaaagtttgagtttcatattattttattctttatttttttttcttttatcattctctttcactccaaacgaacacgtccttaaattgagagaaaaaattatattatatatttttaaaaaaaaaatatacactgtacaaaacaggacaataattgctgtaccaaaaaaagaacgggacagacagcagttagatgcaacattttagagaagtttagtaatatgtgagtaattaagacaaagtccatgtttaaagatcctgctaaatatgaaagtgaaatatgatataagaatataagaaaaaaaaacaggggatgtctgatacaaataaatttattttatgttccacaatcatcgaataattcttgaaaatcatgaaactttaaaaatgattaattttatttgattgatgataaatattattatatgaattttttggaaatataaaagtaaaataatacatttattataatatttaattatttaccttattaaataatttaataagaataatatgatatttactctaattaaacttgtttttatataacttggaaaatttagggagtgtttgattttgttgttttctgttttcatttttactggaaatagaaaatggtgatggaaatgcgtttggttgaatttttgaaaacattaaaaatattttttcaaaagaaccaaaaattggaaacaataaaatctcattttcagttaaaaccagggatctcattttagtgaaatgaaaacaggtggcaagaaaataattttaagcaaaatttaaaaatatattttttttttctgaaaacgcatcttcagtgtttatatttcttgaaagcagaaaacaagaagtcaaactaaatatattttcagaattctaatcttttgaaaatgaaaacaatttttaggaaatcaaaacagaaaatgaaaatgcaaaccaaacacacccttaaatattcatcttctcgcataaaaatattttggtgagaaacttggttcaatttttttttttgaaaaatattatttcccgataatgttatttctaaaaatcaggaaactaacactcacaaatttaattagatacccagaaaacttaaattttctctttactcctatgtattatcagtataaaatcaataataatttaagaattttaagttaattagtagaaaagttaataaatttattatatatgataattgtatgcgttgttatttttctttttaaaataaatttagcgctattgtttcaccgctttcaacttcttgatgtccattacaagttacaaaacaaaaccatctccatcacaccatgaccctagagtaaaactatctaaaaaaaaaaaaaaaaaacctcattgtacgtgtagcttgacaaaataaggtacatatgagccaataaggttcaattggtatttggttccattcagttatggaagaaaaacataaattgttttaagggtggttttggttttttggaagaaaaaagaatcagatagaattataaaaaaatatttaacttaaagtagagagaaagagatgtgtgattcccataattttgaatttttattctatttttttactctaaatattactgagtgacataataaagtaataccgtgaggaaaggttgaaaaaaaatcacatagagaagtaaaatctaacatgaaaccgtaagctctcaagcaagctcgagactttgactgtgtgtctattgaagaataatgagctaatgactcatagacaatgacttggataagataaatcaccagaactaaggtgagtcttcatatgataactatcactgtttatggacccagtgtgattggttgtgtggaagaaaaataaaaaaaatatttaaattaaaataaaaaagtgtgggactcatataagagagacaaataagaaagaaaaatcgtaactcactaaagaatacttttttgtccgttacacacaaattaaaaagttaaaatgatctcttgtacgtttttttttctctctttcacgtgtccaactgcctccacatttctgaaatctctgaaaatgtgttggattcttgtaagtcctattcatagttgcattattgcataactttgtgaagatgaatattgaaataaagataaaaagggaaagatgttttccataacccgagcccatatatgttgtatgcgtgccacttgaaaaagaactattgaagaagctgagctcctttataacacattcatgcgaaacaaatttattgtacaaagaatgttttcataaattaattggagtagaatctttaaattgagtaataataaacatcttttttttaatttctcataacataaatcttattatatttatattctctttctaagggttagatatcacatgtctatcaaacatttttctttccaaaagtatcattagaattaatctctcttcttttaaattgagtgatgatacataaacatctatatttttttaacagctattaaacaactatcatttcctttttatatcaaatcatattatttataatacctatattttcttagtattatctctcactcacttctgtctattggcatattgagtccatctataatttttcttttaaatttgagtagaaatacattatttgtttccgggatatggttagtggcggagcttcttgggtgcggagtagccataacctcctcaaaaaaatttctttccttttataagcatataattttctttacaagtaaagctataaataattttaaatatatttatttaatcatttgctcccccaagattttggagcaagattcgccacccactgtttatggcgtactttgtcacatcacttgtgttgtgttgctgatgttagtattgtcctgttggcaacagtgcaattgctgaatacctgtctcgtgaccttcctt

SEQ ID NO: 3770 - DNA, 2695 bp, Glycine max
  Intron number 3 from transcript Glyma10g12190.1 (locus Gly ma10g12190) derived from phytozome v7.0 (chr-ID Gm10; pos 13071594 to 13074288)
ttatacttaacagttctcattgttactatcttcaggtttgtcacacccttaaaatagaacatgcttatctactgtggtttagcttgaatggtcttactgcttacattgtatctatttcttttttctaattaaggccttccattaggattcttgctgcaggaagagtaatactctacagttccaagtttgaagaattagacattcggttgaatcctatagggttctaggaaaattttgtaatcctcctgaaacatgcaatctacactgttctttagtagattatctcattaggaaattaatcatttcagatgccatggttttagtcttatagagattcttagaatcctgtaattacaatttcttgacaagcccctccgatatttttttcctctctaactctaattcctttggtctccaatattgatttaaatgagtgaagttttgtcaagtgaccttgattcattgatattaagtttggaaattttaattgtttttgtgtcattcttacacataagcttacacatatgagaatgcttgggttccttgtctacatgcattatgtgacctaaataaatcttcaaagtattttgtcctccaaaatccaaatctgaaaaatatagaacataccaaatgtaattatgcaagttaaaaagatttgcttcttttaagaaaaaaaggattatgaatttcttgcatattaatagaatcttattcttttaaaataattatttgagatattattagttatttactttctgaaaaaatgacttctgcaattaggggtgtgcacaggttgggttgggtcgggtttggctaaacccgttaccgaacccgataaaaaattttcaggttggattgggttgggtttgtgaatttttttttttacatatccgacccaacccaacctaatcataaacaggttaggtcgggttgggttaatggggtctcaatatttaaaagaaaattattttgtaaaatttaaacctttttagagtaataatttgtttttttcctaaaactttgtaagtatataatgactaaatgcactcaaaagataccaaattgtgataatatttgactaaagaattaatgattccaatggtaatacaatattttaattctatatagaaataaagtattatattaacatgagaaaacataaaacaaaatcaaaacaaagataaaaacaacttattgccatttgagaacttctggggcataccctactgggaaactcctctctgagttgtttgggcccattgtacttcttttattgccgtttgacaactattcttgatctaaactggttggatccattaggtttgtcacaatgaatggaccactttttggtgatgatttccttttccaatagatgccataagcttgagtccaggccttgagattggagacatgacccaacaattgcacatagttgacagcttctaatccaccatggtgatactttgttgccccacagctcctccttgatgcccttggccagattgttgacttcagtcacttgcttcaaatcttgtctcggacagtcgaacctctcaagaagtaaccaagaagctaaactttggccaactcagccatttgtgccaccaacacttcaatattttaatataatcctccacaaacccttttgcctcaaggtggataatcactcatgcactgatcctaaaatacactcctcaaatcactgttagttgcttctaagaaattttgggagacttcttggcttcttttacaagaactgtgttaaaatctcacaacaactagagatatgacttatgtagtccttatagggctgagatggttctcaacttacaagctggttttgtgggattgagttagattttaagcccaagttctaagatggtatcagagcttatcctaaattctttattggacaacccgtatttgtctatgttctagatgtccattcctaggtgtgaggtgttgttattgagccacatgcatttattcatgctctagatgtctagtcatgggcatgagagggtgtgttgagatctcacattgactagaaatatggctagtccttataagttataaatcttagccaatcttcatcatataagccacttttccaactcctttctatctctccttcatgggtctccctgtgcgctacccctagggaccctccttttctgtagagcctcccttgatccatgggaaaaaagagatgagaaccttgaattctcctaattcctaaatgtattttggttataagcatgttgctaatatgtggaaaagcaagatagctttttataatttatcaaaacaataaatatttgtctgtgtgtttttattttactgggactattgtatcctcctatttcttaacttagggttttctgtgtctatccatcttgtatctttttgttataaaccatttcagtcagtattacgccaaagaaatttaaacatgttctcgcttgccttttttcctcctttttgttcttatggtttttcttaaattgtccttcccttgggaaaataaaatggacaatttcccttctggtatctgaaatattctacgattattcttgcaagcttcattcttcatggctaaatatttataactccctcaaggaacctgaaggtcaacttttctaccaactttctatttgcaggcttacattaaccgccgtctactatttaggcatcg

SEQ ID NO: 3771 - DNA, 3637 bp, Glycine max
  Intron number 18 from transcript Glyma08g42110.1 (locus Gl yma08g42110) derived from phytozome v7.0 (chr-ID Gm08; pos 42024977 to 42028613 reverse strand)
aagacatattatcactgctgaagtaagtgagaaattctttttctttttttatcagcaaatgttagctgttaattttgttagaatgatagtgtgggaggatgttatgccacaatgctctgatgataattctaggcccattagaattggaagagagcccaaatggctagacaattatatccagtgagtagtgggaccactcagccttcttttcttaggattacagctcaccctccattctaggagtttcctattaggagcaggatcaggacacctgtagggtggatccttacaagggaacaatccattttatgtatttatgctcctttctcattaatgaatacccgagaagagtttcagtctttatttttgtttgttttcttatttggagtgtccctctctaacaaggcgtttgacctaattgatagggctctatcttgagtcttatcagaagaattcaaacccatgacctctccttccctccttcccttcaacaattaagtcaaccttacaactcttaactgagaaattcttatcaatttcctttctgcatccagttctttttgtggtatatggaagagagtttcaaggtggaaaccttggtttcactctaacaaccttttgctctgcttcatttgtgctcaggaaatcttttcttaagaaagatgatatttctaaacaggactgactatttagaggtccgatttttttgttatattaaccaaagtagtcatagcagcaagtagtgcacagctgccaccgaaagtaatagtattataatagaaatagtaaaacagcaaaaaaccccaccccaagtgtaagactgtttgggtgaaaagttactcaattgagtgtgcagaccaaacacccttctcacctagaaaaaccatagcttctttgtagtttctccattagctgccaccccctcttacaaagaaaaaaaaagcttgttttttttttttttttttttctcatctgtcatcaccttgttagagtatatatcaataaggcatatagttttattgtaaactttgtagtaggtcattttatttactgtatatgtatctcaattagtcacatgattagttataagtcacaatcaatgctgagtcagcactttagctagcttctctaagactcttctcagagtcttgagactgtaaatatgtacttctttagaattctgtgataataaaaatctttcagaatatgtccattttctctgaatatacaaaatatattatggtgtacaaagcttgagaagcttcatcaatggcttctgatcctcttagaccagatcctatctccacttttccgtctcatggtcatgacagaggagcctctctgccatctctgccagcttctcttcatttctctgcctgccactgtttgccacctctgtgttgatacaatctacatcggcttcttcgccaatcaacttctcctatgcaattttggagaaactctgatcagaattttctggcttggaagcatcaagtagaaccagtgctaaaagcacatcgacttcatcgatttgttgtaagtcctgaaattcctctgcaatttcgttcactctccaataacaatgcagggattgagaatcttgcttatcatgcttgggaacttcaggctcaactcttacatatcttggttgcagtcgtcactttcagcttcatttcttgccaaagctagatcatgtaaactaacttggttttaacattgggacaagatccaaactaacttcaattcgcagaccaaagctagattgagtcaataacacaccaagcttcacaatttgaagaaaggagataggtcgattcctgaggttttgttatgcatcaaagcttttgtggattcacttgattctattggtgatcttgtgtctgaacatgaacagttatatgtgattattgaaggtcttccactagactatgaatctcttgcttctctgattagcaacaaatttaagctgtttccatttgctgaatcagtattctacacaaaatatgatttttcatccaccaggttttccatcacaacataattatgcttatttgtctccttcccaagtttgccccacttcccaagcacatcacctcaattatgctccgccttctcaatttcactcgatgtcacctttatcggtgcctctgatgagttattcaaaggcctatgaggctcactcttctaagcctattgctcaacaatctcagaactggttcattaattttggaaccttaacttgtgacctcaaactcagataaccttagcaattaatgctgaaccaattcaagcagaagaacatgtgtttcaaggcaatggtcaaggttttcctatacaatccattggctctgcatcctttactctaaactctcatccacatattactctatatctcaaatcttttacatgttccttctataacgaaaaacttagttagtgctagtaaatttgccaaggataataatgtctactttgaatttcatccctctctttgttacatcaaatctaaggttgataactttgccttacttcgaggttctggctaaatattgatggaaaagagaaggagataatatgttgcatttacaagataaaattgtccatacttctcttctcgtctcttactgcctacactacttcactcatactcccaaatcctatcttttgtttttccttttgcttgtcttatcattctgtttgttctctaagtcaaccattaaaaggggaatttgagattttgaggaagatcaagggagaaggagacattttttatcgagaagggtcggtgagatgatggcactgtatggtattgtagcaatggagcaggaatacacatgttaacaaaatcctctaggtttaaaaagtcctaaactatacttttgatcccttatctttttcctaaaattcttgttagtcatttttcttttaaacgattcattttagtccttcatctctcaaatttgagttaatgttgtccttctgaaacaattgtcctcctcatagcatgaccttgaaaaacacaatgggagtgaagaaaacttattactcactttaagtgtcgtgtaagtttgtgtatagaaacaaggttgttagaaagttagcgataacatgtaggatgttattcaactgaaggtaaagttaagctgaatgttgttgcatacagtaacagcagaacgatatttgttaggaagtcccacatcgcctgcctcaattcttggggtgcaacttatatatttgctgggcaacttcactcagtaccaattgattttaagttgaaatttaagatgatatcagattaggaagtctcacatcgtctgcctcaattctagggatgcaacttatatatctgctgggcaacttaacagtggggtgttaacataacccccaagattgggagttgtgatacagcatgctgaagaatatatccatcaatttgtggatttatgaaactattttgagtttttgacccataaacatacattttggaaacaataacaggtcaatttgttgatttatttttcaaattgatcagactaatgcattgaatcaaggcacctaaatgctgcttattaataatttcatttatactttgtctttaaaatatatttgttatggcaggtataccctcttctggatc

SEQ ID NO: 3772 - DNA, 393 bp, Glycine max
  Intron number 10 from transcript Glyma04g07850.3 (locus Gl yma04g07850) derived from phytozome v7.0 (chr-ID Gm04; pos 6119829 to 6120221 reverse strand)
gggtaattgactcactgttgtgtgaaaaggtacattgtttacttcgcctttataatctgtcatattttgcatctttattttccactgtatgcatttagtttgctttagttactacttaatatgattttgattcgtgtttagttaaatttgagaaaaaattctctgtgcaactgttatgagtagaagatttgttgctaaaaggtatcctatccagcatgtgatagggactttagtagcagagattaatcttctcaactggcagagtgattgggtctacacattgataaccttttcattctttctaattaaatccttaggaaattctgatgttgaattttgtgtttttgttttgcatcagcactcacggctaattgaaagacctcctgaattggt

SEQ ID NO: 3773 - DNA, 3560 bp, Glycine max
  Intron number 5 from transcript Glyma16g09890.1 (locus Gly ma16g09890) derived from phytozome v7.0 (chr-ID Gm16; pos 9780903 to 9784462 reverse strand)
gttccatctatcaaggtaaaaatagtttgcttctccctctttttgtattaggtatgtttggtttttttgggggatgattttcattctctctttgatgtttattaaactgaactaggaaggaaatagaggatttaataaaaagtaaatatgattcataaatttttttctcttctaattactgtcaaaagtcaagcaccagaaagtgtataaagtaatttagtttatgaaacaccccaaagtgtagaactcgcaaaaagtaaatgcttttattgatggattttgttatgttaattagagatctcttatttgtatctccttaaaatcatctcaaccaattcccttagagtgtgtttggatgaggcaatttaaaattctaaagaattttaaattctaagaatttcaaatgctttaatttaaattctttcattttttaaaattctgtatttggataaaaaattaaatttcttcattttcaaaattgtgtttggataacaaaattgaatttcttcattttcaaaatttcttattttgataaaataatcaaatgcattcttttttaaaattttatatttgaataatatattttttaataaaataattatttttttcattaataaattccatgtactatttatcgagtgaggtattccaataaatatgtattattttaatctatttcaattaaaaatatattaatttaactatttaaatcattattccatttccggtccactacaaaattctacatgtttggcagaactatttagtagataaaatgatatattaaatgtgatcttagaaccaccacaacatacaaagtatacaaatcaaaattcacaaaaaaacttgttttagaagcctacagataaaacttgttttgtgtagaagtcattggtcagtaatgcaattacacaaaaaaaaaaacttggattgaagcaaaatctagtagcaaaataagttcaacttccaaaataattccaaattttctaattgcctttgctttagcacaggaattccttcacatcttttttgtagaagaaaacataatgttaagtgctactgaacaaatcatatttgttaaaacataatttgttatataaaatgagagatataaatgtaaaacataattatacaacatcaacatgcttgtcatgatatcaaatgtacttgtaatttggcatcaagacgagatgtaatcctccttctcatccaatggaagagcttttataatcacaattttaatgagattttctgtcaaccaatcgattgttctatgtcgaagtgtaccattaaaattaggtatattatctagctcattcaccacttcatgtaccacttcttgagcttcttttattttcatctttttttttgttctccatcttcttcttagtcaccaaattctttcaatgactcagctacttctctattttcttccttttgtcatgttaaacaatattgtaacacttacacagaaactgtatttcacactattcaatttggagatatatgttctttatataaactaaaaaagtaaaacacatgctttcttattctgcgttcgtgcaattcaagtttttctcttaaattttctcctgccttcgtgagatcttccacctatatggaataatataaagtacatgaaaaacaacattaagggaaatgattttttatgattattaaaattctggtacggctagctaccatctaatgatattgacgaagattacaaaaatattttatacagcaaacagagttctgtgggttatttttttccttccccatgctactatctagccgttcttccaggcaccgagccaaaattagaattgaaggagcaagtttctcaaaaatagaacagaaataaaacaaaacaatgagtaccaataccaatccaatcccataaaagattttcatggtaaatagggcaacataagcttcaccatcccgaaaggatttgactttggcctccttactgaaactttcgcatttgaaacaaagagctagaaactagtcaaaagtcaaggaactcacctaaaatccatcaagcaggctaaacagcttaaactatagtttaatgattccggtactgaagaacttacaaacacaaataaaacatacacactcaaataaaaggttggatcagacctacccattacaaccatgtcatatacacaaacaattcagcatttaaacaagtagtctagtgttttttacaataagcctagccacctaatgacaatactaaggtgcagagcaaacaagttgtcatggcatatacctgttcagaaccaaatcaccaccagcagaataaaaagcacagaaacaagttccagaaatatgcaaccaagagcagctaataatgcatgttcctttaattgttaatctgttactgctatttatggtagaataatcttttaaattgatgaaagttggcttcttaaacattatccatataatgggtggagttggacatacaaagtaatgcatacaactaattgcaaacaattaaccaaatcacagaaataagtttcagaaattcttaaacattcttttctggttcggtgagtgaagcaattttttctcacaaacaatgcaactccttcagaatcctttagaatcatcaacaatgcaacaataatcacatctaaccacccaatctcacaaacaattgacatgctaatcacaaaatcaaagcatagaaacatcaattactacttaaagtttcagcagaaaaaggtttttcaatcaattaaacaaactgattgaagaagaataaatagaaggccccgtgcaagcattgaaatagagcatgctcattttgaaggccaagctgcgagagccagggattaggtctgcgagaatgagtattgagggaaatatatgaaccctagattggaattcagttgagtattgaggaaaataaagtaataatcatagaagaacaacatcgaaaccatgaaagttcaagagagaagacgaactagagagagaacttcaagagtgagttgtctttgtctagggaatttccaaattcactctcctgagatggaatttgaaatgtttatttcaactaactaaaatctctttctaaattctaaaattttaaattccttttagtaaaatatccaaacaattacttttaataaaaaagaatttaattttctgtaaaaaatacattacctagttaaattattctatccaaacaaactcttaatttatcattccccagggcatgaaactttggtagcctagttctcattatttacagtaccctcacaagcttacatttgccacactgaacattgttaaaattttcctctgtaagtaaaattactactcttattgatttatggccacttgtgtttaacatgaggttttccgtgtttgctggtgagttaaccagttactcagaaatattattcatgccctattgggttctgtgaagctgctaagcaagttatattttgcatgatatatctgaatatcaaacctaacagtaattaaatcttttgcgttaattgcatcattcttttacctgcagtcaagaggacgagctcagg

SEQ ID NO: 3774 - DNA, 345 bp, Glycine max
  Intron number 1 from transcript Glyma18g10120.1 (locus Gly ma18g10120) derived from phytozome v7.0 (chr-ID Gm18; pos 8929403 to 8929747 reverse strand)
cttccattccctccttcacccatctcccaacaaggtaaccgcacttcgaaaacgtgatcaaaatttggtttttcggtatttttagtagtgggggggtttatctagggttttagggtttattgaaaactctacagttttggcattttttatgccatgtgtgagtttagtttattctgttatgatttttttctatgaattattctgtcgattttagaatttctccactttccccttacgattctgtgttgagcaaatttagtgttagatagaaattctcgttaagtctatgtgtgttttgttatgttctagctgattccggttcaaaccaattttctgaattcatca

SEQ ID NO: 3775 - DNA, 1426 bp, Glycine max
  Intron number 1 from transcript Glyma14g26940.1 (locus Gly ma14g26940) derived from phytozome v7.0 (chr-ID Gm14; pos 32963124 to 32964549)
gaggtattcctcgaagcatgtttatcgagaggcaaacgtgtgtgccgatgcgttggcatatatatggctactagtattgaggatgagtttgtgggcggaaagactttttagtgttaaactttttttctaaaactatctcacgataaattttaaataaatatccagaaagaagtaagtcttataggtatctcatgacttatgagttgaagtcgaaaatcatttcacgactttaaatgcgactttaaataatttatgacttcttattttttttaaatgcgactttaaagttgtaaattatttacaactttaaaatcaaataattttatttaaattattatttttattaaacgggcaagtactgcggtgagaacatatatattcttctgtccgtcaatcttgttgctgataattaaaatatatgctaacaattttgcttatatattcttgctacaacttgcaacaacaatttttatctactcacatttcctttttgtctttttccaccacttcccttgtcttatattactttttttatgtaataagttttttacaaataactttactcgttatagcatatgatttttgtaagttacagcatatgctaatacatcttctttctttctggtgttctaggaatatatatcactacaagaaaaataacctatgcctacggacgcttttttgctacagacataaattagtgtaggtaaatctcaaaaatacttttacctacaactcactaatatagataaaactcaactacttgtaccaaccattatttggtgtaggcaaattcattaaaactaaaaaaatacttctacctacaactatgttgtgtaggtaaaactctaaaaaaacttgtacctattgttgattagtgtaggtaaaactcaaaagaattactacctacagaagcacagtgtaggcaaaatttaaaaaaacttatgcctacaactaccttatgtagataaaacttcacaaaatctatgtctataattggttagtgtaggtataacctcaaaagttttatacctatgattgttggtgtaggtaaaactctttaagactatttgaatttaaatactagtctcttgttttatttagtaaatactcaatctcaaaaaataatcattcaatttaaattaatttttagttaataattgttcaaaattttcattgacattcgtcgggacacgtgacacgtgtatgaccaaatttcccatttgaacttcggacttgagcgttgttttctcaaatccactttaatctaacccaacacatcaacattcaaaattgttgcccactttcaaaacttagaacccttgcttcttcttattttcctctcaatcttctttcttttctctctcactccgtgttcctctttctcgcagtaggtaagcaagttcacactccaaattccatttcg

SEQ ID NO: 3776 - DNA, 1084 bp, Glycine max
  Intron number 3 from transcript Glyma13g22190.1 (locus Gly ma13g22190) derived from phytozome v7.0 (chr-ID Gm13; pos 25774524 to 25775607)
tcttaaatccaaggttggtctattgttttttaactttttttaatttggctgtgcttgctgcagacaattttttagcaacatatttctgtttctatggtcatcagccattggctggtaacaacgttgatattagcattttttgtccaatgtatgccacctgttgttggatggtttgagagttttttccatttgtatccccttagaaaaatgattcttatccattctggaagctcaaatttcatgctatggaccttccaaaatcaagtaagtgtttccactgagggttgtggttgaaccggtcatctatctgcctacacaaagtttgagtttctaaggcttgagccttggcttggactctctgtggataggtatgatgtatgagattcgatcctcactggtgttgaacatatccccatccattctatggtaagatcattggtgagtcctaaactagaacaattcccggacaatgcctcttactggtaggtaggggtttaccacagcagccctgctgttcaggccaacctgggaatctccttctgtgtaccctaaaaaggtgttttcgcggtggcatgaggaataattatttttatgattgtttattatctcactaatgttgatatctttctcctcattataaactaattaaacaaggactctttgtttataggtgatgggtttgggctttgcattatgtcataattatttctcaataaattcagttacctagtaagcatctttgtaagatgcctgttgtaataatttatcttctattttcttcccgtggatttgccaaactgcttgcaacatgcttgttagttgatgttcaccagtcacttgaagtcaccataaaagataaagcttcaatttctctttaattaagaatcacattgaaatatttaaatctgtcccattaattaatttgtcatcatcgtctttatcatttatgattctctgttctctttatgctgttgttaccttgaattctttaactgttaaactactaatatacatgatctaagttcattcatgtggttctctatctgcagattcgctgcaaaagaagttgaacaacttgacaaaa

SEQ ID NO: 3777 - DNA, 1845 bp, Glycine max
  Intron number 3 from transcript Glyma03g41230.1 (locus Gly ma03g41230) derived from phytozome v7.0 (chr-ID Gm03; pos 46746909 to 46748753 reverse strand)
aggtaaaatattagtaaccattttttatcatgtctttttgttatattctaatagctattcttcaaacaatctttctttaaaaggaaaaggaacgggttgaaacttgcaactttggtcaaaatctagtttgtgagtattaagataaccaaggctcaaaatctggttatgttattttggattttattgtttatttgggtaaattgcacatttacactctctgccctagagatattaatgcttgttaaattttagttatttaatgtgaatgggcctcttaaagatagtctctctctgtggcactcaacactgttggtaatggcaactatttttaaactactatcacacaataaaaataaagattttgggtgaagttccaaagccattagtaggactatagtaaatattatttcgttcttaaaagtcctaaaattataggaataggatatgccaatatggtactttaatactcaccccacccatacccacatatattatttaatacatcaaatctaaaattagaaatattatacctaattacttattcaacaatacaaattatcatggatcgaagtctacacagatcatatacttctcatctcaaaaccctaagtgttgttgttgtcgtgactctgttgtctaaagtcttcttggcttcatattcaactagttatgggagcagttggttgttcttccatccaacttgcggtagaatttttaattaatgttctttgttttgttgatttttcataattaatttcagtatttaaaaaagaatttttgttttactagttgctcaaagaaaactcattaaaagaaaatattctgtttaattagaatgcgggtaatgggtgaggccatgagggtatatatatgtatgtagctaccatagggtacagagatggacactaaagttgctaccaatgtgggtgtgtttggagatgggtatttgtttcaaatgttggtgtaggaatggatactataatgcctttttcaaatcttacccatctcctttcctagtaggaggcctattcataattgtttaccatccttaagagtatcatttactgtaattggactggagtggatggagaatgtagtttttaaaattggagggaaaggaagtgtagtttaagcattacttgttggaggaaaatgcaattcaccctgtaatttaagatttttctcttgccatcaaataattgattaaaattatcaaatcctctctgaatcctcttgtttctcacttatactaataaaaaactttggattggaaacttcaattttaaaaatattatttaagaacaataactaattttctctctccatatttttcatttttttctctcatatacatgtgtgtgcttatggcttgtttgtataaacccaacttctatggacaacttttctgatggtcaaagttggaagcttaacaaaatggtttcattttccgtagttagctcctgcaccctcttacaagaaaattgatcttcattcttcagttaccttcaagagcacagacactaagaggaacctttatgaaaactgtctattagattacgactactcacttgaagttagtgccaagcggcagtaaactagtaatatcattttcctgtgttgccactgaattaactatcaagtaggaatcataatctgtggctcaatgaacatatgactaattgctgaaaataataattgttaatttttattgtttgattttttagtcaaatgaattttctttatcatatttgatagtcatgtgctcatattgcagtcataacagtttaactatttcttgctttgacatcagggtcggtttgagattatttcacttactggttctta

SEQ ID NO: 3778 - DNA, 1323 bp, Glycine max
  Intron number 6 from transcript Glyma09g08000.2 (locus Gly ma09g08000) derived from phytozome v7.0 (chr-ID Gm09; pos 7025983 to 7027305 reverse strand)
ccattttttgaattgcactttggtgtattaaataggtaggtattcataacaatcctgagttccctcccctatgaggggtgagatgttgatgatatttgctatatcttgtcatttgttgtattaatttttggaaggatggttctgttagtattaacaagtgatctgttgtgtcttgtatgcaccaaaagtgtgtcaagtaactgctactcatctgctgcaggtttatagaattaatgtgtagtactttctgaaacatatatgtgctagactgctagtattttgtatgttttgtgaagttgacttgcaagtgtgattgcaatattaaacatttttttaagtcagaatcccactatatattttatttccttttatagataggatttaaatcccattattaggagatttgattagctgcatattttgtatttatgaccaggaatcattgacccttataggaattgacagtgggtacaatgatgagcattagttcaggagtttccttttttagattaccttgtattctatttaagagcacatgctcttatatcaatatgaatcagaaaattatcctctgacaacatgcaataagacaacatgcaataagcaaagtttaatagcaaggaattcatgtactcgggctaaacatccacaccccaatgtaggtttctggaggataaaaagccagttttattgatgtccaaatattaagtgaagcaaataatatattggctgaaagtaactggaaatggttcaatttttgcgggagctaagatgtagtttgttgtagcataaatttggcttgtacatagaggagtaaactttactattgtacataggtgaacaaacttttatacttgtctgttgtacataggaaatatttagtggttcatttgtcccttggctttagatttcaatgcttgtgattatttttcttacctcttgcagggccttctcaaataaaattagtagttatatttggaagataaagtgaaatattttccaccatttagattcttagtgtcataaaaaaggatacttgaaaaaaattggtagagaccattaagaatgctattgtttttgatagagcccaatggaattgattgatccatgtaaccaactccacctcatgggataaggcttgtttgttgttgcttacatgatggcatgttgtttgttatctggtatttggtaaaattatttgaattctgcatattatatgctcgcatttattcttatgtgtgatacttggaatgctagaattgtttgccatctagcctgacaatgcatttattcttattgtgctgatatcattgtagcatcttc

SEQ ID NO: 3779 - DNA, 2216 bp, Glycine max
  Intron number 2 from transcript Glyma08g42330.1 (locus Gly ma08g42330) derived from phytozome v7.0 (chr-ID Gm08; pos 42331480 to 42333695)
ctctcgtggtttgttattttcacaacccaatttgtgtttttgttttccagagattgagcttttttgtttgccaaaccttgataactatgcattagtgtgctcctacttcaatggaacttcaaagtttgttttattaaagttatattataatttatgtcttatgagcttgaatgttgtcttgtctccaatgttagttgatttttgtgttaatggtagatgcttattctaaaggacactgcccggatccttttttttttttttttaataaatttttccaatgtagttatgtattagattgatgtttgatttctctgaaatttcatgtttcagtgactgttttccccctttttataaaggttttgtctaatgtcactcgttacctggaagaagttacatctagattataggattcttttggcatgttcaaaaggggaaaaaatttattttgattttgatgtttctagtgagttctatggtaatggagccctgaatcttatttttgcggggaggggggtggagctggattgttgaatatgatgcagccactaatttggtcgcactggtacaattggcagtaaaacagtttttgactactgagttcaaactgaattgaggtagacctttcatatttgaaagaatgaactagttgtgtgtttcctatatactatatagtaacaaaccataatactttagtggcaaatattgagatttgcatggactgtcttgtacttgattcatattgattccatgctacagtaattgataactaagttgtattgaaatgtatatagacaaattacttaagtgcattaactacatctggcactggctatgtgcctggaatgagtattgtagccatatggaagtacttgtgcatcataagtaatgcagtttcgctactttctcctgttagatgcatctttaacattgaatttgatttcctatgcaacatattgcttgcttctatatgtcagatttttatttaattttcatagagatcaagttgtgtatattgctagatatggtcctaagctaaatttcatctaattcttgaaataattcttaggattgttaactcaagttcttatagtttagcagccaagaagtctcttcactttactgtccatagttttgtccaagagattgaactacctttattctatctaaattctatctcccttacaagggaacaagaggatgtaatactaatgtaaacaatagtaaatttgaaacctgaagtgaaaaaatagttgaaataaaattcgcttactgagttggttactactattgttcttaaacattgattagatacagtaatttcaaaattagattttgtgatattatgagttgtgagactatgctaacttacattgatttaaactttcccaaacactgttgcttgcggattagaatcataatcatatatcacacaaaacctgatgaactgcttagtttgctgcaaggcattcctgtataaactagttacggttatgaactttaggcagcatcatgctaatgaaatatatgaaaccaagatattctaagcaaagactagtttcaattgagcatgaatggagaagctgtgtcatgcaattgtgacacatgaaacataattttggtggcaacatagtggtgagacaggtatagatgggaaaacaccagttggaatcattttagtgagtgaagatgaaacaagtttttgggacttgaaagataataagctgctttggagttgcacctttttttcaaaatgtcatttatttggctgcagagtagttccagtattttagccaaaatcttcctttctgcttgggtgggcatgtaccctttgacatgctatgatgttttttctttttcctttcttgtagtatcgcttgtagcaccaagaggatttctggtcctcctgttttgtatttcaacattgcaagatgattttgttgctcaaacatatgtagcactggccaaatgttatgcttgctataatccttttgttcaacaactgtgtttagagctaagctgaatatattaagctcaatattgttctcatgtttctgataccccctcctatctttttcttttacaattgaacaatgaagtgaatattttttatgttgataaaatgatattatcacctctaacttattacttcttttggtttcttgtgttgaaaaaccaaaatagtgggccgttctctgttcggtggattaagcaacagt

SEQ ID NO: 3780 - DNA, 4186 bp, Glycine max
  Intron number 17 from transcript Glyma09g21300.1 (locus Gl yma09g21300) derived from phytozome v7.0 (chr-ID Gm09; pos 26271029 to 26275214 reverse strand)
aggaactgttgtccagcaggaaaaatatactggaggtatagtttcactttcaatctgttctcttgttcataatttatctttcttgaaatctctattgcttagataacaaggggttgagttagtacctaagtttatttttctccgtgataccggtattacctatttgctggtatggcaatgcgtgaagttgtatatttcccttaaattcttaatgctgttcctatctgtatataaaaaattcactgttaaatctcaagcactgaagggaatgggggagaaaaaagaattggcaaagatatattgtgcacaagtagagatagtatttggatagggggaaaccacaagtgcatggtcattgtcaagtattacctctggtcctatatataagaaacaaaaggtaacattttcttggtcttaattataagaaacacgattacttaattgttaaattttcttttcacccctaatgattactctcttttcccatgaaagtgggtgcatttattgagccatcaacaaaacaaaacatactcattgattgaaaaataatcatatcttaaatcatttaatgtcatgggtagtcatggaataaaattaaagtttatgacaagctaactaatctaattatttttactggtcttgatgaattatgtaattgctacttatatataggaccggaggtagtaataaatatcgaatccacaaggattgtgtttttggctttgcaattgtcacaattaaaaatagaaactaaataatttggaaaaatattgaaatttgatttgtcgaatatttgatttaaaaaggtaaatattaaataaagataaagataaatgacaaaaatatattttggataagatttagatttgtgaaattctaggatcagggtttcgcatcaagacacttgttcaattaatccaacaattcaatattcttcctaattctcttataatggtgaattaatctaaggtaatttccgctctctttcaagaaacggagatatgcctaattaaattaacccctaatattgtggtgctatgttcaattaagccctttacacttgttactagtttgttttatcatgaattctactggcataaattaaaacctaagcccttctactatggttccaacacgtttagttcacctctcaattcatccataagcgtctaaaatcatgcaaacggtgatcaagtgtttaatatgtataaattacaataagagaagaatgaaaagacaaaaaagtaaagaaaaccttgaataaattaagttaacattgaacaattgtcatggactatgtcctaatcccagaacaagaagaaatactcacacatgatcatgagcaatcccaaaggaaacataaaaagaagaaaaaagagtacaaatcggagaagagaaaagccaagaaaatccaaagctctccaaagctgtcaattcttaaagtcggaatccttctacagagtgtttctcagctatttaaagtcagaacccagaattgctctcttttccttccaaaaaggtttcggatggccaagtctgatcgtaaaagtccaatatcgaccagaaaaactccatttagcaccaaagtcattatggcttctgtacacatgaaaacaaccaagacacacatgtttgacaaaaaggataaaatgcaatgaaatgaatagaaacaaaggcctaagcaactaataatgcaaagaatccaattgggaaaaacccaagtttcacattggctacagataagatcaatatagagtatataagtggggggaaacccgcaccctatgagctagcttttgggatttaggtccaaaacttacattctaagaaattctaactaaaatgcttcctaattaaagactaaatgcaacacatcatattccaattaacaagtgggaaaatatgtgttggaaagcagcattggttgtggtccccccctaacttgctttaattgtggcctctttggcctaccttaattgcaacctctaagggatgtactaagttaatgaatctagactagtattctgacattcaacatcaagctgaaggctgaagctttctaagctctaatcttgctatgaagatgtactcaaagaacagaacttgaaaatatatgggtgcaattaaccatgtagttggagagagaactcagcaaaatggggaattaaaaacactgtatgggagacaatgatacactgccaaacaactattacatggcaggaattatgcacaaccagttaattagaaacagatatatatatatatatatataatacagagagagagagagagagagagagagtaaaactttgtggatctgaaaatctaatttcattcccactgagattctattacaatctaacttttatactagatttagaaaacttgcagagcaaacttctaatagttagctgccagctgtcacttgacagctggattactaacttccacactctaaatcgagtacagcactcacatacagatgagctgtagaagcatggaacaagagaaggaagagaatcagaggctttaattggttaccatcaccttgaaacaagttaaattggcttgatgttatgcttgcagctgaaaaagaacacaacaagctactcatgcacatagctgaacagtcaaaattctgcaccaaacagtctatataaagccatgcagcagccaaacagtggaggctagccggccaaacaacagcaggagcagaaaacccgtgtaggcataagctgatacatatcaaacggttaaggtagagaattttagagtacatttctgtcttgaaaattagaaaaatgtacaaatgtgcagagtttctgaataacagaaataagagagcctaactggacagttataactgtcactgagacagttctgactgtcttacaaacagctacctgaataacagttgatacttaatatgtagctgtctctaacaaactaacacaagctgaaccgaaaatagtattctttcccaaaaaacaagaactaagcagttgtctactaggaaggtacggaccaaacatgtgcaagcatatcccatgtagggcctgcatgcaaacagacctaggtgcagtgacacaaaggatagtgacatgatatggttggatcaggagcaacctgatctgtggtagttaacagagaatggccaaaatcatactgttatgcagttgtaatatctggaaaaaccacctgaatggggttgcaaggaatgttgttgtgttgttgatggtggttttccaccctatagctattgggcaacatctggatgcaatgttgatgtcactttcctgaaaaactggttgggaattgttgataaagaattacagctgctaaataatattttggagacaaaaagtggcaagattttcatcagaaaatggagtagacaggctgtgtcttgactgggatggttgagaatctacctgatctctagaaatctgcctggccaagtgctacatgactgggcatgaatcttatgatccttgaagagaggatgatggcgattgtggcataaaaatggcaacatgaaaggctgtgccatgtactgccatgagcagctggaagcgtgtctcttgctctacctgaaaatctggctgcctatggattggtgcatggcgcaagtttctttgttgtgctgggaaattgtctagaagcagtgaggaatgaggcagggtttgggtggctaattgaaatgaaaatcatggtcatcccatttaccagaaaaagaaatcactgtaggcagtgggtctacatacaagtacagtgatttgtacaagtttcttcactactatatatatatatatatatactggatttggttattgctattcaatgaatgttgtcactgtttacattgttttttaactttttggacactaattgtgtggtgaaatacatgcgctaatggcaagactgttaactttgctaaaaatgtgataaattaatttacagcaacctggaagggcatgtttttttttttttttgggtttgactataattcgttatagctaaagattacaggagatctaatgaaaccataatctttctcattttagaccagtttttctatgacttaggggctattattgttgctatttttctcttgtggggatgacctgtttgacctctttctcatattttagcttatagaacaagaagcaattgaactgaagagtaa

SEQ ID NO: 3781 - DNA, 1592 bp, Glycine max
  Intron number 2 from transcript Glyma20g29700.1 (locus Gly ma20g29700) derived from phytozome v7.0 (chr-ID Gm20; pos 38546020 to 38547611)
aggaccagtgtggaaggaattttactggtatgttaagtgatttctctctttctttactctttttttttttaattataattgtgaattggattaattgatttcaataagttggtgaaattataagattagtatgccaatatttggttgcgttaattagctgaattgaatgattggtgatagatgatgatacatgtttgattttatcatggtctatgttgcattgtttattgatctacttcccccatgcaactttaatattattgaacctagttgactagatctataaaattgcatcaagggatgtctttacttgagtcaaattcttagagtaacccattaaagtacacagtgaggtaattaggtaaatttggtatgacaacaacaacaatgttactgaccattcagttcagttaaaagaccaaagtttcagcaatgttatttaccacgaaatccctcttgaccactttctccaatgtccttagcctttctctccttctcttcataggactaaaaaccctacaatctactcttctcattggtacctcctggggctttctttgtgcatgtccaaaccaccttagttgattctccattatgttttcctcaattggtgctacaccaatctttcctctatatacaatcatttcgtatcctgtattttcttatatatggtcaccatgcatcttaacattctcattcctactaccttgaccttttctcttgttgtccctttaaagaccaacattcactaccatagagtatagccaaaggtatagtactatgataaaacttgcctttaagtttggtagttattagttactctgttatcacacaaataacccccgatgcatttctccattttagtcatctcattgtatcctatgcatgacatcctcattaatttctccatcatttcgtagtattgatcccaaatatttaaacttagacacctgataaggcatctcttgataattgcatgtaatagaacgtacatttactatagaatatggggactaatctttgttgctgtttttgtcagtaataaataattgacaagtatccaatcatgggcatctgaaattctatatttagattggatagtggtaatactgtttacatctgaccatctacaaatctcataatggtgagagccttatgtattgtgttgcacagtatgagggtgtgacaataagattgttaactttcgacctggtggtcatgacttgtgaggtatagtcatggagacatcccctctcacctaataaatagaatcaaatttgacaaagggactagaagggcccctctaagagaggggggggggggggatggatcccatttttggtgggaccccctctacatacatctgatcaattctgctctaaactcatttaggtcacttacatttttactttttcaattacttatacctatattggtttctcactgtgttcttgttaattctcatctatggcactactttcatagagaaagactatctaattcccttcaagattctgctcattttcctatctcatctttatgattttaaatttgcaggtacaagagcacaatcatcctcatatacttcttct

SEQ ID NO: 3782 - DNA, 1224 bp, Glycine max
  Intron number 13 from transcript Glyma19g04230.1 (locus Gl yma19g04230) derived from phytozome v7.0 (chr-ID Gm19; pos 4305728 to 4306951)
gaagcatcatacttgcaaaggaacctgttcttcaggtatattaagtaccattaaagttttggtctcgtgcaagatgtagggccattccccttccccttatcacaccccacctatattctgtgcaattgggtggctactggctatttaatcaagttttggaggattatatgttactaagacgtgtgtgcatgcatgatgtgtggtggaggagttaaaagggatagaaagagggttagaattgtaatgacagggtgtctctgataggtatggcttgttaaacagcgaactagtcacctgtcttgagtgaaccaatgctaagttgaaagcttatgcttttaaaaacttttggttggttaaacttagtattatgcatcactaagctgcacaaacatattccactaagttatctgttgggtaatcaacgctctcacaaataaaattatccactcccataaaggattgtgagaacacaacaaagattacaccgtaagaaaaataattacaaacacaaaaatttaacgtggttcggcacctttgcctacgttcacgaaaccgtctcaaaagtatttcactatcacaaaaatgattacaagattgtaacacaccccaaataatgtatcactctacaaacccgaataccccactcaatggttacaagaaatgatagcactcttacacaaagacacttttctctcaacaaagtgactttggttcacaatctctcttcatgtattgtgtttttccactaattctcttctctatttataatgaaaattgttaccaactataataaataatctctctaagaagttgaaacaaaaataacttttaatacatccattcaactaaggttcatctaataaaatgtaatattttactttgtatttaaaccacctaaactttagtgataaaaaaattcaattcccaatgtttatgcaccttatcttttggcttgcaacactacattatcaaatgtattttaattaaaaccatgaaatcagaagataagaaaaattatgtgtaatttatatatccatcgttgttttagttatataatagggcttttgggccatgatgattgccatgaacttggatatgatcttggtccagattttggcatttggcttggcctatgataaggtgtagtgatgatagtgactaaaacttttcttgtatatgttcttttcaggctaattttgctcgagctgtagcatctcttagcaa

SEQ ID NO: 3783 - DNA, 1178 bp, Glycine max
  Intron number 8 from transcript Glyma07g32780.1 (locus Gly ma07g32780) derived from phytozome v7.0 (chr-ID Gm07; pos 37677150 to 37678327 reverse strand)
tggctgaatttccttttggcagctttttacacccggtatattttttaactatatatttgattttaggcctgctgcattttgttttaatttttcatgtgaattttcaagccacatgctgttgcatctaccaaaaatgtgtttaatccatgatatatgacttatatcaacagatgcatggatgagtttaataccaatcttctaaatgattttcatatttgatgattgcaaaaggaaggaaagcattggatataactaacacaagaacttaaggtttatgtttctgttcaaagaatcacaaattttaatcatgaatttgaaagaattgtggatatacttttttgtagctgaattcttgagtaggattacattgtctcttagaatttgggtttgagcctaactcaacctagaaaaccaacgtgaggtgagggttgccctctacttatgtacacaactttggccatatcactagtcaatgcaaattctccaacacactcttcacgccaaggactagacatcttgagcatgaagtttgctggactggacatctgcgggtggtccaatgagggcctgataacaggtggtctgaaaggcctaacattgatcgttaggataggctttgataccatcttagaatttggatttgttcctaattcaaccccacaaaactagtttgtgaggtgagggtttccctccacttatatgcacaactttgatcgtatcactagttgatgtgggatctccaacagtctcattttgttaaaccactagagctgaattaatggttttcaagtgatatatccagaaaacatagtaaataaataatacaagccatgttgtctagataaaaacttagaagactagcaaataccagagtaaacctatccataattatattgccagctttctaacatgaatactgaaccattttctgtgatttaatcaactgtggcttttggttatcctcttatttgtactaattccatgtaaaatgaagcattatggggttaacttatgttacaattatgatgtagcaaaaagaaaagatgtttttgctacattggggagcacttagtcttccaaatgcaggtctagtcccatttttgcaacctatatattttataaccattaaccatgcaattgcaggttgaaacagcagcagattctgctccatttttgtc

SEQ ID NO: 3784 - DNA, 4488 bp, Glycine max
  Intron number 8 from transcript Glyma17g35000.1 (locus Gly ma17g35000) derived from phytozome v7.0 (chr-ID Gm17; pos 38957306 to 38961793 reverse strand)
attttgatccaagaggaacttctaccagtaagtccaacattgcggttgctgattctattgatctattcattttaagagaattatttattccttaatgtggagtaaaaattatgttgcatattttactgttatgtatgtgatacatgcaaattgtacttttgagttacaagcctttcaagttcaacatattggtggtggaatcaattatctctgtagacttagtttctcagatttgtcaccatcaagttgactaaaaactatagttaaatcccctttctacctttctttgagtgtgactttctttgtattcttccatgtgttgattccattcatttaggagaaatattaggctattcattcaagttcagtataaactactgttgtgcacattttactgttacgtgtgatgcacatgcacttgcacatacaagcttccaaatttcaacataataagcatccaaggacttggggaatcttcccttaaaagctagctgtcaaggggggagaagaaagtcacctaagttttccaccgagcatcccatactgcttcatgtgggacttaggcactttataatacttaagtccctatcatagcattgcccctgtgagttgacatctcggtgggtgcactctacgatgctttactcagtctttctagttagcccttccataagtgacatgttttgaaacactgacaaccagctttgacaccaatgataagcacccaccctccattaaaagctagttgtcaagggaggagaaccaagcctcttgtgtactccatcgggcatcctactagtcaatgtgtgacttaggcaccccataatacccaagtccctatcataatctctgtatacttgtcaccatttgactgcaaacaagttaatcccctttcattctttgattgtgacctgcttttttcagccatatactgacaaactaaggccatttgctccttaaacaaccaatgaagaaggttgctgtaagttttacaccccttctcccaccctccaggccagctattggccaaaaaaagaagaaaaaccaaattgagtatttgactctatatttggtggtgatggaaaacatttggcaagtgcactaatcgtttcaagtactaaaagatgagtattgttcctgaaaaagaattgcccctgtgagttgacatctcagtgggtgcacgtttcaagtactaaaagatgagtattgttcctgaaaaaaaattgattttcaattgccattatttgatctaaaaattgaaatgaatgaaagaatttcatattttgacatgaataggtaattttttttttttttggaaggccaagataaattatattatatagtaaaagtaccagaggtactacatattacaaataggatcctgaaagatcaggaaaaccccctacacgaatgaaaatcctaaaaacagaagctttaactaaaagctgtggacatatttgaagaccaacaataataaggaatctggaagttcctttcccaccccctcagccaggtccatagtaggaacaatgagttatcttgcagcctagtaatatcaaaatcttgattctggaaaatgatatcattcctgagcctccaaattgaaagtgtagctgctatccaccacattatccttcttgtattagagacctttgatgctgctgaggaataatgctggagaaaattatccattggcctacagtgaagcaccttgtcttcctttacccaagataaaaattcccaccacataggcataattttgccacaagtgaaaaataagtgggatgcagtttcaggttgactatggcagaaagggcataaatcattatccacctgaatttgcctcttggtcaggttatccttcgtgggaagtctatcccaaagtaacctccaagcaaaggatagggctttaggaggggctttggtctcccaaagattcttgaatcccagatgctgaccttcaacaggaagttcaggtttaataacttgatagacagatttagttgagataatcccagtggattcagctgtccaaacccaggtgtcattgagattgttgtttaaactgatttggtggatgtgatcaatgaatttagaagctaactgcacctcgttatcaaacaaatgtcttctccaaaccatgttccaaacccacccattctctgtccaagatcccacctctgctaccctacagtctctttgagaagaaatgttgaacagttcagggaattggtccttgagagaaactccttcatcaccccaaggatcttcccaaaagaggaacttgtcacctctccccagcttccacctgatttggttagcagcattgatcacattctgatgctgaaagatgacccttaagtcagcccaccaagtagaaaagtactgttttctaggcccatgctccaatcctctccagccattgtacttagagatcaaaattctggtccaaagttggtctggttggtgaaacatcgtccacttccatttgaacagaagagcctggttgagactttgaatatctcggatccccaacccacccttatgtttaggagagcaacactgtctccaagacatccaagcaatcttccttccttcttgcttccccccccaaaggaatttcctttgaatggcagaaatcttatgcatgatagctgaagggaccctgaaaaaagacaggaaaaaaagaggtaatgctgttaagacagcattgatgagagtgatcctaccagccaaagaaataaatctctgattccatttgctcagcttagcctcaatcttccttatgacaggatcccagaccaccctccttctaggattagcacccactggaattccaagatagcaaaagggaagttgcagtaaatcacaattgagataagtagcagcagaattgcaccaaaccatagattgactaacagcaccgaactggcttttagcaaagttgatccttagcccagaaaccatctcaaagcttctaagaatggtcttcactactctgacattttccatggaagcttctccaaaaaacactgtatcgtcagcaaattgaagaacattcacaggaactttgttcttccccaccaaaaaacttctgaatttattttgagaaattgcctctctcatcagtcctgtgaatccctcagccactagatcaaagaggaaaggtgccaaggggtcaccttgtctcagccctctttgagggttaaaggaagacaataatctacagtaaaaatatatgcaaagcattcaagacatattcacacaaaattgaaaaatgatggttaacaaacgttagcattagaatcctttcagttctcttcctatgtaacctaattccactctcaattcaagatataaatctcaattaaagatcaaattcaccagattaggctaaactcaattccttgacatttagctcctttgttcaatttaagaaccctaattcctttggtgaccctaaccctaactcaaacaagcaataagcaaggaaatttatgagatttctaactgcctagttctattcctagaatctttagcaattacggctattcactacaaatttcaactcaaaaaccaatcttccaattgtgaaattgagtttaaattcaactcctagtcctaggtgaccaatctaagagaagtattaagcatggaagaaaacactcaattaaaagaaacaaacttgaattgaaattgaaagaatcaaatcacacaaggattggaatgaaattcatacatccttaacataaaagcttagttacacatggactgaaaagagaaaagagaggagagaggaatagagattagaaaaaactccattaaaatttgataatcttgcaagttgattcttcaaacttgaagtcccaagtcataatgtcaaaagagaggagtttaaatgaagagattaagttttgaagtcaaaagttacaaagttcatggaaatctttaagtatttatagtgtattctattgttattgtgtggcacactcttctctaagtataacacacacatgtaatctaataggctcagcatggcaacaaacttcttccagcatggtgatgtgctggtgctagcatagttattctcatgtaactccccttcagcatgctaatgttcaaggtttcaatccatgtgttccaatgcttgcaaaaccttctttcctattccaaccactactcaagcaaccctgcaaatgatggaaaagtgaataggaatggatactcatcattcaaataagaaaattatcacaaaaattaccaaacacaactaaaatataaagtattaatacatcattaaatttctataaaatgaaagtctaatactaacacactttaaagcataccattttatttctctaatttaccacaaatatagtatccatatgcacttataatttgtaggactgttttaccttttaattgatatttaatcattttttcttttcaacagaaacttcagccggaaactctaaccaggttgatctc

SEQ ID NO: 3785 - DNA, 6342 bp, Glycine max
  Intron number 3 from transcript Glyma04g18960.1 (locus Gly ma04g18960) derived from phytozome v7.0 (chr-ID Gm04; pos 20774567 to 20780908)
tacccactgcttataaactttttacaggtgagaaacactattttactttcctcctacctgttcaaatttttagctctttcaaattcaataatgtttaagtactatacaagaattctagcccttgaatagattaaagacaatttcaaaaactcaggagtaaaggaaatttcttgaacaaagtccaacactgataatgaaaagtatgaaagagaagacattgacactgatagaattgtaaattcagtagtatatgttgttacaatagtttatggcaaaccgaaaaaattactggctaagtcacagataatgtcactttctttaagacgtttcgtggcactgtcaaaaattgtgcaagcagactatcaaccacgacgtccccaggataaaacagcccagatcactgtataagattcccactgcactgagggaaccttttctagaattacaccctcttgtatgacttgaaaagtcactctaaaaggcaaccgagaaatgtgacttaaaaagtcactcttaaaaccaaccgaaaaatatgacttacaaagtcactcttaaaggcaaccgaaaaatatgacttacaaagtcactcttaaaggcaaccaaaattttagagcgacagaaagaaagagggagaagtttgccgaaaatgcatcgactgaaatatgagaaggagaaagaaaagttaaggaaatgcttctcaactggggcaaggaaaaaagaagaaatgagctctctatatatatggagtgaaacactattcaagtgtttatcctgagcgatgtgggacttgaagcttttttttcctttcttttttttcaaactttcatttgttctaacaattccccacttgaaatttgaaaagaatattttcgaggatttcataaaattgtgcataaacaaaggtgttatacaacttgaacctttgcatagtgagtaagattcagattttactagagtgactcgaagtcttgaactctatctccgacatcaaaccacacacaaccttttcataggtgtattctataaagcccgtgcgttaaaggccatgcatgtctatcccagtatagtgaacgctctagaaatttttgcccaaaatttcatatgaagcggcccccacttcaacattcacataggtgagtcgatcaagagtactcctgtagcctaggtactccactcaatgtagagcatagatctcattaagaattatgaatttttttcataactcatcctcttgttacttcaggaatcatgctgctttcacttataacaacatgttcatctcatatcatttcataacttgttattacccattgaacctagttcttgggatctccagtcatataggtcgggttaccatcatgaatgatcatcgcagtaagggcaatagtcccattcttttagaagtgttatgaactttctctctagctaatcctttcgtcaaaggatctgctaaattatcatcagtgcgtacgtgatccactctaacagctcctgttgagagtaattctctaacagtgttgtgcttacgacgtatctgtcgtttcttaccattgtaataacggttctcaatttttgcaatagccgcggtactatcacaatggatcaacacagctggtatcggtctttcccataaaggaatctctgcaagtaagcttcttagccaacttgtttcctcactagcaattgctagtgctatcatctcagattccatagtgcactgagctaagatagtttgtttctttgacttccaagaaacagccccaacagctatgctatatatatagccgctggttgctttggaatcatctgagagagtgttccaatctgcatcgttgtatccttcaagtacagcgggaaaccttttataatgtaatccaagatttatggttcttttaaggtacctcattaccctttcaatagcgtgccagtgctccatactaggtctactagtaaacctgcataataatcccacaacataggctatgtcgggtctagtacaatcagtggcatacctaaggctgccaatgatacttgcgtactcagtttttcgtataccttcaccagtgttcctaaacagttttacacttggatcatatggtgtactagcaggtttacagtcaaagtagtcatatttctttaagatcttctcaatgtagtgagattgatccagagaaattccctcttttgacctaataatcttaataccaaggattatacttgcttctccaaggtctttcatatcaaagttgttacacaacaatgatttcacattgttcactacatgaatatttgaacctaatatgagaaggtcatcgacatatacacatatgatagtgcaaatattatttacagatttgtagtaaatgcatttgtcactttcattcaccttaaacccattcgagaatattaagttatcaacttttcatgccactgcttaggtgcttgttttaggccatactaagatttatctaacttgcagactttatcttcttgtccatgaatcacaaacccttcaggttgttccatatagatttcctcttccaattcaccattagaaaaagcagttttaacatccatttggtgtaccactagactgtgaatagcagcaagagatattagcacccaaatagatgttattctagtgactggtgaaaaggtgtcgaagaaatccacattctctctttgcctaaaacccttggctacaaggcgagccttgtatttatccacagtaccatcaggttttagtttctttttcaagatccatttacaaccaattggtttgcaaccaggatgcaagtctactaaatgccatgtcttgttagattctaaagaatccatctcatcattaatggcttcttgccacaagtcagcatccaaagaagacaaagcttcttggaggtttgatggatcctcctctaatgtataagccatataatcggacccataatctttagcaattcttgctctcttacctcttcgaggctctatatctggttttggttgtgcaagattttctactaatagtaggaagataattggatgaagtacccccactattccttaatttaaaaggaaatttattttcataaaaatcagcatcatttgactctatgatcacttttgcgtttaggtcataaaacctatacgctttgctattaatagcataaccaatgaacacacattcataggctctacttgcaagtttaaccctcttaggatctgggatccttacataggccagacatccccaagttctcaaataagacaaatttggttgtcttttctttaatatctcatagggagatgtcttgctttttgatttgaggattctatttagcacataacaaacagttaacaaaatttcgccccacaaaaaagatgttgcactagaactcaacatagtagctacaactaattctgtaaaagttttgttctttctttcagctttaccgttcatttcaggtgaatatggagcagtcgtttcatgtatgattccatgcaaattataaaactcattaaacaaactggaatcatactctgtgcctctatcacttcgaagtttcttaattttcttattgaattgattttcaatttctgttacaaataacttaaacatgtcaagcgcttcacttttatttttcataagatatacatatgtataatcagagcagtcatcaataaaagtgataaaatatcgttttccatttctggtcaacgttccatcaaattcacatatatcataatgtattaaatccaatggctaagattctttaactactgatttatgtgatttcttagttattttagattgactgcaaaaaacacatttttcaaagtgatttgaagatagcttttgaataaaacctaagttactcatattagatatgcaacgactatttatatgacaaagtctagaatgccagatattaaaatcacacagcatgtaagcagaaggagaaactttattaatatcaagattcaatttgaacatgccatcagtggtgtactctttccctacaaatacctcattcttggtcaaagtaaataaatcagcacctatggtctgagtaaacccagccttgtttaaaagaaaaccagaaaccagattctttctcatctatggagtatgcatcacatctttgagaatcaaagtctttccagaggtaaacttcagttcaacatctccagttctagcaacagtagtggtgtgggaatcacccagcaacattttcttattttcaacattcgtgtatgttttaaacatagcacgatcatagcagacatggcgggaggcgccagtgtctatccaccatccatttgatcctccaatcatattgatttctgttatcacagctatgtatggctcttgagtcatgttagcttggggagcacctgtcattgaaggatttctgcatttacgtgccatatgtcccggtttgccacaattgtagcagaggaatggctcaccgggattattcttggcaggtggatgttgtctagcatgttggacccttggggggttcttgttgcggttggaggtattgctcacattgcggttctgattcttaaagtttttgccaatgggcttcagaactgcacctgtgttcttccttttagtgttgttgtgagacacaaccaacacttcatctttctgatcttgtctgcgtgcctcttcctcaatgcgcagacgtgtgatcagagactccaaagagaattctttggtcttgtgtctgagaaggtttttgaaatccttccagccaggaggcaatttgtctatgataacaacaacctgaaattgctcatccaatgtcataccctctgatatgatatcatgagcaattttttgtatcttatgggattgagactctactgatttatcatcagtcatttgatacttgaggtagcggctaacaacattctttttagtcccagcttcctcagtatcatacttcttttccaaagccagccaaactaatttggcagacttatatgggctataataatcataaagatcatcagttaacccattcagaatgaaattcttgcatagataatcattttcattctagagaactaattccatagtcattttatccttcacttccttctcaacattctcaagtaccaccggaatatcagtgttcaaaacataggcaacttttctcatagttaaataaaacatcatcttttgttgccaacgtttgaaatgatacccttcaaacctaaaaggtttgttgaggtcattcctgttcgagccagtaatatctacgatagccatagtagaaccgaaaacgtcttaaaattgttgttacaatagtttatggcaaaccgaaaaaattactggctaagtcacgaacaatgtcgctttctttaagacgtttcgtggcactgccaaaaattgtgcaagcagactatcaaccacgacgtccccaggataaaacagcccagatcactatataagattctcactgcactgagggaaccttttctagaattacaccctcttgtatgacttgaaaattcactctaaaaggcaaccgagaaatgtgacttaaaaaatcactcttaaaaccaaccgaaaaatatgacttacaaagtcactcttaaaggcaaccgaaaaatatgacttacaaagtcactcttaaaggcaaccaaaattttagagcgacggaaagaaagagggaagtttgccggaaatgcatcggctgaaatatgggagggagaaagaaaagttaatgaaatgtttctcgactggggcaaggaaaaaagaagaaatgagctctctatatatagggagtgaaatactattcaagtgtttatcctgaacgatgtggaacttgaagcttttttttttttcttttcttttttttcaaactttcatttgttctaacagtatataatatgtttccattgctggttggtaatcttactacagcctttggcaagcttcccttattaactgtgtattcaatcctcataaattccttttattcacatttcttaattaggttaattgcatatgttcaaactcgtgtaatttctcagtttcacttcacttaactttatatatatatatatatatatatatatatatatatatatatatatatatatatatatatatatgaaggcgtttacaactaactagttgcaaggtatcacagtttatgccgataaaaaaacaaatcacatacagtttatggaatatgacacaaataactgtccataactaaatgactttgacttaaaatgaaagaaaataactttaaattggtacgtcccagtttcatgttatcagagttgttaaatattgattcttgattttgcttaggttctgcctgg

SEQ ID NO: 3786 - DNA, 7251 bp, Glycine max
  Intron number 2 from transcript Glyma20g01450.1 (locus Gly ma20g01450) derived from phytozome v7.0 (chr-ID Gm20; pos 979251 to 986501 reverse strand)
aacacaggcaagtttattattgcttatataatttgaataaacctatatatgctagtataggttacatttaaatggttattctttcaatctcaagtttatgatgtttaaacatatgctttttgtggatagttgtggttgtctctagttgtggactctgtatcctatccaatgcatctggcattctgaacatcatgatatattctgagtcacagtttgcttatattcctcaaaaaatttgtttgcagctttttgtaaatctcatttttattttacatttatctgtactgactaataagatgacataacatccatactccttaaaattgtaacagttttaggtgtggatagttctagttgtatccagtttgcactctgctagttccatctcaacaggcattatgattattaacaactatttccaatgttgtcaaggtcaacaacctacttgggatcaggagggggggaggggggtgcaagatcataaaacgtaggatagtaagatcttgcccaaattgtaaaattacagataataaattcaaaacaactcgagagattggaaggttggctcaagacagcaaggtagatgtgtgagagacatgccagattggaaggttggctcaagacagcaaggtagatgtgtgagagacatggcgtagatgaacagtggttcagaacttgggatgaatgagatgctgtgacctgcgaatggcttgaacaatagatgggatctgttttgggaagtaaaatcaacaatttagggaacaaaaatgggttaaaatccatgtttatgagaatcaggtcgcgcaacctggcccaaaaatctataattttaaaatccaattatgttattcttttctttttctattctacactttcttttaccaggatagaggacctaaactgtctttgaatgagagagtataattattttaatcttctgtgcaacatctttgaagacataaacctataaaagtgcaaacttatgattttaatttaaggatgttccatgaaagtagttctttactgctgcgctgatttatgttatttggttttatttcctgctctatatactctgtacttatcttcattggatgacataagtcatattttaaattatgtcaaattgttgtgcttataacagtttgtctttttgatcatagcttcaagaaattactgtttcatcttactgtagtagatacaagtctagcaagaagcttaaatgttacatcttttacggatatgctcctacaatcttcaatttaacaattgtggtctagattgaacattaatcttatggtcctatatcaactgctaattaactaaattagagcatatgatggtagtagatcttaaaactgtaaaaagatttaacactcacacccttgttttgtcaaaccacaaatgtgaattcttgcatctgtagatggcattgagctgtatatgcagattagggttctgttatgcaatggggaaagctagcttaggacgtttatctatggcttagaaagtgtattatgttgagattttatttgattttgttcatgctggactgaaccatttttttgcagtacattttcataatcaagtgcttttgtatctttagtttatatttgtggtcatgattttgagatgtgtactagaaagaatagattgaccatgagaagaaacatttaggtggccagttaaaccttaaataaatagttagttataggcttctctgaaatagaaaaagttgactaatactgtccctcaagtctttcctaagcaaatatatttaaaacaaaaaaggaaattgggctacctatatgggaatattaatagcacacaatagtgggccggatggccattggctgatattggaaagcaatcactgggcattttattgtcatgactgtagtggcagaaatagcaagcaaaattgtggcaaatagtgctatagtatcaccatgccaattgcaatcaaaaccccctttttgtttctgttacactgtcgattttaggggtaaaaacaggattttactcccatttatggccataaggataagggaaagctaggactttagctctttcctgaccttccgtttcaagacactcagcatttctgaactctgaaggatgcccatccactgttgtcagagacattcttttctccagccattttctactttctatcattctctcctgttgctggctgcattctgtctctgtttccagccaactttctggccaccttggttctttttccaacctttttctattgcaatcggtatttacttgtatgttttgcttaagacctatgaccttttttttgataattatgaatatatcatgaattttgagttttttttccagcatttatatgtatgtagtataaatataaattatataatctaaataaaatatcacagtagtggccatcttactatactgctgtagcatttttggggtcagttgctatgcatcgctatttgatattgatgactattctgtatggtaagtaggtaacttagtttctaacctcccatctaaattacaatgtaattcttttagtcaaagtgactaacaatgaaaaagccattggcataaactgccgcttcatacatctattttgggcctaattttagtcaacatgttcttagtcccttgtaagttaaagatgttttcagggttttagtttggtttgattaaaggggttgattgtttgggaatagacctcctattgggagagtctatgagaggatgcatagggaagctgtagggcatcataacccttttagttagttgtatgaaggggttgattgtaaaaagtggcagtgattagttagttgctagagactaaatatgtgaaggtagggtctgttgaagggcatacagattgtaatttgggaacttgtgagtgagttgggtgactcaaacttctcagcagcctagtgtaatcgttcttcatctgttcttaagtctgtttcactttgggtcttggggattagtgataaaatcattcttgctttcaatttttggtactggtttctatcattgatgcaatgcaaatatggctgaggctgggatacctgcatagccttggagtgcaattttataatgccttttggggctctatgagaaaaaaagatgaatcatatagcggagggtccatttcaggataaggagttcttcctcaatctttaatttggcttggagtttgtgtttttcgtacttgttctgattctcattcgcaaagtcatagatcctgatttaagcttttcttttattgagtggcattgtgtatttaattggtgcatactcatattgctatccttttcctttttatattgcaaaattttacattgctataaaggtattagacacattttggattttttatacttttaaaggaaaaaaaaaacattttcaacaaccaactcatcttagatcaagaatttgtgattaattaacccattcgtgtgtgctagagaaattgaatccaattggatatacttcataattagtttttgtagatttccttaaggtaagaaaagattacatcgcatcaggctttgcttcttcaggggggtagaaatcataggaagtgggagcaggagatcattgttgtacccagctatggttccttgcgagactgagcttagtctgagcttgaaaccatgctgctggcaatctaattacatgtactgttttgtacctctggtactcactatatatatatatatatatatatatatatatatatatatatattatctttgctgatcaaaaaaaaaaaaaaagaaaagattacagataataggaatatcctaacgtaagatatctcaataggtagaatgcaaaactatttccgccaaaattgttaatagagtttctgtttggtagaatgcttttgaaataaagatcttctaatgagcttcagcagtgttagtcactttacttccccttgtccttgcaattatttgtttgtttgtatgattaagacactgtttttgctccatggttcatgccgtggttggagtaattacaaaatgttggtgaaggatttaaaagtgccatgaggcctggcatttaatgttgctaatttgaagtaactgcaaattcttggacaaaatttcacattactctgtagtctgaacagagcttatatgaaagacaaaataagatttatttattatcatttaatggattagatgggactgggaaaatggagatagagagtagaaacaagaaaatatttttaaaccatgattatgaaaagacaactgtatttcattcatgttaatgattttctgcttgtatcaatcctttctttccatgatactttgttttttacagttaaagtttaaattcataagtttgtcaggataaagcactggcatgctaacaaattttgcaacattttccacaagtagttctattctagctggttgtatactgcaacgattatggtgatgcatagatcttgtcctacttaatttctgtttaagaaaaagcaggattactttttctggggcataggggaagtcccatcattggggtgaggcctacaagatcctccactaggagacccaagggagggggaaagggggttagtgtatcaggattgaacctttcaccccaagtacatcagaaacaccatatgccactaagccaaaggctctgggtagtgaaggcaatatcaatccattttttgttgtccagtttatttttagggtttcaagatcctttataaagtactgacaaatgccttaagttaatgtttctcagcgtactctctttaaccagagtctcacgttggactttctgtataagctcttttgcaaccctaggtaacatctgttctgcagctgtggttggtaagaaattgtgcttatgttgagcttatagtgaatgaagttacagaccttgcaaaatcataatcctttatgggttaattacacttatgaacctcaagagtggctaatgtatgaaaattgtgttaattatttctttggggttttttagcacatttccttaagaaccccattgtttgttttgggttttacaagaaatgtagcacataagcaaatagaattccttttaacttcaaaaataagatctgatagagatggttgtgtaggtgtttgaagccttacatgctttaagtttgtattggatgaacatttggttgttttgtaaacaaatttgttattggtaaatccaagattaggatactatatagaaaaagtagtacaagattcttaaatgaagtgttctgctgccatttcatttgctgttctttaaatctacatgtgcaataatatttgatcatattggcagcagtcatatcacaaatctgattgttgtcatcattgtgcttttgtgtaggaagtatatttgatattaggcctacatatgtgtggctacagtttaattttgttattcacaattgcttgagttctataagattcttcgacatatacaaatggtcaaacaactaatcaaggattccagagttggatttattccttagatttttctgatagtttagggtcaaaagaattccactcttaatcttccttcacaaatatcaaagcaatctcattttttttagtagtacagttattgttatgatgcgtttgtagtttttatattattgtagctaagttcactagtaggcatggaacttcagttattacttcaggcactatcttggttgtcctcaaactcagcctctgtttcccttgccttgccttcttttaaatatatagagcaagttctttatattcctcattaaattctcaatcaaacaatgacctggggatgttttttccaacattagattagtctccattaaggacatgtgcaatttcaaaaagtatcctcatctcacaatttgatttaagaactttggcaataatataaaaaacttgatataagttttgtccacatatgtgtgtcagtgtgtattttgatgtcttatgattgtcatgtattgtttttattgtatagtagacaagctcatgagtaggcttggaaatttggttattacttattattcctggcaccatctcttgattctcttacaacttagcttctgttttccgtttcttgctggttgccttttgtcaaatctaaagcttttggttgtggtgctctttcagcacacactatatatccctgcttcatgccggcacacatagactttaaaatggtcacataacaaagcctctctctgattcatgcagcatgttctgaattgtttatcacaattcaatgataaattctgatccctgtcaaatttatgcctgacatatcattcctttgtccctcaaaataattccacttgtcaatgtgctaacccagtttctttactgccaaaaattctggtctccaatcctaaattggttttacactgagcagggaatgagctgctgactattcttccttcctgccaaaaacaatgtattttttatttgatattacctggaaaacaaaaaacattagaaagaaataggatcaaatttcagggtgaagctggagattgattggtaacccctatagttagtttcatagaataattggatagttgagttagttagaggcagagataattagacaaacaaggcatgttgcctataaataagaaaaggggttgatagggagattgtatcttgtgatttgggagggaattcagattgttgtgggagagtccaggcctctcgaaagtcctgcgaatcatttgcactcttgttcatagaggctttcctttctgatccagtttctgttagattaagcatggagtttacatactgtgctgtcagtgtgactcgatgttttcttttgaaacttagagcacttataatggtgctatgtgttgcctaggattacaagtttagaacaggacatttgtaacatttatcaagtgaggttaaacaagcaggaaagctgttactaatgatatctctactattcataagctaattgctgactttaatatatgccagttactaatgatatctctactattgataagctaattgctgactttaatacgtgccagcagctgatgctatatttaatttcttcagtaatgagttacaatctgaggatcaatgattgtatctgtgtggactttacagttttatggttactgttattgaatgcttttcttttttggatatcaaatagatgtatccatatgctaagctttattttgttttaaaatttcaaattggttgaacaggttatttcttctgggcttggataagt

SEQ ID NO: 3787 - DNA, 5645 bp, Glycine max
  Intron number 1 from transcript Glyma15g16470.3 (locus Gly ma15g16470) derived from phytozome v7.0 (chr-ID Gm15; pos 12767803 to 12773447)
acagggaatcgtttgaagaatacatcgtatcaacggtgggtaattgcaattattgatatgatatggttatttgttaggatatattcgaaattcttttttggtatgtaatttagtgatatctgggtttgctaatttccttctgggttctacttggtcagactaccagtgtaattaactcatgtctaatattcttgaccttttctttttttttttttggggggggggggggtggggggctgaaaaggagggcaaggcccagctacaaacgcatcctacaggggaaagaagcccctataagatcctgctaaagaagcttattacaattagctttaggttcatcccaaacatggaggccgaaagtaagagcatagcaaagtttgctaggcagtgcatagatttagtgagcgcaatgtaatttgttttcattgtgctgtgtgaaacacaagattccaggaacactaggacatgataccagtgacatcttctcttccttttaggaaaatgtgtatcctcaattaggtagttttcagagggtatatctgtgttatatctaaaatcatgttctggaacattcaaaccccaatttgaccagataacaataattttgacttttaagtagaaacaaagagtaaatgttttggaagtgaagaatgcagcacaaaacaaggaacataacatagacaataaagggacaagaggtattttctaaagaataataattggtaggtagctgcactaatgggcaggctcagaatgagatccactgacaatggtattagatttagactgagggagatgagcaagagcattgtgattcataaacttgaagaatatagtagataaatctgatggacaaaaacaaactttcttcttgtatgattgtactgttaggctaagtttctatgtttttgagagaatgggataaaatggaaaggggttgttcacctgtctttcaatcatcaataaaaggataaaatagaaagtaagggattataactttagaatttcaatatatccctttgtaactttttaaagtatctcagttaatggggaacccgccgatgacaagatctcaaagtaacagcaatgctattttcattcatcacctccaatttgaagtggaataaaaggtagaaattagagaatggttccctcacattccctttccatgcataactgtttatacttcaaagcaaggaaaataaaagtaacttgagtggcaaaaaacattaatctataaaattgaaattttaatatgatgtatggaactggcattttgtgcgtgtgcacactcattagttgacagtgctaaataagctgttatggcggcactatagtgctattgcatagtggaatctctcggatctgtttacaaccctgtcctctattgcggctgctatcattgttgtggttgcagcatgtgttatacatcctcttgccatctacagccaattgaacttttgagttaatatattccaatttttatgtatttatttttatttgcatacgacttaatttttttatacatatataattgatagatcttatatttcaaccgttatgtgacatccgctttatatgccacgacgctatccactatatgatttggatcaatgttgttaatggcggatggcggttcatggcggaaagccaaaaatccgccataaaaatatggcggatggcgtagcggaaaatgacggatgtcatggcggacaaaaaatacatttttgttcttaaaaaaactatgtatccttttctcatatattgctttttttttacaagtcgcatgttactactcttttttgtccgccgatgaaccttcagcaagcaagtatccattaggggggtcgttcaaatgttttcctaagggtttcttctcctaaggatttcttctctaatatggcagaccacttccacactatacttgctatatcactgaacaccttggaaggaggtgcatcccgcgtgacaagtaatatattatacttgttctctcagctgtcttaaggttggagcatagcctctgtcactagctatcaacatgacatgtgccggtggaggattttcagagacccaccgcttaaggtgtttaagaagagcgtcatctgcattgtctctcccaacaacacaaaatacacctactctgggtgtgtggtaatgctgaatcactgaatcaagaaaggtaccttgattgaagatgattcttatcttgggtcgttcaacaagcttctcctggtttcgtcgggataaatcgtgtgcctggtgaagccgtagattgtctcaagatagccgctgactttgttggcaattagagcggtctcgatgtaatcatcaatctgggaagcatcacacgatgaaggaatgagacaattttttatgtcccaccaaacacaaatttgcatgaggttggtgggacttgatgacaacgatgacgagggataatgggaccaaaaggacgagtagaggggcctgatacggggtggacgacgctcaagaagagcgtcatttgcattgtctctctcaactgtacaaaatacataaacagtcgaaatgttactactcttttttggccgtcgatgaaccttcatcaagcacgtatccatcaggggatcgttcaaatgttttcctaagggtttcttctctaatatggcagaccacttccacaatatacttgctatatcactgaacaccttggaaggaggcgcatcccgcgtgacaagtaatatattatacttgttctctctcagctgtcttaaggttcgagcatagcctctgtcaccagctatcaacatgacatgcgccggtggaggattttcagagacccaccgcttaaggtgctcaagaagagcgtcatctgcattgtctctcccaactgcacaaaatacatacacagcaacaggctctgaaacgtttcctcttctgttactcaggggagtgctaacaaccttgaaatagcaactttaggaccacatgaggaggaggccgtttcctcttcagattgatgattacatcgagaccgctcgctctgattgccaacaaagtcagcggctatcttgaggcaatctacggcttcaccagcgcacacgtcttatcccgacgaaaccgggagaagcttcttgaacgacccaaaataagaatcatcttcaatcaaggtaacctttcttattcagtgattcagcattaccacacatccagagtagtttatttcggctgtttatgtattttgtgcacttgggagagacaatgcagatgacgctcttcttgagcaccttaagcggtgggtctatgaaaatcctccaccgacacatgtcatgttgatagctggtgacagaggctatgctcgaaccttaagacagctgagagagaacaagtataatatattacttgtcacgcgggatgcgcctctttccaaggtgttcaatatagcaagtatagtgtggaagtggtctgtcatattagagaagaaacccttaggagaagaaattcttagaaaaacatttgaacgatccccctgatggatacttgcttgctgaaggcggcctaaaaagagtagtaacatgcgacgtgtaaaaaaaaaagcaatatatgagaaaatgatgcatagtttttttaagaacaaaaatgtatttttttattttattgcattgacctttgactgaatcccaacaatactggcctccgattcttccacttagtttttccttctttaagccagaaggtaataatggtatttgtaggtgtccattatttattattatttttctacatgtgaatattccaatagaaccaatggatcatgtaaccatccattggtcaatttatatatgatttgagactatcctgaagatacgaagatcctctcctgcttaatctgccacttttgagacttgaaaagcatgtgaacacggattaggcctaccaaatcactgatatttatcacaaaactgttgataatcgtggttttcccaatataatgtgcagatcatggtaatttattttgaaactttttaaaatgattatgtaattaactttttaaaaaaatattccgccatggccgtcattttataacactgttggattattgtctgtcttccattttccgcaatccgcaattgattacactgttagttcatgcccaagactggacctagcttggagtttgcatgactgatgtatgtgggtgactcaacatgacaacattaaaactggatatgttctgattgggcctaactatctcttgaaatagttcaagggaggaggattgcccaagtcttataaggaatattctggtcatttttctagtcaatgtgggatttcccaacagctttcatgaaatattgatgtgtatttatgtattgcctgtctcgatcgtgtcataatttgtctgaggacgagggaattctgtattcattattttagggtttaagtcttccttatcagggtgtttgtagtttgtctcgatgacagtacgtaatcaaacagcacacacacacatctttcattttcagaagcaatagttcattattttagatgaattactctggagctgaatctttactcttgaagatactactttgctaccattttttagtatatatagagtataaacattttttatatggtactgaaccactactaataatctctatgtatgtgtgtgccaatgtggctttgattttcacgtgagctccatttgcagcagttatctttataaacccttgagaaaatggtaaggcatccttttcaggaaatacaagtggcagttgaaactatctactagatggagaaagtttagagatctatgtgacttcattttcattttactatctgctcttggcaatgttcaaatgacaacaagtaacaaaacatattgtttcatttttttagcagatactgagagtacattgatttaccttctaatgacgtcatttaatttaccaaaagggattctgcactgttgtaactacttgtgttgtattgttgtaattcgacttctgtgtgtgtgggagtgataaagtgttcttatttatattgagtccatatgtgtaccttataagttgatagcaatatggttgaagtgattctcaaagtttgggatttgacttctgcaaaagtgagtgattcactgtagaagtaaaggtaaggaattatatctgttttttttaaaaaaaaaatcaagggagtatattttaaaatatttcatttttcatagtttgccatacatgtgcatgtattttcattacaatctcaaccacttatttttcaatttagtgattataactagtcacttttcccttttaagtgaatctctcactttaaaaacccaaatcccaaagtttgattggtcctttgtcttataaagatacccttttttttaacaccctaaaagcaatatctggttgacagttgacactttcaaaatcaccaattctgatagctgacatattccatgatgaattggtttcttttttggattgggggagttgtcatgtgacatttaattaaatttaaccactaaaattttaaaaagtatgttttcaattatttttacagttttatcttttactgttactaattttgtttcaacccttcatatattattatcactttttttgtccaggtattaccttctttgagagagaagc

SEQ ID NO: 3788 - DNA, 4773 bp, Glycine max
  Intron number 4 from transcript Glyma14g25920.1 (locus Gly ma14g25920) derived from phytozome v7.0 (chr-ID Gm14; pos 31604307 to 31609079 reverse strand)
cggtaagttgtaaaatttggtatgttataaaattagagatgtatatctgcttgagtttttggatatgttgctcactacatgctcgcagtagaacatgtaagaaaggaatttactgtgttgtgtgtttttcaccacacacaatgcctttatttataatcagaattgatacataaatagggaaacctaataatgactaataataagggtaatccctaatttcagccatgcaatcaaacatattaaatacatatatttcagagaacaatggagatggaaagtaaaaggattgagagaattgagaaaggaaaagagaaagagaaagagaggttagagattgagaaactgatattattgaacccaagtcacatatatttcagagaacaatggagatggaaagtaaaaggattgagagaattgagaaaggaaaagagaaagagaaagagagtttagagattgggaaactgatattattgaacccaagtcacaactcagattatgtagaattatagatgatctgacaactaacaacctaactgtcaactagcttagtgcgaaaataggttttaatttcagccatgcaatcaaacatattaaatacatatatttcagagaacaatggagatggaaagtaaaaggattgagagaattgagaaaggaaaagagaaagagaaagagaggttagagattgggaaactgatattattgaacccaagtcacatatatttcagagaacaatggagatggaaagtaaaaggattgagagaattgagaaaggaaaagagaaagagaaagagagtttagagattgggaaactgatattattgaacccaagtcacaactcagattatgtagaattatagatgatctgacaactaacaacctaactgtcaactagcttagtgcgaaaataggttttaatttcagccatgcaatcaaacatattaaatacatatatttcagagaacaatggagatggaaagtaaaaggattgagagaattgagaaaggaaaagagaaagagaaagagaggttagagattgggaaactgatattattgaacccaagtcacaactcagattatgtagaattatagatgatctgacaactaacaacctaactgtcaactagcttagtgcgaaaataggttttattttcccttgaatatgtgaatggtacatgggaggtatatatagaatgcacagggcagaaataagtgcagtaatctagcctagaaatcaggcaaagtgatctccctataaatgcaaattctagatatggtaaagacagaaatgacagcatcttctggaaatagagcccttggcctggtgtacctttaaggtattggaggattctattcacatttctcatgtcattttcagttgggtttgacatagaacgactagtcatgcttacagaaaagccaatgtctggcctagtatgagttagatagattagttttccaactagactttgatatctatctttgtcagctgctacactctcctcttcactccttttgactggttctatggtagcattggctgctttgcatccaagcatccccgtttcttgaagtaaatctagagtgtactttctttgagaaacaaaaataccattctttatccgagcaatttccatccctagaaaatacttgagctggcctagatccttgacttcaaattcctcggctagaagattcttcagatgatttatttgatcataatcgtctcctagaattatgatatcatctacataaacaataaacaaagctatctttccatccagagaatgcttaacaaacatagtatggtttgtttggcattgagcaaaaccatcttgcttgacaactattgttagcctgtcaaaccacgcccttggagattgtttgaggccttatagagatttacgaagcttgcacaccatgtttgaggtgctgggtgattcaagtcctggaggtatttgcatcaatggcgatttttccagaatcaccatctacaagccttagcacttttacaagtggagtcacacactttaggcaatatgtgattgatttccaaaatctagcatcgctcaacactaggcttgtcacttgcttagcctcacttttactagcatgtggactagtagcccattcctccgatgcaaacatagatctaattgcattctgttgttgctgaatgcaattcaatgtaaggtaataagttgcaaaccttgtcaaagccagccttgccaattccctcccctttgaatactttctattcaaattaagcgcccatgtatgcctatatttgtaagtagtgcttttctttgcattgtcaatggtattatagagtacaggaagctctccaatgtcctcaaggattagatcaatgcaatgagctgcacaaggggacctaaacaaattgttaggaagttccacattgcctgcctcaattctcggggagcaacttatatatctgttgggcaattacaagtagtgccaattggttttaagctgaaatctaacatggcagcttatatattctagtaggcccgcttgttttggcatgcatctatggaggggtggggctgggtgtgttagaaagtcccatattgcttgtctcaattctcgaggtgcagcttatatatctgttggttaacttcaattagtgccaattggttttaagcttaaagctaacaggttatcttctccaataacttcttcccggctgctacaagatttgaagccccatccgtcacaacttggacaacattcttctccccaattccttcaacaatgctgtccaacaactgaaacagttgtgggccgtcctttatcacatcactagtaccaatagactttaaaagagcgatcccatttttcccaatcggtcttatatttctctagactttcttggatgttttctaccactttcttccaaagactccctcacctcatgataaggaggcttctagcccctactatattctccaacactccaacatttgcacaaaaagagaactccttacagaattaaatggtaaagcatttccatgtacgcacttgcaaatatcttgaatcacaacatccctatcttcgcaagtttgattacttgtctttagtatgacaactttagatgtcccctctttttcttttgctacttcaaaacaatcaacactttcatgtttcttttttctttactcttcaatagcttgacaaatatctccttaacatcatgtggaatctttgaaaaaggaaccacattttgatttgttccagcaaaatgatgcttcattcttgcaattccaccacaacatgagaacagaacttacattgcacttgaagtctattaggggggacttatcacagtactgccatgtaatatcaactgccctatttttttcttgacccattcttcaaaaactgcaaacaacacaaaaacagaggagaggagacaatccaacagcataaaaaagggatcaccacagcaacacagaagcatgaacaagggtgaagggaccagcattactgaaacagggagtttgcatgaacaatgaaccagcagcgagaagagatgaacgaagtgtcactctctttttgcaacgcatgatgagaggagaggagaggagagaaacggtggaggaaggagacgagacaaacaaaaatgatagaactcagagaagcaaacatgcttcatacgtgtctcaattttcgcaaaaaaaaaataaagtcatttttttagggtgactgacccgtttccgtgaccgaccctctgtttcagaatctccaattcaaacagaaatcatgattccagcgattctagtgcgattcccatgattcaggctccgatacagatacaagaaccataggaactggaaatggaataaaaggtatgatccatgaatattgatgtgtatattccatacaataaacaaaaaaaattctgattctaatgaattttgtttcttatttgtcggcttctattttatctttttcgtaaagaaggggttcggttaataaaaagtaaacatagaattaattaaaatagaatgatctattattaattattctgaatctttgtacaatatttttttttaaatattataaagtataaacttaaaacggacaaataacgaaattcataatgaaaaataaacttctttgaattcatatgacgattcaatgtcagatttgcattgttgggcctccgattcgtatgtatcatgatacctgcgatacttactacgatgacatcgagaatgtctattccttgggtattctactgcacataaaggctacaaatgtctctcttcagatggaaaattattcatttccagagatgtagtggtcaatgaattattcacccactgtggcgctcctgatagctatatattaattgcaatcagttagctgtttgtaagacagtcacaactgtatcagtggcagttgtaactttcagttaagcactagttaggctctcgagtttttgtatcataaatatttgatataagcagaagctcttcaccttttgtacatttgtctcattttcaagatattgaaaaattctccaaaattctctctcttctcttacctcaacaatagttagtgtaagttgcatgtaaaataatgaagttaaattcagaataaattaaaaagtgacttgttcaaagtcacacattccacctactagttttctcctttctcgtgatttgctttgtttgctaatttcactcatggaatcatgctgtgcattgatcaggtcaatattttgatacacacagctgaagtaaagac

SEQ ID NO: 3789 - DNA, 863 bp, Glycine max
  Intron number 1 from transcript Glyma15g04210.1 (locus Gly ma15g04210) derived from phytozome v7.0 (chr-ID Gm15; pos 2953131 to 2953993 reverse strand)
caccgatctgtcaacgggtattttttctcaaaccaacaaagtttcatctttagattctccctattcctattctaattcatgggtatattatcataattcctcagtgttgtgtcatcatacatcgtatctacacttacgtttaattcttagcttatagtttgaagtgtcattgacagcatcacatgattatgtaatatttgttggattttatagttttagcacttgaattttacgacctaggtttacctgtgtgcttcaacttgcattcatgttgtgtaacaagcaagcaacttgcatttcccgttgacttttataactgcaattatttgtctgtatggtatgcttcacccgagattgtattcatctcaagcacatacatgatcatagcttttgaggaagacataagattttaattattacaaagtattaggtacagcaaagtcatgttgttattatagtgttatagtcttttcaaaatactaaaatgactggaaaagattatttttcctccatatacttgttcttatttccaagctctcaacaccatactggcatgacttattgggaagtgttccatcaaggatctgctttccaaagtaatattcgacagttttatacatcaaggatgtgagctacaagtaattattagagataaatgtctgtttatggaagtggaatctcttgaatcactgatatttctcaagaaatgaagaaagcttatggaaattttatcccaagctttttggtccttggacatcattctatgacacctccatccattttggtttcatcagtaagaaatgtagtgattctgtggaatgcaagcttacacatgttctcctttgattccagattgctgggat

SEQ ID NO: 3790 - DNA, 1314 bp, Glycine max
  Intron number 19 from transcript Glyma08g40530.1 (locus Gl yma08g40530) derived from phytozome v7.0 (chr-ID Gm08; pos 40254193 to 40255506 reverse strand)
aggttcagtttatcctacttgcatggaagcttttatgtgcatatttagcatcaaacagtttatattttttgaataggttaccttgataagtagttaaatttcactaaaatattgtttttgacgatttctctttaagtttgtcaagttaggtttcttgtttgcttttcattacatcaatccaatgtcattggattctaaagagttaagattaaaaagtaactgattcactgttcttactaatttaaaccctaaaccaaacttcaatagccacagaacaatagaaagaaacaactatgctattctgcagattcaaatagcaagacaactgaaactcaaattctgtagcattactctcaaacttggacgcaatgtatgcattagacctttgccaccagttacatgagctaattttagttctgataaagtgaaaatggccctgtgcccacaatgcactcaataaactttgcactttccacttggaccctattaaataactgcaaaacattaaaccacgacagtctgaaaatttaagaatacatcatcaaaacatagaaacaaaaaattccatcttaccttctcttcaatttctctaattttctgaagtgataattgataataattttcttcatttcgttgtttgataaattaaatgctgcaaccagagagtgaatcctgatatgataattgaaaaaaaaacaattgttattcttaatattcttagctacagtctgcaaccatattttttatggtaatggtttcctttttgaaactgcttgcatgtttggatgtgtttaatattcaagattataatctgattgatagaaaataactgtcagtgttactattcaaaggtttttgataatataaattggaatccaagattataatcttaacaaagataattgtcttttatgataaacaaaattttggaaattatgattataaaagctagcagattatttttcagttaaattttgtttttccatttgatacccaacagttgattagtttaaatacaaaatcaactacgacaaataacttcatactcttttttgtatttttgcttttacagaaagcaattattttaggcaactcaaatgaaatagattatcttaaaaccactttttacaaacctccaaacaatgagacttatgtcaatcaattataacagtaatctatttactaaatccctagttgtaaaaaattaccttgagtgcataatatttggatttcattgtgttaagttactaatgtgaattattctcttcttactgacgtgtctagaaatgatacaggtcgcagaacttattgaaa

SEQ ID NO: 3791 - DNA, 814 bp, Glycine max
  Intron number 5 from transcript Glyma10g34490.1 (locus Gly ma10g34490) derived from phytozome v7.0 (chr-ID Gm10; pos 42657030 to 42657843 reverse strand)
gctggaggtaatgcaatcttggatgactaatacaatcttaatgcatgtaaaaattttattctgattaagtgattattttaataaattcggttgtgtaagttattggaatacctttcttttgatcttcttaggctatgtaattcagttataggccagttattatactaccaaatttggacagtcagagatgctcattgaaataagttacccttaagtagattactatgcgtcacaattgcaggtcaataagatactcgttacatgattattacaatttacagtgcaatacaattctctaacttaatacttctatttatagtatactagttgtcacgattccagtcgcaactgagattgtgacgctaataattagttcaagcactagtacttctactgcaagtccaagccataccgatacaataccaatgtcttaatttgttcttcatcaaaattacatatacaagatatttaatttagattaaagtttttgatggtttatcatttctagcaggcattgccatatattgtttccattttcctcttttcccgcttaacctcttttttcattcttctatctttatttgttcttagtctattttagttctgtatattagaaggtttgttctgaatcaaatattagacttgtcacatatatgctgcttttgtgcagttagctttgtagctaggagcattatatgaaacagagtgcaaaaagaataatattgccagtgcaaagtcagaattattctgttttattcctgtcactccagtagtttttgtttaacaatgcaggtcagtgaggtgaaaggtgagg

SEQ ID NO: 3792 - DNA, 844 bp, Glycine max
  Intron number 1 from transcript Glyma03g38730.1 (locus Gly ma03g38730) derived from phytozome v7.0 (chr-ID Gm03; pos 45039340 to 45040183 reverse strand)
ccaccagcttctgcagtagcttcaagcttcgaaaggtttttttttttttaatattttgatcattttactgtgttcaagttcaacccacttgattcgtatctgtaacatcttgtttctgttttgatattcaatcttttgatcttcaaacattatgagtttaaccctgttgacttctagtaactacttcccccttcaaattacccattgattctctttatattctttactttgaagaatctgttcgtatatttggcatgtgggtattacggatctgtacaatttgtatttgtagcatcagtaaagtgaactgattctgtttattattatttttttcataccctttgtgtttatgtgctaaacgggtgtaatattatagcttgcgtaggggacaaaaagataaaatcaactgcaaataacgttggttataataactgataagcttaggattaaaatcgtatcatgagcttttcctttctgcatcgttgaccagacacggaaaaggtatatgttagctcaatgcttcttcttttttttttttttttgtgtttgtattttgaaaaaatttactctgttagatgaccccgtattctagattgtttaggaagctaaagattttcttgtttagtaattactgccaggaaagtgaaatatttgtgaaaagagaatatatttttctgattatatatttatctgagattggctgtgtggagaatatactacaaggacttgagtgtctcaattgtttatttccttgtttcattttatttgcgttctgtgtaaaattaggaatgtattcaggtcaacttacctttggatttccttgtaaggcagattttccttgacc

SEQ ID NO: 3793 - DNA, 2160 bp, Glycine max
  Intron number 3 from transcript Glyma17g35470.1 (locus Gly ma17g35470) derived from phytozome v7.0 (chr-ID Gm17; pos 39453239 to 39455398)
caggtatgtctcgattttattcattatttgctcttcaaccttaatctctctctcattcttgtaatatttgatttcgttgttgttattttttatttttctattcaaagtccatgtaaatgatataaaaaacctttatgtttgaacactgaagaattttggttgttgatgaatgttaattaactctgcctcaagttgatatctccatttatcctttgtgtgttctttggatggaatttggccaggactagttacgaaggtccaagagatgttttactatttaatactccctccgatctcaaatataagaaaaaaacacattttccttggtctcaaatataagaaaatttcaactaactttatcttatttaatgctactatttctaaaatgtccttcatttaattgaggtttagtgccaataactcttttttattccgaataccaagttccaatgaaaggtaagttgagaaaaaaaagtttttaattgagattggtgaaattaagtgtggttaactgactttcttaattagtgtgaatcagtttgttttccttataattgagattggagggagtatatggactgaatgtatttctacttcaatatcaaattatcattatgcccttacttcagcaaagtatatgtgtggttagatttttgttgcttttgtggactgctaattttcttgccagcattgttgatagagctgataatcagaactaaaattcactctgttactgaaactgaatgacctcgtaaacagggtgaatctggaacatagatctctctcaaacaggaaaagaaaaatagagctgtaagctagttgaggtgcctacttggctatcccctccagccctccctaccaataccttaatctaataccccttttcttcccatatcctcccttgtgtttcatcttccttacatcataagtaaggttgttgcagcccaaatatgcactctgtgcttttcttttatggtcctcattgtccggagcctatattccctattaccggttattgatggttctctagatctgaggctctacctattgatagaagaccaagtgctggactgcaactaattggatagttccccaatcacagtgataggatatcgaatttctttatgaaaatatggaggctaactccttatgtagagatgggtctctagaattctacataacagaaaaaggaaagatatcacaggttatttgaaaggcctgaaacctccaaatttgcactgaaaaatagcccaccaatcacattttcctctattcccttttatcccacacaccatctaacttcacctcattgcttcccagttccatgtgtgttcccttgtaggcatgtcatgtgtttgtaatagcttaaataaatccctattcttcccttattcatgtttctcgtgtggtctagcataagaatgcctaacaataacctccccaccactcatcccctgcccccaaaacaaaataagaatcagcttgtcaaggtggaggttccagtggttgccctgtagttgctgaaagagctaccctggatcccattgcttggagtatggtgactgggagtctcattcctttgaattctttgttattagagttggcattggaggtttgagtgattgcttggtagcttctgaaagaactcccctggatcccattgctagaagtatggtgtctaggagtcccattccttggaacttactttgctattggagttggcattagcacctcctggatcaaacaataataagtcacagaccaaccaacccctcaggagctgattgtgtgaccgttgcaatataaataatagttccctctttgtttcttgcaagttgcaactactaccatcatttgcttctggataataactgtagcactatgattctgaaacaaagctgcatttcgctttctggttttgttcccccaaataattgactaagaagtagtaattcttctctgaagcccttgaaagaacaagctttgtgggagttgaaccttaataggaaaatattagttttggttctaaatttaattgagtgttgggtcatgtgatttttaatatttgctttgtgatttatcaagtgacaagtgttcattctctacgaatctataattgctgcagtgttgtctcaaggaagcaataatacatcaagtcaa

SEQ ID NO: 3794 - DNA, 845 bp, Glycine max
  Intron number 1 from transcript Glyma19g31760.1 (locus Gly ma19g31760) derived from phytozome v7.0 (chr-ID Gm19; pos 39556553 to 39557397)
ttcctgttgttgctggagttgtcattgcaagtggggtatgtcttgttctctttaatttaatctcactgctttcttttgatttgttgtatttgaatgttgtgaatgatcatggatgtgtttctttttgagattgggataggggggctcttgattgattcatattggtgtttgaagggtgtttgtgtgactatagagacatgtcaatgctgcatcatgttccttgtgccactccagatctggagtggtgttggacagattaggtgatggtggtttgtgtgatttagttgatcttgattgtttgaaaggtataaggaatctgtttttcatgaagtgaaacctgcttggaagttaatgagatctcaacttttcaagaactgcaaatctatgacaatcactgggaaaatgatgcttcttggcattattctttgttgtcttcttctttttggatctgcactgttctagtttattagcttttatatcagatagccaggtttttgggattttttaaaaaaataatcaactagcattgaagttacttaattatcattttattttatctaatcatgttatatatatgattatgatgcctcccctaaagcttttcatgaattaggctttttgtagttatctacttattaaatgccatggcattctgtgtattgcacaccacaatataatttgttatacgactggcaagtggcaacatcatagcagttcctttcgactggcatcatgcatattttcctttttgttttcccggcttattcattttgattctgtagagcttcatatttttcttggtgattgcagggcgagccagggtttcacttatttggattcattat

SEQ ID NO: 3795 - DNA, 689 bp, Glycine max
  Intron number 12 from transcript Glyma14g37520.1 (locus Gl yma14g37520) derived from phytozome v7.0 (chr-ID Gm14; pos 46819501 to 46820189)
attgatcaaccagaaacagtaaaggtttaactttcatattcacatttcaaattcataattttactttctaaaatgattggtataaaaacatgtaaaatcagtgcagaggtattttgacataatttcgatgaatctgtggttatctgtgacgtattcagaagtctttttacctgaaccagaagctgtgatggatttgtagttgtatttaccttaaaagactttaattggttgaggaagtagattcttatgctctacatcttagacacatcttctgtacttctaaagtgtgatgctgactagtatgttgaggcttggaagtgtaatgtgttaagtttactctttatctctatctctgttttcctttgataagtaactaaagctgtgttaaaagggttggaaagtatctccaatttagacaaaatctcttctactctggtcctgtatatttgtgctaataattaggattttatttctatatttttggaattattttcctgcattactagtttcatgaaattggggattgtagatcattttataacttacaagtaactgcacaaatgatgtttaaaacgccaattgcctcttctggaggtgatgagaaaaaaaagtaagctaatggattatgtggattcttgataatgcaatatatcacatctaataggctatgttgatgttccaactagttt

SEQ ID NO: 3796 - DNA, 1775 bp, Glycine max
  Intron number 3 from transcript Glyma04g41540.1 (locus Gly ma04g41540) derived from phytozome v7.0 (chr-ID Gm04; pos 47415179 to 47416953)
gtcgctctacctcaccagttttacaaggaggtattttattttattttaaatttttacggagaacttttgatttttttagctagattaattattattaataatatatatatatatatatatatatatatatatatattaaaaaaattactttgtggttttatcatccgctctatttaagatatttcggtttattgttacatttttttcttcaaaaaacactaaccaaagtttttttaaaaaaaactcatgagattatttcagttttttaaaaaaccaaaagtaaaaaaaaatcatattaaaataataaattattttaaatagtttctgtagaattagtcgcttttcaaaaaagaaagaaagtgctttttatgatggtaaacaaatacgagtataaattaacttttttattttaatttttaaaaataattcccaaattatgttgaattatttttcttagtatgtaactacttttttttcgtatgcaacaaattaatcctttagtggttttttattcgaaaaaaagtgttttcaagattcggcgccggtgcgtgctatatttgcttttcatctttttatttatttattatttttaaaccttttctggtttgttgaaatctgctattctttcgggggtttgaggttcattgttattcttcaattatgtatttatagattccataagtaggactggacgcactaaatcgaatttttatagttggattcaaagttatcataagattaaagtacatagtatttcatagacttttaaaattcgaaaatgctaaacttccacctcacttttggtggattcgagtggaaggaagagaaaaataagaaataaaaaaggcaaagaaaaaatagttatacattatgatcggaaagaaaaagagattcaaaaaagagaaaataaggtatagactgacagaatacaattttacatctaatttacaaatcattatataaggtgattttattgacttttactacaattattatgttatactaacaacaatatgtgatttttacctctaatttacaaatcattatataacgtgattttattgacttttaccacaattattttaaagttatactaacagcaatttgtgattagcgtgtgattagttgataatgtaaaattgatttataatgtcatcattatactctaggaaaaaaatgatggatatgaaatagaagagagtgtaatgtaaattattaatacgtcacgtaatattactttcaaaatatgggggaatgtaaattattagtttatatcaatataccgatatacattttttatttgtcttgagtttggtacgcatatgatttttccgataatataacatggtttaatgactggattgttaaaattcaggttttccaaatatagtcacttacaaatcttacacttgaatgaagtgaattaaagaccataagaaattgccttttatttttgtcttaatttctgacatcctggaagtaaatttctccatcttctatgtagatttttatttgcgcttttctaggacctttttacttgagaatcagattaatcaccacatgattcctcagttaaggggaaacaaacaggaaatagttctaaaatcaatccatagaggtttcgactgattcctcagtctgtaacttcaacacaaattttcatttactaatgtttgatgcagtgtttttcacctgttgcttctaaaggttgatgatactaacaggtttgactatttgcaggttgtggattttgagcttccgccaccaggaaaata

SEQ ID NO: 3797 - DNA, 869 bp, Glycine max
  Intron number 2 from transcript Glyma03g29000.1 (locus Gly ma03g29000) derived from phytozome v7.0 (chr-ID Gm03; pos 36952801 to 36953669)
ttcctgttgttgctggagttgtcattgcaagtggggtatgcttttgttctctttatcttaatctctctgctttctattgatttgttgtatttgaatgttgtgaatgatcatggaagtgtttctttttgagatcgggatagaggtcttgattgattcatattggtgtgtgaagggcatttgtgtaacaactatagagacatgccaatgctgcatcaagttccttgtgccactccagatctggagtggtgttggacagatttggtggtggtggtggtttgtgtgatttagttgatctgttattgtttggaaagtataaggatttttgttttcatgaagtgaaatctgtttggaagttaatgagatctcaacttttcaagaactgcaagtctatgacaatcactgggaaaatgattcttcttgatattattctttgttgtcttcttctttttggatctgcactgtactagtttattagcttataagttatatcagagagccatatttttgggattttttttataatcaactagcattgaagttacttaattatcattttatttcatctaatcgtgttatatatatatgattatgatgcctcccctaaagcttgtcacgaatttggctctttgtagttacctacttatcaaatgttgtggtattctgtgtattgcactattgcacaccacaaatataatttattaatttgttatatgactggcaagtggcaagaaatagtagttcctttagacggggatggtgcatattttcctttctgttttcccggtttattcattttgtttctgtagagctacaagattttcttggtgattgcagggcgagccagggtttcacttatttggattcattat

SEQ ID NO: 3798 - DNA, 5403 bp, Glycine max
  Intron number 3 from transcript Glyma19g18330.5 (locus Gly ma19g18330) derived from phytozome v7.0 (chr-ID Gm19; pos 22202207 to 22207609)
gtgaagtaagtgaatttgactttttgtatgctatcttcttgcagcactaaagtttttcgagttttttgtttcggagatttcattactttctataagaaacaagtataaaaaatattctctgtgattcatgccacactgttagtttctcatatttttactagaaatacagcatttttcattgtttaatttgtctataggatgtagaacaaatatagtgcatgtttattacaggaatggtttccattttttgtttgtgttttttggtcattttaaacacattttctaagctgatcatttgagttgacaaattcaggactcttggacaacagtttctccctaacaaagtggtagtcaatctctatatgtttggttctttcatgaaatattggattggaagcaatatgaagagctgcctggttgtcacaatacaacttcatttgtttaacttcacaaaacttcaactcttgaagttgtttgatccaaatttactcacaagtggttgtggctatagtcctatattctgctcctgcactagaccgagcaacaatgttttgtttcttgctcctccaagagataatattgcttccaatggatacaaaatatccagtagtagatcttttgtctatggggtgtccagcccaatcagcataacaatacccaaagatttgggtattttctttgtcctcatataacaatccttgtcttggagtctttttaatgtacccaagaatgtgaatcacaaccttctaggatcaacatgaggagcctgcataaattgactaaccacactaactgcaaaggaaatgtcaggtctagtaattgtgagataaatgagctttccaaccagtcttctatatctttctagatctaagtatggttcaccttggtctgccattaacttttgattcaggtccataggactatcaatggatctacaattagtcatgcttgtttcttctaaaatatcaagagcatactttctttgggaaaccactatgccttcatttgattgagctacctcaataccaagaaagtatttaagactcccaaggtctttggtctgaaaatgactggacaagtattcttttagctaggaaatcttagcattatcacttcctgtgatgactatatcatccacataaacaagataaaattttcaaggagatgtatgacaataaaaaagtgaataatctgcttaactccgtttcagcccaaaattctgaacgtgattgaattttccaaactaagcttgtggagattgtttgagcctgtagagggaccggcgaagtttacaaactagaccagattccccctaagcaacaaacccaggaggttgctccatgtaaatcttctcatctagtttttccgtgaagaaaggcatatttaatatccagctaatgtaggggccaatgaccaataacagccatggcaaataagagccaaatagtagtgattttggccacaggagagaaagtaccacaccatagtcaagaccatagatttgggtatatcctttggccactaatcgagccttaagactatgaacttcaccattaggaccaactttaatagcatatacccatctacaaccaaccaccttcttcctaggagaaagaagaaccaactcccatgtaccactgtgttcaagagcctgcatttgaacaatcatggcttgtcgccatccaagatgatcaagtgcttaatgaacatttttgggaatagtaagaggagataaagaggaaacaaaagagaaatgcgaagaagaagataaacgatgataactcagataaatagtatgaggattccgagtagatcgaatgcctttccgaagaacaatgggccaatcggagtcatcatcatgaggaggtgatgatgatgtagaaggattcatcataggggaagccaacaaagaagggcatactcttgtgtgtcctgtgttgagatatcataggaggtggtgaagataactcgactagactgttcattgaagggtgagaatgattttcttcttggttggagttctcacagataggaaatactattgggctgaaggataggataggtaagacatgttgtattgagttgatatcttgcttggaggatgagaagaaggagtttcttcaaagaaagtaacattaacagacttgtagtacctcctagtttctagagaatagcactgatacccttttttgaagacgagagtacccaagaaaaacacatttgattgcccttgcagatagcttgtcaagaccatgggaaatatcatggacaaaacaagtacaacccaagatacgaggaagaacatgatatagaggttcacgtggagagataatggaaataggaattttattatcaagtgttgaggagggcattctatttattaaaaaacaagtagtgagaacggcatcacccaatggtgaacagggactttcacattaaacaataaggtgcgtgctatctcaaccaaatgtctattttttctttgaggacaagtagattgatgtaagattccctataaggataaaaaggaagaaagagtagaagaaaaatattctttagcattgtcacttggaagaattttaatgactttgccaaactggttcttgatttcattgaagatataaaaataggcaaaagttcagatctatctttcatcaaatatacccaagtgcaatgagagtagtcatcaatgaatgcgacaaaatatctaaacccaaaagatgtaacacgattgggaccccaaatgtttgaatgaatgatagaaaaaagagtgttacatcttggttcagtttgttttggaaaggaagaccttgtatgtttacctaattggcatgattcacactctaacacttgtaatctactaagattaggaaccatttgctttaactttgacaaattcagatgacctaagcgatcacaaagaagtttaggagatggagcagctacacaagacacagaggaagaacttgtttctaaatagtagagtcctcttgactcacattctactccaattgtacgactcgtaccacattcctgtatattaaaggaatcatcacaaaatgttacggaagagagattttaccaattcctttagaagccaccttggatccatttgctaaggttataaacttataagataaggaaacttttgggaagacatggtggtaaataaagatgcatcaccagaaatatgatcagaagcacccgagtcaatcacccatggaccttgaatgtccttggattgagaaatgcaagctgttgaaatattagaggttaaaggaggttgagcttgtctgctggcttttaaccttagatactcttgataatcttcatcagagaatataggctcacctctcttgaatttggatgcatctgttgtcttgttagggaaaccaaataaattgaagcatgttttccaagtatgcccagttgtcatgcaaaatgtgcattcagtatggtcttttctaccaatcctcatgttaggcatggtgaggaacagatcagacatggtcatttttctgtagcaggagaaagaataagactcaagagagaaataaaaaagatgttcaacagagtcttcaagctgaggcaaattggagaggagacttaaaatagggccaattggcaacgacaagcagctggtggcagcaacacaactttccagtgacagtagaaccaacaactcaagtatttcctagaaacaaagtacaaacccaagacaaagaaagggttatgttcaaacccacaaaccaaacacagaaggaatgacgaatcggggcctaaaaagggaccaggagcctccggcgagtactatggcggtggtctggtggcgttccaacaatggacagatggcacatgaactgcatgcgccttacaaggcagtgtacagaaacctcgctcagaaaggcactccaaatccggtgttcgcctgaaaaatggcagcggcggacagtggccagagatggcagccggcagtggacaacaggcagagttgacctgctctgctaccaagttgagactcagatattttgaataataatacttgagtgtctcgcacactcacgcacagctgaaatgtatttatatattgagagttaaagtacaagctgtctttctataacagatgactacagcagagagacaagacaccaaaatataaaataacttaaaaactacatacataaatctaacagaaataaactatgtgcagacatcctcatgtatgctacaaacacaaccctttccccctgaaagaagaaaataaataaatgtcaagtttgttggaaaaaaataggaagaatagtgtgaattaggataagatatgataggtttgaattggtataatttgatagtctgcattaggataagatctgcaatgtccacttcagaattcagatctgatttaggttttagttttttccctctatttttttcctttatattttccttatttgtagctgattggtttggttttgtttaaccaactctgcctttgtattctagcattgtatgattctatttgaatgagaggcaaaatacattattttaatctactaaattacaaggagctagttatttaggggtctatttagtcttagaaaaacattttgtttccatttgttgttttcacatgtgattacacaaaatgccaccttgttttcactaatttttgtacaaatatatgaaaataaaagatagagtgaaaacaatgtgacatttttataattatttatggaaagttggaaacaaaagacaatctttcaaaccaaacaggaccaacaattttaggtctctctctttattgaggcccctaacttaagttgacaaatttatcaaaagggcttgtcaaaaaatgtgacatgtaatctcaaatatgccaagtgacagtttggtttctattaattaactaattctattaaacaccacatatggaagtaatatactagctacaatgattgatggagtgataccggaagaacaaaaaagacatatttcctgcatttaccctataaattcaattttagctcgaatggtttgtagaggattcctacctttttctcttttcctactttttcacatatagcctataaattcacactaggataaataagattagctatcaaatagaatactcaaaattaaaaacaattactctcttcaggggtaaagagatgaagatctagggagattcatgagtagtaatgatcatagctttgttgatcgaaccagaaacatctttaatctgtccattctttgtaaaaaattatccattgttctttcagtgtgaaattacaactggatgtttcttttggctttggttggtgaattatgacattatattagttagtgttttcagtttagtttaataacccattccctttcattagcctcttaacagggatc

SEQ ID NO: 3799 - DNA, 828 bp, Glycine max
  Intron number 1 from transcript Glyma19g43810.1 (locus Gly ma19g43810) derived from phytozome v7.0 (chr-ID Gm19; pos 49380219 to 49381046)
tttccttttcttctcccagtctttctctcttattggttttcattatcagatgcaattttattctgtgaaattgacattgatgttttttttattctgcaaatgataaaaaagaaaatcattttttcttttagaaagcattaaatgtcacgcgattacattgttaagaaaataatttttgtagaaccaaatgataaaaaaaattatgtgatgagattttctattgcttttaatgtggttgttttgtttgttttctttctgcaagttgcgttttctactctctttttttgttgcaaaatgagttgtaagttatgtgtttgttgaaatacctaaatgaaattttagtttgtaatcttaaaaatgcaaaatgagttgtaagttatgtgtttgttgaaatacctaaatgaaattttagtttgtaatcttaaaaatccatgtgtgtgctggttttgggatgcctctctgttcatcatgatttctgatttattttatttatcacttattttctatgttgatatgtgtggtgtgtgttctgtgcaagcaaactctctctaatttacataaattattattatgagttaatttttttaatagtatgcctatttgcagcactgaaaacaggtaacccaacaacatctaagataagaaagtattcttttcttaataggttctcaccatcatcaaggaagttaactgtcagagaattaaaggtaaaacatttcatcggtacatcttaaaactatttttgttctttgatattcgatatggttgattttagtaattttttattatacagctaaagtgataactgatagagcctctggaagatcg

SEQ ID NO: 3800 - DNA, 3238 bp, Glycine max
  Intron number 6 from transcript Glyma10g12000.1 (locus Gly ma10g12000) derived from phytozome v7.0 (chr-ID Gm10; pos 12566122 to 12569359)
acaaactctccactcttgaaagctttgtgagacaggtacgttacatatatgctttgactatatatatatatatatagagagagagagggtgtgtttaaatttccatcgaaattacgttaaatgaagaaactgcacactttaattaatacaaaaatttcaaaataattatattgtaattttcatctgaaagtctgttagtgttagattcaactacttccgaaacacatatactataaccatattttatggtaactatttgaatgtgtgcacatatataaaatcttctagatgaaaaaccaactaatgttaatcattgcaagttgaatttgtggtggtggtgatttgggtaagttttgtgagcgtgtgatcttggttaactagtttttgtggtccccggtgacatttttactaagtttaattccgtaacagatctcgtgggtggtaaggaacgagaatttgttcctctttgaatgggtagggagacctactccaaccccttttgatgaacaacgcattgcatgcatgtctcaccatctcatgaggtggttacatggaatctatatataagtggtgaaaggaggccagggggtggcgttgacaatgttttattttctcaaaatttgttcgtttagttcattttatttggtttgcgttcttatattatcgatatataattataatcatatagtattaccaaaattatgtaataactcaataataataataataataataataataataataataataataataataataataatagttttaagttttatatatttttaaaacaattattacattaattttgatatgtatatcagtaaagtgtaaagcattaaataatgttaattaatctaaaattttacatttatatatactgtgtaagttgatttttccattctgtatgtgtttgtgtgtgtccatatatatctattgtttatatttgtagtttagcttgaaagtagtagaaaaatcaatgccctattttagttcttcagaatcaggattaaacactaatttatacaccaagtttgcaaaaacatatataggttagtacttcattgttttaagaaatgtttttgcaaaggcatcatagtaaggatttatatatatatatggacggcctgtaagatattcacaatttgttttgataagtaaaatgtgacgatattaattgattactgcatttaagattgaattcctaaggttagttctaatcagcatgtctaccacattggtcacatacacgtacgtgagtctatggaaaattgtggtccctctttgatatgttcctcgtggaaacataagtttagaattccatacctttatgatgtcatggtcgtaaccgtaacttgaagacacaacatatatatagagccctcaccatagcttgctgcttggctatttctaacaactcacacatatatatttatggtctagcataatattaagttaaaaatatattatattaatttgggatttgcttgtttattttggtaattaagtaaatactcttctatttgaacttcattatctttacattgattacggaatggattactgtctgagctgttttaaaatatatttaaaattattatttgaaaaatgtttcatatcatatggtatagtttaatataccgaaagtaatctataagtgtgaacatgtttgatccaaaactttccactacaaacactcacccaaggaaaacgaaaaaaaaagaaaagaaaagtggaaatagatgactgcaatggtaagatgtcttaaatttctttatgacgttcatggtactaggtcggttcaccaactatgcttaatttctatgattaataattaattttaagtacaagtctccgaagaatacgtttgaaactatgataagtaagcaatcaaaataatatcaacagaaactagaggaatccttaggtagccaacatcatcgcaatgattataatatggattttatcacaagaaacctttcccattattaattagtcttaaaactagttgtgtctcaatttgaccaagttgtagtttctgtttagttatgactaaaaaatttgttgtctacatattctgttcaatcttgtctcaactataaaactgtcaattaattaaataaaaatgatctctcatgtctcaactttaaaaatattaattaattaaacaaaaaattatctctcttttcttttcttatcttttttcttagttgaccgtggtttttttttcttaattaataacatttaataggggatgagaagatataattgtccatttaacactggccacaaagttgacttgaaaatcctcttgatggtccacgattttagtgtcactgattgattatatatcattcttcttatcatttaggattcagaaattaatacaatgttttaataagatcctgtcacaaagttgaaaaataacattcagcttctttatgtttctacttgctactggctgctttaaatgaaggaggtcccaatccaacgttgtccatatgctaaaatttctctatgtatagttttatttgtttctaaattaaactagctagctatagctaaatttaatcaataaatcagtggggacatagttaatttgcactttgcaagttcggttctagtttcagaaccagacaagaaaagaagccaccattctagtatcccctaccaggcttctaacaaatttatcagttcattagctcctaaatttcatgtagctcatatagtactttaattgcaacatatatcgtgcgatatatgactataatcacttgcatattttcacctaagcctatacttctcaccaggttttgtggtcggattttttacacatccacatagttagggcattaatgaatattattaaatgaatcttagatgaatcattttatttggataaatttaatttaaaatttaaaataccatacatatgagattaaactgtttttgctttttttttttttttacaaaagagatttaaactgctcaatttttatttattagttttgactcattcactgtgtgaatggatgaaaaaaaaattaattaatccaatttcaaggttgattatctattacataaaataaatttataactttttttctatttcgaacttctttattagttttactaataaagaatttaatgaacaaaatctgaagagtgatgaaattattttatgtaattacttacaggctgataacctcaggcaccagacaattcaccgtct

SEQ ID NO: 3801 - DNA, 5016 bp, Glycine max
  Intron number 3 from transcript Glyma03g40380.1 (locus Gly ma03g40380) derived from phytozome v7.0 (chr-ID Gm03; pos 46166128 to 46171143)
ttctctaggtccaaaagctagttggttcaactccattggatcttgcaaggtctaatttggcccaagctggactaattagcaggaacgcactttgtccatgtggttcaaagaagagatacaaaaggttatttttctcccctgatctttttactaaaaattcttaggcacgaaactgattcctgattgtttttctgtcttgtggtatttgcttgttcttcaattaaacaagtaaaatgttactgtctgacaatacttgctgtagttcttggattttctttgcatacttttacatagtagccgaggtattgaacttaacaataatatctatacgcggctaaaataattgtttccaaaactccctactccctagtccatatccttcctcaccctatagtttgctacttttctattatttcgttagatattatacttatagtgctttgctgctaatgccatctatttcttacatttctatcagttctagacttccagggaaactaaatcttactcaattgtttattactttagaatttaaactcgatttggtgttttaatatgtattatagtgtgaagactattgtgtgtgtatttgtaaattgcaaactattttatttttctctttcttttctcattcttttctatcaaaatagtaaatgtttttttatcctccccaccccccaaatgttatgaatttaatattttatacaagaaatccagaatctttatgaaaatattttcgaaattaatcaccttatgctactccatatttatttatgaaggtgctgcggaaatgactgaaggaattcagagattaaatgttaaactgcaaggaagcctgatctattatggtggttccatacctacgcatatgcacatagctgaattgatctgcagtcgtaccttgttttattcagttcagatcaagttggcctatgcactagactgcaagcatgcccctaagctgattttaggatgagatattttgccgaacagctgcgtgattttctttagctttctaatttttgaggtggtcataggcagaaccaaacaaaatatttttgttttgaaaagtagttagttctcttctttctcttgctcctgtctaaataggcaagagaataagaaataattgtagtctcattattaaagtcaaaatgcttcaactcattttttttactgatttatatcatcatcatcatggtattcgagttgcatttgtagatttggggttgaggtataggtaatggtgaaaaggagacttgatgtggaatatgttcttcaagcatagcagtcaagttcagtggcgaggcgagacgagtatttttttttatgtgggaatgataataaaaaatatggtatcttataatttgcataagtgtcatccccgctactaatgaccataaccttttacttgctaatctcaaggaaacttttgcagtgcattgtggttgtgcaagaatttatttatttttgttaattattccaatacaaaaatccttaagaatcacaatttatgcgtgaacataatatctataagtataatcaattaagttaaagataatactattaaataattttaacatggacttcagcttgaattaagtactgtgccaatgcaagaattgcttttctaagaatgcttgtagcacaaatcacacatgttaacacaatttctactttttagtacaaatttgtacatcctaatagtaatgggtacataagaacagcaatttatcttgctcctagttcacagcaatcaaaatgaaggacaaaaagtttaattagcgaaggccgattattatatatagaagaaacataagttatttagggaaacagatcttgtcaagttagatgttgacatgataaattttgataaaattttatttattcaacagattacatcttcgcaagatattatcatgtaacataaggcaatctattatgaagcaacagaagagtagaaacatgattgttaagaaaatcaacatttgaagaataaaagttggagtgctgtcttatctctctcacacacaccttcagagaggtaaataggtgtgcggactagctggaaaactggaggttataggaagaacatcgtatccatgttttctcctgctcatcatccactgtctatggtgaaccttttatgcctattattctcttttatgaactagtggaccacagattggagagtcagtaataatactttattatggagtcattattattacagcagcctgcactatttaaaccagttaaaacttaaaatgttcgtgatcaaagtgttcatcgttttcatgttatttagtttgtagtgagtgtatacctttcaccatgtgatgtgataagagttctaagactaggaagtgttagcttgtttggattagtttaaaatctcagagagagatgcagggatgctgtgcaattgttgagataactatggtttgaatttaaattaaatccgaggataactatggtttccagtgtaagattaaacagaattttctgtattttgaataatattagagaaaactagcgtagcattcctgtagttaggcaatctacagagcaaaaagaacaagaaagttgaagcaaaacgttagtcccacaccggaaaggaacatgctaactcatgactcacgaggcagcataaataaggagtaaccagcaaccttgagacatacttacctgggtggggtcaatggacgatcgtgaatgtccatggcctaggttggtgacctccattgcactttggaggggtgcccacctaaggtctccccaagtgggagagcctacatcataatttgtggtagtgggggcttgcgttcgcgcagcccctttctgattaagttcaatgttgtattttgcatgcttcacctatggaatttattggaagtgttacatatatgcagtgtgtttaagtttatccaatttatcaactctgcagctaatttgggtatccataccagctctcggctcctacaccttgtgacaacgttaggagaaatcaagttttcccccatggtcatctctggaatatacacagatccattgtgtagaaaatgttccctgaacctatcaaaagcatgcaccacaacaataaaagggaaaaaactcattttaacttgaaacataatcaaattttgaaatgtaatatagtataaattaaatacaattagagttttgttctgtctcatgcataaattatttcattatgaatttaagggacggagggtagccttgatgtatggcttcatctttagttcaatattggatatgggcaagaagtcaaaataaaaataactagcaatgagcattaaataaatgccaacggttttttctttggaacttttgaaggtttaactattttttgagaagtggaactatgatttttctctttcccgcagagaaagaatgtccactctcaatcactgagttaatgtttcctttttaattcactcatttttcagaattatcagtattatacagaaactagcttgaaacatttgtgctcattgtcaaagactccgtccatgactaaaagctccatcgaagttacaccgtgattaagtcccatataaaattgacattttgaaattattatcttcataactttctcggcctttgggctaaagatcaagtgtagtacctgtttttcagtttaatatctgatatgtggttcattggtccacacgatattaaattacatttttgtagggagggtctactacagtagcttgctattggcactctcaaatgtcactcgtgcattgtattgtagcatgagcgtggcacaccctactattaagagaaagtttcgtgaaaaaccatcatagcctaatggaatggtttcattaattttgttccaaattgtaaagatgcatatctcccctattcaattttataagcatcattttatctattaataatgtccaactactgattcttgtattttttttctgttttggtagttgctgcccgcttactcttcaatttaacaatttgtatcgtcattttaaattttaatattggattcagcactttgcattagtagattcaggtttaagctatttggtgaaggtgaaaaggagactaggtgacaaatacatggctcaaggatggcagccaagtaaattggaaagggaggtcaagatgacctcacacccagtcatatataggaatttggaagtgctacaattagttagcaaactgggaagaaaatagtagcacatggatgcctcatgccggaagtatttgctcaaaatggttaaagttacaaggttggactactaaaacttacatttctaaaaatgcttcagccacaaatcacaaatagtaactcaacttttagtgcaaagttgtacttctaattggtttacatacgatcctacatttactttgctcatactaggcaacaaacaaaaaggaaaaatttatgaatacaagttcaaccacaaatccgaaagcttaggataagatattgaaataagtttgttagctttctacttgtattgctgttatacctagttgtaaattagtttaatacaatattacaataggcagtttgggtttcttaacagcagtttttttataggaatctgacctgaaccagttttatgttctatctaaggagaactaatttaatagtaaaaaataccacaccataacatttttgcaacttttcagaaacagaacgtaagcattttcagatgctgaaaagatcaagtaatgcaaaaaaactataaagtagaaaccaagattgactttggctttcacaacgattattgttacgatggagaatgggtatcctctaacacaagactaaaaatagcaacatccttaacgattccactgccattactaaagactgttcatcttcaaattacttccgttatggctttaccctttgtaaggaaaaacaagatgaatgagcgtggtcagtatgcagttcacgcatatattctataaagtctgcatattctttcttgttgaatccttgtaggctgcattctacta

SEQ ID NO: 3802 - DNA, 2101 bp, Glycine max
  Intron number 1 from transcript Glyma13g00300.1 (locus Gly ma13g00300) derived from phytozome v7.0 (chr-ID Gm13; pos 62938 to 65038)
cctgtgatcttcccaggtactcgcatttccatttcgaagggcttcaatgtatgtactcttattgctaaacacgattcaagtactatttctgtttaattttagggccacattgctaacactagctgctactacttcatttcctttgtgttaattacccctgcttttatattcggttactcttttcttctttagtgttcatagcaactcatgggagaatgaatcctcttgcattcaaaggaattagttcaccaacaagaccatcgttggtctgagtggtccaaagcttggtcttctttaagcaaggtcttggtttgggccttgtggatagaaaaaacatggttgggaggggagaccccattaaaggtggttagtcagattccctggctaagattagtcatcaacaaagttggtggatattttgcaccaatgtcttgatgacaaaaaaagaaggaattagttccaaataaccttgttgcctcccataacattaaaggagtattaaataggacaataaaaacttagacatagttttttaggtgttgttgtcttattcttcaactagaattgaagtttctccttgttaattcgcatgataaaagttttcattgaaggattatgtaacttgccttgatttccaattggacaaccgtacaattaacaccgaaggaactgtagttaagttgtgtgctattaaataagtggagttttataaaaaattgtgaatatttatggaaagagacacaaaaaaatttcttgtcatgtgaaatcttaatgtgagtggatatatagccgcttcctttgacgtgtcaatatttgcagttgcttgttgcacttgatgctgcttcttcctctaatgaggatgataatcagtagaggttagttccagaatgattgtgttaatgtattgaagtatgaggacagcatattagtatgaggactgcatattttaggaaagtgtagacagagtttgagtaaatttgcttctctccacataaacttgatatggatgttccccatggggaccagcttatggtcaacaacttttgcatatcaagttagcaaatcattgttaagcatataattttaatgtatcaggctaggctgcagattcctaggtgattggaggaaaatgaattttcagaactgtgatttttgtttttaagctaattcagattgaagggctctagaaatggtacccataaccgtaaaatttgaaaataatgtttactaaattagtttggttcctctaacaacatggtttctggtggcaatatttcaagtaatgggtgggatccattattttgggaacatttctgaaaaggctacattttttcagttggtgacatctggaaactcaacttgaaatataaagaaacatatcctattcttttcataatcttagaatgtgattaaccattgcattatgattttttgacttgcaatcaattttcttttttatcctttcccagtttataacttttgatcatctcatttataccagttcaatatatatcttgagttgttaccttattagtggacctgtaaatcattatgcatacttatagtatctcaaattcctttgaagcattgctgagaatggtatgctctgttgttaattatttccacatttcactttaaaaaatattatctgatagtcattcaaacagttgtgctttttgtttggttgacaaatggaaacgctgaatcctgttttgcatggcataatgaagcaggaaatgattacttttagcttctatacatattctctttgtgatatagttgaacactagcaacctgcagttgttattgggtgacccttcagaccatggtttggcttttttctcatcagatgtcaaacttttgatttttttgttgacagaaggctttataaatcaaatttatctcatctaatttcaacttttgattttctgttgactaaaggcacctcctacactcttgcgagatgtatcagttttacaaataatcactaaagtgtttatcaaacagctattctttgcttttcatcttttagtagtttactgaaaaattagctattcatatatgcttcattcatttctttccaatgttgcttgaaggttta

SEQ ID NO: 3803 - DNA, 1042 bp, Glycine max
  Intron number 7 from transcript Glyma17g20190.1 (locus Gly ma17g20190) derived from phytozome v7.0 (chr-ID Gm17; pos 18702510 to 18703551)
gtgcaagtaagcagtttttcacctaattttgatcaagaactttgtgtttcttcatgtgtttgcagctttcaagcaccaatggtctaagctattctttgtcttgtaaattagtttagtttaaaatataagcaaatagtctcttcaatcatgccactattaggaaaaatgtgaatataggaattaggatcaaaatgttttgcttagattacactagtagctgtatggatgctatgtatcaaagtcaaaccaagaaataggctctttggtacatgaaaggggtaaccaagaaagcttgttcaatgaagaaaaaaatataaacaaaacagaaagaaaaaacagggtactaaatatcatcatcttagctagtcatgatttgacatgattcaaggatttttattctggtttaattaccaaggtggtactgcatctatatcttttgtttgttttaatggcccaacggaaaaaatatgtttcaagattttgatgtcttcattttcgacagttattgttgtcttaaataacttacaaagttgacattttggttggtatattctattcgatgtactacatttaccttaaaatgactctgcactttgcagaatagccaaccaacgaaattgttaaaataaatgtatattcttattttagtcatcagatatctaaaggaaaaattgttatctaaaagcttttgctaatttccttcattgcaacaccatatgtgagatattattaggacacagaagacatctttctgatcttattatgcttttgttgtgattttattatctagaaatactagtaatacactttctagcacactttcttgaacatactctttattattggttaaaattgattagaaatgacaatattttgtgagtcatgctcatgattttgtagcttttagtaaattttaactaataatagagaatgtgttagaaagagtgtgtcggagagtatgttgttaacactcttttattattttatctaaggaaaacctcttatgttgtttttaaatcataatgtacagatctggggaaat

SEQ ID NO: 3804 - DNA, 9940 bp, Glycine max
  Intron number 3 from transcript Glyma02g11280.1 (locus Gly ma02g11280) derived from phytozome v7.0 (chr-ID Gm02; pos 9468212 to 9478151 reverse strand)
tgggtttggcttgtgtatccctctttggagcccaggtatttgcttcttcatgatccttgataatttcttagattttttttctaaattaatcttggtgcattatttttttggttactatgcaataataatgtcttgataacacttgcacaacgggacaaattattttaataacgtaaaggataaaagctaaacattttggtatctaacttcttagttttagtttacggcataattttaacactttttctatttttaaataattttgttttatcactgtccttcgcactaaatggatgctaacatgatgggtgattgatgatgccatcgtggtcctacccctttaatgtcttttcaaaagaaaggaagacacattgcgtttcaagtacttttttttttcggtttttttcaaaactcaggaggttctttaaagaaagaaagaaagatacattttgcgttcgaagaagacacatttacctttttgggtaaataaattcattagaggagatatgtcagtaaataacaaaaatgattaaatttgagaaaatacattttgcatttaaattataaaatgttatcttatttttattactatgtttttagtttagacaattgtatataaaatagtgaaaataatagaaaaaatatttttacttgattcttgtacaatttttttaaaaaaacagaagtgaaattttataattaatgataaaaaaataaaaagtgaaaacatctttaatactataaaaaatctctatttttttactacattaacgaattctaatttgatactccttggtcaataaacaatattttaattagtaaatttttttgttaatgaattgttattcgtttttgttgtcatctaaacactaaactaaatcttattcttattataatatactaatatttaaaaataatgaaacaatcatttatcttttttagaaaaaaatattaataacactcactctcttaacgtactcttctcttctgaatacactttttattaatagttaaaatttatcaaaaactatgaatttgataagtttcataattttgtttaataacactcttattttatagtttttaataaataataaaatatttttaaaaaaagtgtgttgttaatattctctcttctttgttgtttgttggttgtaacgtgcaagcaaaggatattgaataagaagtaatattaattttaagaaagaagacacacatgcacaagcacttagttctagaaatatgtcagccgaacgttgtcgagctcgagcaattatgaattgcaatttgagttacattccccaggtgggttgaaatttgaaagctcaatgtgcttcttcttttttgtggatttttggtactcattgggatttattttttagcagctggtattgtattagtttttttattagtaaatattactccttggtaccgtattaggtattagtatttcaaataaaataattccgtgacaaggaaaaattaaaatattaaaatggtatttcttttattttttcagaaaagcacataagaaacttgaacatggctttttattttattcttggaaatagaatgtaaaaactcaaagatatcattattcatcgctcatagtttatcccccagtacttaatttattatcacatgattcacatctacaaccaccctttcatcgcctgaaacatcattcactgctcatgaatttgccctatcatagctgagatgtctttggggtaaaaaattgtttaggatcttaaagactgttatactcaaacaaaaattataaatttccctctatgttctttttaaattgttggatttttagaaagttattgtttctagttatttgtatttgcaaaatttaagatcacagtaattattaattgttttgttagcaattatacttttagttgtcttcttaactttaatgaatttacatatacatttgtggattgtggagtagaaaaaaatgagtaaaataggaaatagcacaactattttattaaaatcaagaaaatttattacatattttgatttttacatgaaatcgacaaaataaaaaaagaatgaagagagtatttttattgagattttcaagaaatgttccagcattgtccgtggaaaatttacatatatttggtgtgtcactatcatatcattaaagaaagagtaatgttgacttattaaatcatactgcctcgcctctgttccaaaatataaatcattaaagttataatacagatattaagaaaataattaatttattgaattttataaaaaaaatatcaataattttcctactataccattttatctctaatgaaatagtactcctgtttatttactcgcactgcacaaaattctcattaataataacaagagtaaaatacaattttatttgtccctaattttggtatccatcgatgagacatttgttagaaaattaaaataaaataaataaatgagaaaaaaaatgcaaagttttaaactagataacaaaacaatagtaacaaaacaacaataagcacaagtaaaaaataatttagggaaagaaattattagctgggttgaagcatgcaaatgctattctcagagacaaaatgttcaaactgtactagtagtaaaatcttattgcgcttctcttccaagatacgataatctgatcgtgtacaggaaaaggatccctgaaccttctcaacaccaatgtttttgttctcaaaaataatttttttataagaaagggaaagacaaaatttagagagagagaaaggaagcaaattgtttattttgagtgtgtgttttctagaaagaaggaaagagatacatataggcataaacccccttatgcaacaatttatatatatcaaaacaaatgtaacaatatgcattgacccactcaaagcaaaatcttagaaaagataggaaatttaattttacgtaacagattctacaacaaatagtttattttataaaaacagacttagtaatatatttttataaattttaaattataaaacaaatatttactaacattttcccacataatttaaaaatttaaaaatattttaaaaaaatataatttgtatagaaacgtaaaaaaaaaaagagcatgtgatattgtattttgatataaggaaccttccgggtttgagtcttatacctagtgtttatgaacttccaccgaagaaaaatgtagtaacttaattgtcttgaactacatattctttaaccggactttagtacacaactcctacaatattagtgttcatttaggttctaaccaatagtaatgtgttacacgaccttgtgtatgtattttgtttcgtaagtatcacgtagagattagcacatatctcagtggcggccccaccaccacactcactaggtgaatcctcaaagagtggtttgtgatcccccacccttataataattgtcattagattcattaagagattttttttaccaaagatacacatatataaatacctcaaccttaatattatcacaatttataatacacctcgtcataggaatgagaaacggagcaatttcacaaaattttattttggtgtactttagtcaacaagcaatttcattgttactcgttgaacttcattcatgggatcaccaatcacacgtagactagtgtccattgttgtaactaaataatgggatctagtctcattctcctcgacgactcaagtatttgttggcgtgtcaacccttttgtgagaggatccgcaatattgtattctgacctgacaaaagtcaagagaaatgacaccatgagaaatcaaatttctgatagacttatgtctcattctaaagtgtcttcttttttcattaaaatttttgctagtaactttagatatagcaacttgactatcacaatgcattggaattggaggtatataggcttattcaacaatagcaaatcacataacaaatatttaagaaactcagcctctctagtagcagtatctaaaacaataatttcttattccatgatagatcgtgaaataataatttgtttagcagattttcatgatattgtaccactaggtaaagtaaaagcataaccacttgtcgattttgtttcatcagaattagaaatccaatttgcatcactaaacccctcaattactacatgaaaacatgtataagaaatgtcataattaatggttccttaagtatttaaaaactctttctaatgcaatccaataagaatgatcagaattattagtataccttcctaatctaccaattgcatatgcaatatcaagcctaaagaagtttgtcaaatgcaacaaagaaccaataatttgagaatatgtatgagaaaaaaaaattttactcaaatttttctttaacttaatggatgagtcataaggagtagaaacaggtttcacatcaaaataattaaacttcttcaatagcttttaacatagtgcgattgggataaaatcatgtcatcatttttctttataagtttaatacccaaaatcacatctacaggcccaaggtccttcatatcaaaattgctagacaagaaagacttcacatcatttatgaaatgcatattactaccaaatatcaatttgtcatccacatacaaacataaaatgacacatctattattattaaattgtttcacatacacacatttatcactattattgatgtgaaaatcatacaaaagaacaatttgatcaaactttttgtttcattgctttggagtttgtttcaaaccatataaagatttaataagtttgcaaacttttttttccttccctggttctacaaagccttcaggttggcttatataaattttttcttttaattcaccatttaaaaagatattttttacattcatttgatgaatttctaaattaaaaaccaagcaagtgcaattaaaacactgatgatagtaactttagaagcaagagcatatgtatcaaagaaatctacaccttctatttgtttacaatcaatcacaacaagtctcgccttaaatttttttgtagatccatcagttcttaacttcttttgaaaaatccacttacaacatacttttacaaccaggggaaagattggtaaaaaaaccaagttttattaattttaagaaaacgcatttcatcattaatagcttcttttcaaaaaggtgcatcaataggcctcatgatctcaccataagttttaggatcatcttcaagtataaatttagaactaaaatccttaagtttttcaaatattttactcctcctaggttaaaaaataatgtccttattagcattactacaagatgataaattagaccaagaagtattataaacagatttagataatttatttttttcaaaggaaaaacattttcaaagaaagtgacatgcctagattccataatagtatcattagaaatttcatatacttctaaattaacaaccaagaatctataagtaatactatgcaaagaatatccaacaaaaacataatcaatagtttttggttcaattttccttttcttattaatagagatgttaacctttgctagataccccacactttaagatattttaaatttgattctctttttctccatagctcataagggattttttcaaaatttttataaggtattctattaaaaatatgacatgcagaatataaagtttcacccaagtgtttgttttattgttttgtgtgttgtattttcacatgtttattttttttagcaatgagctatatatagagacaatcagtcaccaatgtgtagcaacaaaatacttggagcaataatgttaaacaacatacaataaaaaccaaacaacaaacttcctaattttaaagacttgtaacgttcacaaaagaatttgaccaagtaaaaggtagcttcctaacataggaatggaagtagggggatgcttttagttttttcaaggaaactaattctaaaagcattttatctttaaaaaacataattgataaagaaaatatttaaattttaaatatattttccaacaatctctcactaatttaaaatttaaggaaatgaaataatgtaataaaaaaatttaatggagtataatgcattgcgttttcacccgtaaatttttcaggcttactagaaaatgacttaatcatatccatggcggacatttagataaacaaaatactactgcagaaaagactatgcaagaagaaagtgaatttttctctctaagacagttagaaaaaattaaaataaaataaaataaatgagaagaaaatacaaagtcttaaacaaaacaacaaaacaacagtagcaaaataatttcagttgatagaacatgaatcttgaatgcaatgtatcatataataagcaaaaagaaaattaatttaagagaaaaaattttaattagcctgtgttgaaacgcataaacaccttagagagaaaacacccccactgcactggtaggaaaatctgattgtgctcatatctcaagatacgacaactcattgatttcgatcgtgtgcagcgaaagattcctgaatcttctaaacaccaatgttcttgttctcaaagataattttttataagaaaggaaaaaacaaaatttagaaagaaagaaaataaattgtttattgcgagtgtgggtttttgaaaggaggaaagagatgtatatagtcatatactaccttattcaacaacaaaaatctaaccggtggaaaccaacttagcttcaacaacaaaattctgacctttgaaacccaacttataaatatcaaaacaaactcaacaattacataacaacctgcattgactcactcaaagcaaaatcttaaaaaaatatgaaatctaattttatgtaatagattttaaaacaaatagtttattttataaaaaacagaattaatatgagtaatatatttttataaattttaaattataaaacaaatatttactgaaaaaacatttagtatggttattttaattaaaagttaacattgactattaaaaattaaataaaataagattaaaacaaataagatttactgaaaaaacatttagtgtgattaaacccttaacttcaccaaacactcagaacatggtaaccacgtggacggggtgaagtgtgtgtttgtgtctgcgcatttaactgcgattaaacctttttcttcctcttcacgtcacggaatgattccatttcatacttctcagatcccatcgacatattttccgcacaaacctttgtcgtcgccgttgttgactctagctattgctccttttccaccatcctccgtcacactaactttgcgtcgtcgccatcaacgtcaccgacacatgcaatgtgttcttttaaacttcaaaatttgggtacgaattagaaaggttctcaatatctgacttggtaactacaagttgcacatgcaatatgttctttgataattatgcagacttcatgaagattgatatgcaaaggatcaactactatgcttgtcaatgcagggtggcagtggagtacggaatgaatttagatgggaggttttgattttttcttttaaaattaaaatatgcttcggtggataaaaataataattttatcagtgaatttttaatggtcaactcattaatttggatagtggaatcaaaatcactgattttataaaataaaagaattaaatgttttaattttaaattagaagaccaaaattacaaaatagaaaaactaaaattacatgttatcctaataacaaattcctatataaatttgatagactaagacattttcacttcacttaactccattgtaccatgtgctacttgtggaaaagtaaataattttttgaattaatcaatgatataaatacataagtaaatactaatgccttaggaaaaagatttcaccataattaaaaagactgttgtattaattcatgaaatattgattgagggtaattctggaaaaaaaatatttaatgaagtattaattttgtaaaatgcttttggaatgatttttttcccctaaaacaacttaaaatttggaacagagtaagtgtttggtaaatgtatttgttgatgtaattgataaatgtaaattgacaaaaaaaaacatgtttgtatgatattattatataaatttcaattttattgataaaaatatattttggatatttataaatttaattttttttaattaatttcacattcttgcaatttttaattattgatgaattattttaattatatttttagttccaatctttttttttcatattttgtaatcttctattaaacttatttttttaatatctaaaattaagtttaaaatgaaataaaaatagcataaacttaaatagacaacacacattcattacagtgactagggaaagtgcaaaaatagcatacacttaaacagacaacacgtcattacagtgactagggaaagtgcttttctaaattttttaaataataataaaaaatatagaagttaaatatagttaattaaaaatgacataataaaaaaaactaataatataaaagtaatggaaagttaatgcgtgtagattataagaaaaaattgaaatttagacaagtgatttaaggctaaaattgttcaataaaatatgaacatcaaatgaaataatttacattattaatatttatagattagtataatggttaaaatatcttacattattaatatttatagattagtataatggttaaaatatcttgaactataaaattaaaatgatagataaatcatataaataaagtaacgattaaaataaatagtttaatatgaaaatattttaaaaaataaattcaacaatccatcatatattactatcaatatattgacgtgtaagggttataataaataatgtaatattgttttttttaaaaaaattagcaaaaataaaataaaactctattgttatcaagaggaaaagagaaacaaaaaagaataatacaatcatattttatatataaaaaaggaaacagagaaaatttaataaatattttaagaattaaaaatataaaaaaccctagaagttataagttatcattttaaaaataatacttaaagtagtgtttaaaaaacgttataatctaaagaaacttgtatgccaatcataattaataaagtcaaataaggttttcacataataaaaaagttaaaaattttctttttattgtcaataaaaaaggctaaaaactcgaaaaaagtactcaataggtgaagaaagtattcaatttttttaatattttcaaaagacataaaatatatttaatttacttttgcatttaatattatctccggtcctttatataagaaacaagcattcagactaagaaaagtggtgatcatatttaatactattataaatttaaattttatttcacaagtgtctttaactttaaatgttataaatgatgatctcatttaattttaatagtccaatgagtgaatgattagtaaatagagttaacaatgaattaaggatataaaagaaatttaacccttaataagtttcaaaattagtcattatttcttataattggaaaaaaagtcaattggttgtttatatatatatatatatatatatatatatatatatatatatatatatatataattggaggttattataaaatattaggataataatcaaaatcttttatattgatagagtaccataattaaattcgtcattcaatggtgttaaccgaaatgccaaacattctaaatgatgtgtcaatacttgatttagtgtcagtacaagtatattgataatatttttcataaaatcttttcacttttgatttctcaagtctcattgttagcatttttctatatttatttatattcaccagagagcatactatgacctgaccctttttataatttcttgtctacacacagtggttgattggcttcttgaacttttggcaccgagg

SEQ ID NO: 3805 - DNA, 3820 bp, Glycine max
  Intron number 17 from transcript Glyma09g06390.2 (locus Gl yma09g06390) derived from phytozome v7.0 (chr-ID Gm09; pos 5128026 to 5131845 reverse strand)
caggctctatcaattggtgaggtatgactggttatgctggaagccatgaaaatttcagtataatttagtggctactgttttgaagactttgttatgtcttttcagttattttaatatttacttaagtcctataagatccctgtattagagtatatgcttgtataactgtgaaaacagtttgtaagggctgttaacttttgctaacagcaccccactggtgttaggctgttagcttctattaacagaatttccctccttatggttaattctgttttgcttagttcgaaggatcagaggtctatatatacctctttgtaactaatcctgtaaccgacttttcagacagaataatatcagttttctctctaatctctcttatttcctctcactttatcaaagatggtatctagagccaaattttcatagtgctctcatctttgcaaattccagattcttgcatcgtacccatggtttccgcttctcagagttttgtctcgcactcctttccaaattccatcgccaagaagcttgatgattcgaactatctccattggcaacaacatgttgaatcggttatcaaatcgcaaaaactgcaatgtttcgtcgtcaatccagttgttccacctcgctatctcacggaagatgatcgaatcgctgatcatgtgaatccagagtatgaagcatgggaagttcaagaccaaacaccccttgtttggctccaatccactctctcaaagtccgttctattgcgtgttcttggtttgaatcattcctatcaagtttgggaaaagattcacgagcaattcagcctccatacaaaatcttgtgcgcgccaactgcgatgcgcgcagtttcgcttgaaggtaaatccatggatgaatatctgcgtaaaatcaaaggctatgttgatgaacttgttggtattggagttcgggttcgccatgaggaatacgttgacgcgctccttgaaggcctcttgtccgattacgtgctggtgatctcagtcattgagagcaagaaacgtactccgtccatcgccgagattgaggccttgctttacggtcatgaaacccgccttatctgctctcctaacctcctatggcatctctcacagactcatctgtccccacactcatcatcaggatggtgtggtggaaagaaaacacagacatatagtttgggccttaccttgttacaccatgcatccttacccttatagttttgggactatgcctttattactactgtctatctaattaatagacttcttactacttccctcaactttgctattccctttgttactcttttcaacgaggaccctaatattcagtttcttaaaacctttggttgtgcttgctttcctttgttgagaccttaccatacacacaaacttaacttttgttctcaagagtgtctgcttttggggtattcctcctctcgcaaaggctataaatgtctgtcttcaactaggcagaatttacatttcgaaagatgttctgttcaatgtattgaggtttccttattctgacatatttccttcctcttttaactcaatacaaaatcttgatttctatttcagccttaatcctaacctgtctctaccatctgtggttcctacacctcaatcttctcaactgtcttcctcccattctccttctgcacctcttattcctcctggcttttctcctatttcagtcaaccctcctacagtctctcttcctatctccaatcaaccttcagttgagtctacttctgtccaccctcaatcatcagacaccatatcccttagcgagtctgttccagcacctaattcaatccctgttaacactcatcctatgcaaacaaggtccaagtctggaattcacaatcctagactacatccttctttatttcttgctcattctgaacccaaaaatgttaaacaggccctgaaaaattcagattggtttgctgcaatgcagcaagagtatggtgctctgctgaaaacagaacttgggacttagttcccctaccttctaataagcaagccattgggtgtaagttggttttctgagtaaaagaaaatgctgatggttccatcaacaagttcaaagcaaggttggtagctaagggctttcatcaagtccatggttttgactttcatgagacattttctcctgtggtcaagcctgtcacaattcgtgttgttatcactcttgctctttcccatgggtgggaattatttcagcttaatgtgaacaatgctttgctatatgggtttcttgaggagtcagtatatatgacacaacctcctggtttcgaggtagcagataagtccctagtttgcaagcttaacaaggctctctgtcttgaaacaagccccaaggcaatggtttgaaaggctgaaatctactttgctccagtttggttttgtaggaagcaagtgtgattcttctctgttcatctacagacatcaggtgcatattatctatcttttagtctatgtggatgatatcatcatcactggtagctctgcctctcttattcaatagctgaccaccaaaatgaacactgccttctctcttaagcaattgggtcatttggattattttttggaactagagatcaagtattttcctaataactctatactaatgactcaaagcaaatatattcgtgatttactccacaaaactcacatggctgaggcatattctatttcctcccccataattgcaagctgtccaggcttggtgctgatttgtttcatgacccaactctctacagatcagtggtgggtgctctgcaatatgctactctcactagacctgaaatcagttttgctgtcaataaagtttgtcaatttatggctagtcctctctctagtctctcattgggcagtggttaaaaggatcttaaggtatctcaaaggtaccttgtctcatgggttacttcttcagcctgcttctattacaaaacccttggcgttttatgcattctgtgatgctgaatgagcatctgatgtggatgataggcattccacctcaggggctgccatctttcttggccaaaacttgatatcttggtggtctcgcaagcaaaaggtcattgccaggtccagtactgaagctgaatattgcagtttggctcagacttctgctgaattgacatggattcatgcttttctaatgtaaattgatggattcttcgttagagaaaaagttctggccaagcgcagctttcagttttacacatcctagctctagatcagtgggcagatgtgctgaccaagcctctttcttcagcaagatttgaagttctcaggggcaaactaaatgcgaagagtttttcctctgaaaactcttctccttgagtttgagggggggtattagagtatatgcttgcataactatgaaaacagtttgtaagggctgttagcaagctaacagcaccccagtggtgttaggctgttagcttctattaacagaatttccctccttatgattaatcccgttttgcttagttcgaaggatcagaggtttatatatacctctttgttactaattttgtaaccgacttttcagagtgaataatatcagttttctctctaatctctgtctcttgtttcctctcactttatcaaagaccctgtatcattagaaaatcataaaataataagatttgtgtttaagcattcttgtgccttttacgtcatatggatttaaccatgtcttttacatcatatggatttgacttttaacatcatattattgtttctaaaaaatcagctgtggatttattgacttcttcttttgaattgaacagaaatttcttgagc

SEQ ID NO: 3806 - DNA, 1399 bp, Glycine max
  Intron number 4 from transcript Glyma09g36880.1 (locus Gly ma09g36880) derived from phytozome v7.0 (chr-ID Gm09; pos 42467739 to 42469137)
actctccttactcgccggattacacttaccctacggtttgtacatattttacttttactttttacttttttctttgtctactctatatcttttacctaggatgcgttttcaagcatagcttttaggacgcattggcttttgaactttcatgaaaccaaactatttcccctgctttctatatttccttcaaatatatttaattggtagatatctaaaaacaaaaatcgtcttaaacaatctccgaaatcgtataagatatattctctgaatgtttttctttttctctctttcagttaccaattattcttgtcttttctgatcatattggttattcacattttgtaggagtacagttgcaacttgaaccgcttgaactttttaaatttgcttgaaagaaatagttgatatagccttagctatgttttttttttaaaaaaacaaacctagtaaaaacattggattgcgtttctatttttacctcacgttagatcgaatttcttaaaattttcaatatttgaaatttggcatgtcaacaaattttatcatcagaaagaaaataaaatagtgatcatatcttctggactattcaaaagtaaatatcatatctcgtaactaccaagatccattccctattagtattgtaaatataatgaatttgattcacatacatgatacatatatttagactttggtagatatataataatagtattttttatatgaaagtaaaaaaataagtatttataattaaatttattatatataaataatcaaaacaaaaacacataagtcatgtaattattttaaacaatcctatggtttttttttaaaaaaatcttaattattaatatatgcttatataattcaaatttgtttgtttttgaaataaaaataatattctcgttaactagttgcataaatacatgcatgactaaagaaaagaaaaatctgttgatgacaataaaaaaaaaaaagggggtatgatggtaattgtaatggaagtttcactatttatgtggggatgaactttttgttggacaagacattattgtaccctaccgaatgtggaaatgaacgtggtaagtcggtggcattcacaatgtttgttgtttaattgattgattcccttctctcccccgagcactagtcaaagtgttccaccttggggcgattgtggtccattttctcagtcatgtcatctatactttcacagtcttcaaaattcatgtggttctgtacactgcacacgcgaaattatttaatcaaacgtatgctagtggtccacctttttctattttaattagattaaaaatactactacgacttgaatgtatagaatgaatgaatgaattatggtggctgtatgtattgaataatgttaaaatggtgcagagctact

SEQ ID NO: 3807 - DNA, 2336 bp, Glycine max
  Intron number 2 from transcript Glyma08g43990.1 (locus Gly ma08g43990) derived from phytozome v7.0 (chr-ID Gm08; pos 43746592 to 43748927 reverse strand)
cttagtttgtaatagagagcagagaaaaatattagagtttccttcttctctttctttcttcttgggagggtcctagacctcgaatgctaggaaacattgagctgattttcagttcataacaataacataggaagctatggctttgtgagcaacaaagtgatgtagagtaatgaacaatggtatgtgtgtttgtgtaaggcaatcatatggatgtagttcaatcaatattttgtgccattatctgttacaggagtgcatgatacatacgtatatgtaaatggttcttttcgaaaacttttattttccttaatatctgcaattctgtcctatcatgattcataatgagtctttatgctatatgcatttagggttggagactactgcctccagtctcaaatataaggaaaaaaacgattcatgctaactacgaaagttagttaaccacatttaatttcacccatctcaattaaaaaataaaattttccccaacttacccttcgttggaacttggtataaggaataaaaatgagtcattggaactaaaatctcaattaaatgaagggtattttagagatagtagcattaaatgaggtgaagttagttgaaattttcttatatttgagacaaaaaaagtgtttttttcttcttatatttaagaccggagtagtattatacactgacaattttctttaatgttgtcttattctttcttatttttgttctatagaaataatttttctacctctcttcttgtattttctgttctttctaataaaattccttcttttatcctaccaatagaataacagcagatgtttccgaataaaaaaaataatggattcattaaaatttgattatcataagtaatgatagaagtttggtgaagatttggtgctttgagattcagcacctaggtcctgttttggctgaaaacaaggatttgtcaggatgccaagcacctagttgctaactggtgggagagccttttcaaacatgcaaattttcacgctgaaaccagttccaatcacattcaaaacacacaataccatggatcaacgacaaaaaagaccaaatcaccatttttcaattttcgcttacaagcaagctaagaatcaaacttttccatgaatgagtgtgagaacctaaaaacactattcatcatccctatcattaacatgttcattttccttactagtgtctttcaagaactgccaatctagagtagtataaactcattttgatgatgaatatctcccaaacacatcaaaccatgcaatccctatatgcgatttttcaactagaaaaagaaatagatcaacaaagcaaaaaggatgggttttagatgcttcatttacttaaaaatccaaatatttgaaggtttcttttcccttcttctccctcccaccctccctttcatatcttttcttcagctgaaaatacactttctaagacatagactagcctttaatgtagggataaggattaggattatattaattaatattgtagtaaaataaataaaacatgcaccgacagactgtgtaaagatattttacactatcatttaatcacaaatcttcttgtatggtaagtttgtgttcttttatagaaatgatacttttttattggttgactgtgtaaaatcttttacactgacattgcatgcctattaaactttgtaacttgttacttaattcttcatactttgaactacacttttctattaatatgtatgattaatgtagattaaataaactttaagttctgcccctggttccatgcaaagcagtgctaacagtggaattaaggataaagaaagtgtaagtttatgattacaggaaagttgaaggactaacctgcaattagtcagcattttatctctaatgcagcatattcttggaaaacaactttaagctcctcttatcaccctttatccatttctgcattccaaataatattgaaaatatttagcttagaaaattaggggtattacaggaaggaagtccgtctatgatctggttaatctttttatcccttgtattatttatttatttatttgtattttaaatcacagtatcagctggtcataacttggtaccatctcatgaggccacaaatgacagtgtcaatgaaattattggtctgtctgctcaaataacagatgacaaggtatatccctttttgtcccctgccctcccttccagtttctctattttcctttatattgtttctagttaatgtttttgacatccacatgctcctctttctcaggactttccaacgagtaactccaaattgtccaattcagacattgtttggtcaggagttgcgtggag

SEQ ID NO: 3808 - DNA, 1855 bp, Glycine max
  Intron number 7 from transcript Glyma04g32460.1 (locus Gly ma04g32460) derived from phytozome v7.0 (chr-ID Gm04; pos 37238540 to 37240394 reverse strand)
ttcttcagaatctggctgagttccagttttcttgtgtgagtaattttcaaaaactttgacaaactaactttgctgctggctttattttttgttttttatacttatttacgttattacactaatgaatattatctaaacatccgatactgatcaactgaaattttacaaagcaacaatgcaaggaaatttactcttacgagttttgctttaggaaatttcctattgtcatgttaataacatttttttttgattcatttcataggaaatgaaactcaatattttttcatacatgtcaaagtggttaaaaagaaagaatatcttttacatatccacctaatttgtcaacttttcctaaactgatggcaaaatgaaattatctcgaggtatatgcagccatctgcaagggaatagcttgtttctaggattggaattggtggcctctagattagttttaaaaattgaaccggtgatcgacccagtagagtcactgggtcaatgcttgaaccagtgggttattaattgacttgcatgacttggtctatattaaaaaaaaatgaaaattttatacccgtctttagaaaagcaaaaaaaatcacatcacaaattattataattacacaagctcattcttcaagttcaaatctatattaatattatattatttattattcatatttatatatatatatatatatatatatatatatatttaaagagtaaaattatatatatatatatatatatatatatacttttttatattataaatgtcaataaatatttttattatgatattttaaattttaaatatttaatataataacctccaaaatggcagatttgtccactaatgtttattatatatttttataacaaaaaacatgtgaaaatgtgcgagagacacctgagcaccaaggatgcacaacttgcaatgctgaagttttagtagctagttttgtaaaaaaatgttttagcttaaatgtggcagcatgggaagagaaagtatgctgttgtgtgtgcagatcgagaaagtatgctgttgtgtgtgcagatcgagaaagtatgctgctgaagcagattgagacagccatggctattgtgctctgatcgtaaaagtaaagctgcacaaataaaaaaagctagtttaaagttcaataaccggtttgagtcattacatcctctggttcgatggttcatttggaaactcgccggtttgcttcagttcccaatgattcaatgacacgaatgatccaataactggcccagacagtctgtatcactgctttgtggttaccggtccgactggttggttcgagctggtttttaaaactgtgctctagattgtatgacacagacaaaactaactactaaagtgtgtgattcttcctttaatggaccttttcatggacaaatcctgaattgattttcaactgcaataaaaaatgaaatgggtacaaaatttgataaataagattcacatggtacggctttccttgtttgactgttcttgtggttgcttttagtaattcaaactgtagggggttcgtgagtttatgacaagttcactctggccttgtgatcagatgattttctgaattcatggatggcaaaactactactagcttttttggatattgatattgattttttgttttatatacacacataataatataatgactctttctattagaataaacatttcagaagaacgttctttggcatgctttaactttttaatggacttcctttctagctttgtgttttcttttttatacctagtttgaaactagtgtcctttcttcagatcatgctctacttctttatttttacactactttgctatgtgcaggtg

SEQ ID NO: 3809 - DNA, 3353 bp, Glycine max
  Intron number 1 from transcript Glyma12g01660.1 (locus Gly ma12g01660) derived from phytozome v7.0 (chr-ID Gm12; pos 1006328 to 1009680)
cctgcgagaggtttgatctttaaccctaccaacattctgctttctgtttttctttttggtcactgtggaaacaatgatggcgttttttgtgtgtttgaatttcaattttatgttcctttttgctgttctgacttgtgctactatattttctttttctaaccttgctaactgtgatttgcctgctatttttcttaattacttgagatgagttgcgccaagtttttagtatagaaagaaataagactctctctctctcacatgctcactcgtctttcctcaattgctgatatctatcatgttttatgtgtgctttattagtaataattaatttacattaggatgggagaagaagtgatatctcgcaacacttggccattcccaaagtaattgtatgagtggcaagtggttgttgaagaggcttgtttaatcatttaatgcctttccctgaaagttggaaagatctcactggtgttaatgacaaataacttttgaatttatctgacataccatgaaacacttcttgaactgtaaatttgtaagattaagattgtcattgaagctttaggacagaattttctggggtgccagtgctgtagatggtttgctttttgacggctaaaaatattaggaagagttgagaagatgagctgcccttgtaaacagtaaatatagaggctcattttgttgtgtataaaagattgaaaaatttgatatataatagcctttttggtgctattgtattgatgtataattttttattgcagatgtgggctatctgcagtgtggtttagatcaggaactatgttcatggccttgcaatcactttattgcagcttattcagaattattttttggacttaattcagagtcttattttgctcaaagctccctgttttatgatttatgtttttgcctttaccattaagtcaataatctttgaatcagaaaaagccctttctgttaaatggagctattaatcatgttgggatagtttagatttgagtatatcagggaatcttcttcaagaagtaatcacacagagatgagtatatgttaatttagattgatatatagaggaagcttgattcctcaagcaattacatatgagaggtatgacaaaatactagaattattagataaatattggtatattacttaatctgttgcagcttgcaatgaaataagtcctttgcatgatatattcttgtcctaccatagataaactaatgtcagtgatgtttctgttttcattgtgtgaaaataggatgtaagagttacagtaatgctgttgatcatacttcttttttctttacgttttaaattttatttttgagagaaggggttgtaaatgtgattatgttgaactctccaataaagattaatgcttgtttggaaattgctttttttttcccttctggagaaataataacttattttttaaaagttctctctggaagttggtaaaataagcaattatttcttcaagataaactaaaccaaacacacactaacttgtggaatttctggagtaaccttaggagaatcagatggaatatgtttgtgaagagaagtagtagatttcattggcatgcctcttatttcattgatgaaccattggagagattcatgttactgtgtattttaaaggtggccttcaatattacaacctttccaagtttcaactatattttatacttttctccatcttttttcttaataagttttctgttgttcagtagggaatggatttcatttcatgagttaaaaggaaaaagccaaaactgtcgattgtatttcgtgagtgtttgggatatgtctagctgtgagcaggcatctgctggtgactaggtgtctcacactggtcacagggtggctcagcttacttgcaaccattgtttgtgtgttgatgagtgcctgttcctgaataagatttctccattgctctaccccacccaaatatttttttagtctttttagaactgtttattttttatgaattgatttctaattagcaatcatttttcttcatgatgctaatttctgggtatttaaacgaaagtatgagatgttgatgattgtttagatgtgattacaaagataatgaaagtaactttggtcattgctgatgcagcctggtttcttccattcatttaagcagatgtaagccaaaaatctaatcaatgtttctgttatatgcttaatgcttatagccctataggctctatatggataacgattagttggcatcagttttctggtctgaatactgattctatctcttttcttgcaatttctcttctctcactgcaaccttcttctccttatgtagattgctatgcagctacagaatactctcatgttgatttctcctttttaattgatttgaagttaaattctaatctgtcattttggtcttagtattgagtaatctttgatcttctgtgatatttgactccatgtcatgttttgttcctctgcttttagaattgtttagcatgtcatattgtcatccactatcccaaattcattttccttgtcattgacactgattctaataacatatacaagtttttctatttatttatgtttggggccatataattaaattgttatctattaccatatccttatttgtaattttactatatgcatattttatttagatatagttctgcagaacctataacattttgattctatcaaatttaatccttgctctatcatattgcaattgatatgtggcaattttcttcaatcaagggcaacggaactgaatgttgatttattgtaatgtagaaatcgactgagaactctacttgtttataactattactgcaaatctgtgatgttttccattttagtaaatctgaccatatgatttcatggggggccttgatttgcttgatatggcattcatgatgacctcgccataatgaaaatacacacattaatgattcatttttttgctgtgcacaatttagttttttaatggtcggatatgataaattaaaacaacaatcactggtgtgtaacttcctattacttgctgtagatatgtcttatcatagcattacattctttttggtcctgattgcatttcattgaaatatgctctaccaatctaaacataatagttctcatttgagttttttttctttagccagtaagtagtatttattttttcattaaaaagaatgaataatgcttgtacggtggtacctcccccccaaaaaacaagggaaaaaccctaatgaacacttcttaaactttaattttaagtctaatacaatttcgtggatttcttatgtttcagaatttccctaaattttcctcttgcaggttgttgccttatc

SEQ ID NO: 3810 - DNA, 1979 bp, Glycine max
  Intron number 1 from transcript Glyma19g05890.2 (locus Gly ma19g05890) derived from phytozome v7.0 (chr-ID Gm19; pos 6540452 to 6542430)
gtgaaggtaaatgttcttttattattattattattattattattattattattattattattattattattattattattattatgtgcataatagcatctctctgaaactttttgtggtcactggtgatatttcagttgcattgaagagttattgttagatgagatctttgtagtaagatgaaattagggtgtccctgtccttattaatgcaaccaatgaatgatatgagaaaacacatttggcctttgacttagtgttcataattgttgattcacaatgtttctctatggtttagggtgttctatgaggtgaagcaattttctggtctttaggcttgttatgacattaatacagagatacagaaaattcttattaattcaagatataatatggcctagatatgttaacaaattaaaaaaaaataatacttcacatggatgcgcaatatttgtagatgatgatcatttctcatcatcacatagtgggataaggcctttgttgttgttgatgatcatgtatcgttaatgcataattatattaggcagatgatgatcacaatcttcaaaaacaatatttgtgatcatagcaaagaaccatagttagattttttttttccaactgcctatatcaaaatatgttctttctcccatgaacatgttactatattcgtattgtttcgtaggacatgttagaatgtcacagaaagcatcattaggtcttggttttgtataattgcctactatttactattgctttaaggatattgaggaacagatagagctgtgtgtaattgaagtcttattcaaagtatttgagttgtatctcaaacgtatcagttaataaaattaaaaaccaaaaaaacaaaagcaggatagttcttggatacatatctaggagtattgtacacatattggtatcagatatgggcatgacaccaatactttttcatttttggagtaattgagcttcatctcatttaattatcaagtttccagtttgtatgaaattgttctaggtcctctgaagagaacaagaacaatacattaagttcaaataagatttgatatttattttaactccatttatgactcctgtcataatctgaatagtagatcaatatgaattgatattcattattgtcctaggaatatgatattttcaacttatatgacaaagtatgtctgataagttatcccctaccttaagcttgtagtgctgaggggtgtattttacaaagcatgttgagggccctactttttgtctataaaacattcctcttcatcataacacctgaggaaaatggacaaaaacatcttccctatcatttgttttgattacttttggcatctgaagcactaggactatagcctcatctaacccaagaagaaatatcaaggtttttgggttctctaagactgtaattgcagctgcattagcattggctgcatttgtttgcaatttaaaacccgtcattgtaagagacaacaaaaatgagttggctggtacctacaaaatgctcacaactttttatgaaaatataatttcccaagttagagggcgagccctggtgcagcggtaaagttgtgccttggtgacttgttggtcatgggttcgaatccggaaacagcctctttgcatatgcaagggtaaggctgcgtacaatatccctcccccataccttcgcatagcgaagagcctctgggcaatggggtacgaagttttttataatttcccaagtcaaaccaacttattgtcttcgattccatacaatgtttttcgttctatcccttggggatagttgtttatagggatctcatggtgaataataaggatttggtctttaactaagtcaaatggtgttgtgtgattcacccaatgggatgaggcttttattgttgttgtatcccttgattatttgttagtgctttcatgctagatctaacttcttttatcttttcattatggcaatgtgcaggg

SEQ ID NO: 3811 - DNA, 692 bp, Glycine max
  Intron number 5 from transcript Glyma19g31870.1 (locus Gly ma19g31870) derived from phytozome v7.0 (chr-ID Gm19; pos 39642753 to 39643444 reverse strand)
ataaaattggttctccagatccctttttttcaaaggtttgctcttgacatctgtgtacacttctgagaattagtgtatagattactacatgtttctatatctagtttagataaatgtttgcaaatatgtaaatttaagtacatatagttctcttctcttccctataaattgtaagataactttgccccttctgtgattctgtgaatctcaaattttagaagaagcagtctatagataaaaatgaaaataagggctcctaaattctattcaatgctgaaaccctgtcctttgctttataagtaaataaatgtggttaaactattttgtcattttaaaaaatggtccacaactacaattttgactgcaatgtcaaggattttgtgatctttgcatctacaattatagccatatcagctgcatagatatatttatccatactttcctacaatatcaagaatacaaagctataggtgtgaccataatttaaaaccttgctattaacattatttaacgcaatgattatacataagtcataaaagagaatctaatttgatgctggaaatgattatgtggttaatttcgaatttatgtattgtagctgagtgattaatatggtgctggaaatgactgagtgattaatttcaatttgttttttctataacaaaaactttattctctctggcagctgctca

SEQ ID NO: 3812 - DNA, 5260 bp, Glycine max
  Intron number 1 from transcript Glyma07g12450.1 (locus Gly ma07g12450) derived from phytozome v7.0 (chr-ID Gm07; pos 10781555 to 10786814)
ttgtggttagttttcttcaccctagctagctccttgttgtgtgttgcattgctaattaattctttggatttttcatacatttttgttttggtgatgtgggaattaattttctggaaaatcaatggaccatacttgattcgggaaaagtaaacataggattaaaggttttatctcaattgattgaataatacatgtgagttgttataaatatttaatatctaaatttaaattttttggaataaaaagaaagtagaatacttctaaatccttaagtattactaccattttactaattataaatcttatgtatgtacaaatttatggtatctaactggcagaagaatcaaccgtaagaaacaatttcctagttttctggataaaaactgtcggtgtagtgtgaaaggaaatgcgtgtgaacctcttacagctacatgtcaacaattataatttctaattaacctcaagtgtcaacatgagaaatgttaacatattggaatatagtaccaaatttgctggacttcactttttatttaattaatttattcataagttttaataataaacatattgttacgagattcacgtcaagtgattattcacatgataagtacttatatatatatgattaggccaccttattatgaattaatttttaagaaaatcttttaaatattgaactaactttaacacatattttaaaaaaagtatatataaaagaaaaatatgttgttagcacttagcattctttctcatttcaattttaaattaggatctccataattcgatgtgtagttaaaaaagaaaaacagtgagtctcttaatttaactatagaacatttaatcttacgtgtacaccttatctgtctaactctctgtgtcaaattagttcaacatgtttaatttatcaaatttttttcgtaaattatatttaatatctacactttttaatatcgtttttaagttttttctgtttagtagttttataaaaaaaattcttttttttattatatttgattattaaatctgagaaaattttatgataaataaaatatatacttaaatatttttaatcttttctttaaaaatggatcgagagaccaactcaatctctcaatccaacctacaattcatcacaagttagattgagattttcaattaactacaaatattattcatttaaatcaacttaatccattttttaacaagtttgaaaataagtttagttgaccgtaagaaagggttaggtgacctaacatactaatcgtgatcatctttatgatagggtctggtgtaaatgacaaagtgtatcgtgtgaaagttaaaaattttcacactgtaggaaagttcattttaatccaatagaatttattttaaaatcaatggttatcattttctattttttttttcttttcttttttatgttatttttcctattttaccctcttcttctctctttctctctccccattttattcttcacctctacttcttcgacgtgcttccaccttccctacctctgctgtaggtgttctctctctctctccctcctagcctcttatgacaaagaaacccaaagccctcctagcctctgaccgcgccagggtgaacccttccctctcgcgcttggatttttttttcctttttgcagttgaaggtggagacattgacgacgacacaataccccatggttctagtaagtggttcatccctatcgtcttgtccctctcgcgtttgtattttttccattttgctagtgatggtggagtcgttgtcaacgacggcgcagtaggaggccctgctttattgctctggaaagtacacggcagtgtcaagatgcagtgcgttgcaatgtcatggtcgtccacaatggtgtcgtggcaaggagggggggcgggggagggatgccgaaaatcgcttttgtaaaataagttgatctaatagattaaaatgaacttttgtaccgtgcgaaagtttatagtatacaacaaataatgctataaatttctttatattatctttaattcttaaagataaaaatatacataaaattattttttttcctcaggcacaccgcacacgggaacaaacacgttattaaagcaaaagaccaaaagtaaacataaagaacccacgatgttatatcttatttaataaatttcacatgcaacatatatatatatatatatatatatatatatatatatatatatatattatcttaaaacgtttttttaaaatataaccatgggtgaatttatttaaacttaaaagaaaataattttaaaaagtatttttataagtattttttaagaaatagatatgatttattttttaaaataaaatgaaaattattttttaagcacgagcccaaacacactaaaataaaaaaaaattacttattttatttaaataagtatttattttaatgtataagtttaaacaaactaattttatgttattagctgatagaataatgtgtgtgagatgttaagatttttttttaaaaaaaatgttataatttttttaatactttactttgatttctgtatgaataaaaaaaacttctttcttctatttttttttttacttctagaaattaaacacacgacttcttcattaaagtagtagcgttaataataataaaaaaacattaatgtagtggttgaactaatccagtaatttttaggattgggattgtgtgctgcttaagacctctaccaaatctcaatagcaataaatagtttccttgtgaaataaattatactagaaggtcatgacagagcaagaaaatcagcgcaaaaataataaaattaaattaaaattaaaacgatatctctatatcgtatattttaatctatgtgctgatatagaatatagataacggagtccacttcacaaaacccaaacaaataagaaattaagtaaactttgttacttttattaggttgcattagatggaagtgttttcatacttcataggacaagttacaacgacttttagtttggtccgaatctaaccagatatttaaattcggttaatctttaattttaattctgacctaattgtgacccaactaatggttgtaattaagatttagataaaacgtatatatagatattatgcatagttagccgtaaaatttaaaaataaggaaattatgagttttatgcaaaatactttcaatacaattgtatcgatataagtaaccttatggtattgatttaaatcaagaaaaattctaatttatgcttgcaatataaaagatatttatcgaattgagctgattttatctaaaaaaaatatattattaatgagatttaacttaattgattaaatattgtgcatgttgttatgaattctctattacttgagtttaattacaacaaatgaaaggaaaaaaaaatctagaaaaagagttttccaaacccaacttttttaacttaaatatttaaggtctaatttttaaaatctagttccatcctaattaattaactttccatcaccgtgttattagctttacatgggtcttggacacccttattttgcaattttcgaagtagcaacactaaaataagattgtgcctaaatttagtttgttaatcaaaattgcccttttttcaactaactagactgctggtagaggagttgttcttgtggctgcaaaatggttaggattattagctgaccagctttaggcactttcctaagtttgtctgttttaatttactttatagattcaagccaactaacacaattattaatttatatatgcactctttcgaagttctctatcttatttcaagccaattactctttagattccaagggttatctgtatcttaaaggattcttctgaagttctttttcaccattttgttatgttagttcacccaccctttcccatcaagtggggataagcgattgggcgtaaagatttgagtataagttaagtcaaaatcataataaagattatccagtgaaaaaaaaaaactcaaatcaatttcccccttaatttatattttctatttcatttctcatcctagtctacaaaattggacacgttacacctgttttttattatcttttgcattttttatggtttaaatatctttttgatttttataatctttaatctttttgtctttgtatttttattaaaataatccttgtatttttttttgttttgatcattattgtttttttaattccagcagtatctattttttcgttttagttatgctattgttttgagtcattatgttagtccctaactttttatttataaaaaatatatttaattcattctgactagtctttgtggaaaaaattggtaaaaactaaaaactaaaacaaaataataaaaactaaagaaaaataaataaattttacaagaactcttctaaaaaaaataccacaagaataaaaataacatatttaagacctttttcattataaaattaaattttattttaatatacttgaattttctctgcatagtcattttgaaatatttaattttactgcatagaagaaagttgtaatagataatacaaaatcaggtacaatatgcctaagtctaggacgcaaagggcaacaagagtaataaggagtacaatacatttaatcaccttgcctcttaaggatatggtcagagatttaatcaaatccatgtatatgaaatacatctagtgagagaagtcaactcgttaaatagaatgtagtatttcaaagaattaattccggactctgtcaagaaatatgatggattaacccctaaaaaaatgcatttaacccatataacatgaattaatttttttaaaataaaacaaaactctttaaaaagagcaattggagagaggttttctctgcatagtcattttggcttgtgctgttttccttatgcagcagagaggaagagatgtaaaacaaaactctttaaaaagagcaattggagagaggtttcactgtcatccaaattataagtagttataataaattaattcattcttagtttctcaaatgtgttcagagatatttgtaggaaggagcatatctactttcaccaccaaagttattagtttcactaggatcgtaaatttgtttgattaatcttttagggacttatgtaacatctatatagcacaagccaatagataattatatctctacaaacacttccaaagtgatttctaataacaaaacaatatttgtgcacattgaacaggtcttttttctgtgcctgattgccggctgcagcat

SEQ ID NO: 3813 - DNA, 1880 bp, Glycine max
  Intron number 12 from transcript Glyma17g09550.1 (locus Gl yma17g09550) derived from phytozome v7.0 (chr-ID Gm17; pos 7078018 to 7079897 reverse strand)
tatatcacaaaaatcggctgatactggtaattatcacacaacagagtaaggaaagttgatcaaatggatgataactcaatacaagtagaggaagactggggaaaaccttaaatgtaaccattaaaaaagaccttgatctaattttaaaattttggtcttgatagaatacaaaggcattgtttgatctggatcctacctagtggggcaaggcttggatgttgttgttgaagggccacaagaaagaggaggataagatatccttgataaaaaaaggatcaaaagaagaaagaaaagtaacctgagtcaaggagatgctgtataaacactgagtgcaatgttccaatgaaaagaaactcatgaacacaatctcatttcaaaatagagaataattatgtctatagaattctgtgttttgttcccttcaaacactccaaagaatactatacaaagctgttgagatatgatgtgattttgctatcatatggtgtagattttggagatatgatttatatctccaagtccaacagcctaagtctccagcatatcatatctcaacaaaagcatatcctcttgaaacttaatatccttgctcttgtcaaaaacctgaaaactaaaaagagggaataactccaaattctgtgggtctgtagttagtttggttcaattgatttaggtggaactttttattttttgcatggacataatacttgtggtttgttaaaatgtgtagaaagattaggtgctgattggcatatcacgtatgttagcttttacaagttaatatatatattatgattatgttgaaaaaaaagaaaaaaaaggagtttttattctccatcttcttgggaaattgcaattaaaatggaacttacttgtttgtcaaattgcatgtattgcagcatcaaaccagcctataacattttaaatcattttatattcattggaaccaataacaactgtcatgattaatgggtaatcatgtattatgaaatatgtgtaacgataactgacatgttggcagttatgagtagaagttaggaccagtaatgtattattaggaataggaatgttgatagaagataacttatcttacattagttgttctgtattagattagaatacgaaactgctttgatgacaattattcatggaaaataactgttggcagttatgtattagggtataattggtagtgcatgtaattaagcagagtgttaggacccaattgtaaggtatgagacgtgtgttccaccttggaagtaccggtttctatgtggagtttataaggccttggatgctaactatagcaactagcttttgtagtgtgatgctcccaaggttcttatcaactgctatcaaagctttccatcacatctcagttgcaaactagcagcttggatggtgacaccaacattgcagtgtttacttgggactagtcaaagggtcagtgcacagctaacattgtggagtgggtgctgctggggttgcagagcataatgggatgtgagagtccaattgtaagggctgggaattgagtccttcattggaagtatgagatttttgtgtggagtttataaggtcctaggctctcccactacaatgactagattttgtggcgtaattctctcaaggttcttatcacaaagggtgttgttatttgcagtctacggatagagagtaatctctgtaagggacttgtgtgtctgggacagcaagtatattgctgtattgtatgtgatttctgttttcaatgttatattttgctggtttatcaattgttattctatcatattctatgttaatgaagcatggtttaccatatgacatgctgagtttcttttgcagccattttggaaggttgtaaactatacaaatactag

SEQ ID NO: 3814 - DNA, 5000 bp, Glycine max
  Intron number 3 from transcript Glyma10g24340.1 (locus Gly ma10g24340) derived from phytozome v7.0 (chr-ID Gm10; pos 31673691 to 31678690 reverse strand)
aaactgctaaccattaccttgattgggaggtatgtgctgatttacttgttttagtttctgggatattgctggcaggacttaattgtagagatgctatttaacctgtggtcacattttgtatagtattaatttgtgtcttataaactttgccatctaatgttgattaacaattggaaggagatgatagctataaatagggaattagtatcagtcagatgaaattactaaagttgagcagtgttgttaaatagccactatagaggtgctacagcactattgtatagcagaatttctcggatccatgattgtaactctgtccgctattgcagccactatcattgttgtggttgtggcatgtgtcctgcatcctcttgtcatctatgatgagtctccagcctattgaacttttgagttaatattatagtgaattttatatattttgtttttatttgcatacaacttaatttttatacatatataattgatatatatttgatatatttcaactgttatgtgacttccactacatgcccgcaacgctatctgctctatgatatagtggattattggcttcccgccgttttctgcaatccacaattgataacactgaattcgacaagtatgtttctggacctatttttaagatgaataagccattcagatgagatcttaaggtacttttgttgtggattttcccccggtattggtgggtggtactggtttgggtattactgttaatatgtattcaacttctagcatttaggaatcaagtaatgagaatggataggaaactgatattttgttgaatttataatagaaaaatccccttactgccactattaggtatacaaggaattgataatggaatagaaaaataatgtaaatactgtacaagcagcacttcaagggactgaaacctccattccaaatcaatacctctgctcccttttttttagctttcccctttagattaattaactcaccaataacaaactcccttatctttatttattattctgttatattccctatttctactcattcaacttaaacattatgttataagaagataaatctaattctatcttattcaacttaaacattatgttattaggagataaatcttattctatcttatttttgttcatcactgtcctctccctctccttgctcatgtgattcttctttctagtgtatatgtgggtaactggaggtcttacataacacttttgtgtttaagaactatgtatttggattataaacctggttgtctgtaaaatttgtaaagaatttttgtgttctgttaaggatttgtgaaattattttctggtcaggttgccttgttggatgctgtaattgttgcaaattagttatgatgctagaatgctaggtgtaaaagatgttgatgtatgggttttaaagtgaagatggattttgctattcttcatacagtttttaaggaggaagggtctgttttcactcatggaggatgtaggttaattattttctgcttgcaatgtcattgggggcttcaatgtttcttttggaaactttttgcttttttaagtctttggcataaggtgattaaaagtaagcatggtccttgtcccataataaattgggaaaaattctgtcatatctcacatgccactttgtagagactctagaaatttatttctatattttgttcttcattcaagttaggcatatgtttttgatgacttccatatttatttgtgagagtaatgatgtgttaattatttgtgagagtaataggagtattaatatctaggactggcctctttgtagattctcggttatctttctcaacactctttgatggagtaatattctgtctttgtgaataccacgaagaatgctcattcttctagttcaacagcgacaaccaaagtcttttctcacatggtgggattgattacatgaatcaaacgatgctgttgtgttctatccaaaatcaaattcaaagttgtttacttcttgatcctttttaatcttttcctagagttttccttggtctacttctacctcttattcatggccccattagatcaactattctaactggttttattggccttcttctcacttgttcaaaccatctttggcatgattataatacaattgatcactcaatcaatgatattccgactttctctacattacaaccacccttgatccattttttcttgtatgatcactgacttatccaacaatgctcattctccttctataaaaaaaaaaaaaaataaaaaccctgtttgttgaccaccttgattgtttcaaaatatttaattacatttgaagtttgaatgcttaataggttgattttaatttggttcttgacctagcatttattcataaagaaaaaaatggggtaagaacaaataatagttcacatgatagttaaactagtttttaaattttgctttgtatgaaatttattgttgaatttattaattatcacgtgataactttctaattcatcttcagtgtgttgagaatcaattctgaatattctgtatttatggtataaatgtataatggaaacgaaatctcctataataaattgtatttattatttgtgactgtataataaagtcaccgctgtgtatcacaggctcaccgtttcagcacaatgcctctggtttccttcctttttaagacagtgacttggtcttgtaaggagaagaccattagagactgcaagagaaaagtggattcaatataaaatagtttgcttaatagggatagaggacgattgaagcatacttttggatgaacctttaaaaaacgaccttactttaaatggattgttggaaaatttgatggagcctggtggtgttgtgtaagaaagggaactgttgtcaggttacccagaggttacagattcaagttgtggaatcagcctcttacaaatggtagatatggctgcctactgtagacccaagcagtgggtcttgtccttccctatgagcagaaggaactctatagcaccaagctgccctaatagagtcatgcgatgaagttctgtttttaacgatctgagaggagttgctgttggagaaaagaaaatagaatataatattttcagtatgtttaagcaggttttatcacttatatgctgagaaggtttcttttggtgtcctttcatttcttataaattggttgtttgcaacatgttttaggacaacctgtgatagaaaacagtatgtgtgcgaaagggaaggaaagtgagagagaaagagcaagaaaatatttagagagaatttgggagctttctattgctgagaaagtaacggattgaattgacatactttacaatgaaaactagaaattcatttaccctgtgtttggatagagtatttccggaatgacaggggatttgaaatgcaagtaattcaattgaaagcaattaaaatttcttcaattacaaaataacttgtttggattattagttttgaatctattttcacataaattcaaaattattattaattacagattttgaataagattttatctctctcggcaacatagcatgctcaaacactgagcattgcagcagttgcagtgttgcaccaacaccactgtagtacaagaaactccaccatgatgatttctggttggtggtggtgtttaagctcaggaagatgataaagggaggtttgctgtaatcttctctcttcgtcggtggtttggttcaactctttctgccggcgatttggattctgtggtggagagtgtggaaatgattgtccgctggttagggctttggtggagatgattgttggtgggttgggattccggtgaggaaggttcgccaagaaaagcaacaacagatgagcgttgggagggatagggaagcaaatatgcagataggagaaaaacatcaatgaattcgagacactcttctatttgcaaatgaggaattttagaaattccacattccacctcctttagtggaatttcaaattcccaattttaacaaagattgaaattccggagaattctttaaattctttgagtatccaaatggagcatttcattaaacagtaatttaaataccccgataattactttacccgcttgaaatgtcatatccaaacacacatatttggagttaggaattgacttctttaattaccacatgagtggttactctaatattcctgtcacactcaaggagaatggattaatgaaaatgggttggataccctaagtttgtcatgcaactcaacaccagttagcttatttgagctgttatgtgagacagtgggattcatgttgatgaccatctcttggacataaaacaagtgtagttctgtgtgtacctttaaggtatgaatgatggtacctttaaggtatctttaagaatacaatgtaccactttccagttctcctcagggtctgtgaaagaattgatagaccttgttcatccctgtaaggctgtaaataatctcaggtcttctgagagtggcatatcccaaggaacctactatggactgatcgaagcagatatgcctttatcatcttccatgtttgatttgtagagtaggtgagacttaagcaacactgcaccattgggaaggtgcctgacctcgatacgtaagtagtctggcaacactaccctaatgtaaactcattctgaactttaacatggtagagattttttttacagttctgttgaagaaaagtattatactaattctgttaatacttagaatgcattgtatatattttccgggattttactagtgatgatataatgttaagttctatcaatataatgtggaagtaaatcagttgttttcttggtttttttaattgttgatgtttagtctttcaaatactcggataatactgacttgcaagatattgtaaaatgtaaagtgatataaagtattagttctaggacactattgtatttataattttgcacttttagattctgtcagtttctttcttgcagatagaaaagc

SEQ ID NO: 3815 - DNA, 6725 bp, Glycine max
  Intron number 1 from transcript Glyma04g34960.1 (locus Gly ma04g34960) derived from phytozome v7.0 (chr-ID Gm04; pos 41252843 to 41259567 reverse strand)
tttctcgtctccgtccgtgcaacctggtaagtcctccatttggtcctgctttgttcgtttccgtatcgtttctcacaaaattttcgaataacaaaaccttttcgttcttgctcctcaatttttcatttgaatttccagtgagtttgaaatcccaactaatttggttctgctgccaaatcaaattcgtcctccattgcgttggttaaacagcttgttaatgctattgttttggttgtggttatggctgttggggtttgtatcatgcggatctctaatctttgggttcagttttttaggaaaagaagggggaaatcggaggagataattagggaaagaatactattgttctaaatactggtaattttttaatcgagtctggaaggaagtgctttgaaggtttcgttttagttttagatagtgatgaaaatggggttttgtttcacgatgaagggactttctcctagaaaatggggttttgatttatgttggggacttcatctactgggatatggcttggtttcttaagtggtttttttgccaaaatatagccctgaaatattaagagtgtttgttttccttaccttgtaatgttaccaatgaaatgaacttttgtaaattgcacccaaatggcttctacaattcaaaaggagtttttctgctgttgtatccaaatgctgaaaatattctgcataacgggcttctaaaaacatttcaaaatcccagtggctttggcttgttcttttagaaggtaagaataaaattgctcaatgtcatacttccaggatttatctaaatctgtgttgagtttccaattaaaattttgtcagctataatttcttaaatgctcaagttttttttttcttaactcctgtttagagttaacagttccccgtaccccctttttttgaaaaaaatgttgatttttttggctgtaagtattctatttttgcagctaagttaatttacttatgatttgattcatatttaaagaatattcatatcaactagacaactatgtattgactgcaatgttcttggaagatgaagtttttctctcatggttttagaattcttgcaaacaagttgccgtaattggaggtttaaaacttctctagttcctagtgttaagtgctacttgtgtaatggaagaagactgaatatgggttgggctaaaatgaaaataatttttgaaaagttggtgaacacattttcagacaccatcggcttgaatttcttctagatagtttataatgctattgcttttggagtgttattgttttcagtttcactctacataatcttggcatgtaagcatttacgtttatgtgcaactgaaaacagtgcaaaaatgtctcccaaaacaagtaaatatctttttgggcctttttacctgttgtcaattatttgtagtttagacatgcaatacttttgtatttactgcacttttcatatttgggaacattctgatagaactcacagataaattgtatgaattaaacagtgtaaatggtaaagagaatgaaacggttttttgattaatggaaatattgggaaaactacagcaaatatccagagcaaatgctcctccagagaaaagattctcctcgtacaatgataacaataaacgtgcatgcccacaaacactactcctccccccatatattactcacggctaaccacttcctataattcagggatattcacggattccctttgccacaccactaacagaatggttccccaccttcttactcctacgaacgtacactctccacacagcaggattgggcctttcagcaggattgggcctttcattaatactaggcccagcagtggttctatcattgcctcccccagaagcaacagtcttgtcctcaagactgaaggagggaaattgacttttcagaactgattcgtcctcccaagtggtgtcttctatcgttcgtcccttccaacgcactaaccattgtcgcacgcgctgtccaccttccgtgaccgaccttgaagccaaaacttcttccggctcttctaagtcctctggctccacctctaatccttctggtaattgtggttcagctgaataattccctatagccttcttaagttgagatatatgaaacacagcatgaattctacttccttcaggcagcttcagcttataggacacagctcctactttcttaaggataggaaaagggccaaagtatcgtggagcaagtttttgattaatgcgtcgtgtcaccgtctgttgtcgatgaggtcgaagcttcagaaatacccactcaccaacctcaaacgaatactcctttctgttcttgtcagcatatcgcttcatctgttcctgtgctcgaatcaagtgatactttaattgacgtaaagcctcgtcacgatcaatcaactctgtagctacagcctccaccttagtttctccttgaagaaatctcaccacagtaggtggttttcttccatacactgtttcaaacggtgttgtacccgtagacacatgaaatgtggtattataccacaattctgcccaagaaatccatcgtgaccactccttcggttgttctgatgcaaaacaacgaagatatgcttccaaacaccgatttaccacctcggtttgcccatccgtttccgggtgataggaagaactcatactcaacaccgtcccttgcaaacggaataactctttccaaaataagctgacaaataaggggtcacggtcgctgacaatagattgaggcataccatgaagacgcaccacctccttggtgaaaatctcagccacctttcttgcggtgtatggatgctttaagggaataaagtgtccatacttagataatctatccactactacaaaaatagcctcatacccctttgattttggtagaccagttatgaagtccattgagatgtcatcccaaatccgctccggaattggtaatggctgcaacagacccatgggagaagatgcagaatatttttggcgttgacacacatcacaactctgcacaaatttctgaactgattttctcatccctacccaataaagatttccagctattcttcgatacgtgcgcaaaaaccccgaatggccaccagtagcggaagaatgaaattccttcaacattaaaggtatgcaatcagaacttgaagacaacaccaacctgttatgataaaacagccttccttttatcaattggaaccccggttgagaggtaggattttgttgtaaatcagtcaccactttttgcaaataaggatcattcctgacttcatgttgaatttgttgctcttgcaaacatatagggaatgaagttattccttttaattctacttcttcatgaatccttgatagtgcatcagcggctttattttcaggaccaggtttgtaaactacttcaaagtgatagcctagtaacttagctatccaattctgctgatcagctgtagtgatacgttgttgtagcaagtgacgtaagctcttctggtcagaatacaccacaaatcttcttcccaacaaataagggcgccaatgttgaacagccagcaccaatgccattaactctttctcatatgctgacttgctcagattatttttagataaagccttgctgaagtaagcgatgggtttctttttctgcattaataccgcaccaattcctctcccagatgcatcacattcaatctcgaaaggttgtgtaaaatctggaagggttaagaccggggcttgaatcataacgctctttaaattctcaaaggccttctgttcttctggtccccaatgaaacccatctttcttagttaactcggttaacggtttagctattttgccataaccaacaatgaatttccgatagtacccggtcaaccccaagaatcctctcactcctttaacattgtgagggattggccattctaaaatgctattagtcttagctggatctactgccaccccctgttcagaaattacatggcccagatattccacctttctactcgcaaaactgcacttcttttgattaactacaaaacagtgatgctgcaacacttctagcacttgagacaaatgtgctaaatgctcttgccaacttttactatatactaagatgtcgtcaaagaaaactaggacaaacttacggaggtgtggcttgaaaatctgattcataatggattggaaagtggccggtgcgtttgtcaatccaaacggcatcaccaagaattcgtaatgaccttcatgcgttcggaatgctgttttctgcacgtcttcttccttcactctaatctgatggtaaccggattttaaatccagtttagaaaaatacttagtcccatgtaactcatccaatagttcatccaccacaggtatagggtatcggtccggaactgtgaccttattcagctccctataatcgatacacatcctccatgaatcatctttcttcttaactaaaatgacaggacttgaaaaagcactggaactgtttcgaatgataccttgactcaacatatcttgaacttgcctttcaatctcccccttgtggtgatgagggtaacgatagggccttacactaactggtcctgcctccttttgtagttcaatggtatgattaatctcccgttctggcggcagccctttgtgctcttcgaaaactcctttgaatttgctcaacaattcatcaagttcctgtttctgtgccccaatcaactctggtgtgtctttattcactgctggtaccatctctgcttctaacaagctgtgcaaggaatccattgaagtatgaattgtgttgttcgttgatacatcctgggtggtgaaaaattggccctgcaactctaccctttctccttcccaaacaaaactaatggtcattttctcccaatcgaaagtcacctttccaaacctttgtaaccaagccactcccaagatcatatctagatcacccaattccagaacaaaagcatcaatttgagtggtaaacttacccaaatgtacttccatattcctacatctcccctttgttgttactcggtgaccgtcacccaattttactcccatggatcttccatgttccacatttaaccccaatgcagtggccacatgaggtgaaacgaaattatgactggcgccactatcaattaggaccacaatcgatattccattcaaacttcccttgaggcgtagtgtagtaggagggttattgctcaatgttgtttttgattcagtgattccacacaatcccatagagttgcaatctagcacttcttcctcatcttccttaacttcaatggctattacctcaccttcttcattaatgatagaaccattgctgggcctagtattaatgaaaggcccaatcctgctgaaaggcccaatcctgctgacccacttcctttccaattgcgtggcccaccaacaccacccctaggcaataacgacccacgcatctccgtctccacatcacgagcaatcttcatcgcctgagttcttgaacgtggattcagtgtccgcaccttcagtcgaatatccgtcttgagtcctcccatgaagtaacccaagtactgctcctctggtagtctccctacctgtgacgacacatactcaaaagcagtgatgtactcatccaccgtccctgtttgctgcaaatctttcatttcttcgtaagggttatcactttgccttccaccatacctctccattaaggcttgtttcagcttcaaccacgtcaggtcgtcctctgtctcccttaacaagttgaaccaatgaattgtagctccttccatacttagcttcgccagtctaatcttcacttcttctgatgtaccttgaacctcaaagtacgtttcagcacgcgtgatccatcccactgggtcttcaccatcaaacgatggtaattccaccttcttcactgccatccgatattctgacatcgtctcttccgccgccgacgacaccggagttgtttcaggctcacggcgaaaacttgcaaactcttctgtcaaggtgttacggaattctgtaaacgtttgacgaaaagtttcttccaacgccgatactcgctcttcaaacgtcttctccatggatgttacccgatcctccaactcgtccagtcttgtcatcttctttggcataaatcacccttcactggttcctttcgaacgatccggcaggtcggaccaatgatagaactcacagataaattgtatgaattaaacagtgtaaatggtaaagagaatgaaacggttttttgattaatggaaatattgggaaaactacagcaaatatccagagcaaatgctcctccagagaaaagattctcctcgtacaatgataacaataaacgtgcatgcccacaaacactactcctccccccatatattactcacggctaaccacttcctataattcagggatattcacggattccctttgccacaccactaacagaatggttccccaccttcttactcctacgaacgtacactctccacacagcaggattgggcctttcagcaggattgggcctttcattaatactaggcccagcagtggttctatcacattctacaaagttattgtggaataggatttcatttgaacacctgcttttccatttatactacttcaagcggtagcagtagcattgttaggctacaccttttttttctctgccttgtgatgaggtaaaatctcacaaatattataactttgatctagggaagca

SEQ ID NO: 3816 - DNA, 2401 bp, Glycine max
  Intron number 1 from transcript Glyma12g30930.1 (locus Gly ma12g30930) derived from phytozome v7.0 (chr-ID Gm12; pos 34546585 to 34548985 reverse strand)
caggttagcaattggtaattctcaacttctagtgcaaaaaacaaacgataagattttctattaattaactatttgctcttaaattaacttgtttttaaactaaacacatatttttaactaccaattatgccaggaagaacctttcaaaatagagagtgggaactgagaattaagcatcttattgttgtttgaaaagacaatcgtgcttgattttcatataatacgcctaacctatctacagatagcttacacttcaatttcatcgctatataagtatcattaacaaaatagaatctaacaccacagttagtttgaaaattaatggaatcttagattttgtatttgtaagtctttgtaacgttttacagtttgagatttacaatataatgataataaataaaagaagttgtgcagatatcagttttcttcacaatcactgcaataaacattctggtgataggttttcaaatcattgttatctagtagttttttttttaaaaacagaaattatctagttatatcacataattcacgcaactgtatactatgatatctagttcataattggtatatataaatgagtacataagtgtgtttctttcatatatgtactgtcacttaatttgaatttttttatttaattaataccaaatcatgaaatctaaattcgttacaatcagtttaatttgatagtataaccctctgtcatctatatcttttgtaactactgatgactaatatgtgtccaaattaaattaagggaattagcactaattcctcagaatttgaatttcttctttattcaagccaacctgaactaggtgttttaacatgatgatgttgaagaagaagataatcatcaagaagaaaacaaacatttaaatgaactttaatggctatataaacatgactcttaatgacggtctttttcttttgctttctttttcactttaagaaatttgagctatggcctgttgccccgctattcaacttttagcaaaaggctccctttataccataggctttcaaagggaaattgcacttccatatcttcatgcttttattttctttttctttttatttttccatgtgttttgtccttttgggttgaaaacctcgtcagaatacaattaccttaggaactaatcgtcggtgtttgaggcatgcatgcagtatagcacaatatctaccttagcaaattcttcagtataagaattgcgcctttgttaaaataaaaagaagaaaaaaaatctatatcatcatatatgagagagaatgcacacaaatctcccattcttaagaggcattatatatagctattaattagattactaaaaatcacttcatctcgtttcctttttattcctttaattataaaaatgagttatattaacgattaattaaagacaatggacactagccgctggtctgaataaaggccaacattggtaggttataagtggatggaaatcatttgctctccgttttttgtcttccaaattaaaaagcaacatatgtgattagaaagtaatattttcttttttgatttttagtttttttatttacattttagtttttaatcaaagaggcagaaaataatataaagaaaacggatatagctgagttggatctcacataagcaggcttaattaaggattaattaatttgatggcctaattggaagcaagtttgggatcatttacaaatgaacttgttaaacaaacttatgtatatgagccggttagagtagtcttgtactcttcgtgaaatttgtttggattttttttataagaatgttttttttattaatgatgtcaaagcttaaaatgagtacaagatatgccaatataagtctacagtacacttgatatatatattaaaacaaaagaagtgtgagacaaaaaaaaaacagcaaaaatatttaacatatatattcatcttctctttcattctacttatatctcatttttcataatttttattttctatcacatcatttattatatttaaagttttttctcttctattcacccacacaccccaaatattaagaattctttttttaattaccgaattattgatgtaaaatatttattaattttataaataattaaactttataaaaaaaatctggtcatcatcacttttaatagtattttatcttttggctagaattttttattctaaccatatttgttccagtcaaaaattgaaaaaatattatatgatttagaattactatatagtctaagctaatctccatgacatgtagttgagtattatccattcttgtaaattaaaaaatggggtgtaagttagtcattactctatttgctttgcttaattatgatctaagagagaagaaaaaaaagtaaaacaaatctgaattaaaaatttgcag

SEQ ID NO: 3817 - DNA, 5218 bp, Glycine max
  Intron number 1 from transcript Glyma13g44230.1 (locus Gly ma13g44230) derived from phytozome v7.0 (chr-ID Gm13; pos 43725067 to 43730284)
ttgaacttccggctccttccggttggaataaactggtctcctctctttctttcttcctgttctgtatttaatatttattgttaatttgtttgttgcttgctgcactttcaattctcgtactggtactactatttagttctacactctctttctctttaatgtatttagttggtgagcttaggggctttatttatttagcctgctcctctttggatctcttctatttatttatctctgtaatctcctctcctctgagttaaccatctcctttagatttgcaccttaatgctagtaagtgggagaacttggacttgcacttttattcttcctgaaaaacaaacaaaattcatacaaatttcttttcaactatatgttttattctggagatttttatatgttttatccaacttttacagatgttacgactttggtttaacaatatatctttggctaaattctgtcaagttaggaatatctgtattttttattttcattttgaattttttttcccaacggtattttttaaatagaataggattaggattaggatactatggaaacaatgctgtgaatttttgtgcttttcatattcttctaatttgtaatctagcattaggcatagatatgagcaagtggagtggcatggaataatttgtcttgccaaacatctttaactcaggataaaatgatcaatgtgatacttttctatatttttcactaggaatgttaattgctgctctctttcagactttagcactttgaactggttcttagtgatttattgaagatctggtccttctggttttgttatattatctattcactattatacaaggattatgtagtctgcattttctcgctctctttttctttgtatgtgtatcatccacattgtaatgttactacatgtatgtgcgcacatttccacttgtctctctctattgcattcgttccttttgaaaagggttggaaggagattattttcattgtgagttttagaaacatgtttaagttttcaaaatcaacaagtggtggcaagactattttcaaattgttaagctgtgtggatgtaattgacaaacttttactgggtttataaacgataatatgacaaaataattttgttccgtctttcatgctttgctaagacataaatatatacaagagagttacagcaaaaactcttaagattgagctatacagattgattctccaaataaaactcctaagatttcgtctagactaaaaacaaattgatttacatgatcatagtaatacgggataatataataattgcacataattccagacagattttgttatctcctgttatctcatcatgatatcattatcccccctcaagttggagcatgtaaatgacatatctccaacttgcacaacagagaggtgaactgagtgggaccaagagccttagtaaaaatatcgattaattgtgcatgtgtaggaacataagcataatattgtcagtgagatacccgtcgcgtcgcgaatgaagtggcaatccacttcgatgtgcttggtgtgcttatgaaaaaccgggttgttgacaatgtaaagcactgcttgattgtcacaaaagtcacataggctaagaatgagagataccaagactatggagaagatcttttaaccatttcaattctcctgttacagttgtcatggatcgatacttaacttcagcagatgagcgagatactgtttgttgtttttagttttccatgtaattagaaaagatccaagtagaacaaaccatccggtaaaggacctacaagttaaaggacattcaatccaataagatagttgcaggtcacaatccttacgcaacaaaacaccatgtcctagattccctttcagatatcgaacaacacggagagcagcctcccaatagtcttctttagatgcctgcataaattgagacagaacatgcacacggtataaaagctctggtctggtaaatcagaggtaaatgagacgacctactaactgcctatactgattaagatgaggaaaaggcaagtctactgcaagtgccagatgatgattctgttcaattggcacatttgatggcttagctcccagaagttcagtttcgactataatgtccaaagcatatttgcgttgacaaagaaagatatccacggaagatcacgtcacttcaacacccaagaaatatttgaggatccccaagtctttcgtgtgaaagcaattgtgtaaatagactttaaatttagtgatggcttcatgattatctcccgaaatgattaggtcatcaacatacactaacactacaatatgtatccccggtctttgcaagacgaaaagagaataatctgacagagattaccgaaatctatagtgttttagtgcaacggataacttggcaaaccaacaacgaagcgtctgtttgagtccatataaggacttattgagtttacacaccatgtcatattgttgaggaagaaagcccggaggcgacttcatgtacacaacctcttcaaggtccccgtgtaaaaatgcattgtgcacatccatctgatgtaatttccaagttcgtgtgactgctacaactaacactgtgcggatcgttaccatttttacaacgagtgcaaaagtctttgtgtaattgattccctccttttgatgattgccaataattactaactgtgctttaaactattctacactttcatcatctttatgctttattttgtacacccacttgcagccaagtgctttctttcctggaagcaattgtgtgactgtccaagttccattggtctcaagggtatgtatctcacttttcattgcatctctccaccaaccattgtctttcaccgcgccagtataagtgacaggtttcttttcctgtgaaatggatgcaagaaaagcacgatgtgcaagagaaaaatgatcataattcacataatcagttatgggatagggtgcacctaagtctgtctttggagagggtgaacagttggatgggcccaatcttttggtggtatttgtcgcataatcttgcaatcgagtagaaagttgtttggttctatgtcttttacccaataatggctcggttggtgatatagatggaagcactgtatcttgtgtgtccatattttttagagtaacaccttgttcatcgaacctcgtatttggctcaccctctctatcatttattgtcatattaccactttcttccgtacctcctatgtgatttgttttttctacaccatcagtcacatcaccaacaatttttttatagctccaatttttaggagaaccatcttctttggtagtaacatcaatagaaaaaggatacttggtctcaacgaattcaacatctcgagagacaaaaatctcttttgtttctaagttaaacagcttccaccctttcttgtcatatgggtagccaataaacacacacttcttactcctacttgcaaatttatcaccattccttttttgactatggacataacatgaggaatcaaatattctcaaatattcatatgcaggttgatcaaatatgctgcagttaaaatacattacccctaaaacttaataagaagattaacttgaaatcgcagtgctcgagccacattcaaaatatgtctatgttttcgttccactctcccattttgttggggtgttccggtgtaagatatctgaaaaattattccatgatcaagaaaatatcttttcatgcttgtgaattttgtcgcattatcacttctaaatattttgacttgtttatgaaactgcctctcaagcagagcaaaaaaattgtcaagtattgtcgatacttttcgtttatcaactaatatgtatacccatacaacacgtgaataatcatcaactattgtcaggaaataaaaagcaccacaagtagaaggagttttatatggtccccataaatcacaatgaactgattcaaatgcactactgacttcatgttcactcaaaggaaacttctttctagtctgtttggctctaaaacagacttcacatgtgttattcactacattgttatatttgtgttttctaatctcaggaatcaactaggtgattttcaaggaaggatatcccaactgtttgtgccacaagtctatggaatgcaaaccatcagttttgtaggctctcacattttgaacccctctaagaaaatagagttcatcccctccgttcacctgttccaattagcgtccttgaaatatggtcttacacaacacataacttatcagtgaattgaacaacatatttcaattcatccatcatctatgaaacagatatcaaattacaatttaatttaggcacatagagaacatttgtaagttttaagcctctgtctagcaccacgcttccttctttaatcgctgctgtatgttgtccattaggaagtccaattggacatctttaaatatctcgtagttcatgcatatgattcagatttccagtcatatggttggaagtccatgtgtcaattatccatgtattggtatcatgttcacctttcatcttgtcattagagtttgttttctgagcatttagtaattctaccagtgtttgccactgctctgtaataagtccagtcaaacttgaacggtctcttttgagatcctggtgtctgcacttgtttcaccaccatacacagtatttgtacgtattgttcctccttttcctcgtccagttctcgagttgtcgttgaaattcaattcatttggtgatgaagtcttcttcatcatcttatgttcttcttgtgtatgagacgcattctttggagcctcctcttcatgatgactcattgtcaccaaatttcaaatagaacatgttggctctgataccataaaggattatatgacagaataattatgttctgtctttcatgctttgttaagacataaatacatacaagagagttacagcaaaatctcctaagattgagctatataaattgattcttcaaataaaactcataagattacgtctagactaaaaataacttgatttacatgatcacaggttaataatacgggataatataataattgcacatcatttcacatagattctgttatctcctgttatctcatcatgatatcattagtttgtttgtatgctgtatagaaactgttgtataatgcaattttagttcaatgctgcagttcttccctaagaaagtgggaacaccaagaaaaag

SEQ ID NO: 3818 - DNA, 8496 bp, Glycine max
  Intron number 14 from transcript Glyma10g26450.1 (locus Gl yma10g26450) derived from phytozome v7.0 (chr-ID Gm10; pos 34816019 to 34824514 reverse strand)
caaggtttgtaaacttctgtctgtggttgatcctgctttatttttgtggataaaaggcaatggtattaccttgtggtgcattgatatttttttactagcttttatggatttgttgaagctacatgttattatctctgacttcaatttgttgattggatattaatttgattagatatcttttaaagggcattttttttctagtgcactttggttgaacattgcttttatgattgatttaaagcctgaatcagaataatgagaattgtatattgcattacatgatttatacatcttagaatgtggctttgggcctaacttaactccaaaagctagctcattgggtgagggttgtcttccacttatatactatagcttggcactatctctagccaatgtgagacttggatttttcccaatagtacaatatacacatggacaactggatttaccaaaatccggagttaggacatgtcagggtgaatgtggccaaagtgagctcctggaagcaaaagaaaatagcttgggttaaatgggaaactgtttgcctcccaaaacaaaattggggcctgggcataaaagacataaggaccttcaacaaagctcttcttggaaagtggagatgggatttgtttcatcaacacaaggagctgtgggccagaatacttgcttctaagtatggtggatggagatcattggtggatgctaaaagagtcagcaacgagtcagtgtggtgacaggatttgttggcagtgacccatgaccaacagttcaataatatacttcaagagggaacaatatggagggtggggtgtggggacaaaatccgtttatgggaggactgctggactggcagtgggcaaccactaatgctgaaatatctcaggttatatcagatatcccgccagcaacaaaagttaattctgcaaatggggaccttcacacattcagcctgggaatggaatctttcgtggagaaggcccctatttgacaacgaggtagcatcggctgttggtttcttagaagacatatctcacatcacactacagcaacacgaagcagacagctggacatggaaacatgagtccaatggttattattcttctaggagtgcctatagattgctgcaagggaattcagatgtgggaagcatggatgatatattcaaggacttatggaagctgaagataccgactaaagcttcaatctttgcgtggaggttaattcgagatcgattgccgactaagtctaatctacggagaaggcaaatagatataagtgacagcctctgtcctttctgcagtattaaggaggaaactgcatctcatctcttttttgactgcagcaaaatacagcatctttggtgggaatccctatcatggatagggacttcgggggcttaccctataaatcctaggcaccattttttgcagcacaacattgggatgaaaggtgggaagaaatacaataggtggaagtgttggtgggttgctctaaattggtccatctggcagcataggaataaggttatttttatgaatgccccattcaatggcagtaagctgctggaagatgcactatttttggcatggacatggttcagagcaatggaggaaaactttacaatacatttcaacttttggtctagcaatcttccagctggttttcagtaaactagggtgacaccagctgtggttctgtaatttcagtcgctttctagtaggctagtaatctcctatcagtctgtactcagtctgatatgaggatttactagccttacttacatactcttgtatctatagtacctctagtacttcttcatatatcaatatatattatttttgctgaccaaaaaaagaaagtgagctcctggacttcacacgtcggctttgagagtgacctttttcgagaggacgggagagggaacctgcaatataaaggactccgacgctcaagtatatgagttaggagataaaacaagacttgaaagatattaatctgaatattattgtaattctgtctttcaaagagtgaatacaagacttatttataagctgccagtgacctaattaaggaaagaaataaaatggaacaaaatctatacaaatacaaaaaaatcaaatttgtactaattacaaaataaaatctgttctaattatggaatgtatcacaatactccccctcaagctggtgaatgtatatctatcatctccagcttgcaagtaaggtcttgaagctgctccgtgggaagccccttggtgaacatatctaccaactgaagctttgaagggatgtattcggtggctataagaccactgtccaatttctccttaatgaaatgtcgatcaatctctgtgctttgttcgatcatgttgaactggattgtgtgcaatgctgatggcagacttattatcacaaaccagtctcataggagcttcatattttattttgaggtcgtcaagtatgatcttcatccataacaactcacaaacaccttgagccatagctctgaattctgcttttgcacttgatcttgcaaccacattttgcttcttactcctccacgttactaaatttccacccaagaacatgtagtatcctgtggtagatctcctatcaacaattgatcctgcatagtcagcatcagtatataatttcatggataaatttttctcctttttaaacaacctctttcctagagaagactgtaagtactaaatgatcctatttactgcttgtaaatgtctctctcttggttcatgcatgaattgactaatcacactaactgcataggctatattaggcctggtgtgggataagtagataagttttcccacaagtctctggtactgtgtcttcttcacctttgggctttcttcatcatttccaatcctgtgattttgctctatggatgctctagtggttttacaacccaacttgccaacttctttaaggagatcaagtatatattttctctaagaaatgaagataccctgcctagagtatgcaaccgaggaagtactttaacttcctgagatccttcatctcaaattgggcaactaacctctccctcaaggtttgtttttcaagctcatcatcgcctgcaataattatatcatcgacatagaccaagagcaaagtaagtttaccatcttgggagtgttttataaagagagtatggtcaccttggctttgcttgtaccccaaagataccatagcttgagcgaacctaccaaaccaagcacgaggagactgcttgagaccatatagggccttctttagtctacaaactttatttcctccattagtggcaccatatccaggtggaatctccatgtacacatcttccaagctttcatgtaagaagacatttttaacatcaaattgatgcatctcccaaccaaagtgcgttgctaaggagatgatgatcctaaccgtattcatttttgccattggagcgaatgtctcctcataatcgatcccataggtttgggtgtatccctttgcaaccaacctcgccttataccagttcaatgtgccatcagcctgacatttaattgtatatatccacctacaacccactgcctttttgtctttcggtctctctacaatctccaaaatctcatttctttccaatgcacccattcttcattcatggcttgaacccagttctcatcctttaaggcttcttgtactgatgtagggattctgatagaatcaatagctgaaataaaactctagtgctgtagagaaagatttttagttgacacaaattggtatatcagatatttggcacaagatctttttccttttcttaaggcaattgacaaatcatctaggttagattcacaagaggcatctaaggtgtcctcaagagtatgggttcttacctccagtttggatgattgaagttgttgttggaccaggtcgggtatttttcttcgcttgtattggttcccaaagcgtatgtcctccttatgttgaattggtgatgatgttggttcatgtcaatttttcctttctgcaatcccattttgttgaggggtgtccacacaagttaactgatgaacaacaccattatctttgaggaaattggaaaggttttgattcacatactctctctcattatcagaacacaatcttttaatcgggctcccaaattgtgtttgaattatacggttaaagtttacaaacaattggaaaacttcggatttgtctttcatgagaaatatctaggtaacccgggtgtagtcatcaataaaagaaacaaaccactttggaccagaaatattactgataggtgcaggtccccacaaattcgaatgaacaagatcaaaaggtttaaaacttttattagtactgggacgaaaagttgttcgatggtgtagcaaactcacaaacatcacaatgaaaagactcatgtgacctttttgtaaacaagaaaggaaataaagacttaaggacactaaacgaaggatgacccagatgcttgtgttgaagccatatttgggaaaatgaccaaggttttgaacttgtctgatgattgaaagtgagagccttttgtcgggtacactctttattgtcctcatgctgcaaaatcctggaaaacacaatgggagtgggaaaatgtcacaacacaatttaagtcttgggagattctatgaatagacaagaggttattagatagtttgggaacatggggcacattgttcaaatgaagggaagattgaatttgaatgttaccacaaccggtaattggagtatgagaaccattaacaacaatgatgtgttggttaccagttaaaaaggtgtaggatgaaaaataagaagagtgaggtgtcatatgatcagtagcaccagagtcagatatttttagtaccagaagcattaaaggataggaagctagaattcttaccagccatgattagggaacaagagctagatgtctcactgaaggggtccataaatgctcgtagacattccaatgactacggcagaaggtggttgacggcggaggatggcgtcaaacggcgaccagtggtatatgtagtgattgggcactgaaacaatatcaattgcagcaatgaaggctgcctggaagaatgcagaagcagagccccttggatcggaggcgctgataccaacttgaaagataataatctgaatattattgtaattctgtctttcaaagagtgaatacaagacttatttataagttgccaacgacctaattaaggaaagaaataaaatggaacaaaatctatacaaataaaaaaatcaaatctgtactaattacagaataaaatctgtgctaattatggaatgtatcacaacaagaagtatatgcttaaatatatgctcgagtgaatggtatagagagagatgtgcacaagcttgttgctcgtggctagtgtgtgggaatgtgttgagggttcgatgaaacctggtatttataggagtgatgctctgataccactaaatgtgacaccctctacccctcacatatatattaataaaggaataaaaattcaaatattaattaaaagtatttttaaaacatttttaaatacaagcttttcaaatggataaaaggctcacattcactttcttctacatcatattcaaatttgtccaaataaataataaagtcatctcgactcaaagaaaatcatataagtctcatacaattaatataaaacctatatcctaatgtcacatcttatcagagcgtggtgttcccgtgtcctctagcatgaggttcttcatagtcatccacctattcatctgctcccccgaacacaagttcaagatcatcacaggatccaaacacaacaacacacagggagtgagttatcacattcctagctaatagagaaacaagacaattaaatatacatattatataaatgagataccacttgcttaaacatagctcacgtaacttcaccacttcatcattcaaaattcacttttcaattatcaatcacattacacaagaatcccacacttcgatcaagatataataacacatcaattagcaagcatatgcaatagttatgctaagactcaatcttatatgcaatgtggtaccatgtcagtgaaaaaccaccctggggcgcttaggagtacataacaagacacaccacacaatgggtttgtcaggtcactctcactaagtaagatcatagggagaccagtcagggtcacgatgttttgcgagaatgctccaaccatatgagatcagcataggcttaaaggagcactcaaacccggtgacccccaaggcctacactccgaagagtccgtcagggcctctccctcctgattcaggtccaacccctaaaataattttttttttgcatgcagacactgctcatgaattatacaatacccacgaccttacactcgtgttttaaacacgttcaacacaatcacactatgatttaacactggctcctaaataggaaacctacattttctctttaacactgcgcatcaacgcttttctcaagataacactggtcgggttattgtacaattcatagcttacaacgcaagtaatttcacatcaagtgttaactacacacttatccacaactagaactcattcacaatttcacttctcatagtgtgacaatccaccatcacatgtttacacgtatctcacaaattaacacatgttcaactttacacttatactcaatctcaataacaatattataatctcaaagcaacatattcttctacaattcatcacatactcacaatttgaatcatcatttcatatcctcaatataacaatttatataaaacactattacaacattaggactaaaaccccttaactaatattacacaattatatcaaaatcataggtcgaaatatacaaatatcaagaacacaatttatcaagcaattttcattaggacatcaatattttatttataatcataaaggaaaaaattgcaatttaataaacatctcaaaataaaaccccaatttaatcctctaaggatccctacacatgttctcactaatccccaactgtgaataactcatcccttacctctgagcggactcacgtgtcttcagccagggatagaaacatctttagcggttccctgaaattctttcagttattcctccgactgctccgatagaattcccaaacgtcagagagacggagaagagattgaaacctccacttatactgtcttcatgcgattcctttttctccctccacgaatattatctcgcaaatcccaacggtggaagcgtgcggaattgaatttcgaacaacatatccaaatttcacaataatccaacggttaacgaaaccgggatcatagttttaccaagacagctctgggtttctgcgggaaagaaaaaggctacaatgcgaagggtgtttctctcagttcagacatgatatcgaaattcccaacggtgagaatgctcggaattctgttgcgaacatgatactcaaatttcacgacgatccaacggtgaatgggttcaagatcgtcatttttctgagactggtttggtgggctgcgggaaaaagaaagggttttgagaggagaaggggaaaaacgaaaatgaggccaaaaggaggcagctgacttaatataactatttatacctagggtactcagcctattatttgctctatatttatttatttatttatttttttactaaaaagctttttaaatttatttacgaaaaattgggatgttacagtccttgtttgtaggaactgttataatctttccagataatttccagtttatagataatagccagtagcttgtaaataatgttagagataaattgtagcttatagataaaagctagaagataattgtaccttgtagataatgtgtggttttgtaaataattaactacctgccaatagataaagatttcaaatatattcaaatattaataagttagagataacatgtcagttagggagcccagcagctaaggaccgagtgtcgcgctcctgttgtaggaatgatatggagggttgacatgtgtcatagagtgtcatgtagggtgtcacatgtattttgtggactctggacagtacaacaacaaaatcagtccccaaagtttaggtgttaggataagctatctaatgaaactaggaaagaatcaaagattacaaattcaaaactgaatttaatttgaataatatatctcaacaaaaactaaaatatcaaattgtcaaatgataaatcttctctacaatggcggtcagatttaattgaaactattatttgtttatgtgaataagtgaaatatgccacaaaataatcattctccgatgcttcaaagagaattttgcagaattctactgtgttttgaaatttagggttgtaaaatgtcatataaaagttttcttactgaaatgacaaaatcatatatgttcttttgcagtcttgctactaattttgttcactgatgtcttgcagtgaagggagaagaaggag

SEQ ID NO: 3819 - DNA, 6853 bp, Glycine max
  Intron number 8 from transcript Glyma13g16170.1 (locus Gly ma13g16170) derived from phytozome v7.0 (chr-ID Gm13; pos 20029801 to 20036653 reverse strand)
gtttgcaggttagttgctattcttaaatgctgaagcagcttataatattatttgtagaagttaaccttagtgtttttcaaagaatttttctgtaaacttattttgatattattataatgtcttctatgaaccatttccattttaaaaatataagaaatttgggtttggtgaattactttttctcttctgcatcgatactgctggtcagatgttgggtgcatttttcaaactgtgatgcatcttcctgaatattagctgggaaagtgcaggaaacagtaaattgacagttccatagtttttttgtaagtgtgaataactaaccttagtttttctactgtaatcagttaacagttagcattggtcagttgacagttataactgaatctcagcagtataactactgctcttgtaagagatttcagtggctttgtattttcttcttcaacaatacaagtcctgattctctttctctctctctctctataccttctttacatggtatccggagctttttgatccttttacattctgcaaatcctttttcgtgacctttcaatttctccttgttttttcccactcaagctctattcagccgcttttctcgtgacctccctcttgttttgttctacttcaaccttgcttttgtttctctctaactaagtcgacccttaacctctctttttttccctttgacttctatgactactcaatgctacctctgcaagccagttatgtatatatgtcagccattgcttccgccattcgccatttttatatggtggatttttgggctctctgccgtgctctgccattaacaacactggagacactacatttagaaacttttgtacctctgttaatgtttagttatagtttaattgataacctattgttgtagttggttgccaattctgtcaccacttgaagttcaaaacatcatagcaattttttaaatcaggttgttagaatgtcaggaatatccaatattgtcttaatcataatttaaactgttttttttgtatgactttcctgctagtttgagtagctacttgtatcaaattgataccatggaacattataaagtatcaaaattcctgtaaaatcatttatatgttactatctttttttttttgctcagcaaaagtaattatatatatatatatatatatatatatatatatagtggtactaaatttacagaatcagtttaggtagatagctggttccgatatgcagacttatttcagtctgatgagagccaagctattcaccttatatgctactacaatatccatcagctggtatactctcctagttacatgttgaatatcttttgggtttctgaattagatttgtatgcatcattactaaatattttttccttgttttagaagtcagcagacatagactaggctaggctgtcctttccccctttctctctcttatgctttgtactctataaattgtaagctgaaacatgaataccatatgttctgtgagtgaaatttcctcacacatttaaatttaagttggcatcagagcgggttccggccaccattgttgccgccgccaccgttcgccacctctgaccgccacctccggccaccattgtcttaaaaaccttcgagtcttagactgagtcttgtcaactaggaaaacatgttaggtcatcatttcctcaaactgtacaaagatgtgattcggccttttctaccattcattctgatatttggggaccaagtcgtgttacatcttttggttttcgatattttgtaaccttcattgatgaattctccagatgtacttgggtttatttaatgaaagatagatctcagcttttgcccatatttaagtcattttgcaatgagattgaaaatcaatttgaaaaaacaatcaagattttcagaagtgagcaaaagaatatttctctcatgatctttcctcttttttatcctctaaaggtatcatacaccagtccacatgtcctcatacacctcaacaaaatggcatagctgaaagttaaaatcgtcaccttcttgaaactgctcgttccctaatgttaaattctaatgttcctacacatcactggggagacgcagtgcttactgtgtgcttcttaattaataggatgccttcttctcttgaaaaccaaattcctcactcaattatctttcctcatgacccatagtttcatgtctctcctatagtgtttggttgtacttgttttgtccatgatctttcccttgatttatagacaaactttcagctaagtcagtaaaatgtgtctttttgggttattctcgtcttcaaaagggttacaaatgctactctccaatcacaagacgatactatatgtctgcagatgtaaccttctttgaagacacacctttcttctcatcctctgtagatcattcttcttctctccaggacgtattgccaattccttgtcctctaggtaactccaaccaaaatgtcaatgaagtctcatcttctctaccaaattcaattgaagttgcctctccacctctgcttacatatcatcgtaggacacgaccagctgattctacaatgcctgagcctctcctcgtgatcctcatccttctccaaccagtcctccaaccatggatcctgcttcctcaccagtctctcatcactttaagtcagactgacccattgccatctgaaaaggtactcgatccactcgtgacccttatcctatttataactttttgagttgccatcgcttgtctccttcatattcttcctttgttttctctttattgtcacaccatgttccttctaatgttcatgaggcacttagtcatcttggatggtgacaggctatgattgaagaaatgcaggcccttgaaaataatggtacttggaaacttgttcctcttccacctggcaagaagactgtgggttgtagatgggtttatgcagttaaagttgggcctaatggtgaggttgatcgacttaaggctcgattggtagctaaaggctatactcagatttatggccttgattattgtgacaccttttctcctgtggctaaaatcaccactgttcgtctgtttcttgttatggcagccatgcgccattggcctcttcatcagtttgacattaagaatgctttcctccatggtgatcttgaggaggagatttatatggagcaacctcctgggtttgttgctcagggggagtattctcgtatgtaagctacatcgatctctctatgggttgaagcaatccctcgagcgtggtttggtaaatttagtcataccgttcaactttttgggttgaaatgaagtgaagctgatcattctgttttttattgtcatacatctcctgagaagtatgtttatctaattgtatatgttgatgatatagtgataacaggaaatgatactactaagattgcccaacttaaagaacacttgtttagtcacttccagaccaaagatttgggatatctgaagtattttcttggtattgaggttgctcaatcagaagatgatgtcgtgatctcacagaggaagtatgctcttgatattttggaggagacaggtatgcagaattgtagacctgttgatagtcctatggatccaaatctaaagcttatggcagatcaaggagaagcttatcctgaccccgagagatacaggagacttatgaaaaaattcatttatctcactattacaagacctgatatctcctttgttgttggagtggtgagtcaatttatgcaaaatcctcatgttgatcattgggatgctgtcatgcgcattcttagatatgtgaagagagcacctgggaaaggattgttgtatgaagacataggtaatacacaggtatcgggatattgtgatgcagattgggctggctgccccatggataggagatccaattctggttattgtgtcttcattggagggaatgctatctcttgaaagagcaagaagcaaactgttgttgcccggtccagtgcagaggctgaatatagatctatggccatggttacatgtgaacttatgtggattaaacaactacttcaagaattgagattctgtgaagttggacagatgaagttatattgtgataaccaagccgctctccatattgcttcaaatccagtctttcatgagagaaccaagcacatggaaattgactgtcatttcattcgggagaagctattgtccaaagaaattgtcactgaattcattagctctaatgatcagccagcaaatattttgactaagtcattgcgaggacctaggattcagtctatttgttccaagcttggtgcatatgatctatatgctccagcttgagggggagtgttgaatatcttttgggtttctgaattagatttgtatgcatcattactaaatattttttccttgttttagaagtcagcagacatagactaggctaggctatcctttccccctttctctctcttatgctttgtactctataaatcgtaagctgaaacatgaataccatatgtcctgtgagtgaaatttcctcacacatttaaatttaagtttacaaaagcctactgttaggttgctggaccactgattaaagtgccctacaaaatctttctccattgatctaagccatgtccagactaggaataatgcatcatccatcaacttgcttccattgaatgtttcattggagaaaatgatcctattcctttgctgccaaatagtccaggttaaagctatccaccagcacttccatctgttgcatcttatcccttcattcatcccatttccgtgctgtagaaaatgttgcctcggattttgagggaatgcgcccgatatgttgacccaagataatgactcccaccataaaggtaatgtcttgatgcaattgaagaataaatgggctgtatcctcctctttgtttctgcaaaaagggcatatcgagtcatttatctctacatgtctccttcgtaagttggacttagttggcaaacgatctctaatcagcctccaagcaaagattgatgttttagttgggatcctagcttccttaggtcctcaaaaactccatccatcttctcctccgctgattctccctgcagcagattatacgcactctttgtagagtagttgccattgggatcaggtatccacctccaattgtctgctgtatgttgttgaactgctgtctgtgttatctcccccagaaacccgatagccgagtcaacttcattatcaaataggggtcttctccaagtaaaattccattcccaggctgtttctgtgaagctacccagttgctggatgagtttttgttgctgataggagatttgatacagcctagggtattttatcattaatgctacaccatcaccagtccagcagtcctcccaaaatctgattttatctccacaccccaccctccaggctgtttcattttgaagggcattacctagttgttgatcatgggtcacctccattaggtcctgccaccaccgtgattcgttgctgcctctttttccttcagccaatgatctccaaccaccatatttggaatccagtaatgatgtgcatgttgatgatagcctttatattgtctatgaaaagcaacataataaagaaatgcatgcattggctttggggtcttggaaattgagcattaatccatattctttgtacaatcatgaacatcatgtccttcctctcaaaaatagttttgttggtaggaagtttggacttaatgaaactatctagggatataactcatgaggttaagcttttgattttagtgtatgttttaattgtttttcctaatattttcataagttctcctctaccattcactggatatcttccatttgacctatttttctcactggagcatctctgtcttcttatcatattagaaaacctccttacacaagtttccatcgtcttgtctcctgtagttcaaccctaactttatcttgaatacaattattcctaatcttgcattgtatgttctcccatccacctctgaattctcggctttgccacactctgtttttgttctagctggcacttgactgcccattgtccaatattcattgccatcgtttattgctgttcatatagcagtgaggtagaatttctagaatttggcagacacttctctatcacaactcatacctgagactttaatttttttcacatcttgtatcctgtggttcaaccctaactttctcttgaatacaatcactcctaatcttatattgtttgttcagtcatccacctctgaattctcatatttggtacactctagttttgttctagctgcacttcacagcccattgcccaacatttattgccgtagtttattgctgttcatctagtggttaggtagaaatttcttggattttgtagacacttctcaatcacaactcatacctgagacttgaaattttagaatgtagtactgttagaaagtatgaaactgactatttttcacctttttgtgtaacatgaattgtttttttttgcacagcaaaaatagatagtattatatattaatcagtactaggtgtactggatgaagaataaaatgtacaaggcaaatttgccagacccaacatgaattgtatgatttatttatttatatttagctccctggcttccaatattattatattactcagaaataaatttttttttttgcagctcaaaacattttggttatttgcttcaaacagtctcttgatattttgttaagttgcttgcttgtatttactgtctgaatgcaaaaatttaagaagctttatttttttttattgagcttgatgcataaactaatttactttttaattgtacatgattatttcagg

SEQ ID NO: 3820 - DNA, 4305 bp, Glycine max
  Intron number 2 from transcript Glyma06g12120.1 (locus Gly ma06g12120) derived from phytozome v7.0 (chr-ID Gm06; pos 9335862 to 9340166 reverse strand)
ccaagattttgaaaactcgagagcatttattaaaggtttgttcttcttcccttaccttattcaacaaagtattccactattttttagaaataattttggacacttcctctgtcacacattacattatcatttcttaatcaaccacaaaacaccaagctcacctgatacttacatttaataattttatttataattatgtaaatttaagtatttgttcagtcttctgagcaagaaaacttatatactttagcgtaattaagggcatggaatctatgaaatttgacagtaatcacttttttttttttttactgcatgactggaatcacttcattctttacatttcaatgtccaattaaagttttgtcttttggtccttaattttcaattgttgaattgcgggaaggaatagaagctacttcacacattatgtttaccgtttttttacattaataaataggaacatatgagagagagacagatgattcacttccttttccaagcacggtgcctctttaaagttgcataattttattttttgatgaatatggcataactttatttgagacgacacttcggccgaaaagtcaagtccgttacatttcatttgcctcctataacaattccattgcccttttttctggggaacacacaatcttataactttccgcagcttaagatatattgctgctatcagttaatgtctcccccaaggacagacaattcaagagacttgatcttaagaactcagttggtggaccatttaaacttaaaaatcgttaaaaaaaaaaaggccctctttttgttttctatttggttcctttaaaaccccctcaacattttacaaattttctttcattttgttttcctttctcccctctgtcaatatatcatatgtcaagattgttaacgtgttttagcaagttggcgtacttgtgtgtttgtaatatgtgttcaaacacacactaatgtagtgtttttttttaatgttacaataaaaaatatcattatcaacccaattacacacagttggatgtttaattattttaaaaaacatgtattgaagaaataatccagaatgtttttttaatatatattttgttgataaatattacccaacttaatgtaattcattttttttatcaaatttaattcattgtcgattaagtttgctttattcaacttatggattcaaaactatcttaacctaattcgatctaggcaaaattataaatttgatcatttagtttatctcgagtttcgaatttgatattccaataatttaattcacgaatttagtcttcctattttgtaaaatcatgtaatgttggtttctcaggccacaattgaacatgtcagttcttattggatgatgactgtcacgtgtaacatttttattggatgataactgtcacgtgtcatgttctgattggatgtcaactccatgaaagacaaaatgcattgttagtttcattgaccaatcagaatataacgtgtgacagtcatcatctaataaaaacgtgacacataataatcaatatcatttattaacggtcaacgtccaattatgatctggaagatcatcattgtacaattttataaaataggatgattaaattcataaattaaattaatgatgaaccaaaagtacaatttttcctttcatctattttgattggttgcgatatttctttcaaaacatgacccgagttgtgatttgtcctaatatttcgagtatgagtttgacgctcagccaaagttatgattagttcctccttcttcaaaaagtaaagttttgacttttatgcaccattagtattttttttacattatcaaataattaaaaatgattttcgtaatcctatatggaccagtttttttactctaccaaaaacatatgggccagttttccttcatttcccaacacaaacaaaagattggatatgacattttcatttctgatgaaaatgggcacggatttgatagtgggtttaaggaagcagtgtcaaccttaatctttggcaagaaattaaagagaaggtagatacaaataattagccgtgtttaaaagaaaaaaatgaaacaatttttaaaaaactagatctaccatattatttttgacctatttcacccattttttttatacctctcttcattttttcttctaattctattcaatcaaataattaaaagagaaatcaagatacaaataattagtattgagtatgaaattaataaactgtgttgaaaggaaatatctatcttggatactttcaaggttcgagcataatttcattccaatattatgattattcagaaaaataaaatttctttatataattgtttttattttaaaattttcttaaatcttctgaagcaatgttcagtggttattgtgtagactatctcattattatatctggtgttccttaggaataaagtttattttgccgtgaattggctgacgatgttgttttaagggtcttcttagttaatgtgttcttagaatattaattaataacttaaaaaatatatttattatcaaaatgatagaaacgtgttctcattttctatacatttttataaaaaaaattaacttcttaccaatgtcctgatactcgttaatatttttcttcttttaatggcactagcctacagcttttactcgattaaagagaaaggaaaattactcttttgagaaaaaagtaaaaaataaaaagcatgggaccggatgacacatcttaacgtatgataatgagcataagctagggctctgctatttattcagaccctagcctagggcctcgggatattaattcagataacttttctacagattttatttgaagaaaaaatttagttatgcattaaaatttatcgcatgccttcatatatactactccattaaacgaagtcacagagacagcctacgactttaaaatcacatgccattggccattgccagtcaccagaattacaaagagaaagagaacacgtttctttttattaggaaaatgatagtactggttaagacaagtaaatgaagttaaacttttattaaaatgtgaaaaaatacccctacaactttaaaataattttttatttaattttcttgatcagtgttagaacattgctcagggaaatcttatttactataatggcagcggggcactggtacggggtagccaactaacgggtgggggaatctgttgtacggtcgggtccagtggtctaccacatccaaatgctgacatgcacatgcactgtgtttagaacttgcacaaaaaaacccgctagatgagaggaatcttgtcaactagttttgaaggcgaacgtagattgtcatttcaagtaaaagataatctttattttcatctaacctaaaatcaatatcgtactcaaagatagtagtaaactagtagtacatttcagtcatgtgatgtgatgggtgtagccgtgtaggtgtggattatttcattcacaaataagaaatactatttttaatacatttaaaatcattttctaaatattacttctaattttaatgaggttatttcttgattttatacattttaattaataatactagtgtgtcaaagagtgataaaaagtttatttcaagtacttctcttgacagacaacacaatcttagaagaaaaacaataatttttatcatattacatcacttatttgtttttttttatctttttctctatctacttctacactgcaaaaatgacttgtataaaatttttcacagtgagaaaattctttcatttagacgttggaagaaaacagagtgaaaaaaagagtaagcggaagtcatgtttttttttttctttttcgatgaaaagaaaatagagaagaggaaaaaaaatcattgaaaagacaaatttacttcctcgttgttatactaaaagtaaaatgatataaattcaaaatttcttttcacttttcttaataagtaaagaaaaaagaaggaaaatctaaataataaagaaaaaattgacttttcttatttttcttccctttttattttggtagttggtagtagtgtcattatttgtcttggatccccctccatgacaagaagattctacattatgatttcaatttcaatgtaaacaaacctgttgagtgttgaccttgataagtttcataattgggaaaaatgagtttacacttctcataaattactctacttatacccaacctggtaataagaacaatgccttatgtctaataagtgataaccttgttttgtccatcacagggaactgtaattctgttattccagccagcagagga

SEQ ID NO: 3821 - DNA, 3753 bp, Glycine max
  Intron number 4 from transcript Glyma03g22600.1 (locus Gly ma03g22600) derived from phytozome v7.0 (chr-ID Gm03; pos 28962277 to 28966029)
cacggtaggctgcattactactatctaagtaatctatttttaccatttatcatctacttcctagctactaattggttttaattgattgattgttgcacaaagttaatgtctacttgtatatgtgacaccctctatcccaacatatatataaataaataaaaaacatataaaatgcggaatctaattaaaatcaattttattaaataaaatcataagtaaatccacgtgggtgaaaggtacacattcgcttcactattaccaaatacaactcatcagaaacatttatggctcacaataagaccgttcaagtttacaaaagaacttaagttaagcagcagaataaaataaagtaaaataacatgttcggaacatcatgcaattaaaacaaaaactcatcctcccaatgtcacatcctatcagagcattgcatcccagtgtcctctagtatgagattccttaaagcaatccaccaagtcatctgctcccacaaacacaaggttcgagatcatcataggatcaaaatacaaacaacacactgtgaatgagtcatcacattcctccatgaatagagataaatgaaagcatataggtatgatataaatataataataatataattataataacaatataggtataacaaggctcaaccttgacataatttgcatgatttcaacgctcatcatgtaacatcacttgtcctagaatttaatcaaaatcacatttcatcccttcatgattaatcacatattcaagacaagacaacacattttaaatacaatactacatctcacactaacataatttattacacacaatcacttaacatgtcacaatgatcattacataggtgttatgcaacagatatactaagactcaatcctatatgcaatgtggtaccatgtcagtgaaaaacctcgcagggcgcctatgagtacatgacaagacggaccacacactagaagtcaggtcactctcattaagtgaaatcatagggagaccaatcagggatcaacataggcttaaaggagcattcaaaccaagtatatttacccccaaggcctagactccgaagaatcagtcaggacctctccctcctaattcaggtccaacccagaaaattttttaacacatatactatatttatgaactatacaaaacacacaactcctcaattgttctcaaaataattctaacttgtctcacctcaaggtgattaaactcggcgggttcccatagtggattccatcacaatactcgtcgcccttaaagggtcatacagtcgtgtgattgcacagttcatagctcaaaactcaatgcgtacaatatctcaataaacatgtatcgtaaaatttaatacatactcaatttatcacttacactctatctcaatcataatgttataatccaaatataacaatttatcatgcctcataaatcatatacacatcacacaatagtaataattatatggcataaaacatatatatatatatatatatatatatatatatattaaatcaaactatattattttcaattaaaaagagtttatacaacaattaaattaaaattgtatcaaaagaaattactactaaccattaactttacaactttctttaatttattattttattacttttattattataatgtatatataacatgttgatcatcatcgtggaaagatacaaggcaaaggcaagcaactaaagagaaaattatttagagtacaattcacgttctttaataagttcaattgatatgtgtgatgtcaaatatcaaaagtgcagtgatacatgatataaaaatttgtgtatgatttcggtttgatttgaaagtttattttaatacccttttaaatctatagagagatttttcggtttgatatgtgtgatgtcaaatatcaaaagtgcaatgatacacgacataaaaatttgtgtacgattttcggtttgatttgaaagtttattttaataccttttgcaatatgcaaaacaaacatagagagattttttcttttgaccatttattctttatcgtagtatgctagattcaaatataaactcataacgcaaattaactagtaaaggtatcatactaatcattcagtttcataaattcacgctaattagaaagaaaaaaactcaatttctaggattcacactcaacacaataacatattaatttcacagcattttcgcatcgggacatcaattggcccgtcaaacatatataatttccagttataattgcaaagatagaatcaaaattgcagaaacaccccaaaatccatcccaattgattctctaaggattcgtacacatgttctcactactcttcaactgtgaataactcatcccttacctctaagcaagctcacatgtgtaatctagtagcaatagttgcgtctctagcggttccataagattcctcaagcttttcctctgcttactctgctagggtttccaaatgttagagacaaagagaagggattgagacctcaatttcattgtctttgtatgagagacatttctctctaccaacattatttcgcatatcccaacagcgaaactgtgcaaaaatgagttccgaatgtgatgtccaaatttcaggacaatccaacgattaacaagtttggaatcatagttttactggaataaatttgggtgtatgcaaaaaaaagaaagggttttaggagaggaagaaaggagaacgaatttgggaggaagagagagtgtagaaacatattgtaaatgtaaaaactgacgtaatagctaagatactctgagtctattagttactctatttttctttattttattattttaaaaaaagaaactttatttttctctttcagtaaatacagtaaataagtaaccaattaaaacacctctttattttctaaaacatcattttactctatttattttataatactatgaaactcttattttaattaacaaaaatctttttatctcattttttattttctcaaaactctattaatttttaaataaaaatctttttatttattttatgaaaaatggggtgttaaagaatacacctcagaactattgattccgaactgccaaaaatgaaagagaatttgtaattctctcatgtttagtaaaacaacaaatgctgattgctaaatttgaaagtgatgaacatagtcctgaaaaagagaatgtgctcaagatagtgacagaagctttaatgttaaaatgaaaatgatgaaatacacctataaaaggtgccttctatcttgttctaaaccttatatatttgaaatagtgcttactccttaatttggattataaataaccatatatttgaaagatatctaactaatagcataacatatgccagaagctaatggtcaaaattgtatcctcagaaaactaagctttagcttctaataacagtgctttaaaagtccttattgttgagggattttaagttctagttcattgcctactaacatcaaattgaagttattatatgaattcaatttgctttgattcttgccaattgttgtaatttagtttagaactagcttttgtgacaaatattttctagttgaagggacaatattttcttaagtctgtcttattctatcatatatctgctttgagaaaaatgttgttgggcttctatatgcatactatcatcatttttattgttgatattattgtattaccttttcattggatgttcaacaagtaactagatgtaacatttatctgtagg

SEQ ID NO: 3822 - DNA, 1219 bp, Glycine max
  Intron number 3 from transcript Glyma03g28040.1 (locus Gly ma03g28040) derived from phytozome v7.0 (chr-ID Gm03; pos 35868065 to 35869283 reverse strand)
tgccactgacattagcaactgtttgtctctgggttgttctcacaggccattgagagattaaagaagtagatttagttgataaactgtttagtagttgaagttagctattatgtcttcagctaattaaagggttggcattgggaggttgagagtgtcttgtggtcttgagaacatatctctggatgaatgcataaattgctgttcatctaaatggaaatatttcagctttatgaagttctgattctctgaagcgttgtttgtatgacattatatgaatgaactaagatagaaccgaggaagatctatgtggttgaataatttatgtacctatcttataaaaaattgttgttttcttattggggtgtggaaaagtactttcctccaagttcaattatgtagctgttgaactgaaatcaatgtgtgcatacaatggaaatgcaagttcttgggtaggagagtaggatgtggacactgatggaggatcaaccctccaattctatcatcacttcaaattgagctacatgcatattggcagaatattttattttaagctatgaggtcacagttacatgtagtgagaaatggaagattatactcatttcatcttcacatttagattttcacaaatagaatctgtgatcgtatgtccaaatgaatatgtgaattgtttggaatttagtattatgctctggaaggtggaccaggggaaggggtataatagaaataggaaggtagtaatttacttgatgatttgtagaccaacttggcaatttctgtcccattttttaatctttgcggctgtgaaactctagatggtgaatgacttcttagcagcttaattcaaatgggaaaggaaggaatgcctgctaaaaggaaaacaattattatgcaattagaaatgtctctttgtaatcattgcatttgatttgactctccttggatgtgattatttataattaagttattattttctaatattttatattatgagtttgctatgcttgattgaatttgctttgaccatttgcaaaatgattattgtcaataagtctgttatgtagttaactgatatttaacaatatatttggctatgtcattagtgatggatttctgtttttgactcagtgaaacttacaattaaattagtattcaggagagttatgaatcatgtataacaaggttctattttactaacagttcatggtttgtttctaagcag

SEQ ID NO: 3823 - DNA, 778 bp, Glycine max
  Intron number 1 from transcript Glyma11g01400.1 (locus Gly ma11g01400) derived from phytozome v7.0 (chr-ID Gm11; pos 828489 to 829266)
tgatttcctttggcccaaactgcaggaacaaccaggtttcttctgcctcttctctctctctctttttttttattttttagaggttgctaatatatatactgacacatgatttctgatgccacatgaaagctcgctcaagcgcttatgatttattttcattgcgaattgaagacttcttctgtagatagtgtcctatgaagcacccgatacttgtttttgtttagtgtatccaaattaaaacacaaatggagactattttctttatggatcacgttgaagaaggaattgatactattcctatttctagaaatagggagtgatttatgatggtaatgatttgaaatttttattttgtttttagtaatgtccaaagttcatgttatcaatttgaatttgcagaattttaattatatactatgtatattctatgaatttttatacatatctagatatgtatcctactttcatatttttagaagagtcatatcgtcatattgaatacgtattgtatgatgatgtgtttctttttccgttttgggtttttcatttgtaacaattaacaaaacatgcttgaggtggagcatcaagttgtatcatcaaataatgctgacattaaatgtgatatgcaattggtagttctttgtatgcgtttgaaattttctgttgctgcttctgtcattacgtgacagggctggtctactcgtgagttttcttattaacaaaatttatcatcttccatatgtcctatgttaacaaaatttaacatgcaggtactgtg

SEQ ID NO: 3824 - DNA, 5512 bp, Glycine max
  Intron number 1 from transcript Glyma04g41640.1 (locus Gly ma04g41640) derived from phytozome v7.0 (chr-ID Gm04; pos 47496935 to 47502446)
tcacgaccaccactacacaccgcaccataatcttggtaagccttcttactctacctatgttattcttttgtttttgtgtgtaactgttcatttgttctcggatcaccatgtttattgttttgcttggattattacaatagagtaatgtcattattctatgtccacctgtccaaattgcattattaagcgaatatgctcatttcacttccttgcatgtcattcatatgttctatcctcagcaccttcgattccattccattttttttctctttttttaaacaaatcataataataattgtcggcgagattatatatccttcttcaccctccctccgtttttttttgttcttcaatcttcatcttcatcggtgtaatggttgattttgattccctttgaatcacggctcccatcacatgattattttctatttttttttgcgtccgcttccttttccccccttacatttaataatagtcatggttttttggtttcatgggaaaaagcagaaggaaaaaagggatttgtgcacgagaaacgaaaaaagcggttggaaatcagtttttggtttttcctttttctatttccccatacaaattacaacgcccaagaatgtcattgccacgcgctcctgggctttgttttaccgtacacgtggcactgaattgggcccgcggcccgtggatctggactcaaattgagtttggtggtagtagaacaaggaagggtccagcaagagagattgggtgaaaggacatgtgcctagataacggttaaagtcagtcagtagtcatagatttgaataggactacgatcaatagaaaatgttctatttctgtcctctgtttgacacttctttaatttcctcacacacacccccctctcttcatgcacttttctttgtcgtgtcaacttatcatagtctcctctgcttttcgctctcttctttttctgatttcttttataaatataaacaccgatgatatgttatgttatcttgttatgtagtatatactaaattaatttttttttcttctaaatatattactatatagtatatagttgtagttagtttcttctaatattttccattaagaaatgtaaaataagtagaattgccgattgcctgcaacaagcatcttcagagtctttaactctcaactacctctggacaagtatatttattataggaaagagaaagacttgtctgttttatctatatactataatatgtgtgagtcttttctgtgtgctgctgcagctgtcggttttttttttttttttgacttagataagagattaagaatattttttaattaattggtttagagattaattttactcgtaatatagacttaaggaaattttgtctaaaataataatcaaatacaaatttttttattaaataaattattttcactctcatatgaacgcatgttaaaatgaacatgttataatacaagatttgacttttttaagagctagatgttgttgtccataggtccggacgagtgcattgaggctattaaatagccactagattttcgatgcttgaatcggattttgccttttaatttaagaaatagatcgaccacacagaaattaatgtgctatttttgtagtgcaaaaacaagtatttgctcttttaattaactaaagtagtagtggtcaattttgcttttgagctcatttttatgtttccttaaaaatattaattgaagcttttgcaaaacacttgaatgaatcgatgtcaaagttttcctgtccttaatagtagtataaccatgatttctattgcgacaaagacaaaacattgactgggagagtaagctatctatggatgctgcatggaattttctagttactcactagttacatttgatactagtcctttgttgctaattaaaaactaaattgttaattaattaacttgatcttaagaatccactagctagctgtctctgactgaaacatgtatggacccttccatttaattttttcttcaccgtgcccttttatcttttgttatgcgataggtgggtattttctgtttagacagcttttcacgtcaatcgtaagttccaccctttgattattagaattatatacttcatgcatcgcttttacaagaattaactaatacgtccaacgtagaaagtacaagtgtacaactctcataattataatatatttgactagttgtcaattataattaggagacttattaaactagttataacgttgtttattagagaagaagtattaatattcagctttaggtacaaataattttccttagaattgaccagcttgtcgtactaggatgtccgggtacaccttacacttcccgctatctcaagcttttagcatcaaccgttttgttaaccgacacgtgaaatctctttgtccttctatgattaaataaactaaaaatccaatagtacattacttttcttgttggtttgtatttgtgttcacactctcggcctcaaaagtcaatagtcctttttcacttggcgtatcttcaactccgttttttttttctttctctaaccgataaaaagtatgtgtttctggtttctggttcttacacgtgtaccattgatgcgtgtcacacttgtcgattcttcctttcattatagtgtttatgttgattatttctgatatttctttttcgtttttataaaagactgttcacgaacttgtggttaatttggtctgagagaagaggctcaccagtatgttgattatttgtcacttttctttataggaaaaaacagagttcaaactgttttgctaaccagcatgttttgtttattctaggatctaggggtacaagtcatgtctgagataatataaagaaatatagatcataaataaagatagagtctgggggtgtgaaatgccgttaaacgacagagtaaatggacgtttaattaactcacacacacacacacacacacatttagttagtctatatatacttatctggtttaggttttaattatatttaattataaaggcaaacttgtctttataaaattccctgtcttagttatttttctggaaagtaaaagtcaatttccaatttatgtctaatctatttgtcaattctgagtaaagctaaagatttgtttattcaatggcaggtaaaacctatatattctttcaatggaaatcattttacactcctatgatctgccttgatctaaaggagcgtttttcttcaagattttatttcaccttatttagtgcatgcacttgaagaacagacatatttgttgtagtttaattcgccagctagcatttccttatgtattcttttttatatatataatttcctactttagttagtatcttcctaagcaaggatggattcacaccagattttcggtatattgtttgattggtcaatatttagtacctatattttctagcataggattagtaatttccttgaaatatacatttgaactagctagcagtcaaataatatatacctcttcaaatgcattatttgtttccaacatatgatattgtgcaagtcattttcctagagttcacctgaacccaaaggaatatgattattgttgttactattgatctcataatgaaacccactagcaatagatgacgtgtctaaccactgctgtgtcatgtgagactgtctgaaagattattaattgatataacttacattatatgtcatagtcaagctacattagagcttgattggattagtcaatgaaggtggaaagaaactgattcagttagaggagtgttggcggtacttgggtagttgagtggagccaaaagctaaccaacacacatagatccgttacccgttgatgtaggcctaaactctcctaacacttttttttagcttgtgtcacattcatctgagtcagaatcgactaatatcctaccctactttaccacataagtctttcaaaactttgcctttgtatggggacaagttgtcaaatcttatatttcaataatgtattgcccttttgttttttatattgttttcatgtatctctgtctaaacgacagaaacaaaattttacttgtggaaaatgacctccattttgtgtagctaactttattccttaattacttggcccactgaaaacatttgttagctgatgttttcattctccagaatgattgaaaatggccagaaaacgtttttgcttattaaaattgttcttgaacttgataagtgaaagtgacttcctagacaaaactatttgaagcacttcaagtgtagtctttattgaattaaactagtacacatgattttgagcgattctcctccatctttttttttatgtcgccagcataaccgaccatttattgttgatcatacctttgttttagttttagctttttcgttatgatagagatattagcaaacaaatacagtaacgctcttcctttcgaggcaatttaaagatcgagcatatttaatggagcctgtctaccagagcaagatttgtcatgattttggtggacaactatattagtggatcgcatgaagcatggtgaaccatttgactagagcatgatatgattacacctttgttatgtttttttcagtaacattgcaaacactattcatcttagtagtttgctgactcaagtttggttttcatgttaaatttgagttttgaaaatgaaaagaatatatatattaaaagaatttatctcattaaataagtgcacctaacttgactaaatttagtagaaatttaaggtggtttggaatacttattaagactgaaaaaacttatgtttttataatgtctaagtttcatttttcaaaaataaatatcttttaatattctctaaaattaataaaaaaatcataattatttctaaacatagaactataagtgtcagccatcaacttgtaaaaagcagaaaatattctgcttacataattgcactataaaaaatcagttaaatataattttccaaaatacaaaaatgaaatcgttattactttttattattttattagcaatcacatctgtcaccaaaaaagaaatgaaaatatgaaggataaaattgagaatgggttattaaaaatgcaaaagtagtagacattttttttgttctaaccaacatcccttcaattctaaccgtggtacccacacagggtttttgggtcaatggaccacaaatggaacaatttgacaaaacatttttgttcttaattattagttgggcttagagcccatgacaaaattaggccctattcattagcctttttgatgctcgcatagtttgtgattgttcaagatggaacaaaagtgggcccgtaataaaaatgattgttcaataattatttgttgatgcattcattaatgtgatattatgtagaagcttttcagttatttattccgtttgtttaataatggataaagttttttttattgtgctgattcagatctttactaatttttgttttcaggaaattagcgtctgaaagagttcaaaggacttccg

SEQ ID NO: 3825 - DNA, 1717 bp, Glycine max
  Intron number 1 from transcript Glyma04g08580.1 (locus Gly ma04g08580) derived from phytozome v7.0 (chr-ID Gm04; pos 6721420 to 6723136 reverse strand)
cgttttcgcgctctccgttgtatatctcgttgctggtaaggaagtcaatttcattggtgcttttggttaagttttttttttttagagataattcacaattttttttccatttgtttatttggtgtttgattttatgcattaatggggaaaggcgcctaaatatagttacatagactgtgttatatgtaatgtactaatgtcacttcggtggcttcttctcttggttctaagtttgatttaaaacatttataactataatataatgattgagagaatattatgcgtgggggctcatttgaggtgcagaattttttggcattgagagaactcaggaatgggggccgctgggaatatttttctggagaagcattgtgggaagagttgcactgttgatgttgccttttatagtggaaattcatgattgccatcaaatctgaaatttctatttcgaagagaattgatacgtgagagtgtctatactatcttagtagagtaatgctacattatcaaatcttggattcacaatcctgcacaattttactgtttgattcatggaagtctaacgttttcagttttaaacttaagaaaactgcacaaatttgggaatccaatagtcgcacaaccgtccattactctgtttgagtatttctcatttatattttcaatacaaccccctgaccttttactggacttttggataatgccacagatctaactatgggaactctttccacagatttggtaaataatgtggatgattgtcagccacataactatgttttgaaatatatttcatatttcatttctatagcttaactttttgcagaacaaaggcactttgttctggaaatcctgatgttgaactaatatagatcaatggtttgtggtgcctacagagtggtctctaattcctgtatcttacaccacctcttcatacaaaacttgtttttaactgtactgattactgaccctctattaataattcatctattctttggtagtgtggatgtggattgtgtgcaattttggtctcctaagttatttttggaaatttggtctctatcaatttttcttctacctacaaccctcaaattattattttctgttcaaatatttgaggattgatgatggatttgggatatgaaataattcaaaaatttagaagttagaaaattagtacaaagtacaaacatgataaaatttgaaggattttataagataagggattagggtttgaagagagatttttattttattttaatatttggtgaaatctgattttttggtaggtgaattttaagcaaaaggcagaaatttaattggcattttattaggatttttagtagaaaatgagcatttgagggttttagtaaaaaaaattgacaatagaaacaaatttgcttagtttaaagtttaaacatagagatttaattggctccagcaaaattagagggaccaaaatcgcatagtctgaactgaagggataaaaaatgcaatttaagtctaatatttaattttttagaaacacaagttgcataaatacccatttgattgttcctgtgcgttatcttgtctcacaggaatttctgtttttggggtttaaataacttgtcttattagttctaaaagctttgggccataattgtggagattatctcattggttatgcttgattttttttttaaaatatgatgatgatgataattatttcacaggc

SEQ ID NO: 3826 - DNA, 4185 bp, Glycine max
  Intron number 1 from transcript Glyma15g42160.1 (locus Gly ma15g42160) derived from phytozome v7.0 (chr-ID Gm15; pos 49554132 to 49558316)
gaagaagccttctaaaggtacttaattacttctttgtttttttacttaatttatcttttgttattttactttgcttaattcgagtttgctatttttttatattttttttatctacaactgttagtttggttaaaaatattaattacgagattcgaattgacaacttcttcaccttctcttctctggtggacaaccttatattttccattggtgcatgtttgctattattgttcttctttcttctgtttattagttcatatctctcttgataaaaacataggagaaactagcaggtggtctttgaccactatggtttatgctaatacgtacatgtaattattttttctcttgtagatcgtaaagtttaaatgtattatataaatattgatcagtattataaataagttacagtctaggaccaccggctaaaatcacttaacatatgtttaaatcaaagtttgtaaacataaatttgagttaaacttaaattacaaaaacaacttaaatcttattgttaaaaaattgttttttggggtaaaatattaatatgcaaaattgagtttattcttcaacttgagtttggactacccagatgaaaaagcaatcataaccttaataattgttggaaaacggaggaaaatatggtatagcctttcacaattacttgagtatgaaaaccatgtgctggccaaagtgataatggaagataagtttaaaagttaataaatataaaaagatttttggatcgtgggttaatatgtattttataaaatagggtttttttagtagtgttagtaaatattatatatatatatatatatatatatatatatatatatattaattctttaagtagttaacaaaatgaatataatattgcaggtattttaaagaaaatctaatatcgcagttatgatttcttatggttgtagtttcgatgacaacttcttattgtggaaatttatttataaaaaaatgcgaattgatgagcaagagcaacaattgctgttagttggttatgaccaaactcttttttaaagccttgctttgtcctttcatcttgaacatatgcttccaataaaattctttttattttatagtgtaacattttgttgaagagaatatattgggggaagctacgcataaatataatctttgataacacagtaattttttatgattgtgttgtgtcctcctggaatgatatttaatatatgcaccttttctatatatttaatccatcttatgctataaaaaatcgatcttctttatataatattaatatttttaatccacaaattctttaaataaaatttaatcatgaaatattcttaacgtaaaataaaataactctaagacacaccatttattaaaaataaagtgcacaaataagccagtaaatatcatcatcattctgttatactgtctcaatttggagtcctggaccacctaacgaaggggatacctcgaccttctatggaagaggaaattatggtagtcaatgaaaaacaaattagtattttagttgtttctcaagaacaaaaacaaaaattaggattttggtaaaaaaaatatagtaattaaatatcttagaatatataaattatattttaaatttataaaaagtaatattatttgtcacataatgctatttttaattactaacactttaaaagaaatattgaaatttaatttatttaaaaatagagataaaagagtagattggtagatataaatttttggtttaaaaaaaggagaatatgttgagtgagaattttttgacttgtgacaggaataatatgtgaatattgaaaatacctaattaagaaagaaactcttccaagttgaatattataatttgtaaaaggtttttttttttatatacataaaaactgaagttatatcaattatcattgtattttttttttagaatgcaactaattagaaaccattattaacattattcttaaggtaattattgtaaaaaataataaattaatatattaattatgcatgataattagttgataataagctgatagtgtaaaaaattttaatgcatgaaatatttacttaatttataatataagaatatatttattttaatttgaaaaaatgatcttaaatatgcacttagatttcgttggaatttgtttttgttgattaaaaatagttttttttaataaaatacttttttaatgtttcagcgtctttaaaataagaatcacttgaggcggaacccctccaattcataaaaaaaatcactttttttgtcttagattaattttgtgtctgagtgttctttttagataaaatttagttttaaaaaaaatattttttattctaaatttttattttgatatattgtaaatgtaaatatttttatttaaccaattcagcacatttcatatatgatttttaaagtaataactatgaaaatcaagtatttataagtagaagacttggtaaaagtctttatgttgacagtatattttaattaaattttatgatttattcactttatttccaataataatttccctaagataacgatgttaaactataacaatagtctttttttttaacagtatcaaaatttgaaaactattttaaaatttaattttctgtttaaatataatatttgaaattttcattaaattgttgagaaacttaatgttttaataaattttttaaagaagataaatgtatctgctgcaattaattactttcttgcaacagattcacgaattagagttatacaaaaatgacaaaaaaagcctatataaataaatatcaggatccgcaagaaaggtaatgaaccttttgttaaacaattgttaacattggattagtatatgtgattaacattccttgcttactttatctgcaactagttacataatttgtgtcctcattttttggaatattttttgtggaatattcccacagtgggaatatataatgcaaagttagctagtaggtaacaaaacttaacaaaaaggagacaaacgaagttatgtaagaaaatctcccactcaaaatccattttgctggatatagtttcttggtagattatctctgtgtgtgtgtttttacaagtcttgcctgcacatttgataatgcagctatttgaactgtacgattagtttggtataaaaggaacctatagctctacgaggcaaagacacaagtgtgatttttttttttaaaaatgtttttgtatatgctcctcaaccattttgataaatccgtaatgatttgaacttgtagagattcaattctataaagcatcatgtgtttcttttcttcattaaaaatgtggtccacacacagaaaaaagaaaatgtctctaaatttgcttcataattacctaccatgccacagattttatattctcatgctatttatgaaattgatacttgggattattgtgcatgttatgattatcttacttgataatataatgaacataactatgcacaatcatacacaacagagtaccctgttttgcattatttcgtcccctctgtccataaaagtgcagctaacaaaataataataataattccactaccaccacaggatattccaaataacaaatttgaaggtgttctccacatcaatgccaaagtaaattatatggtccatttcattatgagagagacttttgggcacacaaatccgtactcatgggaccataggatacttgtaatgtagttagcaacacaaaattataacagaattaaagtcaagtaaagacctcatttttggttgccccacatcagagtcacatgcaaaattgcaacatatcccttatgaaaatagacataaaggtaaacaaaaccaagacgtttgtttaatgaacaccttggtgtataagtgaggttgaacaacgtttagaagcttgtttatgtagtcaagttagcttccttgtaagtcacacatccttggggaaacccttgtattttatatttatatgaagacccttctaccttcaaaaattcaaaattgtccccaaaggaatatagtatacttcttgcaaaaacttctatatattattatataataatgatattctcgatatatgaaactaatacttctatggaaaactcaataatgggtaattgccttaccacatgttactgtgcagggaaagtcattcagaaaaaccaagctctccccatt

SEQ ID NO: 3827 - DNA, 3042 bp, Glycine max
  Intron number 1 from transcript Glyma15g37980.2 (locus Gly ma15g37980) derived from phytozome v7.0 (chr-ID Gm15; pos 44031868 to 44034909 reverse strand)
tttgattggaacgacgaagaggttagtcattcaattttctatttttccatttttctcttgttactattattagatcgtagtttgttgtaaacttgtaattgtaataaatttgtgtattgtttatatatatacttttggtttgtcagaatatatattttttaataaacgtgcttaggttattgttattgtatactagtaatttttcttaaaaaatttcttggggtgtattttggtgatttgagacttgagtatgaagtgattataagaaattgaaattaaggtgaagatgttgtcttgtgttgttgctttttgttcatccttttggtatgagatgtttgtaagaaaaaaaaaactatttattgaaaattgaatattattgggaactttgaccaacggttggtctcatttgttgtgtttgtgtcttattgatgcaaatctgaactagcaggaaagagttattagtggataacttcaatcttgttttaaaatagaaggcttgttaaatatgaatttggttactaggttttgaaaggctctgtcagactgtcagttgttgaaaaacatgttcgtgcttcgtttggtccttccttcactttgaggcagtcctgacttatgaaagtattctttaggagatgagaataatgatagtttatgtgataaaggggaattttggttgatggtctgaaagtagatgatgggacgaggaatggagtgtggacttgatccagtatgcagtgttttggaaagatgatattgcaatctcaaaatatttcatggagaggacatgcaaagggaagttgggaattgcgttatggttggattgtgagaggtcttatcataatttttctggaccttaagtgactggttcagaggaggggagggattttaatagaggggaaggaaggggagggattttcttattagacattctgtttatttaagaggagaggtgggacggagaattgaccttgtttttgtttggttcaaaagggaggggagggatattaaaacttaataaacttttatattcttgcaattttaaatttcaaaacatagtgtagatgttttagtcaatgcacctgaaatgttttaaatctccccctcccctctaaataccactaatattggagtggagaaaaattggacatgaaacgattttgttcccctccatttttgcccatattaaaaattgaaccaaacaacaaaacattataaaaatcctcccctcccctccatttcccccaattgaacaataggtaagagtatagtcacccccagatcccttaaaatgaagtttgacattaatgaggagtaatggaggtggaaaggtggtcatgatttgtattttgtagtgcctgtctcctagaaaaggaagagaaaaatcaacactatgtttgttgatacattttgggaaagctggttgctgcacttggattcatgattttttgtgattccgcacaataaggaggcccgggaaagagtggaatcaattatattgtagcaagggagatgtgaagatgatatggtttcttcctatggtatattattggttcctattcatatgagaaggggggggggggggggggactgaaaaagttagatatgaaaaacttctggcgtacagattgttagaatgtttttgttgcattgatgaatgcaatgttggagtcagggttggttgagttttcccatattgtctattgactggatttaaatatttactacacttgtcatagtgcacagggaattaaaaggaattgatgtcaaacatggattggagtaagacaataacaagaatttatagttttaagtactagttcctacatgtgatttccatgttctgcaatattttgttctctcctttttgtgtttattgtgcattacttgtgatgaatgatgatcatgggtaccatagtccaatttgtgactgcatattccctttcaattgtactttgataaggcagaaattatactttattttgttatgaatgtttgatgcatggagtcacacttttaataaattcacattgtaattgatgatttgagagaaggaagaaaataaaattttgggtgctaagatggggagaagtatcgaagataggaaataatgagaattaaatgaaaagaatggaggacactgtaggtctgtagtagacgtttgtttttatctaggtgtaatgaaatatcttgaaaggtgttataggatttaagtagttggttatatttggctgatgtgtgttagcagcgtgatcaattgtggattacggtccatgttggaaagccaaaattttgtcattcactcttgcaaatggtgttgcgagcaaataggggaagcatagtggatgaattaaaaatatatataatatataaaaatatacaaaaaaatatctgctaaatgtacttgataaaaactaataacatatataaatattacaaaattagaaatatattctaacaaatacaatttgtcaaagtctcataacataagcataaatctcaaatcaacactgaaaaagatttacaatacaaaactaaaaatatcctagaagtgagaagaaaaggatgaaggggaaaaaaaggcaaatcaagaaaacaaaaaaaaatagaaaaggagaaaaaaaggatggtgacaaaaattgaataattttaaaaaatagacaaaaaactagaaatatagagaagatataaagaaaagattgtgagggaaaaatagcaaacgaagaagaatagagaagaacaaggaattaaaaaatataagaggttttgccagagttagaatcactggcgggtggtggagggagaagatgagtggcaatcatcttttgaaatctttaaaaaacaatttaaaggataaaagagggtccatgtctgccataaactggcaggaacagaaggtaaaatggcatagtaatagtatttacccgtgtctatgaatttccctactgctagcatctgaagtgttttatatttcttgttgggttttgcctcgtcaatattaattatatgttttacaatgtactgttttcagcttgctaacatagt

SEQ ID NO: 3828 - DNA, 4657 bp, Glycine max
  Intron number 1 from transcript Glyma02g36330.1 (locus Gly ma02g36330) derived from phytozome v7.0 (chr-ID Gm02; pos 41780034 to 41784690)
aactgaacgtagctgaaaccgagaacttattagctgtgagttaccaccatcctgtttctttttttattgcttaaattagtattttgttaccctaatttgttatttaggatgaatttgattttttttaatttaatttattcatctaattttttaaattaatttaatttggtcattccgtctagatgatattttgttcaaaatcattattaagtaattctaaactatgataaaatatatattttttaaaaattaaattgattttaaaaattagaaaatcaaattaaatagaaatttttttattaaatgatcaaattaaataaaaaaattaaaaattaaataaaacttaaataaccaaaatactaatttaaacttttttattttctgttatgctcgctaatttaattaattattaccttgagtagtcaatgtagaacttatttgtttaatttattttcaccaacatggtgtggctgtggagtgatcgccaatttgagttattttaataaacaaaataaagcatgagtctcttttaaaataaattatcattatagatctagtttgaacattgacaggtcaaaatggtcaaacttaatagtttgatggataaatttaaggaaaagatgacaagtgtcatgttttagataaatatgtaataatttatattaataaatatgttttagagacttgcattgatattttatttataaatttaaattgttactcgaaattataaataatttatggtacttgattgaaccaataaaataaagtacccaaactctctgtttagaaaaaattaattgataatatatctacgatcactacttctatcatatccgtatattttacaaaatatattaaataaaaaattaaaaaaaaaagttttaacaaaaataaaattatacaaaatggtccatcatcagtgattgggatatgactagtaagttatcctttaaatatatgcatatgaaagacatatctttaagagatctttcgttaaaaaaaatgtacaacttatttaattagtttacaacaattaattattttagtttctacttagtagaataatttgtgtgtatatgtatattttttaaattacctttattagaattttattctctcgatcttttttttgtcttaattaattaatgtgctttcacttaaagtatttgtataaaaaaaatctgggcaaacttctcaaaattcttataaaatggacttaaggtagtaagcattaggtaaaataaaatatccgattggaatattattattcagtactgattaggacattggaggatccgatggacagaaaatggaacgattctcttatgtaacatttgttcgtcatggggttatgcattattttaattcccgtatatatatatatatatatatatataaaagataattaaatggttgatgtcaatacctttagcctatattttgaattaatatttttaatttttgttacaggtataagttggatttggctatcgcaataataagataaataatacttacaataattaatgttctattgtaaacattaattttgttttaattattttttaaaataaataattttagtttcctatttttaaataagacatttagtctttttatttttacagaataaataattttgtttcgtgtgttagtgatcatataaaacaatttcaatgtaatatattggtactgaagtagataagttattgttacgatgcttatgtggtaagaaattaaataaaataaaaaataattttttttaataaaagttgaacttataattttttatttaaagacaaaataataaaccatgaagaaacttattttgtttagttaactatgtaaacactattttatatatattattagtcgaaagttattcattttttatattataaaattttatatattaaaataaaatagttaatatttaagtacatttaatgttatatgtatttatttttatgataaaattttattttaatataaattattacatataaaaatttgttcttattttattataattttataaaaattgcataaactaatatgttgattatattaaaatgatatttaaataatccaaaaattaaacattaaaatttattactttttgtaattaaaataaaaaaaattattatttatatttaaaaatgaatttacataatttttataaattgcataaaataatttatataaataatttacatattaattatgtaattttcttaattggtattaaaaaattatttattaaatagttttttatagttaaaacgaaaattttagcataagtttcctaaaatattaaatattaaaatttatttatttatataattaaaataaaaataatttacatattaaaataaatttacataatttgtataatttatatattaattaatacagttatattgatttatctaattggagtaaaaacaatctgtatattaaaatcaatttaaaaaataatttatatgttaatttatgaaatttaattataaattgttaaaattaaaataaaagttatacactattgaaaataaaattatataaatgatataaaatcttaaatatagatttatatattaaataatttttaatttataaatttttgtaatttgaaaaaataataactctttattaatgatacatataaaataatatttataaaattagttaaataaaacaaatgttttagagatttaatatcttatttttaaataaaagattataattttaacttttattaactttttttattttttaatttatttaattatttgtcacataagcgtctaagactaaaattatttattttaaaaatataaaaactaaatattttaatttaaaaataagacgataaaaattataaatttaaaatcattgtcgaccaaaatggtagtttagttttttttttcgtcaatacttaattttataacataacaatgtcatatcgtatcgatgcctaacctgtgattttcaaaattggacatatcttatgtgttactgtaacgtcgtatccttatcgtaagcttcgcaaattttggtcctctctacagtgacccttttgaaaacaataataagaaatttcttccacagaatatatatgaccacttttgaaaatcagaagttgtgggtggtaactttgttttggcccttggagtcgttgtctgaaagaatgatcgagaatggggataaggcatggggtaaaaaattcgtgatgtgtagatgataactctaatctccatgtacgacaacacccaattgcagcataaattactaagataataagtcctgctcctgcattcagttcatgggtcattacttcagtttcacatgaaattaaagttatatcttcggtattatgtgtctacttcgttattacattgttaaacgtaagaaaccaaccattgatatcaccacaaatacactaactcaccaagagtattttgctggtaaatgtattataattcagtcttaaatatctttttatctccaataaatacctaaattttaagtttactttctagtaaatttttgttttactttaagtacataataaaataatacttttatttttttccttcgtattttattttaatttatgataaattaataaattttatgtttattttctaataaattaatgaattctatttttgttccgaataataataaatagaaagaatttattagtaaacaaatataaaatttattaatttatcctgaactaaaaataagtattaaagacgaacaacaaaaaataaaattgttatttttcaacacaaaacaaaaatgtactaaaagagcaaatataaaaatcaaatatttattaaaaatcaaaaacatatttcactctataatttatacatttataatactatactattctatattaatttggtttatgagcattggctctctctattcaactgttatgttatgggggtgtttagattgccgtttcaagcttccaaacatcagtttgcgctttcctatacactaaacggcgaaggagctcttgtactgaattaaagagaatgttggatgcaactttttcccaaacacgccctaaattaatcttgcctattgcaatctctattttcaagcctaaacttcctattttcttaagggatgaagataccagccatttatttttcaaaaaagataaacttaattggcacattgtggagaagtcattagtctttgtaagacatttacaaagatagtcaataagacagtaaagccaaagctattaggagggtagagcctctaatacgaatgaggagtttgtgtttcacaggtcacagccctatggtttgatccaaactctttataatatcaattggatttatcagctaaataaagtgattaatgaaattcatatttacaatttggagaaatttgcagccaattataactagtaatatcagctgctattatttttcctggtacaaagcagcctcaatgtcacattatcttcttttttgtctctgcgtatttgtaattaaaattcattcttatgcatccaatgtgttataatctaatttctgtgaataattgatatggcactctgctcactttttgcttatgatctggtagctagcttgatgggtttaagctaattatgcaagatcatgtaggg

SEQ ID NO: 3829 - DNA, 849 bp, Glycine max
  Intron number 2 from transcript Glyma02g13840.2 (locus Gly ma02g13840) derived from phytozome v7.0 (chr-ID Gm02; pos 12149775 to 12150623)
gggtttcttccaggtttgaattattactcatcctttattacttaaaatatcaaatccaaggctgatcaaaaaaaaaaaaatatcaaatccaagaattcagttcattaaaatgaaggtcaatgtaaattttaaggaaattatagttgatatgtaagctagctagctagcattatgttatacaagtgtcaatctcttaatggtctcatgaacatcactgtaagtagcaactaaagcaaggtttttaatgctgccatcacattcacatgattttggctagtaattaatatttgataaattagttaaatgcttctagatcgttcatttcagcttcgatttattaacaacacaccatgtgatttaaattaagaatttgtgcacactcttgagtcttgactctttagaacatctatactttcacgtacaatacaaatttctccaagaatttggcatttctgcctatacaacaggaaaagaaggatgtagatctaattttggtagatgactattttggtctctgaatatataaactaatgataatttaatttctaaatgtgtaagaaatacgataattacgatctgcataaaacttaataataaattgattcttaaactttacaacttaatatcaaattgatcactaaaaaatataatttattattatcaaattaattcttgaaaattacaactaaataaaaaattggtcccacaaacttcatggcacgacaaacttatcgtactttttacacaatcaataacaaaatcccatctagcaccaaaacagcaatttattctttaattttattgttttatatgatttctaatatagaaattatataaaggtgattaatc

SEQ ID NO: 3830 - DNA, 1455 bp, Glycine max
  Intron number 8 from transcript Glyma16g21930.1 (locus Gly ma16g21930) derived from phytozome v7.0 (chr-ID Gm16; pos 25273775 to 25275229)
ggagcaaacctacttaaaggtaaacttttatcttaagattaatttattaacatattatttttaacttatttattgttgatcaaagtttattgaaaattgtgaattttaaaatcaaacttattaaattataaattattcaatttttttctaatttctaagaaatttcagttaataataaaaataaattataattttggtcctttataattttaaattcgtaattctagttttcctatttttaaattaagatacatagttctcatattttttataataaataattttaattgagttgatttaatatgaaatattggtgtgtgatgcttatataggatcttgacatgatgtaacaataagttaaataaagtaaaaaataaaaagaatcttaataagagtgataatcttttatttaaagataaaataataaatcgttaagatatttttattcaattaactttataaataataaatattattttgtatgtattattagtcaaacttattaattttttaattataaaaatttataaattaaaataaaaacatttaatatttaaatatatttaacatttaattttacatgtatttatttctattatattttaatatatatatatatatatatatatatatatatatatatatatatatatatatttctgtttttattataattttaagaaaattacataaaataaaatatagattatttaaaaaatatataatttataaaattatgtaaatttaaaataatattcaaataatctaaaaataaaaaaaaattattatttttataattaaaataaaaatttgtaatttttatatataaaaataaatttacataatttttataaattatatatgtaactttcttgacttatataatttctattaaaaaattatatactaaataatttttaatagttaaaacgaaaatattaacatgtaattttcctaaaaatttaatattaaaattttattaatttatataattagaataaaaataatacacataatttatataatttacctattaatttattcgattatattaatttaaataattagagtaaaaatatttgcatattaaaataaatatttagaaataggggactagattaacggtcaaagttaatatttgattttaataatcaactaacggaagtaaggatcaaaattgattatttaaaaaataataagaaaataaaatgtttttaattaaaaattagagaatcaaaatcacaaatttaaattataaaagattaaaattacaatttaatctaataaaaaaatcaatactgagtattagaaaattagaagacatggtgttaacattttgctaattgtagttttaaagtggagtactgtatactttggtgatttgtttattaaagaaaagaattatgggtaaacgggccaggtttgaaaggatcaactactccagtgtggaccgtt

SEQ ID NO: 3831 - DNA, 5199 bp, Glycine max
  Intron number 1 from transcript Glyma15g43020.1 (locus Gly ma15g43020) derived from phytozome v7.0 (chr-ID Gm15; pos 50461660 to 50466858)
aaggtcaagaatcaaactgaccaaggagtattcaggtatgctaattccttcaacttgaaactcctttcattctttgcttggacctgcatttctcatttctggtcgttaatgcatctatttgcatgcaattgaagagttcatttcatttcttacccttcttgcatatacatgttaattgattcccatggtgaaagatttacatatatacctcttatacattcttgcatgcccaaattgatatatgtaagcattttatgaattgatatacatatattaaccctcacattcttcttctttttagtctataaccgaatgcctgacacgctcaagtaaaaaaaaagataagtggaaattaatggtgaggattaaagtattgcataggataaattaagatgcatgcttttgctctttccacatcatttaattaattttgtatcttaattaaccacgccattaggaaaataataaaaaaaaaaaccatgttgttttactttgttacatacaaaagtatagaactattatggcttttgtaaacttaacatcagccgacacttaacggctaagttagtctcacccctaaagttagcttcatgcaacttgcatgccacgtagcttccatgacattcaactgctgttgtagtcacttattgctcagttataaacacacttttataatctttatgatgaaaaaaaattgtaccacagtataaaggtttttttacagtgctattcaatttacgaattcatcatgatgagtttattttatttgttttataataaattatacagaatctaattttaattattaacagtatatattcattaaactgacatttttttttacatattaacatattcatgattatttaagattctaaaaaggaccttaaaagtagaaattattataccctagcaatttaacacaagcactaaggcatatattatcagaaccaacaaataatagagtatttaaaattattaaattatcagtaaatattgacacatattttaaattaaatttttttgaagaaataattacttctttttttaaaaaattatgaaaaaattgagaaattaaaataaagtatgattttcttaaaataaaataaattaaacatacaataaaaatatttaagaaaaattatctacaaaattaagttcaatcaagtgaataattacatccatatttaaagtttaactatattttttatcatcatgatattaatataaagtatttattttacttattattaatatttgtaaaaaaaatccagtttgttttctataacttgagctccctttaaaactttatttaagaaaatttaaacccaatttcactataaagttggtttaactattttaaacaaggctatttatcttgtaaatgatgtaatcttttcatttaatgtgaaattacgttttatatacgtggaaaatttggatgtcatttcttagtgtggcttaattcacggttgtatttgatgcacaatgtataatatccacacacttatccaccttgtacggattagcttgggggacctaccaataagtaaatgacaacaaaaaaccttgttccacttcttctggcaatgtacggttttcctctctctagaatacgtcatctccaactatgttcttttcccttagttaaaaaataatgtttattgttcattaatttattaattttaatttattttattattatttaaaaattaattattcatcattgataaaatttattttcttaaatttattattttaatagaatcattcatatcgttctttatagttttaagtatttaattagtacaatttcaataattgttttctttggttttaattaaattttaaaaaataaaatccttgtaagaaactttacgagctatggtatatctactaattatttaataggtttaagtaaatttgctaaattaaaccggaaatttacaagaattatatatttcatttaatttgttttgttattaaatatatacttaacgtaatcttttataatagtttaacaattttaaatggatggttcaacacgtttcaatgtttttattttaaagtggtaaaaactattcataacaaacacaaacttcgttaattaaaaagacacatcattttcttccctggtttgtgttttgctgcaaaaaaaattgtcactatcttatctatagctaaagaactgattttaatagcctatagtggagaaatagtggccaacaatgctggattagtagtatacttttagtttgtcatatacgcacgcgtgcattttggtgcacacacacaactatatgcaaaggtaattaattagttatatgggatcattatcctagtaattcaatcttatcttttacttttttgggtgaaataatcttatcttttactagcttgtaaaatctcatcttaacttaaatttctacacggtgtaatcatctcctaattaaaatatctatctcggtaatgaagatccttatttttatcaaacttacttattgctagctttatataagcaaatagatactaggatgatttttattttattttattttttagtacatactagcatgaattttgataaactgaaataggaagaaaaaaatgcaaacaaaaatgaaattaaaaaaaaacctcactttattgagttgctaaaggagcttaattaaaatgttagatttgttgcttgaataattgacatgggagaaaaactagtaagggatatcacttctagattaattatattacgtggcgtataaataaatataaattaatctttgagggcatacttctgtttctgtttttctttttgtacagaaaaaaattgttatttggaataatgcgctaattatgataaggctcccaatgtacataacaagaaaggttgaacgatttcaaatatatatacttacaggaggagatatagataaattgtcattttgaatgcatgatactttttcatgctacatattacaatttaaactatctgtcattttcattaaagatgtgaggccattccatttctttctctttttaattgatgcatatatttgatgagtcgtgattataatttaaaaatacaactttatatgtagattctagttgatcccaaattccaatcacgaaagtgagtcagctttcttttttattttaattgaaatatacattaaagaagattctgattccttgcctatatatgtacttttcttgcttcatatataaatttcaacattttctattgccatttattttggttaaataaaacaaaactaccaaaacaggatgcaatgataatcgttccatatctgtgggatatgagacttttcaataattactggattttcttatgaatgtgaactcatgtaggtagaaaatggctttcatgacttattcacatgttacttaattttagaaaattttatttcgataaaattaattttaattaaaagtgagtttgagattaaataatttatattttaaaaataattttgtaatgaaatttaatgtaaaattctacatccacgtaagaattactttattttgtcttaggtcagtacacatttcgtttctagtctaaagtaagtttgtttcaacaatcaaatataattatttttaacggtgaaataatgttaaaagaagacatcaaacttgagttttaaggaccatgattcgtatccattgcacattaagcttcaagattcctatggaagcgtttctgtcttatttctacttgctttaactttaattagttctttcttgttttgaatttcttttaagaataaaactgacatgttcagcgtggaattgcacacccgatctcagcaaatcctgcaattcgttaagcatttgtttatgttactcgatgcttcactttctgatgcccattctacatgtgaacaaaaaattaaataaatcattactttatcttcaaattcaggttcatgactcatgttaattatgtggtcgtttctattccatatgaaacgttgatcactgatattatgcaataaatttccttatgacatgctttatcagggagatggttggcattttttcttgaatacatgtaacttccctatgctgtttaacattttttcagttctcaatgttccgcacaaatatttgaactctattaatttaatcaatatatgggattacctaagtcaagtaggtaaattaactcattggtagagctgcaaatttagctacatataatcttgcttgtttggcaagttattgtaaaaattattgcatttaactcattgcatatatgctaagtcttctaaaaattaaaatacataaatgttccgcacaaatatttgaactctattaatttaatcaatatatgggattacctaagccaagtaggtaaattaactcattggtagagctgcaaatttagctacatataatcttgcttgtttggcaagttattgtaaaaattattgcatttaactcattgcatatatgctaagtcttctaaaaattaaaatacatagcatttagctttccttgatttgcatgaggtccatattctaaagaaccttttacagtttgcatggtggatttcaaaaatcatgatacaaaataataaaaaaaaacaatacacattcttttttagtataaagttcaattaatataacttttcttttatgtagctatcaggggtttaattaactggggacggttgttgcactatcatttgtcacattcttccaagttctgcttacgcatcttttaacattttttgcatctgatggttaattagttaaaattaggcatgcttactttatgagaaaatgacgttaaaacacatctgaggaaggctcagactataatcgtgacgaaacccataattatatgttactactgtctgttactttttcaaccctccatgatttctgcaacactttaattaacatttggcttttgaatatcagcaatgattataaatagttcactggtcttatagttgatctctcaatgctagaaaagtagcacattatatctctgcatggtgatcaatataaaacaagtttatttttttattttgatggtacaaaacattgaatgttgttgtcaaactcaaaaattggcagattgttgagatttggctaactcatcccgaagggaaatacgttccttttcgcactatcctcttcttgattgagttgttattttactatttaggatatc

SEQ ID NO: 3832 - DNA, 3358 bp, Glycine max
  Intron number 5 from transcript Glyma06g09590.2 (locus Gly ma06g09590) derived from phytozome v7.0 (chr-ID Gm06; pos 7157825 to 7161182 reverse strand)
cttttcctgataatagatcctgtggaaattgtctggtaggccactccttgaatatatgtagttgtggttgcatataaatgcttgttttcctttattgtctgaacattactgttggcacaacagtgggctgattaacatttttattttattttatttatttattttcttatgttgtttttttacttcctttaaatttttttatttagattgttgttctcccaggcatactcttttaataaaggcaacaggaaggcaagaatcatttaacaattaacactcacttttttaactaactactaactagaagcatttaattaatagggtgtacttaatgttccttaatcaataccctcgagacactgattaacaagaccctttatggatagatttatgaatatagagaacatgagagaaagtgacaaaactaaagggagagatatttgatctgaaagcagtagctaaaacttgtatggaattgaatggatgatccgagatcttaaacaatatatatagttagagccatctttctaacggtacagaatcagagaatctagcctgtgtcagttgaaacagaacccaaatagataactggactaagttgtatgcgcgtaagtagatacccactaaatgttacgcgtgccattaagtgtacatgtctatatgaaattatattcttaggatcattgatcttaaagtcatccctcatagcatgtgctggaagtttataatttttgtgatgaactctgcatttattctgttctctggtaaattctttttagcaaattatctgttgtccttggtacagtttatttttttggaaaaatttcctcttcaaactatgaattgatttgtgtgatcctgtttgagtctaccccctgctatgggagaaattaatatttctgtctcttctgtatgtcttttttggcctcattttgctcaacaaaattcacttgcaactctcattgttgctgcatgctttcgaggctccacattgtttgtgtagagccctttagattgtgtttgtttcttgaaacatataagaaatagttcctggtattgattttttttaatgaaataaagatacttttttttcctcattggtacttatgaattgcatttatattatagtatcatgctgagtttgttatatggtcctgaaattcaaaaggcattgaacatacaagtacgaacaactgtttctctgtgccacatgttgactgtaaatattgccattttgtcacaaaaagttgtaaaagggtggtcgctgggttagaggtcttgtgaaatttatctacagatggtgaggaaaggggcagtaaaaataatacaaattatggactataagtgggttcccaagcataacaacaaaaatgaaactaaaatcagaggggaattgtgattgtttgtacatattttttcatgattaaaagaataattcatcaagacaagacaagagtacgagacaagatgactacaaagatacgaccgagtcgttggggaaaagaaaatacatcaggtcaaatccaattgccacaaagtatatgtctatgccttactggtcaaccttttccccctcttatgccccttctatttgattcatctctatttatttgtatttagtctgcatgtaaatgaattcactgctaatatgtttagctgcttgtcaaattataagtatagatgccttgtttccaagcacacaatggttctaaagcttgaaacctttgttgcagctgcaatacattcaattcaatatatgtgattgtacaagtttgaaatattggaaagtgtttttgttctgccttactcatttctatgcaggaaggttacaagtgtatttcttaaaattctagtctatctttttgcattgggatttcacatcaatataattacatcatacacttgtgccttgatcattattgatgcgattagatgtcttaaattgatgaaaggctttaaaaaatgagcaaataactgtgcattttgcccctggttttactatgttcaaaatggagtgaccactgaagcagggattcgtggatcaaacaagttcaactgcttgtttttttagtaacattgcagcatgccgatcagttcgttattgggagttagtggccttgggtacttctgcattggtggttcatatattggaagttaccttgataagactgtaacatggttcattatttatactatggagtgccagttggctgggtggtagaaatcgaaagtaatgcattaaaatggtcatctcgtgaaccgaggaaacatggtcgtcaagtgatgcagtttattattgaaaactgttaagagaccatttactatttaaaatttatgctgtaaacgtatacacagttgatgtatctattattttataacagctgatgcacagttagtgcctcaatataattcaatttatatattggtgttcttgtgttatatatttgttttggctcatttttgtagatttttcattccatttgttagcatattaataatgctagaaccattacatagttaacccagtaaacttctgttctgctgatcctttgattggttctggcaaccagcttctaaattgcaaatattttgtgaatcccttttcagttctacagctggtttgcagtttaaacctgccttttgaaattaatcccatgacatggagattcaatttagagtttcttccaagctatctagcaattcttctcccctccaaaagtatcggcaagcaaggaatatgataaatggttgaatgaatatcaataactatttgtcaaggtttcataatgaaaattccactactatatgcattgctgttttgaaatattagattcttaaaaactccgcaataataagtattaaataatataaatttttcattgagctctaaccagtttttaaattagcagaggggattcattttcacatatgctaccctctttatgacaatgcatagtgctagtaagggatatagatttaatgtatacaaatcaaaggaaaatgacaattgagaagaatgatttatctttgctctgtggctgcatgcatatttttatttaaaactgtttgacaacataaggaaaacctttggtgaatcataaggctttgcttctaaactttaaaagcttctaaacatgtcaaccagatatggtcatggttatttgatattgtctagcagctggcttattgaggttctagtggtagcaacgattttggctgagtttgtatgtgctgtccataccctggggtttgttttattcattgtaagctatagaggcttactccattattttaccttttttcacttagttatcctgaaaatattgatgattttattctttaatgctaatcaggactc

SEQ ID NO: 3833 - DNA, 1330 bp, Glycine max
  Intron number 2 from transcript Glyma11g35950.1 (locus Gly ma11g35950) derived from phytozome v7.0 (chr-ID Gm11; pos 37531142 to 37532471)
agagaaactgctcctgctctttcttgcaaggtacccttttaactctttaaccatctaaatcattatttcctttttcaatttttggattattcgtatgcttattatagttttttttattttaaaattgatggatttgttatacgattgagactcaagagaaaaagagagaaaaccattaaaaaaaactcaaaattttgatccttgtttatttcattttctttcatcattacataaccttgtattgatttttttttaacacaaaggctaatggtgtctttaggcactaaattattaaagaaataaaataaaaagtatctgataaaaatacaaggcatgtttatttttttttctgttttcattttctgtttttatttttaatttacaaaattgatacattgttttaaactgtattcttagttttcaaagatttttaaggacgggaaccctgaaaaaaactttttttttttgtgttttctgtcaaacatttgaaaacaggaaatagattgaaagcaatgtgacagttttacatatcaaaagtaaaaacataaataaaaaaaggaaatgaatgcagaaataaattaagtagttgttatattaaaataaaatatttaaccaacatggggtgttagggttagaaaataaccatatagtacaaacatttgaaaacagaaaatatatcaaaaacaatgtgacagttttaccaattaaaagtaaaaacataaaataaaaaagaggaaatggatgcaaaaataaattaagtagttgttatattaaaataaaatgtttaaccaacatgctgtgttatggttggaaaataaccatacagtacaaacatttgaaaacagaaaatagattgaaaacaatgtgacagttttacaaattaaaagtaaaaacataaaatagaaaagaggaaatgcatgcagaaataaattaggtagtcgttatgttaaaataaaatgtttaaccaacatggtgtgttatggttggaaaataaccatacaccttaagcatgtggttaggagtttgatccttagatccatgtgcatgctagaacacatattgggagatattaatccattaaatagatttattttatctggaggaatcctttctgagacaaattttattagggaagacagtattattgcattagaaacccaagtgtggtaagtgtttcctttcttaataaaatcgtgttacttttggatgtttaaaatcagcactgattttaaagtttaaaacataaaaattatatagtacttaattttttaaatagttgtaaacaattcataaggtgtattaaacatgatttatccatttttgtcaggat

SEQ ID NO: 3834 - DNA, 8613 bp, Glycine max
  Intron number 18 from transcript Glyma10g12530.1 (locus Gl yma10g12530) derived from phytozome v7.0 (chr-ID Gm10; pos 13658017 to 13666629 reverse strand)
acgtaagattttttacattgtcatggatatttcttattttgtacatataatgtgtgccaaggggtgccctttatgctcaatctgtttcaatattgaagcacatggaaaagtatgaatttgttagtggtaccagtcttttttgaaccagacttatcagttatctatatatatatatggggagagagagagagaatgaagttactcttagagtaactctataaagagttttcttttaattgttttaacgagtaattcatctttgaccattagattatattagagtatgtgattgtataattttgaaaacaattttgtagtatgtttgtaagggctttcactccttcgaatttcgtctctcaatcgttcccaaactccatcgccgagatgctcgatgattcgaactatctccactgacggcagcatgtagaaccggttatcaagtcccacaaattgcagcgtttcgtcatgaatcccgtcgttctgcctcgctatctcacagaggatgatcacattgttgatcatgtgaatcctgactatgaagcttgggaagtttcggaatcagttctgttgtgcatccttggctcgaattactcctataggtttgggagaagattcatgcgtattttaatctccatacgaagtcttgtgctcgacagctgcgaacagcgatcgtgcggttttgcttgacggtaaatccatcgatgaatatttgcgtaaaatcaaaggttatgtcgatgagcttgctggtgttggagttcctgatcgccatgaggagtatgttgacgtgcttcttgaaggactcccgtccgattatgcgttgataatctctgtaattgagagcaataagcgtactccgtctatcgccgagattgaggccttgctttacggtcataaaactcgtcttgctcgctacagtaaagaagctcgggtgcttaattctccgtctttgaactacactcaaggctattcgcataaaaattcctacaaatctggtcatcctggtggttctcgaggattgtatggccgtggcaatggtcgtggcggttttcctgatcgcagtgctggacgcagtggtggtggctctggtagaggtggtggtggccattttgccaactttcattgtcaaatttgtctcaagtacgggtctaaatgcattgattggggccctaaaccttttaaggtttatgatggatggttaatgaacaagcaatttcaaaaggtagtgagggattgttggttagattatcagcctatggggtggggtggttatgctttaaaatgcaagcttcagcatcttaaacagaggctgaaaatctggagtaaagacaacataggagacctgtgcagcaaagtcaaacagcttcaacagaaactaaatgacttggagaattctatgccagctcaaccttctgaacaacaagtcaaggagctcaagaaaacccaagctgacctttgggaaaaagctactatgcaggagtctattgtgaggcagaaatcaagatgcagatggatcaaagagggggacaacaacacatcctattttcatagagttattaatttgaggaggaggagaaatgctttgagggggatgcagattggtgacacctgggtggaaaatcctaacattataaaggctgaaatccttcatcattttcagaacaggttcaatgagcctcacttgagcagacctaacctggatggggtttcgtttaaaagtctgacttctactcagagagaaattatgattgaaccttttaaagaggaagagataaggtgtgctgtgtgggcctgtggcaatgacaaaagcccagggccagatggttttaatttcagatttattaagcacttttggaaggaattgaagcctgaattcctaagatttatagcagaattccatgtgaatgcttctttccccaagggtctcaattcctctttcattgctcttatccctaagattaaggaccctcaatccttcaatgatttcatacccatctccctcattggatgtgtctacaaaatcattgctaaactactggctaacagactcagcaaggtcatgaaccacctcattgatgaaaggcaaacagcctttgtgaagggtagacagctgctccatggtgttttaattgccaatgaggtggttgaggaggctaggaggtctaagaggccttgcatggtgttcaaagtggactttgaaaaagcttacgactcagtgtcttggcaatttctgttttatatgatgggaagaatggggttccatgatagatggattggttggattaaggggtgcctcacatcagcctctatatctattcttgtgaatggaagccctacctctgaatttaagcctcaaagaggcttgagacaagggaaccctttggcccccttattgtttgtcttggtggctgaaggcttgacaggaatgatgagagaagcttcaatcaaaaactgctttcaaagtttcttggtggggaagcataggatcccagtgaacatcctccaatttgctgatgatactatattttttggagaagcttctatggataatgtcaaagctgtgaaggccattcttagaagctatgagatggtttcaggcttgagaattaactttgcaaagagccactttggagcaattggccaatctgaagaatggtgttgttctgctgctgattaccttaattgtgccatgcttcaattccccttttgctacctagggttgcctataggcattaatctgagaagaaagatggtgtgggagcctatcattagaaagtttgaggctaggttgaacaagtggaatcaaaggagcatctctatggctggaagaatcacccttatcaatgctgttttaacagcattacccttgttttacttgtctttttacagggctccctcagcagtgattaatagattaaatgctattcaaagacattttctgtggggtgacaattctgaaggaaagaagattgcttggatagcttggagtcatgtatgttcatctagagaaaggggaggtttgggtattaaagatatcaaggccctcaacaatgctcttttaattaaatggaaatggttgatgttccagcaaagtgatcagctatggagccgtattctgaattctaaatacagaggctggagaggcttggaaggggggccaccaaagcctaatttctctcattggtggtctgacttgagatccattaaccagcatgggtgtatggctgaggtttctaagcagtttatttggaggctgggaagaggtgatcaaattctgttctgggaggactattggatggatggggggatggctcttaaagataaatatccagagctatatcgtatctccttgcaaaaacagcatacagtagcagagatgggctctttctgtgaatcggggtgggaatggaaattctcttggaggcgcaatctgtttgacaatgaaatggggatagcctcagattttattgatcagactgctgtcatcaatttaaatgttttgtcaaaggatagctgggtgtggggagctgcttcttatgggatattctcttctaaatctgcttatctttgcattaaagctgagcagtcaactgaagatcatcagcttggtttctgccagctgtgggatactaaaattcctcctagagccttaacctttgcgtggagattgctttgggataggcttcctactaaggagaacctatccaggagacatgttgatcttgccaatgacttatgccccttctgtcaaagcaattctgaatctgcttcccatctgtttttcacttatcaaaaagttctgcctttgtggtgggaatttaacacctgggttaaggaggatagagctcttcactgcaggcccatggatcatttccttcagcaatcttccatagcaggttcgaaggcttcgaatacaagaaggaaaatttggtggatagcagctacacggtccatatggaagctccaaaatgatgtgatctttcataatcagcctttccacatttctaagttggtggataacactaacttcctcacttggtcctggctgagggggtgggaaaaggacttcaatgccccttttcatcaatggtcctcagccatgcctatggcctttatttagtttgtggtctgctgggttaagggttatgggggattcttgtagggcatttgtgttctgtatttttggactcatgttcctggagacattatctccttcttatcatgtagtacccctggtactattatttgattaatatatatattatctttgcagttaaaaaaaaacattgcaagtgtttgccactttcggtctgacacgagtttttagcctcatgaatcactcacctttgatcttgccacacttcaaccagttccctactcctctggttttgccagggcttccaatacctggattaatcccaattccaattccaaagttgctgttccagcatccaagctatgcttaccatttcctcctctcatgggaatggttctgctagctccacttggatttcagactctggagctagcttccatgtgactggtgaatcacagaatatcaagcagttcactcactttgatggacctgatcaaattttcataggcaatggtgaagctttgagtatctctggttcccgctgcttccctcaactttttccattccctttgttactcttttcaacaaggatcctgattttcaattccttgaaacctttggctgtgcctgttttcccttgttgaggccttatcatacccacaaactcaattttcgatctcaagagtgtctatttttgggatattcctcctcccacaaaggctataaatgtctgtctttatttggaagaatctatgtttccaaagatgttctgtttaatgagttgaggttcccttattttgacctgtttccttcctcttctaactccatcaagagtcttgattcctatttcagtctaaatcctaacctgtctccaccttttgtagtttgtgtgcctcaatcttctcagctttctccttctcattctctttttgcaccccttgctccccctattcctatccatttgcctacaacctctcttcttgtgtctcatccatccacttcttctgagtctacatctattcatcctcaaacttcagagtccacaacccttagtgcaccctcttttgactctgtttcagcacctaattctatactagttaatactcacctatgcaaacaagatccatgtctggaattcacaatcctagactacatccttctttatttcttactcattctgaacctaaaactgtgaaacaggccctgaaaaatgcagattgacttgctaccatgcaacaagagtatgatgctttgctgaaaaacaaaacttgggacttagttcccttaccttctaatagacagactactgggtgtaagtgggttttcagagtaaaggaaaatgctgatggttccatcaacaagttcaaagcaaggttggtagccaagggttttcatcaaattcatggctttgactttcatgagacattttctcctgtggtcaagcctgtcaccattcatattgttctcactcttgcactgtcacatgggtgggaattatttcagcttgatgtgaataatgcttttctaaatgggcttcttgaagaatctgtatttgacatagcctcctggttttgaagttgcagataaatccctagtctgcaagctcaacaaagctctctatggcttaaaacaggctggctccatggcagtgttctgataggctgaaatctactcttcttcaatttagatttgtggggagcaaatgtgacacttcccttttcatcttcaggcaacaggtgcatattgtctatcttttagtctatgtggatgatatcatcatcacgagcagttctacttctcttattcagcagctcacaaccaaactatacactgctttctctctcaagcaacttggtcatttggattattttttgggccttagagatcaagtatctacctaataactctatactgatgactcagagtaaatatgttcgtgatttactccacaaaactcacatggttgaagctcattccatttcttcccctatagtctctaattgcaagctatctcgacatggtgctgatatttttcatgatccaactctatacagattagtggttggtgccttacaatatgctactcttactagacctgaaattagctttgctgtcaataaagtttgtcaatttatggctgcatctctagactcccattgggcagtagtgaaatgaatcttaaggtatctcaagggtactttgtttcatggactacttctttagcctgctcttgttacaaaacccttggttcttcgcgcgttctgtgatgctgactgggcatctgatgtggatgacaggcattctacctcaggggctgccatctttcttggcccaaacttaatatcttggtggtcttgcaaacaaaaggtcacatccaagtccaacactgaagctgagtattgtagtttatctcaaacttccactagttaacatgtattcaagctcgagttgcaagctcccttcactactcctgttctttttttgtgataattagagtgccgtatccattgcttacaatcctgtgtttcacagtcgtaccaaacacgtggaaattgatgtcttcttcgtaagagaaaaattctggcaaagcagcattcaattgtgcatatcccagctctagatcagtgggctgatgtgctgaccaagcccctttcttcagcaagatttgaagttctcggggacaaactcaatgtgaagagtgtttcttctgaaaactcttccccttgagtttgagtggggtattagagtatgtgattgtataattgtgaaaacatttttgtagtatgtttggaagggctgttagcttttgctaacaacacccctctagtgttagacaactggtaatatgtttgtaagggctgttagcttttgctaacagctcctcactaatattaggcagtcagtttctgttattgttagttcagaggttcagatgtctatatatacctctgttgtaactaactctaactaacttttcagattgaaataatatcagtttcctttctctctaattttctgtctttctctcactttctcgaatagattagaagaaaatgaagggtgatgataagtaactcttcttgagttattctttgggttaacttatcccttcttttgaagtcaaatagctaaaaagtgagatataagcttcaaaacaaagatccaaatcataacagccactagaacaacaaaatattggctgctcaaattcagcagtatagccccccagcaagctattcttgcgattcatggtgccattcaagcaccaaaacaatttactcaacgattttgttaggatataagaagggagagctagttaagatagttagactattaatgaattagttagttagtgagaggggtttattagatataaataggggaagaaggataggagagggggagattttttgtcattgtaaattgagcattagctctttgtgaaaggagaaatcctttgtgaaggggaaacccttggaggagagttttctctcctattttctatttttttcttactagtcaataaaatcctttcttttctttctcaattcaattcttggttcctaacagatttgcatcgtcagctgcactatttgaatcaaatcatatagtattgtgaattgtactgtgctggtagcaatgcttgacaaatctccattcaaatattgttttctttggagaatatttcacctcttcttgatgagcctgttgctattcttttgttgttttcatacatgataagttaattttaatgtggaagtgtttaaacagcatgaaacaacgccttaataggctgataccatatgtcaaagtgacaccacggtactggtttatatagactgaggtgaatactgatgatagctgaatgctggattatcttcttacaacatcacctacactgtttatgtttaaagaaaacatagaataggaggatagctgtttgacagaacaagtgatgtctgaagtcagctcctctcttagcttcagatatgaatttaatggtttttgtttgatctaaacatcataaaagctttatgtagggtttcattgtaggtttaatgagtttatgaaatgacttgcccatgaggtaaactaactctatcttaattaacaagtatgacaacataaagtattagagaagctgcagtggtttctggtgatcccatggaaaattattattttaattttcatggtgaaatcttgaaatgtggacaacttatgtattcctggtgaaagtttaagccaaactaacacgagcagtgactttatttgcatctggtgtttatataaaatcttaagctttccctttatggtctgctagaagcctagaacttaattcagggaaggtgttttttttggcagctatgaatttctcaataattttttttggtgaagtttctcaataatgattaagacttgatttgtatatatgtgtggctggttaatcctatttgcttatttttggcttccccccctcccccccagcttgaatactttccaccttgctggtcgaggtgaaa

SEQ ID NO: 3835 - DNA, 1238 bp, Glycine max
  Intron number 2 from transcript Glyma03g14770.2 (locus Gly ma03g14770) derived from phytozome v7.0 (chr-ID Gm03; pos 18945999 to 18947236)
tttctctgggccaaatcagctgcaattctcaacaggtaatactttagactaattagattattttgtatacacttgagttggatcttcttgtgtgttctattttcaattctgaaacgtattagaatgtcgaagcttttatagatcattgatacttcaaattcagattgtttgttctaatatgaaattgttatgtctttatagtattcttttaaaattatatggtccaaggctatttgtttgaaagataaatgctggcatgattaagtggttgaaattttgtaacatgtatattgtaacttagctactgtagttttaagtatgaagaattgtttgaaaacttgatgctctgtgcactatggtaatgtatgtttgttactttgtttagactaaaatgtgcataacacttttgtgtgttgatgttcaggatttacttttcttgtacattggagggataacagtttatcagcagttgtgaatgtgcctattgaaaactaattatcattaatcattcttgagagccctaaaatttaggccctgctcttgagggagattttgtgataatttgattcattaaatctgcatttacagttgcaagttttgatccaataagatacttttgttggagaagtttgtttctgctgtatatttattgcatgttttgaagctgagtgatagaaggtacataaaactttgatcagtgctctgatgaaattgagccttgtcctcagtgttgacacctgtttgtaatgcagaggatgtgatgcctacgttttaagtgtcctgatcttacatccatttatttacagttcgtttttggtgctgaagagggatagttaccttatttgtatctcaattcctatatagaaaaaatattccttaaactaataatgtccagttaacaatacattggctacacgtggatgagttggcttgatggaaatatgtaatatagtgtatcatttcaaagtctaggttggtctgttaatcattatgctttaagattttctgggaattgttgcttcttgattgataccttcccttgaataacatgttgtaatttagacacctcacagtattcatcattcttaacatgccatcatgttcagtaatttgcatctgtaaattttcagtagtgtttaatggtttatggtgtatcaacaaaatgtataaaaacaagttaacggtttttttttcttttgacagacctgctccacctctaccacagttgcatctctcag

SEQ ID NO: 3836 - DNA, 1578 bp, Glycine max
  Intron number 20 from transcript Glyma09g00460.2 (locus Gl yma09g00460) derived from phytozome v7.0 (chr-ID Gm09; pos 178294 to 179871 reverse strand)
ggagatacattaggattggaaacaagtatttcagtgtaagtgcaaataaccttctcaatgattcgatagaacaagtttcttcttattgtgcaattggacatagtagatagatagccctttttgaccaaccttgaattatgctgcttgtgttgattaatggtattgatttgagcaaattcatggatgttgtccttccgcgttacaacttccattatctgctcatgtagcaatctgctaaactaatataatttccatgtgaatttgtctctatttgtatttcatctttgcttgttttttctgatgagatcttcattagcacattttttataagaatgcccttgataagagtagtgtattaatattagggtttgacaattaattcaagagaatttgataagaaatgaatttgagagattttctatcatattgttcgatcaattcttgtaagcaagttgggcattttggatatctatggaccaacttgatgggggtgtcaaagttgttaagttattttagaatataataattctagaacccttagaagagaaaaacaatatttcttactattgattgacaagaattatatgagagagttatatatgtagagatagctaggagaaatcctgaccactctgattaccaaataaatacaagaatgagatggagagaaaataagggagaatcaaataagtttagatttgaataatctaagtctaatctttatcttaactacctaaatcttctagaataattatttgaaataaaaaataaaagcacgtgcaactgttgacaccccagcaagttggtgctaagatgtccaaatgcccaacttaaaaaataaagaattcaaagtcatgtctaaacaatccttttgcaataatgcttgccacttactgtgaagtacgaatatttttcatgccagttaggctttcatccaccttctattttataaaatgtctgtagtttctacatgcttggttcgggtattttgaattggattttgggaaatactaattgcatccttgttatcacagtacaacttcataggaagagtcataagaagttgtaaatcttctagaatttttttaagccttagaattccacaaactccttgtgccattgccttatattcaacctttgcactactatctacaacattttgttttttttctcctccatgtaaccgaattttcccaaacaaatgtacactagccagatgtttactttgatcaataatggatccaacccagtcaacatctatgaacaacttaaatgccttgctgcccaattttcttcaacaacaatccttgtggtatgccacctgcgattctgcatctcttcttccaccttaataaatagttgtacaatgttgttccttgtccaattttagggtttatgggtgatattgtcatatgaagtattaatcaagacataaacaatagcagcatgcatgatgtgatgaaaatgtccttcatacagctgtatgcactacttgtagagaacaatatttcttttgcttaattttggggatttgattgtttgacctctctctctctcaattcaccagtcgcttggggg

SEQ ID NO: 3837 - DNA, 2677 bp, Glycine max
  Intron number 3 from transcript Glyma19g43200.1 (locus Gly ma19g43200) derived from phytozome v7.0 (chr-ID Gm19; pos 48922994 to 48925670)
ggcatcctgattactgtatctcagcatattcatctgtaagtgactttaatctcaagtcttcttggatttcaagatgttattgctgacagaccgcttagtgctattgtgctttaatgatgttactttttgttaattgttgacaacttagtactaatgcataatactgtactgattttattgctgtgattgatgaaaccttgtgacacaccacattctactttaatattctagattgttaaatttaaaggcaaatgctaactagtgtccttagggtataggttaaagaaccaaaagtagaaagtttatattgatcactgtagcatttaatgttaccgttgcattgaaattgcgatttccaaaaaaaattatatttaataattccttaaagggcactggttagtaggacccaaatttaaaaggcactgaagttgctagagagcttccaattcaatgctattaattttttttgcctttttggtttttgagaaaatataagctttatgttataatagggtaatatttttccccccaaaacaatactttaatgtaagctgctggtcaagttgattatatcttatatctactagaaagcattctttattttgagattcaccattgatgaaaaatctttccaagctcatatataatttcaattataccctatattgatcttgccagaaacatttgctgcagtagaacttacggcaaacaagtttaaggaaagttgacagcatgtatttcctgactaatagaaacctagtatcttattaggaagaaatagggataaaccccaattaaaagattgaacactgcagtactttgagagtctgcacctccaatgccctaatggccctgattttctctaaaaaatgacaagatgaactccttttttcctcttctcttcatttcatacatgtgataaccttcactaattgtaactaactaatgggttatctaacaatactcctccccttccccaaccccccaagacattgaccttgtcctcaaggtgaagggttgggtaaacgccaacaattgtctgtcttttttcctctcagcaagagatgtagtaacaactgttggtcaaaccgtattaatattcaagtagaaatagttcaatgtatcgtcggaaatagtgttatcttaatttctctcttggttgccttttttaattttgtaatctccatgactgtaaattgaaacattactgctgggtgaaagactcactcaagttaattaaaaaattctccctatttcttatttctcacaataacataagttggttttatcagtgagttagccccttttttcttgattgcaacccagaaaagagccatttgtgttgtctctgtcactatgattcttgatctctagaacttaatttttgcttctgcttttgtccagataatttttgggttgctattgttagatttctccaaaatcttgtagttttctcatatttgtttcttgcccttgagttgctatttctgttctctccaaaccttcatcttgtgttctgttttcttgcacccaagaatttcatgctcacatcttcccatgaccacactcgataatcaaaataatactctggttgaaaacttttgaccggtgccgtcactaatgtcgaccaggttgcattcaggttgtattgtttccatgttggccaccagtcaagagatcacctcttagagcctttgctgcctttgatggcctctcctcctcacacattccaatggattcaatgtacagctcaagctggatcaaccaccaataagcctgctctccatcattggaatcttcttcaagattcaatactcagctccaaagttggagctctgatacgagttcatagaaacctggtattgtgttaggaaaaagagtaaattacacaaacctcccccgaggtttaagaaaattacatacgtctcccctcaatttttaaaacctacacaaacctcctttaaggtttaaggaaattacatatggctccccttagattttagaagttacacaaatcccctaaatgccttccaaacatttgatcgtagtaagtcatgtgtgttgcacatgacatttaatgagtattttttccaaaaatgttcttgtcttcctccttcaagtatgggacaattttgattaaaaaaaataggttgcagaaacctacaagccaaatgaacaccaccgtgagcaatggaaccattgaaccaacttcattccagcaaaccgataagccaaatgaacaattatgggtttcagaaaccaaatgaaattacaccaaccaagccatcaatgatccagcgcacaaaatcacctgaaccaactccataccaacaataataacattaaatctggatatattttaaaaacagaggggaggtgtgtaattttcttaaacctcaaggtaggttcgtgtaatttactctaggaagaaatagggataaaaccaaattataagactgaaaactgcagaatttcaagggtctactccttccaatgccttaaggccccaattttctcgcaaaatgacaagacaatctccatttatctcttccgttctatttatacatgtgataccctttactaattgtaactaattaactactgattgttattgactaactaatgggttatctaacattgacccttttgtaggtggacataaagcggggtattgaag

SEQ ID NO: 3838 - DNA, 994 bp, Glycine max
  Intron number 2 from transcript Glyma15g06180.2 (locus Gly ma15g06180) derived from phytozome v7.0 (chr-ID Gm15; pos 4370144 to 4371137)
ttcgaagatctcaacgttacaaacacgctttggaggtttcaccctttccattagagtataataacacaggattgtagtttaacaactttttagctccacgagttctgcaaagtttattatagttctgtgatggtgaattagggataattttcacaaatggctaagatcaggtagaagaacaaaaatatctgtagaaggccacccagcagattatgcaaatgcaagcttttagatctttttctgttttaacaaattagagcatgttactgaatttccacgagtggttattatcatgattaagagtaaattatactgacatcgccgtgggtttttcgaaattcacactgataccctcttcttttttcgggcaataacccctcttaattgtttgaaatacattaccttgatatccctgttactccagaaaacacattaactttgtactcatgtaaagggttttttttttgtaaagttaaaacttaaaaaggaaaaagtttcgtgtgactttcgaagaagtcacaagggatgtgagcaaaatttgctctatattattaatagtttttgtaaggttcagaagaagaaagaaagatcttaaggtagttcggtttgcttatttctgtagtgcctataactgttggaatgagggtcctttgatgttttcaatactgagttaggcctttgggaaattaggccatctcaacactatagaagtttcgtgaagttaatatatttgaataatgttattcggatgtttgaatatattctgcatggttttatatatattagtttttgcctccaacaaactacaaatctctatcaattcggaatacttccattggctcctcggttatatcacagttttgtttattttctagtgataaggttgcatccaacttggaccactttattatgatttatgaatactgctctctttttctgttggatctatagctttgcaatttgtgactattgataattgcagatatcagagtgg

SEQ ID NO: 3839 - DNA, 646 bp, Glycine max
  Intron number 11 from transcript Glyma07g01940.1 (locus Gl yma07g01940) derived from phytozome v7.0 (chr-ID Gm07; pos 1332612 to 1333257 reverse strand)
ctattacaggtgaggatgctaagaaatttctattaatttcctttaaatttataaaataaaataaaattctggataatcaaatatgtttattttgttgctgtacaaattttttgtacaaggacacaggtcaagctcatattattatactgtaaatatccagtacataatttttgctgcattgttttttctttgcattagtagttgagcacatgttctattgaataaaacaaaatcttgtcatccaaattttcactaatagtgagtggtgatcaccaaatgccttgtaaataaaatattgatgaacatacctgataagaaccttgggagaaccacacaacaaaagctagctggtgtagttggatagctcaaaggccttataaaccccatactagaatcccatacttccaatgtgggactcaagtcccataccttgcaattagatcctaacaatgatctatttgctatattattattgttaatgccctttgcttgttctgctgttctcctaaaacaaagcatctcctagagaatttgtcaaactgaaaaatggtttcagttgcagatatccaattgtttatatcgatttttaggtcttaacattatcctgatatttgactgttgccatgtgccatttctcttgtccaga

SEQ ID NO: 3840 - DNA, 2597 bp, Glycine max
  Intron number 1 from transcript Glyma19g00980.1 (locus Gly ma19g00980) derived from phytozome v7.0 (chr-ID Gm19; pos 649442 to 652038 reverse strand)
aggttactctcttcgagtcaccgttgacaacccaggtaaatctcccattctcctcatcaaacaataaacacttgttcaatcaaaatttagtgtaaaaataacaaactgtttcttaaaagaatttacaataactcgtgtcttattcaatcaacttaaaagatgataaaataagttgaaagaacttatgctaagattatacttaagttacttttttgaacctcaatagattcttccaaatatatccttattttgcttaagtcagttaagtgtatatatgttgttggggtgttgagaaaattatgattttctttctgggtagattcaaggtgtgaacgagggaggaactttgactctttgaatagtgatggtatgcaagttggtggtgattctagttttcttgttaaattacggtttgaaacagaggtttaactgggtaggtgtgatagaaacaggggagggagagaaagaaattcagtatgcatttgctatataaattcaatgctttttttaatttgttcaaaaggtactaggtatattccaaaattttgttaccaaaaataattggtttatagtctgtttttttttttttttttgaaaggggtttatagtcagttagtcacctcctattttgatttttacacccaatgaaggaaattacttttcattaatcattagattcattattcatttggtaaaggcttgttgtaagctggtgtaaattatattaattgttgttacattaaatttaacttatgaaatccgtttgataatttttttttagtttattaaacatcaacttttattattctgcggccgcacatgcgagagttccgtgcactactaggactttttggggattgaatcaacaacttgtgagatgtatttttgttaaatatatatatttttactgatttaattttatgcgtttttttttattaaattaaaataaaataaaataagtttaaataaaatttacgtaataacaataagaaagacgatgttaattaacgtttttttgttggaaaattgtgcatgtggatgattcgtttcggtgtgttttgttgtttccgtacgtgataaacaatgtgcgatagaaaattatgcatagttggcaatttgatgtccatctttattgagcaaatccaatcaaatatttaatgttatatatatatatatatatatatatatatatatatatatatatatatatatatatatatatataagatgtcaacttcgtttttatatatgatgatataccatgacgttaccatattgattggtctagtgtgcaattttgaataaggaatttgtcttatatgccaaagagccgactcaacaatgttccaaagttaaataaataaaaatagccgactcaatataatactgttaaacttaccaaagtttctatgatcttggtttaatttaattatatacccagtatctttatatttgtagtttattatggcgtgattacgagtttcgtgtacgctcacaaacaaaaagagtgcggcaagaagttgaaataaagcaccatgttctttttccatcaaaaagaaaaataacatgttatttttcctcgattaatttatagagaaaattacgtttatatccttggagtttaataagaatttactaataaataatattttttatgctaaataaagctttctttagttatataataataataataataataataataataataatattaacacattacaaattatattaatctcgcggcatctatattaaatctccacagtccaccataattggatatctcttgagatatacacacgtgtgttttgtgtgtgtgtgttttttttaaaaataataatcagatttccttacatcccttgggtaaagaagctgattaatgtttattgcaaaaaaaaagacctatagatttactaataaatacattttttatgctatttaatacctttcttaagttatataataatgttaacgcttaataatctaccagtatataatttgctatgcattatctatactaaaaaacaataaactttttttttgttataaacatcactagttatgaatagaattggtagatgtatcatatttgtaacatagttaattaattaaataaagaaacgaacacccaaattaaaagtgtagttgagtaacaagaggtgaattgaaaggtgtgagtatgtaaattttataccatatttaacttctaatagtaaacacaataattgcattacttaacagtacaagcttatgtgcaattctatttttttttcctttctttttcttgtgtaacttgaagagtgctaatatgttctagaacatagagagtaagtggttatgacctggcttttatgctgaatgtttgtgttgtccctccaaaatgacgtagttttgattaaaaaacgaccttgttttaaaagtacaacttttaatacaacgtcattttagagatttttaatacgacgtcattttggaggaacaacacaaaaacaacaccaaaagaatcaggcaagagaaaccaaattcgacttatgaatggtgcatggttatttatttgacttgttgcagaggacatagagaagctgagggaa

SEQ ID NO: 3841 - DNA, 2496 bp, Glycine max
  Intron number 6 from transcript Glyma15g13580.1 (locus Gly ma15g13580) derived from phytozome v7.0 (chr-ID Gm15; pos 10187185 to 10189680 reverse strand)
ttcaagtaagttgaaaacttcttaattattttatttagaaacatctttcttgccttactgtatcaatatcacattgaactgttcagtgcaaatgattattgcagaactgatgctagaatgtagggttttaatgaattttccagtagcttcatttttgaattattaagaatttaagatttttagtgcattaaatgattggccaactaaaagcaagagtagtactgttaaaattgcaattaaatcttgaattttgtggatgatcagtatgcccaataagcaaagaagggtaatgaattgaagtttctaaaataatattagccttagcaatacattaaggcactgtgaaaaaccagaagtgtgttctttattattcatttgtattggaaaaaatgttggtgcttctttttagagtggtgcgtatttgattttgagtgcaagtgctgtcagtgtgtagttagtgcatatggcatgtcttggaagaaggcactggctagcagtgaaatggattctgtggttcttgaggtgtatctccaatgttggttggtggtactatttggactattattttgcaattgatttggataggtcatctctggcttgttatctatttaatcttatagttgtgctgttagtttgtgatagaacaccaattgacatcaataataaaatataatattgaacactaaaatcgcgcaatacagcaatacacttgctgtcccagagacaaaaagcccctattatataaatatggctatacacttgctgtcccagagacagaagtctcctacagggagtattctctgtccgcaaacttaaaataacttcacacacctgattacacaacctactatcagatttatactcctaatacataactactggaagttattttctacacaactgccatcctgcagtttctaaaacaaaattaactactagcatttattttctacacgtaactgtcatctttgagtttctaacccacaactgatttctagcagttattttctacacatgtctgtccctgattatcagttcctatcagtttgaaggcaacctagctagataaacttgtattgtctccaagcggcaatacaagtaggctacttatctgacagcagtggtataatgagtgaattttggtggtttctgaaaaagaaagcagtgttttgttacaaccaagtagattatcacaagaggaccaagcgtatttgatattgctgtttgggatattgtatcacaggggactattgcagaaagttacacataactgccataattgttcctgattatcagttcctatcagtttgaaggcaacctagctagctaaacttgtattgtctccaagcggcaatacaagtaggctacgttttctgacaccaatggcataatgagtgaattttggtggtttctgaaaaagaaagcagtgttttgttataagcaagtagattatcacaagaggaccaagcacatttgatatcgctgtttgggatattgtgtcacgggactatttcagaaagttacttctcatgaaaacccaaaaggtatgatgatcaaagctggtccggtcagcaactttaggtattgcttgggtttggttagaatttgcagaattattcagttgtgcccttcaagggaaaataatggaaatcctagttgcttcattgttgatgatgaggatacaagcaaatggattgaataattataactggctttaacttagtttttggtttgtgacttgacatctgtctgacctggcaagccagcattgcaatctgacacagaattttgaaggagcttatgtggtcttgaagaaagggacctagatgtttgtgtgcatgtgtataatgcaaatgtaaattcagtattaggttaggtctggagtgtgttgggaaatttcgtttatgatgggtgttttgtattgagattagggtttgagtgttgggtggctacaaacacatttgtaatcttaggtaattttctttgttttgcttggccattgcttcattgtaagtttaaccagattatattaaatgtctttttctcttattctccattgcacttatgataataactatcagaatagatgttcagcttgtgaattataaaattccctacagattttccctgctcttgccgtctttaaaatagatcaactacaaaacaaatgtgtgatgtgtgtattacatgtgaatttgaaagatatcctacagaattctgactcccatcctgtcgtggcttttatatttagctcaacaaaataaaaaggtgtgatatgtgttggaattggaagtgtggatattaaaggaagttacttgatggaacattttgatgaatatttcctagtattattatatattctagtaaaggactgaagggctgcttattttcattgttgtgttaagcatccattgggttgcacttatcagtttgctgatgtgttgtccttatggctatccaggctcaccaggaaattgtgaagaaactagttgagtt

SEQ ID NO: 3842 - DNA, 1690 bp, Glycine max
  Intron number 2 from transcript Glyma02g42470.1 (locus Gly ma02g42470) derived from phytozome v7.0 (chr-ID Gm02; pos 47511153 to 47512842 reverse strand)
cttttattgtcaatattggagaccaaattcaggtgaatactctccctctcaattatcctaatggaattaatgtttggctacaaattcatgatacatgcatctgtcacatggaggggacatgtcaagttgaggcgttattttttttattttttattttaagttttatccttcgtcagatttttggatggatgtggccagaccatttcaatgtttctacccacatgcatgtgatctcatttagggttttactttgatgaaaaaataaattataactaatgatataaaatagttatacattaatatttaattacagatcttcaaactattatatttaatattttaaaactcatattaataatagttttttattaattgtgtaaaattttacgacttatacttaactcttattttatttatttatttattcgggaaagaacaatatattaattatattttcttagtttacatccgacatcagattacttcaagcgaaggattacgtgtggattattatttggttagttttcctgactgtagttttttctaatggaaataaagttattagtataattatttttaaatacactaatagagtaaaatatattgcactactaatatgatgtaatgatgatatgtatgttagtttgttatattaataaaactatttgttattataactgtcaacagaaactattaataaatgttttattataaattagtagtaaaataattttcattagtgatagtttgattgaaacttgaaagagatctttattataaagaatgttcttttcagtgtcgcagaatcagcgcgcacacttaaaaaatggataaacatttggcctgttggccacagcattaaggataagatcgttcttttatattggcatgacatttctgaacaaatgatttcatgcctccctaagtttgtgactgatactctatccttcatagtggtcgtgaccaatcataccctcatcatataaagctatgatcaatgatctaccaattataactagtacataattgcatcttttgacaatgttcaaaagaccaaacattgcacctagtaaaatattatttctatcatgacttataagatgaaatatctagattatgttgactactaaaacaaggttagagcacgctccaataaataattgagacttcaactaaaagattaattactgtttagattcctataatctatccttgtttagattctaattaaaaaattcaaaaagacagtacattgattaaattcttatgaagtgtgaactatgtcaaaatgaaataaacacctaatgactacatgacgttattatttctatcgtgactgaaaaaaaaatgacagaatagggtaccaactaccgcacgattagtgatggtttttaaaacgttggttagtcatggtgcaaatgacactgatcatattgctaagatcattattaccaaaaagaaatgcatcttattcattcttaacggggactgcattgcgtgcatatatatatttgctcaagcaatggcgtggtacgacattaacgtaaatctttgcccccgattttaagtttgcatgacgacgttacttccaattgaaattcatcgttagatctttagtagccattatcaatctgaaaatagtactaatttaatttatttaattttgtgtttgacaattaggttctaagca

SEQ ID NO: 3843 - DNA, 2359 bp, Glycine max
  Intron number 4 from transcript Glyma02g02590.1 (locus Gly ma02g02590) derived from phytozome v7.0 (chr-ID Gm02; pos 1918526 to 1920884 reverse strand)
tggcaaagtcaattactgctggtgatcctttatttgtaggccatatttactctgtatgccctgatcaaggtttgtgtctggtcttgatcttggaatgtggccacctgctctccttcaaaacccatttttaacaaaaaaacagaaaggctaagttccattttaattttctgtatttaaggaccacattcatttggcctacttcaattgtgtgttgggaaccaaatttatattatgaaagagtcagtccaggtgttagagtcaagcaccacctatttttgtacattgttctcgtttcttaatttagaaggtaaaattcatataaatggtccacttttctgtcttgaaactaggaacttaaattgaagcattttgaaagttggatctttttctttctttctttcttttttttttttttttaaagtttttgttatggtgaaagttagggatgatatagttctagttagaaagtttagagaggaaataaatcggaaattagagatgtggagacaaactttggaagctcatgactttttgttaattagaagtatgataaagtatatgaaatgcaaatttagcaagaggtgctacaaccatagctttgaggtgaaagttggagaaaatatcttaccactagtcacagaattttagtatctagggcccatcactccattatacagaatggtggagaagtagggatgtaaatcatagcattcaagcaatgccttgcgtgctatctacaacaaaaagatacttcttcagcttaaacaaaaaattgtgtacacaactataagacctgggaagttgtatagaattgaatgttgggcagtaaaaagccaacaagattacaagtgaagaaactcaatccagtacaaatgagaatgttgcattagatgagtggataaaccagagaaaaataggattaggaatgaatgcattagagaaaagtggggtaccagtaccacctatgatagaaaaggtgatagaaacttgctttaggtagtttgggcacatgtggagaagacctatagaagaatccctagtaaggagagtaaatcagataaaggtaaccctggcactatagctagaggaagactgagaaaagttgtaggtgaaaccattttgaaggatttagaggttaatagtttgtctatagacatgatttctgataacaaactatggtgctgtttgattcatgttgccaaccctacttaaaacatttcatcgttgttttttgttgtgtaccctgtttcttttttggtcactattctgcatctattagtttgttttttgttggataaattactattctgcatactgtataatttctttacaatgttgttttcatccatactatggaaataattaagatacggttttgtaatcaattatttgtaatgaataatgtgcagattagagaataaaatctgtagtttgggttggcatgcttactttattaagattgtctgttgccactaaacttggagacataattatgtttatggcctctttggtgttcagcccatagttgtgtttttacacctttttcttgtatctaggttttttcttggatgatatcttgtcctcactctagttgtatttccctcttctctgtaatgaaaatttctttcttccataaaataatccatacaaatacatagtttgttcttactttattaagactagaaataaattttagtgaaccaaggcatgcaagaatgcagttcaattcacttgctgttcttgttatggctagtgaaacatggagaatcttttagttagaatgtaacttgttagtgcatttggatgaggttatggaatgggtttattgtatgttctgctttgattcagtgtttaacagtatagacatctgaatctttatattttctctggattatatggatcataaaaattttatacgtatatgatgcttggacctgctattgtggagtatatttattatgtaattacatcatcattggcctatctagtacatatcctttaaaactggggatttgttgcttcaaactgtcttctggatgctttcaccttagtctcttcttttcattgaacatttccttttattaaatatctcttagtggtgtttgccttgcctctttaatgcctttgaaggcatttgtgaatttttgctagcaaagtcctagttgatcaagaaatgctttctatataacttcttgacttctgggcttttttatgattgggaaatctaattatctcaattactcagattattgatctaactctgctttcctgtgtggaaggatgcaggttgttttacaggtgaatgttggtgttaattttcttagagatccttgtatagaaattcttcaatttgaaaagc

SEQ ID NO: 3844 - DNA, 7629 bp, Glycine max
  Intron number 9 from transcript Glyma01g14800.1 (locus Gly ma01g14800) derived from phytozome v7.0 (chr-ID Gm01; pos 18364215 to 18371843)
gacgggtaattgggtaagtattgattagtcattcttattttatttgctgtaaatattatctttccttcaagataaatttatgtatacatgcatgtacgcaccccagttttttcagttgggttgcacaaatttgagccaaaatgcattgctacccatgttatagtttagaatcatgaaatttgtccagaaaccattgagttgctaaaacaccatagttctggcaggcattgcctgtgtatctgatcaaattgtacgacttgaatcacaagaagtataatttaaagagaaatgttatttgtacaataattcataaaatagtttttacaacaatacttttttgtgtttatctctctcctacacatcatttcttacatgtcataatcatggtagtcaaaatcacgagttggagcgtaagatcgtacgcttttacgattttctttaacccgtacgcatccgtgtctggtatagatcttatttttgccagatcgtgctggattgctgtggaagatcgatgcttgcagctgcacggtgcttgtttgcaaattcctatttggcttgaatgtgggtcaggattgtgacctggtataaaaacccggaaatttgcagcccaaaaaaccctagcggcccacctccttcctcctattctgagtggtttttactatgcccccttttcccttaaaaccaaacactccacccaaacacaaaaattactgcccacttttacccaaaattttactgtgctccattttcccttcctaaaacaaaaactaccgctccaattcccccaatttcttcccttaatttccttttactcctctcaatttcttctcacaaaaacgagactcccttcacttactcctctgtttctctctttccaatttcagcacccacgatccctttcactttctcccctgttttctctttcatgcatcagcacccacaatactcttcctagttctctcttcttttttttttcagttcagcacttcctctcatctctttcagcactcttctgttcccactcatctgtttgtagctaggaaaggcatattgtgattttccagggcaatccttttgactcatccaaagtgatggatgatgctttactcctagcatggtcctggctaaaagttagagagaaagatttcaatactccttttaaccattggtcttccaatcttgcgaagtcttttggttaatctgggttgggtatctttatcttatgtggtggggtcctgattgggttttttctttgtttttggagggtggcaccataggtgtcttgtatttgtttatatttcaccagtacctctggtactgctgtgtttcttattaataatatatattttctgccttccaaaaaaaaaaggaaaggcatattgttttgaaaccaggatgggaatgggaatgggattgctgttttgtaactagatggggttactatatgattacatatatatgattatatatgcatattgtactgttttttttttgcacctgatgttgaattgaagtttaattatgtctttcaagtgtcatattctgattcattttagtttatatatgcacacatatatgattttaggtgcatatatatgaatttcataattttgtaggatcttactatctgtgttatgatttcccaattacgatccttactccccttcccgatcttgagtaaaatcatgattttgactaccttggtcataattagggagagagatagacccaaaaaataatgttgtatgtgcatcacatctctaatttaaatatatattgtgttgacaatatcacagaccagcttacaagttatctgattatgtggatctcttcttgacaaactgtgaactcttctggagaacttagcttctaacatcttacatgtttgaactgtgaactcttcttgacaaactatgggagtattattcttttttttagaatagaggactttgaaacgttacttattttttgttcttttttcatgtgctcattaagatcagaaaaaagttattcttttttcatgttctttttttagaatagagtactttgaaacctttacttatttcccttgacagatatgtccctgtgtataaacattccaagtttcaaactgattagtgccctcttagcttctttgtggtgcttgtctaatggctgcgctatttttgagggatttgttggtttggatttttggaaaatggcaagctgtgctcacttgatgttgattttctatttttcttgtgtctgaatattttttaacacatgcagatcactctcgtatttcttgtactttctttgccatgtataaataggttttctaaactgatgtttatctgaagcagtaaattagtaaggttttagggctactaaaaatattgcatgctttcaatttgtttcggccatagttactgggttcacaatattctttagttcacggtatggatgcaaccttacaaagtattggtacataaggggtatactagaacttaaaaaatatgttaataatagaatttttcgatcacaacttaatcaatggattttttttatcagtcggaattgaagacatgtattggggggtttacaacaactcacacactggtcaaccaattgagctagaccccctgagttgttaatcaatggattgtttcattttacaattatctaaaaaaataagttaaattatttgtatgagtaactttatcattttttaaattaaaatcttaattatatatgtaaatgaaagaaaagtgctgcacagctgtacaacaccattacacaactataactctgcagttaaaaataaaaatcatttcagcttccatttcccatcttttcttttcctttgcctagcgactgccctgctattataattctaacagaatcataagaaagatattttgagagaaaagagagaatcaacagagaatgaaaaatgatattaagccacttcacagtgtagtacagtctggtatttatagacctgaaaagttagttataacaactaactaactcataactaacttctaagtaactcccattaactaagagtgcagttgaatactgcaactctctgtacattgctctagtaccccccctcaaactcaaggtggttgagactttgaagaagcctcaacattagtttggtcctcagaaaagcagatctggtgggagacagtggcttggtaagtgcatctgcccgttgatcaagagcctggacatgctgaactataagctgcttggtcaaaaccttcgcacgaacaaagaaaagatcaagctccatatgctttgtttttgcatggaagactagattgtgagcaatggcaactgcactttgattgtcacaggatacaataggagtgctgaatggaacttttagttcagttaagagtgtctgagtccatgagatttttgcagtgatctgagctaagctacgatattctgcctcagtgctggatctggcaacaacttgctgcttacaggaccaccaagatatgagatgagggccaagataaactgcagccacagaagttaatcttctgtcatcaacatgagattcccagtcagcatcacagagaactctaataaaataggattgacccaagatagccggtctgagatgaagaccatgtaaaacagttccctttaagtaccttaggattctttttacagcaacccagtgagattctaagagattggccatgaattggcaaaccttgttgactgaatagcttaattcaggtctagtgataattaagtattggaaagcacctatcacagatctgtatagagtggggtcagaaaacagatccgagccaattttggtgagtttgcagctggaagccataggagatgagatagattgtgcctctgtcatgcaagttttctgcagcaaatctccaatatatttactctgagtgagtaatatagacttgtcaggaactgttttaacttcaattccaagaaaataatccaaagagccaagctgtttgaaagagaatttggaatttagttgagaagtgagatgctgaattagagcatctcacttctcaggcattattagttgtcatcaggagatgccgaagtgagatgctgaatttagttgagaagtgagatgctgaaaataatccaaagagccaagctgtttgatagacttgtcaggcccttgttcataaagcacttgatcatcctaaatggcaacaagccatgattgttgaaatggaggctcttgaacacagtggtacatggcaattggttcctcttcctcttgggaagaagacagttggttgtagatgggtatatgttattaaagttggtcctaatggtgaagttgatcatcttaaggctcgattagtagccaaaggatatacctagatatatggtgttgactatggtgatactttctctcctatgaccaaaatcactactattcagctcttttgtgccatggctgccattagtcattggcccttacatcagctagatattaaaaaggcctttcttcatggtgaactagatgaggagatttacatggagcatcctcttgagtttgttgctcaggggggatctggtctagtttgtaagcttcgttggtccctctacaagctcaaacaatctccacgaacatggtttggaaaattcagttatgttcacagttttgcgctgaaacaaaatgaagcatgtcattcaattttttattgccatacatctcctggaaaatgtgtctatcttgtttatgtggatgatatagtcatcacaggaaatgataatgctaagatttcctaactgaatgaatacttgtctagtcattttcagattaaagaccttgggagtcttaaatactttctgggtattgaggtagctcaatcaaatgaaggtattgtggtttttcaaaggatgtatgctcttgatattttagaagaaacaggcatgacaaatttgttaggaagtcccatatcgcctgcctcagttcttagggtgcagcttatatatctgttggacaacttcacttagtgccaattggttttaagttgaaatctaataaaattgaagacccattgatagtcctatggacccgaatcaaaagttaatggcagaccaaggtgaaccacactcagatctaggaagatacagaaaactagttggaaaactcatttatctcgcaattacaagaccaggcatctccttttcagttactgtggttagtcaattcatgttggctcctcatcttgatcattggaaggctgtgacttgcattctcaagtacattaaaaaaggctccaggacaaggattgttataggaggacaaaggaaatacccaaatatttgggaattgtgatgttgattgggttggatgccctataaacagaaggtccactactggatattgtgtatccattggaagcaatattatctcttggaagggcaagaaactaaacactattgcacttgtgagttggtttggatcaaacaacttcttcaagagttgaagttttgtaaagttaaacaaatgaagttgtattgtgaccaccgttgtcaaatagtggctatcgcagcactatcacgctatagtgtagcgggttttgtagaaaacgcaatcgcaacggtgtcacgttgcgaactccatgtaaatcacaatcaccggcgccttacgcgtcgtggaaccacgttgggttgcagctgttaagtcgtcaattaccaacgaggaagaatccagagagaaactgcatcaacggcgacagcgacggcgcgtttagggttcatcgtgctgactgctgaaagaggaaactgggtcggagcggatgcagaatcgggtcagtgtagattgcagttgctttgggcttgcaaaatgcacactaggacccaacagtagtcacttattgactttgttaaaagttaaaactcattttactttttactctattctttttaccttttacttatggacttgggaacagtagcattttaacttcagtctacttctacttcacctaagttttttccagaacattctagaacctctcatttcctctgattcttaatttccacgtagccttcttcatccagcctctgtttttttacaggtaaggtaacaaaaaaattttctttcttttgtttaatagttctttctcttcctctgttttttctttcttcttcatccagcattttaacttcttcctctgttttcttgatgctggggcaggggcagagcagaatgaatggatgttttcttgatggttttagcttttttttattatatgctttattgagacttgtttagctaattagcttttagcttttttgattatttgcctcactaggacttgtttagctaattagctttcagctatttatagcattttttgattatatgggaaaggggcagaggagaatgaacttacatagagcatgcttttttttatacatatttaattgttatatatattctatttcaaccgctatgcaacttccgctgtttggccgcgacgctatccgctataatctatagcagattttcagcttttcgtgatccgctgttgacaacactgattgtgacaaccatggagctcttcacattgcttccaatcgagtgtttcatgaaagaaccaaacatatagattgtcactttgttaggaagaaactgttgtccaaggagattagtactgaatttgttggctcaaattgtcagcttgcagataatttgaccaaatctgtgaaaggatcttggatccagttcatatgttccaagcttggagcatacaatttgtatgctccagcttgaggtggaatgttagatttatgtatgtagttttttatattttgatgtcttttctctctgttgtagttatctgtcatttagagacagtgtgtattttgactcttaatatataaatacatttcagctttgtgtgggtgagacacacaagtattattatcaaatatatcttagtctcaactgagtcatttgtttatggtgttttactcatgaacatatgatcatatatatgttattgttgggaatggtttcgggatgcactctaactatgataaacctctacaagtttattatagaaggaagaaagggtccaatataggatataaagggacaaatacttataattgactaggtcttttttgtaactgattaagagtgttatatctgttattagtttgttatttagcttttgataggaatctgttacagtttgttattaggtttgttaggaagaatgtattcctttgtatagtccctctgttgtagatgggaggggatctttttggaaaatcattttaactgagagttccagtgagaaaaggagagtgtgctccttttgggggtaaacatgtttaccttggttctattgtgttcttagttctttgttcaataaacaggaagtttcagtattctattcttttgtgaggaaaagttttctttgttaggatttcagtcttccaatctcagaaagagattcctaacagttatcatgtcataaattttttttactgttcgatttggaagaagatagttgtggttgcactgcttccctaatccccatttatttcttaatgatatatattgtattcaatgtgtttgcaggtatattgaaccacttcctgcagggtcatcaacta

SEQ ID NO: 3845 - DNA, 974 bp, Glycine max
  Intron number 6 from transcript Glyma04g24410.2 (locus Gly ma04g24410) derived from phytozome v7.0 (chr-ID Gm04; pos 28053000 to 28053973 reverse strand)
tggacacctgccaagcctctactcttttttcccaggtctcgttgattttgcatttttatcattctttaaaaatcctatgccgattcttatgaaataacagtttgtgatcttgattcttgagtgttcattgtccagaattaatcaacattgaagtgcatattggagtacagttctactctgtacatatttttttctgttacctttacagcagtagtacagcagtagttcagtacatactctgaaattcaattgtgcaaaatgttagttttagagttgatatctgtccaagtttaatgcatactgtgttcctcattagatttattttcttaaatgatgttcttgcccttgatggaatggtcatattttctatcattggtaaaacagtgcctgggtaatcaggggcggagctacttgtgttctaagggggccaaaatttttagatttcattattttatatctataatttttattcaaaaaaaaaaattatgaaagagttttattaaaaaaaaattcagtcaattttccttctgaattattgtccttctgtataaatgatggttactttgctttctgtcatgagcatttttgtggcaattacataattttgatgaaaggagatttacaactttctatactgagggttgtgatttttgcttcatccccatgctataacatataccttcataactaattgtataacatatttttcttccaattaaacatcatatctcgaactacaaagaatatgagtttgaacagtctgctttttgttttttgttacttccccttccctaggtcatgccaagccagtctgtttcaatttccacctggaatttataattgcttattatgtgataataagaaattatttttttctgtctagctgattattcttccctaagttttgttactgattgctctttttccgagcattggcagcttcattcaccaggtgttttggcaattggaagtag

SEQ ID NO: 3846 - DNA, 774 bp, Glycine max
  Intron number 6 from transcript Glyma16g02900.1 (locus Gly ma16g02900) derived from phytozome v7.0 (chr-ID Gm16; pos 2479960 to 2480733 reverse strand)
tgtcaacaataaccttggccgtagtgtcagcaaaggtctgttggtctcaaaatttggatttggctcattttatatgtccgtgttactatttttcagattataatttggaccaagttcattttgttttggatctgtccctgctgctagtttttaatgcaacaataatatgaactttataaagtttgaagaattaagacacatgggacaatggactatggttgccatctatggataaacatgaatgtctttcatgatgtagtgtagtctccttacctttttgtttttcctatcatatataaatttatgctatagatttgtaatgaaaaatgcataaaattcaagcagatacttatacatgtctcataatgttatgatgaccatcgatgtttccctacatgaccatggtagtttacttccaactatatgcctttggagtcactctcatgggttcttgttccatagatggttagaaaatctggacacaatatatagaagattggtactgtatttgtttgtagcttccaataattattgtacacattttggattttagaattgaacaaaaaaaaaaccttcagtgtgtttatctaatcataaccaacgatgagagtatgacaaaattttatgcattctgtggaagttaaactggatttatatttgtttgttattagtttccttaactattttttatacatttgtcttgtttgctaactctgcatatatgatacacgtaaaccaggtaatttctttaggatacgcagtgcctttgcgttt

SEQ ID NO: 3847 - DNA, 808 bp, Glycine max
  Intron number 21 from transcript Glyma20g31490.2 (locus Gl yma20g31490) derived from phytozome v7.0 (chr-ID Gm20; pos 40110273 to 40111080 reverse strand)
ggtatgaattagctcccttattcttttagtttgcttgcctattgtatttattgtagtatatttttggttttgtagttgatgaaaatttgtattctttgcactgttatctgtttgtaaaggtggatgacaattaccacataatgagttttggaacatatgtaggcattcatgtatgccaatcgcaagtgcagtgagttttgtcatttaagttttaaatgagttattttgttagctgaattgttggagcctttggatgtgtatacattacagtgaatcaaggacatgaattgagaaatgaatgtagcttatccatcatctttgcaaagccttgcattaaacaaaccaaaaaaaaaaaaatggtgcccttttattcgatcgatcaaatctatagttatgttcttgtgaaatcttgatttatacatgtctggttcagattcttcaatccacatataattttccgttctagtagcataaactactctatcacttgataatttcttttcttccgtaaatttataattaatgtaatcgtgaattataatataataactcttggattctaatttgatgcttgacgagattattattattattattattattattatcatatattggatgattgttttgatattcatatttctgtatttgcattctcgcgattttataatttttataaattttaactaatgcttactttgataattttgcagcttttaagaaaatatgttggtttagtggaacttctcattttctttccttttttttttcagactctcatttcttttcctaaatcacccattaaagc

SEQ ID NO: 3848 - DNA, 2862 bp, Glycine max
  Intron number 1 from transcript Glyma13g26930.1 (locus Gly ma13g26930) derived from phytozome v7.0 (chr-ID Gm13; pos 30125424 to 30128285 reverse strand)
tttgattggaacgacgaagaggttagtcaattttgtccctttttcccccatttttagatcgtagtttgtttgtaattgtagtaaacttggtatatatttatttattttttggtttgttagatgtatatgttttttttactaaacgtgcctagattactttgattggatatatatatatatatatatatatatatatatatatatatatatatatatattttaaatttctcgagggtgtatttttggtggtttgagaattgactatgaaatgattataagaaattgaaattatgatgaagatgttgccttgtgttgcttcctgtttatcctttcgctgtgaaaattaaatatttttgggagctttgacgaagggttggtctcatttgttgtgttgtgtcttagaggttcaaatctgaggtagaatgaaagagaaaaacactttgctgccttctttagttatttagatgttcagagaattctttgtgaataacatctttaggagaggaggataaggatagtttatgtgataaaggggaaatttggttgatggtctaaagtagatgaggggatgaggaatggactgtggacttgatccagtaagcagtgttttggaaaaatgatattccaatctcaaaatatttcattgagagaacatgcaaagggaagttgggaattgcgttatggttggattgtgagttagacattctgtttatttaagagaagtgggaaggggaattagccttttttgttttggttcaaaagggagggaagggatattaaaaattaatttagttttatattcttgcaattttaaatttcaaaatatatgtgtagatgttttagtcaatgcaactataatgttttaatctcccctcccctctaaaaccactaatattggaggggagaaaaaattggacatggagcaatttttctccactccattcccgcccctcctgaagattgaaccaaacaacaaaacattataaaaatccctcccctcccttccatttcccccaactaaacaataggtaagagtatagtcactgccagatacctttaaatgaagtttggaattaatgaggagtaatggaggtggaaggtggtcaagatttgtattttgtagtgcctagaaatgataataagaaaaatcaacgctatttttgttgatacattttgggaaagctggtggctgcacttggattcatgattttttgtgattccacacaataaggaggcatgggaaaagagtggatcaattatattgtagcaagggagatgtgaagatgttatggtttcttcctatggtatattattggttcctattcacaaagtagttgggggggggggggggggggtgaggactgaaaaagttagatatgaaaaccttctggtgtacacattgttagaatcttttttgttgcactgatgattgcaatcttggagttagggttgattgagttttcccatattgtctattgactggatttaaatatttactacacttgtcatagtgcacataaatgaaaggaattgatgtcacacatggattggggtaaaacaataagaatttatagttttaagtattagttcctacatgtgatttccatgatctgcaatattttgttctctccttttttgtgtttattgttcattacttgtgatgatcatgggtactacagtccaatttgtgactgcatattccctttccattctactttgataaggcagaaattatactttattttgttatgaggggcaaaggaatatttgatgcatggagtgacacttttaataaattcacattgtaattgatgcctcgagagaaagaagaaaataaaattttgggtgctaagatggggagaagtatcgaagataggaggtttgttttaatcaaggtgtaataaaatatattgaaaagtgttataggattaagtagtttgttatttggttgatgtgtgttagcaatgttatcaattgtggattacggtccatgttggaaagccaaaattttgttgtttactcttgcaaatggtgttgcaagcaaatagtggaagcatagtggatgaattaaaaataagtataatctatatgaaaatataaaaagaatctgctaaatatacataataaaaactaacaacatataaaaaattacaaaattagaaatatactcttagaagttttatcaaagtctcatcataacattagcataaaatctcaacacaacactgaaaaagataaaaaaatacaaaactaaaaatatcgtagaagtgagaaggaaaggatgaagggggaaaaaagacaaatcaagaaaaaaaaaaacagaaaaggagaaaaaagggatggtgacaaaaattgaataaaataacaaaaaataaaaatagaaaaaaggagaaaaaaattgtgaaaaagaaaaaagaaggaaagaaagataaaaaaaagaggagagaaaaaagttggtgagaaaaactgaattaaaaaatagacaaaaaacaagaaatatagagaagatataaagaagagatggtgaggaaaaaaatagcaaatgaagaagaatagagagaaaaaaaaaggatagaagaggttttgccagagttagaatatctggcgggttgtagagggagaagatgagtggcaatcatcttttgaaattctttaaaagaaaatttaaaggataaaagagggtccatgttttccataaactgccaggcacaaaaggtaaaatggcaaagtattagtatttacccgtgtctataaatgtccctactgctagcatctgaagtgtttatttttcttgttgggttttgcctcatcaatattaattatatgttttacaatggattgttttcagctcgctaacatagt

SEQ ID NO: 3849 - DNA, 4416 bp, Glycine max
  Intron number 12 from transcript Glyma10g44540.1 (locus Gl yma10g44540) derived from phytozome v7.0 (chr-ID Gm10; pos 50862876 to 50867291 reverse strand)
ttgttccaggaactgctttaggaaaacttgttcaggtaccactaccaagttgcatttagaaatatcacgtacaatgtgattatgatatttactgtgtgcttgtgagtttgagagagagagacctttatggaaaacccttattgaatttatagaagtgaataatcccttacctatattttagaagtgaatgtatcctcatactaaaactactaacactggtgcaagatggagcataaatgataatgatgcctaacttcttgtcactaatagtattctgtacagcattatgggtttttttttctcacattagtacattaccatcaagatttattttgactgcaaagacccacttgcagcctatagcatatttgtgttaaggtaatggaaccaaaagacaggtctcatttctctccagagccaccttttccatctgcacactctcaccacccatcacgggcaagagcctctgaagcttcactcttggcaagatagagtccatgaaaacagtaaagtactaataggatggagacacatggtgtaagacacaacaacaacaataataatataaaataaaaatgagatcaagtaattctatactatcaattatcaaacggaagtcctcaagttgtgggaagacgggaatttatagctctcaatacaagcaaaacctaaaaacaaagtaataaccaaaataggtaacaaacaaggttagagatatcctcatccttgactaacatgagagagagagagagtgatgtgtagagagatatgagagagagagagagagaggagagtcagagagagatacaaagagaggttgagggaacacaacagagcatgggtgagaaagggaccaagtcacaactatgacgggaaatggtacagtcagcgagcagcatggaaaggagcagcaaggcaaagggatgtggaaattagtaactggagggatgcaacagacgtccactccttctacttcacacgatttccggaggaaatgggggagaaggatatgtggctgaagtttaagacatggggagatgtgcgagagattttcattgcaaagcacaaaaacaggaatgaacggcggtacggttttgtgcatttcaaaggagttgaggatgtgaagcttcttgaacaatagctagacagcatggttatcggtggccttaaactccatgctatcctccctaagcacggaaggcagaggacgacagctgggaaatctaactcgaagggaggtgcaaaataaggtgggcatgaataggagtagaacaggcatgggtggttaggaacatagcaagaatgacatggtattcaacacaggggatgcacgaatatcgaatcaatatccacaccaaaggacaaagtcaaggtcgtacgcgaaggtagtggtgacaggcaatagaagtgtggggaggagagagttccaggggtacaagcatcaaacatcaataacatctcactcatcactgcagttgagcatacccatggaacaggtgaaacgtttctataacacctgggttgggagactgaggaaattgtcggtgctcaatagattagaagataagctcatgtgggagacaagacaggagttaagccaaactatcttggggatgacatggtcctagtggtacaggcctagaagtggaagatgtaccttgaaggggtacaggcctaatgggacagccaaaagctgactggacaggatcctagtatctgcagaatggcttaataaatggcagggtagaagatggcaggctagacaggatcctagtatctcacaattaatgggaactgcaaacacaatatgctaagaggacttcttgtcgatgtttgttggatagaagatcccaacaggatcaaagaagaggcccgtcaagacttcttgttgatggttgttggatagaagatcccaacaggatcaaagaagaggtccatcagttctttaggaagagatttgaggaaagtgaggaggtgaggccgaggctagatggggtaatttttcaggtaattgcacaaaatcaaaatgatttcctgatagatcgttttcatgagaaggaagtaaaagatgcatcatagaaacaatctgattttccaaggaagtcctttcgacccctataaagtcatggatcatgccatttaccttctttggtcctggttcaaggctatagataaagattttaataccagcttcatccactggtcttccaatatttcgaagtcctttggatagttttgatgggtttccttaatctcatgttttaggatgggctttttggagggcagcactctggtgctttgtatgtatctctagtaccactggtactagtttttctattaataatatatatatcttttgccttccaaaaaaaaaaaagatgcagtgtgggaatgtgggagagataaatgccccaaaccggatggattaaacttcaaatttatgaaggagttctgggatgtaattaaacctgaggtgcttagattcttggacgagttctatgtaaatggcagattttcgaaggaaacaaatgcttcgttcctagcactaatccccaaagtacaggatccacagaacctcaatcagtacagacctatatccctgatagactacatctacaagattgtggctaaattgctaacaagaagattgaagaggtgctgccaaatgttattgatgagcgacaaactgcctctattgaaggcagacacatgctacatagtgtaggacattgctaatgaagcggtggaggaagtgaaaagaggttctaagagctgcttggtgttcaaagtcgactatgagaagccatatgattcagttagttgggattttctggtctacatgctttggaggatggggttttgtcctaagtggatcacttggattgaaggatgtcttagatcagcctctatctccatattgatcaatgggagcccttcagctgaattcattccccaaaaaggacttagacaaagggatccattagcccccttctgtttaatattgtggcaaagggtttaacgggcctaatgagagaaactttgcaaaagaatcagtttaagggactcttggttagaagaaatcaggttgaaattagtatcatgcagtatacagatgataccattttctttggggaagcatcgatagaaaatgtgagagttatcaaggtgatgctaaggagctttgagatgatgtcaggtttaaaaataaactttgcaaaaacacagtttagggtgattggaatgccattgcattggacgaagaatgttgcaacctaccttagctgcagcctgctgtctataccttttacctacttgggtatcccgatcggggcaaacccaagaagtagtgtgactgaggatcctattgtcaaaaaatgtgagcgtaaattggtaaagtggaaacaaaagcatatatcatttgggggaagggtgactttgataaagtcagtcccaaactcaattcctatttactttctttcatttttcaagatctcgaagaaggtggtacataagctggtgaaactacagagatggttcttgtggggtggagatacagagcagaagaagatcgcagggattagctgggaatcagcatgtctatagaaggagaaaagaggtctgggaatcagagatttaggagaaaaaaggtctgggaatcagagatttgaccaagtttaattgtgctcttcttgaaaaatggaggtggaatctgtttcatcatcaaggagagttatgggctagagtgctggattcaaaatatggtgggtggaggaaccggaatgagaatagaaggaattccgtagaatctgtctggtggaaagatcttaactctatatgccacagctttggggaggaaatctcgttcaaatctggaataaaatggagcgtgggttctggttcaaaggttaggttttaggaagatgggtggaaggatgatgggatccctctgatgataaagtaccctagactttacctgaattcgaacctaaaaaaccattacattcaacagttagggagcagttcaggtggagcctaggagtggttcctgcagtggaggtgagagatacctatgggtgccaattttttgtgaaaggatttgacatacctttctactattggtccagcaatatcagagagggctttgtaataagggggaattaggattaggtgctgagatgatctatgtaacctatacagtctgagttttggtttcttaatttgctgaatagtttgtattagggaaccaaacctctgcatgggagactaatgtgtgtacatataacagtaccccttgtgctgctttatcatattaatatatactactatttttgcggataaaaaaaaatcttgactaacatgaatttggatttctttgacctaggttgaaaaaattgttcctggttcactaccatcatc

SEQ ID NO: 3850 - DNA, 1498 bp, Glycine max
  Intron number 2 from transcript Glyma20g35950.1 (locus Gly ma20g35950) derived from phytozome v7.0 (chr-ID Gm20; pos 44147061 to 44148558 reverse strand)
tgatttcaaaggcctttcaggttaacactattctcagccttaacttctaaattctgttctgaattcatttgatctgtttactacctttctaccatgatcaaacaagataaccaatctgctatcatataatatgattggatttggaggaatttcagtttacttccaattcattgttttaataagtgtaaattaaaatcacctctgtttccaattcattgtgaagttgaaactcctcgtatagttgctgtttagttcctgttttctttttgggcttttcagacccgttcaataaataaaaaaaatcacttctatttctaaaactaaaacaaaactttttcttattttataaatatgttactcttaagcccatatcttttatttttgtgtaacattgataaaaatattcttactatatattttgtttcattacgatgcatatcccctgcatttgttaaacatttgacaaaactccttttattttttaaatggattacaattatttttttttctactaataagtcgaaataattaaattctcaaatgaaaaattttaaaacaacatttgagtaatttaaaagaataaataatacgattaactatcattccagatgcaaaataaaaaaaaagatcactttcaaagttttgtaataaaaatttaataaaaacttaatcatgagttattaataagatggaattctgatttctactaaaagtaaagccatattttattgatttagttattattcacatgcttaagcttttattgaattttatcgcaatgtttttcaaacaacccttttttattgataattgtgtcattaatatatttttattaattactttcttatatattttaatgttatcttaaaaaaagtatcatttaaatattgataaattttaaaaattgtagagataattaaagaaaatttgttaattgtatttagaaataaaaggtttagattcaaatgtatgtaagaaggtttttgtataggttttaatataaatagaaggttaaattacatttggttcctatgataatttttatctttttagtttctacagtttgaaagtgatctttttagttttatattttaattttcttttagtccctatcgtgttctttttagtctctatagtttacatttaattctctttcctgtaatttgaaaattataggaattaaaaatgtaagaatatagagactaaaaagatcactttcaaaactaagggactaaaacgagaattaaaatataaactataaggactaaaaataacactttcaaactatatgaaaagtaagaatcatgaaattataggaaccaaatgagtttaacctttaagaatgatttttaaaaataaagaatagaaaatggtcgggttaatttactttttgtgtgtgtgcgagagaaaactactatttcacaaatatttggggaaacttggtgatttgaatttgatttcaggggaaaagtggacgggcttttctgtttactcgtgc

SEQ ID NO: 3851 - DNA, 3283 bp, Glycine max
  Intron number 8 from transcript Glyma09g37720.1 (locus Gly ma09g37720) derived from phytozome v7.0 (chr-ID Gm09; pos 43231530 to 43234812)
gctctgtggggattatcagtctcggaaactaacaggtacttttaagagttcagtttatatcttatcccaatcccaatgatattgctccctgaatcttattcttaagactttttttgaaactcttatcgtatatgatggagtattggggtaggccatttttgtactaaagatgatatttctcttttataactgattgattacattatttcagaattcagagtgtagtattattagtttttggatttagatgagtttattgtattggtcttttgctttcttgtgttccctttcattattttatctcctttttttggttcctgaggattctttgtaggtcctttccttatttttcttgcttcctttttgacaaatccttttttcttttctttttatttataaaaataaaaaagatatttagttttgaatcttttcacctgctttcataattccaatatttgttatcctatctccattcttattttgaacttaaatctttatgatgagccattgaggaaatttgaaaatcttagaataggctttctaccactttttttttccttccttttccttttaatttaatttttactctttttcgaccttattgcaatatcttctatgattatctaattccaaatctctctcttccattcccttcagctaattccatatagacataggtttaattattaatatccttttttctgatagaattttggttatttgtgtggggaatgctggtgtttatgtaattgcatattattttagacttctcagtgttatgggttcagacttatcctgtaattttgtcttttttattcctcctcattaattcatcataataacttagtctggagtcaaaatctagcataaatcatttattcacttaaatgaaaatatggaattaatgacatgagtgcaaggcatgaagggaatgcattggaatcacatcagacagtcaagtgccattgattcttctgatatcttaaatgtggtatacatgcagtggaaaagccaagtttatgagtgttgctaggcttttagtggtggttgattgttgttccgttgtggcacaacagggaacaactctatggggatctgtaactgtgtaaacttagtctttattcagttgactttttaggaggggagggtgatttttctgcttggattcttttggaatgttgggatcttattcaattaaaattggtgcattttcttttgtaagtgctaatgtcagttgattcaagtttcatttttgaaatggaattgtaattcaactactgaagagaaagaaagtatttagttatttaacctctttaggaaatggaacattctgggtggagattgcgtttgttggactgagtgctaatctctaggctaaagctataatcaaggtgcaacttttttctacttaagtgcatttgttctagtgctttaatcaatcagacttccaccaacctctgccttgtcaatgcagaatactggcaaagttactcatccccctccccttcagagaacttgcctctggcagttttgtgcctttctagaaattgaagtcacgacctttgattcttataccatttgtttgattgatcgcttacagaaggttagtgggaaaattaatggcttagctaagtctgaagaatgaaggaaaaatattgagggttacatgagaagcatatgtatgggacaatgttatcaaaattacgaattttacttgtaaaatcacacgatcctgagttttggatggcttctgtgctcgattcagtgtgggatcgctgtggagtggatcgtactaggatcggcaagcaaattcactgagttgaagacccgcgacattgtaggttgggcaacccagtgcagagaaaacccattttcgtggtttagccctaacaagcatttccctttatgcaaagtttctcttctcccactcagccaactgattcgtgtcacctctactttgccacacagcatgacatactccgttctttctctacattctctgtttgagtttaacacgcctcttgttttgatttttctttctccccatttccaacctttccctctcggattgcttttagttgtgtgtcttgtttctttttctttcctttttttagggttggtttctaatcctctctctaggataattttggtttatgtggatcatattgatctggttgtgtctaaaactcacattgggcacgttctgggcctttgaaataaagcctctgattttggtttctacctgcccctctttctgctttttttttcttcttattttttcctttataatcattaaaaaaaactagtgtaccccagggcccagaggctcctcgcctttataatcattattaaatattaaattgaattaagatattaatagtatgatcaagctatcaaaggaaactaaataatatgattaaactgctaaggaaactaaattaaaataaggaaacaagaaactaagtagttaattatgctgctttagcggcaatttgcagggtgtggttgcagattagcaacaagcatggcatggcgcaaaacggtagtgcggtgcaagtttgttgtcgtggttgaagcagccgtgtttttgcagataaactgagggccatgggcataagtggtcgtgattccaaagaggcgtcaattttatttttttttttacttttctagcgaggcagaaatgttctgcaacttctggcaaggtagagatgttctgcaattctgacgatgcagaaagagctaaagagaaagtgagagattagggtttcttgtgattttggtgagacagaaagagtcggagagaaagattaggcaaaaggagttttctgaaagaagatggtggctgatgggagaaagagaaagaaacaagggtttctcactttattttactttttgggtcagagtgggtattgggcctaaatcttagattggccactcatttattatactattgtaaaaacataaagtactctataaaatttaaaaatatagaaaaaatatttatacataaataaaaaatataataattaaatgaaatgcatataagtagaaataaaataaaataagaataaaaattgttctgaaacattcttacttgcaatgcatgattttgtttcttttctttgactaatatatggatttgaatttggtaaaagaaagttgtcattccatgatatcattatctttttacactagattatacttattttttttttattaatgttggtttttgttttttgtttgcttagtgttgccattggacgagaaggaggtgttgcacctc

SEQ ID NO: 3852 - DNA, 2960 bp, Glycine max
  Intron number 2 from transcript Glyma03g00620.1 (locus Gly ma03g00620) derived from phytozome v7.0 (chr-ID Gm03; pos 345118 to 348077)
cagtccgagttgccactcgggacggcattcatttcgtaagcccccccctaaccttcgtatccataatccattgtgcacattgttttttttttcatcattttttttttatttttctcgctgctaaattagttataagttttaattttagtttaatatggtcgatgaaaatgagttttaattgcctgcgtttaaattctggtgaagtccattgggaattatgtcatagatggtaaatattttaagacatgcttataataataaattagcttaattctacctttgcatgattgctacacattctgcatggactcaagaagtatcatttgcttcgcccactgcaaaatcaatgataatgaacttgcacttgcacttttagaaaataaaaaatagtacatgtttggtttcagttttataaatgttcacatgttaagtttgatgttaaacaaattattctcgttctagaaatgattttgagtcgggacaactttacattattatcgtattcgatcgataacaaattttgtactaaattctctattaccatttatccaaacacatacttttggataagactcaacatccatcttattttggggtagatttgggtgataaagagtttgaaataagaaagatatatatatatatatatatatatatatatatatatatatatatatatatatatatatatatatatatatatatatatatatatataatgatataacaaaaaaagaagaaagatagaaagaaaatgaagcacaaatgaaataaggagaaaatgagtagataatattttagttttaacttatgccctgaatattccttgttgctgtttcgtacccatgtttttacatgcaaggtgttttaagaataattaagaaatagggtttacatcattagatgagctgattacctcttttgatcgatctcatcttttgctcatttttaaagttgatatgtcaaatttcaaaaatgttttcttttctcctttgaattaggtatgaaatgactaaagtagaaaaagagtgggctcggtttattcagcttcgctgttatgttttggattaatagcaaaattgtttcttttttaatgtttgggattagtagtaagattatgccaagactaaagtaaaatcaatactcaattaaaaaagtggcatactcaattcacggtttattcagcttcgttgttatttcacaatccctaagctagaaagaggcatagtttgtaattaactttgatggtgttaaaggagttactagtactacttacccatgaataggacagacaatgatctttgatcaaaaagcacatgctgccgctacccatgatatttaggattccaagctttgaaatcataacttcttgtattccacaccatcatgaccatcatagtgggagacaaattaattaatttcctcttaccactgcaatcatcccgcacccaatttaacataaagtgattcacagctatctattaggatgaaaaacagtgaataatttctcttttccaaatgttctttctatgtattatgtttcaccgtaaaattcaataatgaatataattaacagattaaatttatataaaagaacttaactttaattatcgcagaatatatttctaaaaaatgataaattttaagtgtgcaagttattaaagttgttgttaatgaaaaaaatttaaaattaaagaagcccaaatcccttttttttatttttctgataaaaatctaataaattgtggtactttggtggatggatcttggaccacaatttggtactctagagactatgcctcatgacttgaggcagtcaaaagatgtttaaaagaaaaagaggcacacagcttaggaactttacctgtcactgtgcatgcagaaacccactttttcagggatttgttaatttataaccccacacaacacaaccactctctctctctccaacaaccaagagccttgttgcttgcctgtgcaggtagtactgcactactgcagctacatccatgcgggttgtggcttgagaaagacattgccttcattcattatgtttctggaaagaacatctccaattttgttgtagaaaatgtatattcattttagacttgatccactattaacacacttcatccccttcaaattgtttattgtttaaaatcatgtacacacttttaaatattatgaattgcactaattagtattgataaaataatattttttaactaaaatatccttattaataaagttaaaatgtataataacaaaaggtaccttttctttttaaaatacttccttagtttttaacttgatttttttaaaagctttttttttaacttgatgtgttaggaaacagactaaaattatcgggtaattaaaaaaagagtgtatttcaaagaaatttaaaagataggcaatatacctatatctattgtataacatcaacagatatattgttaattaggaagtttatatcatttactaggtaatttatgtaaaatatatatctacattagttagtctatttatgtatctgtttacagagggcttaatattttttgaatgatatagccttttttaatactatttctgtcttataaaaacaaacattaaaattacttcccccctaagtttgagttttgcaaattctctaattatgttaatttttacactcgcataaataaataaataaatatatatatatatatatatatataattatagaaaaacctaaacaaaaggaactcagatagtttccaatgtttctacatatgatcagtttataaatccaacaaaggttagtctatccaatttctaaataagcagagtagaaattattagtagtatctatcacatcacttgtttatctacaattgatcaaaacttaaacatcattaatgatgatgatggcatttttgtgtacagctcgaatacaactacagaaacaacagttattaaag

SEQ ID NO: 3853 - DNA, 1804 bp, Glycine max
  Intron number 3 from transcript Glyma18g47100.1 (locus Gly ma18g47100) derived from phytozome v7.0 (chr-ID Gm18; pos 56742119 to 56743922 reverse strand)
gatcctgtcatcaactggtaagtttatgcccttctcattgatttgagtaaatgttttttttaaatcattttcttgtagctcgagttaatttgtcatggaagtttttgatactttgaatcaatcaaatatcatagtaaatatcatccatttatttaaaaagtaacaaacttatagatgagtgagagtaaaatatttatataattgtatttaattaaggtaattattataaaaattaacaaaatacttattgcttgagtaaaaaatgaataaataattcatacattatgtctaaccatataaaagttttttatattatcctttaattacaaactattatattagtaataattataagtttgttgattttttttatgatcaagtttaaagaagttttttcataaatacatataggaaaatgaaataagaaaacaaaactagtttttctcataaattaaaattaacttatgcggaagttaaaattattttttagagaaattaaatgagtttagcttctccaaaagatgattttaacttatgcataaattaattttagtttatgaataaatatttttttcttataagtatatatgaagaagtttatccaaaataaaaatcattaaaagtcatactaaaaataaattctatctgactaactagtgtaaaacttttataatcatacattcttaataaattctatttttaaatttacgcggttgccactatgactatgtgcaacaaaattacttgaaagactagctgaaaactactgaaaaattagtaaaaagttaaaaaattaaccgaaagttaaaagctaaaaatttaatttattaaattataagtgttcaataaaattaggtattgaagtaacatataagtgtaaaatgatagaaaaataaaaaaattatgatttatttaaaaagaataactatgaaattgaataaatatattcaagataaaaatcgaagaaaatataaaaaattaaaagctaacatttaaaaaaatattatttccaatagtgtttaaaaaatgagaagttactagaagttacatttatcgaatagtcaaacaagtttttcaacaagtaaaataagttaaaaactaattaatatatttttgtcaaacatagtctatgtgtgttgtgcttttaagtagcatttgaatgggaaattttatatatatatatatatatatatatatatttatatagacaaccactattatgcataattataatatataaagtcagggggtgagggttgtttctcatttatatattttaatttggttttatttttaatcaatgtgaaatttgggtattttccaaccgctgtgatcacccaccatttgttgttcaagcatcaagtccaacaagtgttgtgcctgaagaagtatttgttggacaacttcacttaataccaatggattttaaaataaaatctaacctacataaagatatttttcttctttctttgttgtttgctgatgttgttgtgctaaaatagtgcaatgatacaggtcaaatgaggaccctatttgagatatttgaacaaaacattcagtaataccaacaaggttcagtacagctagtactagcaaatagctgagttttttaagcatgttgtcaagggtcaattcttgatcatgtgtacaattagtctccgacattaggttgaaaatatctttaggcgcaaacaaaaacatagaacaaaacatagtactatgtcaataatatatggtgggttaatccattaatccaattttatatgattcactcaaaccaacttgaattccatgtttcaggctc

SEQ ID NO: 3854 - DNA, 3495 bp, Glycine max
  Intron number 3 from transcript Glyma20g10030.1 (locus Gly ma20g10030) derived from phytozome v7.0 (chr-ID Gm20; pos 13838796 to 13842290)
aaggtagtattgggtttgacaacataattatgctcccttcatctacttaaaaacatattatctctgtttaaactatacttactagtaatgtggggaaaaaaatcctcttggtttcggtatttttaggaattaggaagtacatggagattttgtaagcaatcatgttctacagtcaaatgtattcttggaatggttttctgccacagaaattctgttctgttactttttattttttaatcgaatgctgattgtcttggtatgtgtttgggtgagtatgtgctaggtttacttttgatgattttgtgaaattaatttggtttaaatggatatgaaatgaagtggcctgaaaagtgagtataaaatgtaagttaatgctgttttctctaatattccaaatccccaatttaaatgcttgtaaattttgcttctcttcaaatcatcatgcatgaccaaacttgattcaaataaaaagtagccaaacaagttgaaacattatatcatgttcaggaatgggttttggtttggaaattgcaaaaccaaacaaactattatcctacttgtggcctatttgccaaaccaaacaaaccattactcctgatctacttgtcaaaccaaacaaactattactctacctgtggtttacttgccaaaccaaacaaactattactctatttgtggcctactatagaagtttgctggcagttttctgtgtgtactgtttgtacccaatatttttttttttgtctgttgacattatttttcttaccatctagatgatcaatttcaatagtgtgcttttctcatgtgtaaagaaactatagttcatctttagttttgaagatcatataatacttggttagaaaggaagaaattaaaaagatgtaaatttaatataaaaaatcatttgatgggcatactctttattatcttttgttcctcatgtaaaaatatatactggttcccactacggagagttgggagctaattttggttgtgcattcatacttgaaagacatggttttacaattattaaactagattctactcttttgattgcttgttgttttaaagtagtctttggcccagtttatttcgaacttatcaaaaggagaagctggacaagtggaattgagaaagtgaactttttaaaaggcagctttttaaatgaagaaaacctgaggtttttagaaagctagtttaggagctgtcttatacttttccttttccattatttcaaatcccaagattcaagaacacattacccaataagtttaaacttaaaggtaacttttaagcttaaaaacttatagaattaacaagcagctttaacattaaattaaagttcttattttcaacttgaatttttaagtagctttttagctccaaataagttaggccaaacacaatttgagtataaagaagaaattgcaatatgcagctggtatatgacacaagagcatgtgtcaaagcttacatttgccgataaaaaaaaaggcttaaatatgtttttcatatctgtaatatactccttttttagtttactaccttttttttattttactacctcacattttcaaatttttacttttgatatccgccgttaatctaagtctattaagtaatgatgtgacactctgttagcctatcacatcatcacttaaccgttgatgtgatactttgttagcttgtcatgtcatcacttaacggaccgagactaacggcagttatcaaaagcaaaagtttggaaatgtcagatagtaaaatgaaaaaaaaatattgtttagtagtaaactgaaaaaagggatatattataggtatgaaaaacatatttaagccaaaaaaataaatgtgttgccaactgactgggtgttgtagtggaggctctccccagttacaagctgggttttaggaaagggtctctctctgcatcataataattggttcttatatcctcatggttatttttgttctatttggaatatctactttcattccttttgaagtcacttgcagaggtttaatcactatagaatactagttgaggaattttctgtctgcctgcatctctttatttttagattattatattatatctctttctgtggttatctagctacaaggtttagaacctttcatttttaagggtatggccacttattcacatttattctgcttgattacatttataggatcatgaatttttgaactgttccctgataaaataatataatataaaaaggaaaaggataacttgtagtttagctgttgaggaggggtggtttcctttgaattgcgttgattcttattatggttagttatatttgcaatcaatgttgtcaagatcgcaatctaaaccataagatggcaggatcgcaatcttgctacctttgaccaagatgaatcgcacataagatccctcctgggagggattggagtgggaccaaagcagaatcatggaatcatgcaattttgccgatcatgtaatgttggttttctgggatgagttgcatgatccggtttgcccaaacccggtttcttaacctttatatcctattttctaattgcatctcagtctaatgatctctctgccctcttcaacctctcttattacttcgatcaaaaccctaatctcagccttgcagttcctgacttggacttggggctctgcattctatctcttctttcattgcagtttgcccagaaccctttctcttatttgcacatctctgttttgttgtctaccaagggaagattttgcctccttttgtgttctgtatcttctgttctcaccgaacaacaaccactatgttaggttctgatcaggcaaaacctctctgtatcttctttctttttctttttcttcccctaaaactcataagttgggttcttttggctttattagagctatcttctctactgtcttttattatattctttgatctttatgttatattcactttctgttattttttcctaattttataaattctaaaatagactgagatattaataatacttgtacatatttataaaataatacaacaactataaaataaatattttatttttgactaaattttagtgattatatttattagctaattataatataatttatgatacttttgtattataattaaaaatatattatatattttttgtagtatcttaggatccttgttacaatcctatgtttttcaatcttgtttccctcctcccaatcctaagtaggatgtcaatgttgataacattgtttgcaacactgaagtaaagcagtaagtttttttcttagatcagatgttagttccttctttcttgattctgcatttgaaggatggttattgtcttgtttacttttaatatttctgatgacgatgatatttataattccattattttcttaaatatgccaatacttcatgcttttactgatttacatatttattgtttgtattaataggaggagttttcaagttagaactatttttgccagaa

SEQ ID NO: 3855 - DNA, 2309 bp, Glycine max
  Intron number 1 from transcript Glyma12g14340.2 (locus Gly ma12g14340) derived from phytozome v7.0 (chr-ID Gm12; pos 13248851 to 13251159 reverse strand)
ctctctccaaagtggcatttgaggttggttcttttcattcttgtgctttaatttacatatttattgctcagtgttttgatttttgaaacacttcattttttggtgttattgtttgtccattcaagttgtgtcactttccttttcttgctttcaagtttttgactgaaatttgaaaacttgtttcagtcatttccatgtttgaactcaaatcagctaccctctaatctgatctaaatttgagtatttgagctcagaacttggcgtggtgcatgtgcataattttgtggttactgtgtggcattgtgcacactgaagtaagagcaataaaggttgcatgtgattggttggagactttgctttttgctggggacatacctgaatcttaatttaagagataataaatatttgtgtctcattagttattaatatactttactcaacacagttctctttctctacctaattcaaacctttctgcacataaaagaacaagaaagtgaaaaaccataatatttatttatttcagcaattttgtattaattattagaacaagcgtggagtttcatttgccacatattcatttgattttggtagaaaaggggaacctttttttcatgcttcatattcaaaactaccaacagttccttttttttttcctttccttctttttcgtagaaaacctcaattttttgttacatccttaaagactatgaaaacccagttgttttacatagaaactttatcaaacaaatgtttcaattagatatgagttttgtttggagatctgactttctctccaattcagtgtgtcaatttacttaattgacatcaatccaaattttaaacagtggcttagtttttatcattggctgtagctgaattatgagtaagacaacgactaacaccattcttcaacaaaaccgtttttctttccatggttgctacctgcaaatgaaatgaatgataatttgatatttgcccctttttttagcctctccctccaccagaaaatcttattatatgcttcattatgcttgtttatggtataagcttccataatgctatttatatttatgtactattacaacagatatataactattcataattgcgtgtgggttaatttggtaagaaagaaaattttaaaaaataatagttgaagcaggaattttaaaatctacgtgtacaactgcgaaaaaccagaattccaacaaaatattttatattaattttaattataaacatatcttgttattttcactttatattttgttgtcactttgaaaataataaaatgttttaaaatcagaaaataaaaaataaaaatatttctttaatcattaataaaataataaaatattttttcaaactagactgaccgtattctttggatttccgggtatgccttctaaaatagctatataattaataatttaacttcctatgacttagagaatggaccacttgtggttgcagacagttctctgcgtctgcgtttactccacaaatctagtgaattatagagtgttaaaagttggaccacttcttggtgataagaaatagtcatgctttgccttttatattatcttcatttttttaaaagaggattagtattctcactaatggtaaaaagtgggataataatatttgattataaattctaaggctattcatattctcttcatatctcacaaaaatagaaatcttgtatgattattgccctgtcttttaatcatttttgaagggtgctaacatatgctggcactcctattgtcctatcttgtattattagtgctaataatgtattttgatattttttaatgagaagagatcaacttattttatgagtgacattaaaatagttatttttcttcttaactattaatttttttgaaatctaatggttaaaattaattatttattaaaattttaagaaaataaacgatgatcatcataaataactttgctttgaaagaattacaattagagtaagttaattctgttttttaataaattttcttttataaatccaaattgagtcttattagtttgagaatgagaaataaataccacatgttaaataaaattcacatgaattttatccaataaaaaaagtgtgtgaaaaaaatgttattaacatttctcatagttttgttaagaagactgaggcatgacatgagtggaaaagaattttggtagaagggattgcttgagaactgaccttacttaataaggagggtttaccaaataaaaaatttatctaaaaaaaaagtatcacaatacaaattctgtgtatttttttcaggact

SEQ ID NO: 3856 - DNA, 739 bp, Glycine max
  Intron number 1 from transcript Glyma09g32240.2 (locus Gly ma09g32240) derived from phytozome v7.0 (chr-ID Gm09; pos 38789002 to 38789740)
aatcaaatccacagacaagcttgaaaccatttcaggtaaggcttctaacccgccaacctactccgttgttgttaccatttcattttagggcttttttctaatcaaaattggaaaatagaatgactgtgtctgtgtggttcctcccataaggtgtttgtgaaaatgctacaatgaggaaaatagttggatagggttttatttgtacttctattgttgcttgttgaagactgtatgagtagagtagaattctgtgttttttcacttacacggatggcttaggaatgctggaactttgttggattagaagagtgttttttaatttttttatttaggtataggtaataggtttggggtgggttatggtcatggtctagccaaggtgaaaggaaggaatctgtaaaacatttatacgtgcaaattgtttgagatgactcctatatatgcttctcaatcacaaaacagaccatgtgtctaaggcagcatgaggcaaaatgtatgaccatgctccagatttattgaaaatcataattttttgtaggtttcacttgttatttaatgagttttttttcctgattttgtagttttcaataattttcaatctataataaagtgtgtgttagaagagtatgttgctagaacttctcttatgagaatcaacattggagatctccaatccatgcgttgttatcttgtgtaaccaacaggtgctggggaacattatcaatttgtgttatcctga

SEQ ID NO: 3857 - DNA, 7183 bp, Glycine max
  Intron number 2 from transcript Glyma08g41750.1 (locus Gly ma08g41750) derived from phytozome v7.0 (chr-ID Gm08; pos 41692147 to 41699329 reverse strand)
aaagaaatcggtggatatttcgctccaataataaggtggtgacacaaatttatcccctcttttttccggttattgtggctctgttattttgatttggccgttttttttttcttttctaataatcagctctgcagactttactggtatgcagattgcagaagacaagcttgattcatttctgggcatagtagcttgattttaattatttagttttattatccataataattcccatcgtttataaactgtgttcatatattagagtctctttttccttctagcatctcaaaatgaataatttattatctcgcaacacgatattaacggttttcctttgcttgtgtcggttggatgatcggtgacattactgttagtttgtttttgttatttatttttgcattgccaatcagctacatttggaaattggaataggtttttgagcttttggtaaaagttcgttatgtacacacacagaggcaggatcaaataaaagaaaagattgttttcatggcttctctttgatgtgcttcagggtgttttcttcttgggaatcaccatgttaagcaggctgagagatattttaaagcactttgacaccaatactaattttttgggttatgatattctgtgttgttttctataaccaggataccttatcctgctttttctttgcataccttatttcctctggaaaaaccatgtcgccccaccttaaaaattcatatatttgttaattgaatttttcaatcagtggaagagctagacaataattttgttttgttttgaggagacaataccttaaaagtaaagaattagaaaaatgttttctctgtaaactttcgtattttgaaagaataatgaggtggctagagcttctccattttttaactaagcaccactctcttgttttcaattgtctttttccatggatatgggtaacttttatacagcttattattatccttaaattctatgttgtgatgtttttttttttttgatcggcaaatatatatatatatataaaataaaggaagtaccagaggtactgattataatgttaagctccataaaaatggttcctcaaatcaggtagcataagtctgattgggaaccaaactatggaaaaaatatacatgtgttttgatgcaaaaatgtaatccctactgctgcaaaaaaccttgtcgtaggttactcgaccattgattaaaatgcaatgtgaaatccttctccaaattatgaagctaagtccacattaggaaagtcgcgtcttcaaacagtttgtttccatcaaaagttgcagcggagaataagattcggtttctaagctgccaagtggaccatgttacagccaaccaccaaatttgccacctcctagtcctgatgccttctacctgtagaaaggaatactgcatgaagtgatgttttgtgctcaatggaggggcacccttcaaatttatccaagacattgtttcccatcataaggttggatcttaatgcagtggataaaaagatgggatgcatcctcctccaccctgcaaaaggggcatgtcatatccaaaatctgcacttgtctagcccttaaatttgattttgtaggtagtctgtcccaaaacaacctccatgcgaaaatcgcaattttactaggaatcttgattttccatagctcctcaaaacattcctcaaggctctcaactgctgcctcctcccaaaacattgagtaagcactatgtgtagagtagatacccgacgggtctgctgcccattcccagctattagatccatgattatggatagatttaccttcaacttcagaaagaaaagagatggccaattcaatttcactgtcaaacaacggtcttctccagctaaaattccactcccacccagagttgttatgcttccccaagtgtccaatgagctagtgttgttgagcagaaatcatgtaaagcctaggatacttttcagctagtgattgctcatgacaaatccacctatcctcccaaaattttaccttatcccctgcttctaccttccaattgatttcatgttgtaggatcttaccatggtgtgactgatgaatagctctttttaaatccctccaccacattgactgtagatttgagcttccttcttcagttagacccctccaaccctcatatttagcctccaaaactgcaacccgaagagccccttgttggtgcataagattccacatccatttaccaaggagggccaaattaaaagtattgatatctttaatgcctaaaccccctttgtctttgggtagacatactgtctcccatgagatccatgcaatctttttgctgtcatgtccccctccccaaagaaatctttgctgtattttgattaacttgttgatcacagtttgtggtaccctgaaaaaggaaaaataataaataggaagtgatgtaagtactgattgaataagagccactctccccccaaaagagatatatctctgcttccacctagctaatcttctctcacatttttggataatgggttcccacacacaagctcgcctcggattggcccttatgggaatgccgagataaacaaaaggaagaaccagctaactgcaattcaaataattagctgccatttgcttccactgatcattcataccaaaagcgccgaagcaactcttagcaaaattgatttttaaaccagacaccaattcgaaagttcttaggatagctttgatagcttttacattatccatagaagcctcaccaaaaaagatcgtgtcatccgcatattgcaatatgctaatacaaacatcattacatccaacacggaaacctttgtacagatttgctcccatagctgtcctcatcaaaccattcaaggcttcaactacgacattgaataaaaatggagctaaagggtcctcttgtctaagacccctttgaggtatgaactccgttgtggggctgccatttaccaagactgaaattgagacagaattcaaacacccttccatccaccttatccatttagaactaaagcctgttctcttcaacatatataacagaaaatcccacgacaccgagtcatatgccttttcatagtcaactttgaaaataaggcaagatttagtgctccttttagcttcgtcaatcacttcattagctataagtacactttgaagtaaatgtcttccttcaatgaaagctgattgggcttcattaatgatggtgggcagcactctcttcattctcttagctaatagcttcgccacaatcttatacatacagcctataagagatataggtctataatcgttcaaatactgggggtcagccacctttggaattaaggctaggaaggatgcattgcatcccctaggaaaaacactattagcataaaattcatctaaaaaacggaggacatcaagcttgattagctgccaaaacttcttgatgaatttgaagttaatcccatcaggtccagagctcttgtcactaccacagtcccatattgctttcctcacttcctcctccgagaaaggtgccactagcatactgttttgctgttgggtgatggtttgaaaagaaatgccatccagtttgggcctatgaaggtctggttcaatgaatctttgtgaaaagaaagccctagcttcctccctcactttatgaggctcgactgtccatactccatccaccaaaaccccttttaaagaattgttactacgatttgcatttatcatcatatgaaaataccaagaattgcaatcaccctccttgatccaccttgatctcgatttttgtctcaacaaagactcatgagcttgggctgctgcccaaagatcttcctgcagctgctttcttttctgctcttctagttgggataattgtctttggattgtgtcttcctccaacttgtttaattcagattcaatcctttttacctttgtaaaagtatctccataatgttctctattccatctcttcaagctatgctttagtttcttaaatttttctttaaggatgtatcctccccatcctgattgctgattggatgtccagctatgatgaacagtttccttgaatgatctatcaagtagccagcagtccataattctaaaaggttttgggccccaatcaatctccttagaacgaagcacaattgggcagtgatccgaaaaattccttgcaagtgtagcttgaatgctgctgggccatctaagcagccagtcatgagaaactaaaaacctgtcaagtctgcttctagatgcgccattaggtctataccaggtaaactttctgcctagccaaggaacctccaaaacctccaaatcatctatccactcattaaattctttgatacagctgtcctcgggcaagctttggacattggtaaacctttcatcagggcttcttatggagttaaaatctctcaaaatacaccacagccccccatccatagaacgtcttaactgttttactgtgtcccacaaaattcttttattgtgtatgtcacatggagaataaatagtaacaagggtgaccagttgtgcttcttggacccattccccaaccattaaaataaagccattaccagtgattttcctctgtagtctgaatgatttatcactccacaaacatagtatgccacctgctaaactgatagctggcagcatttcccaacttacctctacatgtccccataaagcctgacacatagctttatccaccatttctttctttgtctcttgaagacaaattatatccacaccctcctgcttgatcagtctcctaattgctccccattttacaccccttcctacgcctctaacattataggaaattatattcattgattcctgttgctgtcagcccttctatttgcttctaccctgtccctttcctccatttgccggaatttttgaatgactgccttcttgcttccttctccagtgaggcccaattgtttggccatactccatatctgacttgcctcaatagtgtactgattatccaagactgggattgcctttgtaactccattgctgagctgttgctgcaaggaaagatcccgaatgtcattgtgtgtttcccctggctgtgtcaaagtgtttgtgtgttgttgttgtgagtctccattgtgtgatgcagatcctgaattagagggaagaaagcccaaatctgatttcttttggcacctcctctgccgagaataaacctgccttgaattcccaccccccctgcttgtgggttaaagcccaatttggagtttttgtctttgggggtataattggaaatatgctcatcctgatgtgttatacgtggtgcttcttcagatacatgtccctccaactccttatatttaaaattgccacgtgtatccaagctatccttagccaggaccacatcattagcttctgcaccaaaatccttttgaccctctgccagcccactatgccccctgttaccttcattgttgttttggtgataatcctgtgacactgcatccctgttaggtaggctgacccattgcctcacccccttttttgtggccgaaatgcagggatgttacttgattatctccattgacccgaagattattatccagtgagtcgcagcagtcgttatgaccagaggataaaaggactgtcccctggtcttcggcgccggccaaggccattgcgtcgtcgccatgacatgcggaacgcgattccaactccaataggtatggccggggtggcgacccctggtcttcgacgccgccaagattcttagagatgactccgtggagatcactgcacgattccaactctggcaaatgtgggacgttttccgcgaggtcccagttgatgtgcgaggagctgtcaaggaagctatcatcggagttaatctcctccgatgaccctccgacacttctccttctccgaagacagtctgaatagccaccgcaacactcctcgacgatgtgaaccatgaacttctcgtctccgaccattacctccaccgtgtgttgaattaatggccgccagggagtcctaatgaggacccgcgctctatccaatcttcttttctcctccattgaatcgtccaaatccaccagctctcccataacggctacaatctggttaatgtattttgggttccatgcctggacaggaatcccccaacattgaatccatgtaagccgacatcctgcgcacagacttgggctccacctttcaatagaggagaataccgttattcctcctgctcttcctccactcatgagttggtgcgcttcattttcagtgagaccttgcaagaggacttgatcgtcacccatgtatctaggagttacatccattccagtctcccagagaagctcgtcctccaatcgttcaaacaaagcttggtttttgaggggccctatccacgcttccttcagccacgaggtatcttctggtttaacttcaatgtgaaccgaggatgaagaggttttatggttgatgggggtgtttgatgttatctgatatcccgaccgtctgatgtttcttgtcagcgcatttgcgtatgatgttggcttcgtgtggtgggttcgaacctcagctccttgctttctgtccgtgcacggccttgtttgggttgttcccgctgcctccctctgcacctcccttccatactttgggaggttgacgaacaatttcaacccccctatgacaatcctgtctagctgcctcgccagataagggatatcttgtacccctttgaacctaacaaagccataccttctccccgtgaagtttcttctgtttgggatgaagatttccctaacgtccccccatttcttgaaatggtaccagagctctttctctatgatgtcgtcgacgaaacgagagaaatagaaggatgtaatatccttatgatctctccagttagtcaccgtgtgtttcagcttagctcttcctatgtttccggcataatgccgtcgggatgcctccccgaagcttgctctatcacgccatactctcttacctctcagtctatctctcccccaccctgtgtttctctctctactcattttttttttttgtgtcagccacagtagcaattctatgttgtgatgtatcctattgggtttaaattttcttaatattttgtcttcaaactgtatttgttcaggtaataggtgactggaggtggaaatcaagagattt

SEQ ID NO: 3858 - DNA, 1994 bp, Glycine max
  Intron number 1 from transcript Glyma18g48080.1 (locus Gly ma18g48080) derived from phytozome v7.0 (chr-ID Gm18; pos 57593844 to 57595837)
cgaaagccaccatcaaaatcgctgacgctattgccgtaagttttttttattcatttattcattagttgaataaatttgtttggtagcagagataacaaaaaaaatttgggattttattttttggtggtttttaagttcaagttcaaattctcggtagaactaataatcttaagtatttaatatggggcttgttgatgttttcattttatggtgcctgtttggtagctgagaagctgcccgaaagaagaaaaaaaaaacgaggggatgagtgcaagttagattttggaactattgacttactgtattataatgctacaagacactaattactgtatatctaatttggggtttgtggggattgcattagtgcttgctatttgtggcatctgtttagggtgtgtttgcaaagctgttacactgctattgaatggaccttttacacattccaatgcaaaatgaaggagggaaggggttgaattggcgttaagttcaacttcatggatatgcaaacacacgtcgtagctgagaaagctgagagaaaaactaagtgaggactactttgggtagaactattttcaatatctaatttgggtttagggcctgtcgggagttaaattagtgaattaagatagtggtaggagtaattggttattctttgtagttgctactcagttgttgtaacaaatgcttgttgcatagtgtgtggacaccctttggttggatttggaatagcgtaatctgaggcaactgatttctcagctgcatctctttttgagaaaattgggaatgttgtattatcttgtattgtaaaagttgaagcatgtccactcttgactacaattcctacagcggttgcactggatttttattttgcagatgataactattgtgtaactgctacataaagttcaccctttcctcctttttggttcggagttttctgatgccagtcttcctactaggaaaacaaagaaaaaaccttacccttttgttaatatcctttattctgatttgtttttaaacaaaaaagaaaatcctacttgatccttattctaatttctaaattttaaccctgttttacaagtcatccagttgccatggtgttttttgtatctctgcactacataggaagagttaaccagggatggaatgagaggggcaagtgtgcccccgcccttcctcctcattttcttttaaaaattattcatgtagactctagtttttatatcaaaaaagctgtactcttgtaagttgtaacctgctaatacaattatgcatttcaaagttgattcactttggcccccagatgtttttttgatctgcccctggctcaccaattttagttgtttaactttgccattcagatatccaattccttttcatcaatcacaaagctcctgtctgctaactccagttttgtttttttttaccattccatttgtgagcagttaattgaagactgttgattgcattaaagcatgaagaatcacaaaagtatttttgtgataggactttagttggccctgaaagtactgtcaattatttgccccagggatgccgggccttggttggctcctgtcaaaactgattctgtcatgactctgatatatataccagagctttgttaccagtaaaaaaggaaaagagttttttgtattattatttattattgtcaacagaagctaccattacataggcatagatgaggtgtaaaatattttcccaagcaagtcttgcctactaggatccaaaaataaaaaatccttatccttatctgaatattgtatatttggatgtttatgttaaacagaaataaatccctaccctatcaggtcaaatgctgttaacttaatttagttttgttgattattaatgaatgattaatatattgattgaagtgcttaaatttgcatttaagataaatgtgtctggttatcattcagtctaattggtgtttactaatccaatctcatgttttccttttcgacagagac

SEQ ID NO: 3859 - DNA, 4011 bp, Glycine max
  Intron number 3 from transcript Glyma01g04090.1 (locus Gly ma01g04090) derived from phytozome v7.0 (chr-ID Gm01; pos 3553784 to 3557794 reverse strand)
ttacaggtaaattacgacatactcttctctaaattttttattttgttgtctggcttagacagccaagtgacgaataagattgtaaagctggtaacacgtgataaaataccaagtcagatacatggttctttattgaagaacctaggagaaacattactgatgcatggaaaatacaaatcatattaactctgtatttcttcaatataatcaaaacaacgatttatatatgcatatatgttctatggcttatttatcattctcgaaatttgaatgtgacatatggaatctgttgaaccatgccccaatcatatgcccttataaaatattaatgttagtaggttagggaacattttccggggagttggtatatttttggccatggtctcttaggtactcctgtcatgtgaccagaaaggagtttgagtagcacgagggcatgaatgagggtggagaaaagaaatggcaatgctctttctgctttgtccataatggattgagttcctcatcttataaaatcagccaaacttgttatgctttgtgctgatcacttttggagttcactttttattctcatcaagatatcatcataattccaatgtctaaacttgtgatttcactagatcattctcaaactatgcataaccattcccaagcctttcgaatttgtatagataatcattaggagttcttttatacattctgccattgaaggtctttcattactctcagtacggacacatcttgatgccagattggcaaacatgactatagactgaatggtgtaagaatttcgagccatctctggatctatcaccttacgaagcttcttgcggtcattcagtatgtgcctcacctgcatatgaatgtcaaatgaatcaaaatcttgctgttgtatgaatctagtgattctcaatgatagggctcaatataacagaacaagaaaacatggatattgaaaattcagatgtaactctctttattacagtagaacagcaaggaaagaaatgcagaaacaggtaaggcaagggtaccaaatgccaagggaacacctaacactctgaaccagtatctcctgcaacgtgtgtgtgactgtgtttttatcttgatccaatttttaggatttcttcttctcaagaaactacttctctagtgagaaaggtatttttatgagactgaaaagtgcaaaccttggccatacaaccatagataatcaagattaaaagttttttatgactttagtattttaatctaatgcgtaataagatttttctcactcacattaaacaagagttttcactcaattatttttaaatgcaaacagtgaggttagttatatggatcaaactagacatggcaagaaaatccgtatctgtgggtactcgcccgaattcgtcccgattttgatgggtaatacccgagttgatcaggtatgagttcgggttcggatttttctcgataaccaaaagtcgggtacgggtacgggtatgagattactagacccatcccaaccccgaacccgaacctgccagccatttaaaatctttaaattttttgcataatttaatcaaaagacatagaatttttattactagttaattttattttagaattttttcataatttaatattattttcttaattatttttgtagacacacgcactataataaatttattgatatataagtagttaaaaatatatgtttaacaatcaatttattttttctaaaatcaaattttaatttttttttttacataaaaaaatatttttctaatttgaatcgtgtatgagacgggattgaggatacccgacgggtacgggaatgggacaataaacttaaacccatgaggtatcgggtacgggtatagggatatggtggggagtcgggataagagattggggagacaatacccgtacccatcccgccccattgacatgtctagatcaaacggtgccataatgttatgtgtaaatcatgtctatagacaaaccattgaccattagattttttttaatggtttcacttataatttttctctgtcttcctctgcctccaatgattgaactatccttcatcaaatctactctcctaactaagactctagtctctacagtttgttttcacacatgcccaagccacttaaggcaaatttctaccatcttttctacaattggttctaccctcattttttctcaaatacaatattatttttgaataataataatgcctggttattttttaatgaaataaaaaatagcaaatttcgggggtttgatatgttgcttttacattcctaaggattgatgccctgagtgtgtgcacatgtgtgcgtgtacatttcctacctgtagtacaaggttttgatcgttgggaccttggtttagatctacagctcgacgtccagtcaaaagctccaaaagaacaacaccaaaagcataaacatcactctgtagagtgagtttccctgtctgttgtcaaatgaattaataatgttagtgtaaaaaacgtgtagcaatccattgatactagatataagaagattgaaggtgaaagatattttatgatatatagatttgatttagagttataaaactgcttgttcttatgctgcttacatttgtggtggtagacaatatcaatatttggttgtaagtatcacacgcattttctgattgaatcatgttcatttcgtgtaatttccctagtaatatataaaagatgtgttctgtattacatttttaactgttaagtgaaaatgcgaaggttgtaatataaaaatttaggcatttaggcaaggactacgaaatgattttaataacttgtaatgtcatcaacgaaagccctcgggctggaattgttgatcactgtagaaatttctttgatgtacctggaatgttagttactagaccatgtccatggatggtatgggttgagctcttggccacagtatctatcagtcagttcctgataccatgaagccacttgatctaattaaaggcctaaaattgttttcatggccagaaaaatgttgcaaatcaaataacttctcactaagtcttatggtgggctcctagttataacaaaaaattcttgaatcatttactgataacctaataaaccatacaaggaaactgaaggacttatttgtaattggatggaatttcagccataggcttctaatgcaaaccaaaatttcatggtttagactattattgctgcttgagttggtgttgaatttgctgacttaatttgcatggctgatttattttatggtagactaaactaacaaaacaggtactttggtagcaataatggattcttgatttttagcatgtgaagctgtttacatcatgtgcacaggaataatggcaaaagaatttattagatttactgtatactgcattgcaaatctcttttttttatcttcaagaatgaatataaccttatttattaaaggtgttgaaaattgaaaatgtgaaattcttttgagaaagaaaaaaactcttcatggcatagatgcataccgatgtatactctggatcaaaatagccaaaggtaccaagtactctggcagtcacatgtgtctcctgtccttctggcattaacttcgcaagcccaaaatcagatatctacagaaaggatgttaattttagccatgtacacatgattgtcagaaggaaatgttacaagtcattataggaaatctttttatacctttgcttcaaagttatcgtctaagagaatattggtcgatttgaaatccctatgaacaataggaattccaacatcagaacttgaatggagataagcaagtccttttgcagctcccagtgccacttggagtcttcgaggccaatccatgtttctttccccaattcctaaaattaggtgttgattaacagaagcttgatgttagaaattttgacaacagtgtagagtttgagtaattgacaaaccattcaaatgatcttgcaggttccctctacgcatatattcatatactaggaacc

SEQ ID NO: 3860 - DNA, 9133 bp, Glycine max
  Intron number 5 from transcript Glyma18g14990.1 (locus Gly ma18g14990) derived from phytozome v7.0 (chr-ID Gm18; pos 14987813 to 14996945)
tgtacatggcgttgaaagaagatatgaagcaaaatgattagatgataaagaagctcttgagttgtttagttggcatgctttcgaaagcaatgaggttagtcctagttacatgtgttgtgaaccaatttaaacaatttaattgtaattgttagtagttacttttctgttataaaagttagttatatctaactaactttgttagttgttataaaatagaaaggtgtgaataacaaagatagaacgagtgtgcatcttttgtgcaaaagcctaaatcttctctctttctctccataacttgttccagtgtgtgtgagttcctgctatcaatagctccaacaaattggtatgtagagcctaggttcaagtgcaaattcgtgtagctgtgaaagaaaagtaaagatcacaacaaggagcaacaatggcaggcaacaatggtgttccgagaaaccttctaattcttggtggcaagaattgggatcgatgggtagcgcagatgagagtcttgtttagatttcaagaagtgattggaatttttgaaactggaattaaagaaccaggtgcatgttctactgaatcacaaagagtataacacaaagaagcaatcagaagggatgtgaaaacactattcttgatccatcagtgtgtagatcccaacatatttgagaagattcaagcatcatcttcagcaaaggaggcatgggacatccttgcaaagtgttacacaggtggagataaggtgagaaaggtgagacttcgatctttgagaagacaatacaacttactgcaaatggaagccagtgaaagaattatagattactttcactagagtattgaatcttgccaatcagatgaagagttgtggtgagaagatcttaaaccaaatgatcatagagaaaatcatgcagaccatgatcccaagctttgaacatattgtagttgctatcaaagaatccaaagatgttgaaagcatgaaaattgaagaattgcaaagttcattagaagcccaagaattgaggttgatcgaaagagggagtgtgaaaccaacaaaacatgctctgtagaccaaacctctaagaaaggtagcaatgataaaaagaaatggaagaaaggaaagggaaaatttcagaagggtaattggaattcgagctaagataaattcaagagtgaagatagagcataaacctctcaaaaaggtactgcaagattctccaacagcaaagatggaaagaaaggatttgataaaaggaagattcaatgttacaattgtgagaagaggggccactatgcggatgagtgctagcacaggaaagggaaacaggtcagaaacaacgaagaagaagccaacgtggctcaagatggagattttgactctgatccagtattgctaatggtgactaccagtggtggagatcttcattctgagacttggtacttagatattggatgtttaaatcatatgacatgtcataaagacttgttaaatgatcttgatacaagtaagaaaactcaaattaaacttgcagataacagagctctagcagcagaaggtatgggaaatattgtgataaagaaaaaggatgggaaagctacattgatagaggatgtactgtttataccaggaatgaaatgcaacttgatgagtcttggccaattgatagagaaaggattctcaatcatcataaaacatgattaccttgagttgtatgatcaacatcagagattggtgctcaagtctccatggtctaagaacataacctttcaaactacaattcgaccagttgaggtgaagtgtctaactgcaactgaggagaacaagaagagctggctatggcatctcaagtttggttacttgaactttagaagccttaatcaataagggtctaaagatatgttgataggattggcaagaattgttgtactagaaaggatgtgtgagtcatgcatgataggcaaacaatctagacttaattttaattcctatttgcctatgagacctaccgacttgttacatgtcattcattctgatgtatgtggtccaatggaagtgcattccttgggtggaaatatgtattttgtgacttttgtggatgagtttagcataaggatgtggttgtatttgatcaagcacaaaagtgaggtcttttcaactctagagaaattccaagaaatggctgagagccatagtggcaagcaaatcaagatcttgaggactgatggtggatgagagtatacctcaaaagaatttgaagctcattgtacaaaacttggcattcaacatgaagtaacatcaccctacactcctcaacacaatggtcttgtggagagtagaaatagaacaatgttgaacatgtgtagaagtatgcttaaacataagggtttgccaaaatccttttggggcgaaatagtggctacaacaacctacttgctaaataggtgccctaccaagagacttatgcaaagggtgcctgaagaatattggacaggaagaaaaccaattgtgagtcatttgaaaattttcgattccttgtgctacaaacatatagcaaatgctagaaggaacaaactgcaggacaaaagcgagtccatgattttggttggttatcatgacactggtgcttatagactttacaacccttcaaagaaaagaattgaggtcaatagagatgtattagtctatgaaaatgaatcctggaattgggaacaacagaatagtagagttggaaacttaattattgtctctaatgagaataaaaatagtgagcaagatgatgttcatgagactaatgcagactttaaaggtgcagatagtgggccaatgcctatttagagactgtaggataataagcataactcacagaaagaagggagatgaatgcacactttttattgaataataatctgtttaaatagagatttttgtaactgaaagaaatcataaaagcaataactgacttccaaaacaatagccactaacataacaactactaagtaacaaaaaaagtaaaataaacagtcctaaagactcgatcaaacaactagcagaaaacaaattaataggaaactattgatacacacattcaacactcctccttgtatcagtggttggcaagtccaagtttctctctcagtaactcaaatctgcttcttggaagtgctttggtgaagatatttggaagctggtctttagtcttgcaatacttcaagcacactgtaccatccttctgtacatctctaagaaaaaataatttgatgctaaaatgctttgtttttccatgagaaattggatttttagagatggctatgtctgcctggttgtccaccattacttcagtagttgtatcttgctccaagtgaaaatcagttagcattttccttagccataaggcttgattaatagctgttgtgactgctataaattctgcttcagcggttgactgtgcgacaatttcttgttttttggaacaccaagagaacatccttgatccaaaactaaaacagtagcctgaggtgattttcatgtcatctagagaccctgcccaatcactatcagaatagccttgcaacttgaaatcttgtgattgactgaacttcattccataatttaaagtctccttgacatacctcaacaccctttttgctgctttaaagtgagattctttagcacaattcataaatcttgaaagtacactcacaacatacaatatatctggtcttgttgttgtgagatacattaagcaaccaattaagcttctgtagagtgcttcttccacttgttctgaaccatcatccttgcataacttctcattttgacacatagtagtgttcatgcctttacagttctccatgttgaatttcttcaggatctcctctgcatactttctctgatagacgaagatatcaccttcattctgcttaacctccataccaaggaaataggacatttctcctaggtctgtcatctcaaagacttgcatcatatcatccttgaactgttgaataagttctacattgctgccagtgactaagagatcatcaacatacaaagagatcacaatgaagttagcttgatcagctttgatgtataaagtggatacactaagacttttaacaaagcctagttttgataagtacttatcaatcctactgtactaggctcttggggcctgtttcaaaccatacaaagccttctttaatagatagactttgtcctcatgtcctttcacaaggaaaccttcaggttgctcaacatagatttcttcctccataaatccatttaagaaagctgacttgacatcaatttggcagattttccatcccttttgtgttgcaatagctagcaacatcctaatggtatcctgccttgcaatcggagcaaaagtatcaaagaaatctactccaaaaatttgagcatacccctttactactaaccttgctttatgtttattgattgagccatccgcattcagctttgttctaaacacccacttcacacctatgacttttctatgtttaggcctttcaacgagttcccaagcctgatttttatcaatcatgacaagctcctcctgcattgcagcactccattttggatccttctttgcatcccaatatcttgcaggttctagaactgctacattgcatctttcataaatatctgagagcaatctagtgcctctcacgggtgcatcatcaattaactcatcttgattttgcaaaggatcaactatcagcatctttttagtatcattccagctctatttctcattctccatgaagtatacatccctgcttatcagaattttccttatgtgaggttggaaaactctataagctttagatactaaactatatcccacaaagataccaggttcagctttcttgcctagcttgtctctctttatctgtggcacataagtaaaactcaagcatccaaatacttaaaatttttcaaggaaggtttataaccataccaagtctcaaaaggagtcttcccgtttactgctttggtagaaagtcgatttagcaagaatactgcagtgtttgtagcttctgcccaatattccttaggtaaccctttctcatgaagcatacatctgaccatttccattatcgttcgattctttctttcactaaccccattttgttaaggggtgtaaggagttgttagttgatgctcaatgcctgcttcctcacaaaacatggtgaattatgctgaagtgtactccttgccgttatcagacctcaaagcttgaatcatgcagccactttgcttttcaatccactgcttaaatatccaaaatacacctgcaacttctgacttagacttgagaaagtaaatccaacacattctagtgaaatcatctataaagatgatgtaatatttactttttttaagcgaagtagtcctttgaggttcggccaaatctgtgtgaatcaattgcagcttctctgttgctctccaggttgattgtttgaagggtaatcttgcttgcttgccatattggcatgcttgacagcatggtaatttagaatctaagtgaggtaagccatgaaccaactcctttcgtttcatgttcaacacagttgcatgatgaaaatggtctaatcttttgtgccaagcttctgtactatttacagtagctggataggctgcttgctcctccttcagtgggttaaatgagaaaattttgcctctcattttgatactgaaaatttccttgtcattgacatctttaatcaaacagtgcttattttcaaagatgactttaaaacccttctcaaccaattgtcccacactcaacaagttttgatcaatgtcagctacatacaaaacatcataaattaattttgtacctgtgcaactttcaatggctacagttctttttccttcaatagtgataagatcaccatttccaattctaacttttgatacttgtgatctgtccaaatctctgaaaagctcttgatcgtgggtcatgtggttggtacaaccactatccactagccaacattcagttgagctactgcttgtaaaacaagttgctacaagcaattgctcttcctcttgttgatctgcaacttgagcctcattcttttgttgaagattgcttttgaaaattctcacatgatgccccaacttgttgcacttttcacacttaacatcgggccttctccaacatttgaaagggggatgacccattctgccacagcgcttgcaaggaggaaatcctttgttgttgtctccattattgttgctagtgttagccactgcacttgtgtgttgaaattcttcttcttgcatttcttccacttgattttctctccttggttaatttgcaatttagcttgtaatgctccttccacagaaccatcagccctcattcttcttctttgcttttgggcttgcaaagcatttacaagttctaccaaggtaagttttgacagatccttagtattctccaaggatgtaataatagcctcaaatctttcagggacagtcactggtatttttttaactattcttgaatcggaaaattcagaaccaagcaatcttactttgttagcaatgctaagaagcttgttagcatactctttaattgtttcagactccttcattttttgcatctcaaattctctaaccagattcagggcttgcatgcccttaatcctttcatctcctttatattcattcttgaggaaactccatatttcacatgctgatttgatggtcattattcaagtgaaaatttcttttgagacaacagcaaacaaagaagctcttgtctttgactttcttgctttcctctccttttgattttttatttgagccattgttggattggttggtaaaggaagaactttgtagtcttcctcaacagcttcccagagatcatttgcctccagatgtgcctccattcttgctgcccagatttgataattatcaccatcaaacacaggtggtgctagtgatgtgtacggtgtttcaaaatccatcaatttgatgaattgaagcaaggtgttttggctttttgtggtgggtttcactcggttcactcataggtccctcttaagaagaagacttttgataccaatttgtaggataataaacgtaactcagagaatgaagggagatgaatgcacactttttattgaataataatctgtttaaatagagatttttgtaactgaaagaaatcataaaagcaataactgacttcctaaacaatagccactaacatgacagctactaagtaacaaaaaaataaaataaacagtcctaaagactcggtcaaatagctagcagataacaaattaataggcaactgctactatacatgtttaacacagaccacaaagacaaatcccttcaaggttccaaaactttgaaatgctcccagataatgcagttactgatgatggtgacttgaaatactttgcattgctaactgacattgagtcaattaatttcattgaagtagtaaaggagttgacttggaagaatgctatgctagaggaattgaaagctattgagaagaacaaaacatgggaattgactgagctacctcccaataagaaacccatcgctgtaaagtgggtattcgagttgaagttgaactctgatgggtcaataacaaagcataaagcaagattggtggctaaaggtttttttgtagaagcctagagtggactacaaagaagtatttgccctagtttccaagattgaaataataaggctggtgatttccatagctaggagaagtaattggtccttttaccatcttgatgtgaagtcaaaatttctaaatggcccacttggtgaagaaatatttgtaatacaaccccctggttttgagcagaaagggaaatataaggtctacaagttgaataagactttgtacgacttaaagcaagcacctaaatgctataataagaggattgcctcatttttttactaagcatgagtacgctaaatgctctattgaatatggagtctatgtgaagtcaggaaagaacttaagtctagtgatcatttgtctttatgttgacgatctactaatgactggaaatgactcaactaagattgaaaggtttaaagtgttgatgaaatctgaatttgagatgacaaacctaaggtaattgacctacttcctagggatatagtttataaccacagaagaagggatcatgatgcaacaaaagaagtacattgctgatgtattgaaatggtttaatatggaaaacttcaatccaactgctacacctgcacagaccaaccctaaatgggagagcagttatgaacgtgaagtagtggattcaacattgttcacacaaattgttggatccttgagatatctctgcaatagtaggcctgatatatgcaatgcagttggtttgatcaataggtttatgcatgaacctaagcaagttcatatgaaaactactaaaagagtcctaaagtacttgaagggaactcaaaactttggagtattgttccctaatgaagcaaaacaggaagatgagaactgattggccatttagactttgattggtagggagacaaaattgatagaaggagtactactggttatatctttaagttttctggtgcaccaatctcttggtgctccaagaaacaaccagtggtagcattgtcctcttgtgaagcagaatatatagttggagcatttattgcatggcaaactatttggctcaactcattgctgaaagaaatcagagttgaagtgaagaaacctttgaagctcctaatagacaataagtctgccatgaacttggcaaaaaaatcattctcacatggaagaaacaaacacatagaggcaaagtttcattttctaatatagaaggtgaatttaggactcattgaagtggtgcattgtccaacagatttacaaattgttgatgttttgactaagccaattaaagttgatagatttgagctgttgaggaaaaaattgggagtagtagagtgttaaaattgaaggggaatgttgtgaacatatttaaacaattaaattgtaattgttagttacttttctattttaaaagttagttatatctaactaacttttgttataaaatagaaaggtgtgaataatagagatacagtgagtgtgca

SEQ ID NO: 3861 - DNA, 2529 bp, Glycine max
  Intron number 3 from transcript Glyma04g40730.1 (locus Gly ma04g40730) derived from phytozome v7.0 (chr-ID Gm04; pos 46682616 to 46685144)
ccaacactagaagcaattattctggtaacaattttgctcaaatttcttaacttattatgtggtagatatgagaagaatggaaatgtgcaatttagatttgtagttaagtcctaagtggatatgaccatatgacttaaactttgttgatgtgtaaatattttacatcattatgactttttttttcccactttcatatatcggttgcgtaggtattatctagtaaacagattatagattatgggaatctctgctccatgtgatattacaagcaattacttttttcaaaaatattactttcatacattaaaagatctttaaagattttgattataatctagtttgaaacgttttccatttgagcgttattgaactggtgttgggagtaaaattaaattccgacaaagacttttgttgggaatgcataatttgaagaggtagtctttggacataatgtcactcactatcagatgctctgatagaatgagccaacatgatcaacaagtgaaagtaggccaacaataattcagttgccaattatgtcagataaatttgttgattgaagatttgtcatcaacaataatttgtcgattgaagatttgctgtggacagtaaatgatcaaccaagtacttgagattgattggataatttaacagccatactttgtgtggtttctaatcgatggagccaatatttggtgggcttgtcaattcttgacaatttttccaacaagagaaagtacatgggtgactttgcaaactaaatctatcaattggagatttgctgccaatggtgaagtataatgctaatacaattatttgataagccgacgatcatagaggaaaatccgaaaatgtcagtgtaaaagggtaattttgatgtagttattgtagcaagtacatgagcaaattgatctagccaatagaatcagataatgttggctccatcgatgattgatatttccattgataagaaagtagaatggcggttttggtggagtagtgccaacaagaagactatcaaagtgataggtgtcaaggatgttacagttgggtgatggttaccagatcaaatcttaagtagtgggtcacagcacccaaagaattcaatctagagaaggtttcagcagatcatggtccttcatttaatacctgctaaaatccagttatttaaatttttgtattatgaattcaaatttgtaaataattgttaagactcgaagtagttatttattgtgtctataaatggcacttaggatgatcaacttggggctggcattttgtggaacactccctcagattcatactctctaggatttcaaggagttagcttgtcttgcattttacatttcctttaaatttacgttttcatcaatgcaatttaaattcctttacatttatggcatctttatcattttggcactttttaatttctcagtccattttatttctaacacttcactctttagcacatttactatttcttaccatttagttttttttttttttttcatttcaaagaatattagggtgtgtttggtttgcattttcattttctgttttcatttcctgttttcattttctgaaaactgttttcattttcaaaagattggaattctgaaaacatgtttggtttgacttcttgttttctgctttcaagaaataaaaacactgaaaatgcgttttcaaaaggaaatgtatttttagatttgcttaaaattacattccttgccaccgcgttttcattttacccaaaatgaggttcctagtttcaactgaaaacgagattttattgttttcagtttttggttcgtttaggaaaatattttcattgaaaatgaaaacagaaatccaaccaaacacatttccatcaccattttctattttcagtgaaaatgaaaacagaaaacaatgaaaccaaacaccccctaaattccttaccaccctccttgtaagtcatttattgacatatttaactttgatcaattaaatgctttctcttttgaagtccatttactcccttcactttatttttttatgcttgagtttcatgttaaatttcattccgtatcatatatttaagttttttagttttatcaatctacttttttgacaaaaaggtttgttttcttcaccttcctgtccaaaatgtggtttttcaatgtctaaggcttagtataacttatacctcacaaggccacaaaacaaatcttgtcagtgtaagaatctcaatctgacaaagtttcaccacaaactagttggaaattctccagtggtgacaataaaaaagttctctttgacaaatttcactgccattcagtagagaagtaaagatttgtgacatagcctggagttgactataatgtacataattgagcatgagctaatactaaattggtgattttgatattttgacaaaattttaacagaaataatacatttcttcatttttcatacatgttgttttcaccctgtccatcttctacatcaagtttgtgtttcttttctttgcagttccaaagcagcagagca

SEQ ID NO: 3862 - DNA, 1758 bp, Glycine max
  Intron number 1 from transcript Glyma11g03390.1 (locus Gly ma11g03390) derived from phytozome v7.0 (chr-ID Gm11; pos 2234065 to 2235822 reverse strand)
ccattacgttcagcctcgtcttcctcatatccccggtttttttctttctcttcccttttatttattatttctatttctacactatatacgcacccacgtctttttatttttaataaaactttcttcctgcactataaaagacatttcacttatatatatatatatatatatatatatatatatatatatatatatatatatatatatatttgttttagatttaaattaaaataagagtattgcacaaaaaaaatgaactatactgccgcattacttcctttaaccctgaaataaaaataaatattaaataagtttttgaaatgttaaataggtctttaaatttaactgtcattttaatcctaaacatatattactattatcactaaaaacatatttttttttaagaaaaaagttagactaatgtaatcgttgatttatattttcagaattttttttctttttaatttcagggagtcaagtggtcgtttattccttaaaataattattcatgtgtgtaatatttaaaacagttatttcacgactatttttttaaaaaataaaattttgtgtaataaaatgaaacaaggatagtttttttaaaaaataaaatttacatgattaaatattaatattgatccaacgatgaattaaatttcaacactttttttggtctaattaaattcaacacctaaaataaaaaaatgtgctgtgtatagattcataagaaattaccgttaatctctgcccgtattggactggcgcgttcaggttataacaattttagattaatgtcaccccaaagctggctgggtccaattgtgttttttatacattcagaagaaattaccattaattattcgacctttttctgtaagagcttcatgaaatgttaatgcaggaaaatttatatgaatggatttttttttttaaattacatgagcagatgttgaaaatattatagcctatggataagtcatgttttagaacataattttataattttgatttaaaaaaaaataaagtcatattttggatcacgacttcaattattttatatttttttaataagattatagaagttgagttagtagaaatgaatttagtatttttgtttctttttttaaaaaaaataatttagagagattaagtactaattgcatacataacgaatatggatgaactgcctccaaataatcctaagaaatattggttgggtcaaactcaaagataaaattatgataattattcatataaacaattaaatatgtaaaataatgtgtaatattttattttttccatacttaattaattaatttttattgttgaagttgtataaaattccactcttttattactttattattaaaatatttttttatattttatcaataaatattatttactataaaaacttgtaaacaaattaactttaaaacgaagttcttcactttcaaatacgtcgtgatttaaaaaacaaatttaacatacttatttttaaaaaaataaaaataaaaaaattaaaagtcgtgaatgagaatataatttcgatgtttaaaaaaaaaagaaagaaagacaaagtcatgtgttaaaatacgacttagccacgggttataatattttcaaaatctactcattccactaatttttttttaattaatccattcacgtaaatttctgttaatgcaagtaagcagcaatttatacttgcagagttcttttttagtttcattttacaatttagagtcttttcagggatta

SEQ ID NO: 3863 - DNA, 1955 bp, Glycine max
  Intron number 7 from transcript Glyma03g09100.1 (locus Gly ma03g09100) derived from phytozome v7.0 (chr-ID Gm03; pos 10611296 to 10613250)
ctcattcaccaggtaaggctacgtgtatgctttcttggataaaagaagtggtaaagtcacgtcttattaaagagttagtatgtttattttagaaaaatactaacaaataaaaacaaaacaaaaccgaactcaaaataagtgcccactaatgctaactttaagtggggtttgaacgtattcaaagtactaaattttgactctacttttgacatattatcataatatttttttatcaattttttcaatattacattaatatccctttgataaatttaaatatattagttttgtaagattttaaatttgttgaataatataataactatttttcttcttcttcttagaaaaatataataacttattattaaaatatgtaacaaatactttaaactttttatgttaagaatacattaaaattattttttaaaatgtttgcttgaattgaagcgtgccttgtatatatgtgtgtgcactcaactatatcactttttaaagttaaagaaaatagtaatatcatatattttataacatttttcattatgtagtttgtatagaattcatattattttgtgattcttaataaaaatatatattagaaagaatattttactacctatcctttctcctccatgacaagaaaacaaattcactataatcatggactgtcaataatactattactgtcgctactaataattaagtgtatatattttaataatatatcattattaaataataaagcagaatgttgtggcagtatattatttttacacactgactcgatcagtaaaacatgtgtagagtgtgatggagagtgtgattgaatggaaaaactcaaaattctcataaattttaaattttaagaattttaaatatttcaattgaaatttttttatttttaagattttgtgtttggataaaaaaaattaaaattatgagatgaaaaaatgaatgaaaaaagaaaagatatggttgatatgctagttatacgtgttctttatgctcccatctgatcgatattttgatattttaggagtcggtgtttaagattggaagaatttttttttcaaattctcaccttttagaaggaaattgaaatttcaaatttataattgtttaaaattctattttaaaatttcaaaattttaaatttttcatgaaaacattcaaataataaattctaaagtacagatattcaaattttcttcaaacgtactcgtgaggattttgtacacggaattcacaccgttcagtttgttgtgctttgctcgttagaacgcaagtgtttaattttttgagctattattttttataaacatctttcataatttattttatctctttttattatatcatttattttattttattcttctaacttttctcctcttatccctcgtaattgtaaaattaaatatataaaattattattcaaatagaatttttctgattttaagaattatattacactttctgtcacatatttctattattaaattgacataaaactaatgataaaaaaatcatattaacattatttttacgtagttatatctatatatagtaataatttattttctatatatatatatatatatatatattattttcatatgtgcatgtttaattcaatttaatttagatatattatatatttatttctctagatttaaatcaaaacaaacatgttagctatcctaaatttaacctttttattgccatttttccttcttcatctggtctaattgaaaaaaaaaattgttcaccaaaataaacaacgggaaaatccacgaatctaccattgaaaagaagtggtaatcattgaaattgcataaaagcacatcagtaatttccttatccatgcttaattttttattactctcactatttttattttctttccctaatgcatgaatgcagttcatcacattcgggttcgcgtgtactccattgta

SEQ ID NO: 3864 - DNA, 1657 bp, Glycine max
  Intron number 1 from transcript Glyma16g04710.1 (locus Gly ma16g04710) derived from phytozome v7.0 (chr-ID Gm16; pos 3976899 to 3978555 reverse strand)
ggcgcttcctttgttcgcccttgctctagcgccaggtattcacctttcaactttcccaacatttctctctcttttcgcaattttagttgaagctcttggatgctttttgaacatgaccatgtttaacgtttttatcactattgtgctgtcaagtcagtttcttttttacttttttttttatgggcaaatgttagtttattagttttgttatagatgccagtttgggggattcaaactcaggacctctcccccctcccttcacctttccccaatcactagattaaccttataactctgtgatatcagtttcttagtttatttgtagttgtcgtttttttatcggcaaatgttattttgctagaaagttagttttgttatcagagggaattaaacccgcccacgaccttttcccttctcccttaaccattcaacccagcttatatctctatagtttatttgtagtgatagcaatatttcaatgttgatacggatcctttaaattggacatagcgagaatgaaaatacaaataggagggatttgatgaaatggtagggaggttgaatagaagaagtaactagtggaatgtgagtttgtaaggctttaaattatgatcgtggtattgtcgcaatccttgatttttgtggaaaattttggacaaatgtagccaatgtggctgcaattggggtcacacggtgttcaaaaaccttgatgttgatcacaactgtttttcaaagccttctgtgtttgtattaaagacatgatgtatagttcttcatttcaggcagcggcggagccttagagtgggattgtgttttaacattggcagatgcactatatgttatgtgaattgcttatgtgtcttttactttgcatgctgtgtttggttatttgtggcctcatgaaatgaatccaaagaataggagaatttttttggtggctgaatgatcacagggctagttaaatttaaaggagttcaacaattattgactataaaagaaaaaaaaacaaaattttatatttctttataggaaagaaaccatcctctcattctccctactatttccaccttttggtcgttattttttaccctttcaagagtttaatcttgcttagtagtgaaagccatctaaaaattgtaatagtgtgacagtgtgtttggctgcacatcatgtgtgttgtatcaaagcgaaatatactagcttctgctttattttaatggattggatgttaaaatttgctaataatacgtgcatttagaaagcgtaaccagacacacactaagttcattgaagtaataatttctttacttatttgtgctatcatatctcagagagaactatgtattggatgcaactttataggtctccagctcattaatctacctttgtttttaattgtgagcctcaactttatattcctttatgttttactgctaaactactgtgctacttgaacctcgtttttgtccttggtggtgcttccagttcattcatacatgttctttattcaagggcgtggaagatttgagtggcatttggccaatttatagtttttgttccaacttatttctgttcagcaatacttccaaatgatgctttaatcttaaattcttgatttaatgcaggttgagaaattgtgcttttgcggatttcaaaa

SEQ ID NO: 3865 - DNA, 1460 bp, Glycine max
  Intron number 2 from transcript Glyma18g05840.1 (locus Gly ma18g05840) derived from phytozome v7.0 (chr-ID Gm18; pos 4484008 to 4485467)
atcaatcttgtggggtttccaagtgtatttttaaggtttgatcttatttttattttcccttcccgggattttctggttttaagtgtctgtgtgtaatagtattaaggaataagtggcattggcgtgaataagaatagcattaagtgcccaattcagaggataataatatttatagtacgtaatagtatttactaattcgatggcaatatgaaatgattgtttttattttttgaggattgaaatggttgttgattgaggagggcttatagtaaaaaataaattgtatttttaatttttatttcataatatttatttttgttgaccaatgttttggcttatttctgtgatgctagatttatggaggagtggaagggtgacatccttgacccgttgtaagtgtcataatgttgtaatttagatatgccaatgtggcaaatatcttgcttttttccttaatgtaattgcaataaaggcttgattgattcattctcaatattttattatagttctactattccggacaaggttttaaattgcggttgtggttgcggtttcgttgcaatcattgacattgcgggaaaatgcaggtaaacgtggctgatgcggccgcaataatgattgcgctgaacccaaaagccttgacgttgtggccaaaatcacggccgcagaccattttttaaaaccaggattctagcataactcttaagttggtaatcgttgtcataggtgttactgtttacggtaaaaaacatatattttatccctcataatgatgaggattttttagtttatgtgatgtacttatatttatgtatacatattgaactgactctatttagtgtatgttttagtaaatgtttcttactcttatattttttctggtagatagtttcataaaattctagctagctgccgtgattctaatgccatgtttcttgcttctcatgtgaagtaccttttctctctttaatgatgcatcttgctccttgatagtgtagggtgtatgttaaaaagagttgactgcaaatggtaatcaataatttgaaaatcagattttcccatgattattgatcaataagttgtgtccttaattttttttaaatgcttgtattttgttaaaaaaagtttttgctatgattattgattaaccccacactttactctgcaaggtgcactttccacttttaactaaggatatttttcctataaaaatttcaccaacttaaatgaatcttaggtttagttttctcattgaacttttctctaggtgatgcaaatatctttttctctctgctcacatcttccctctgttatacctttggcaaccttgccagttgccatgcattttgattagtaataattcctttattgattctttatatttaccacttggaaatccttaacatgtcattccacatgctttagatctgcttacgagaattcagttttctgcaataaat

SEQ ID NO: 3866 - DNA, 3001 bp, Glycine max
  Intron number 1 from transcript Glyma09g11770.2 (locus Gly ma09g11770) derived from phytozome v7.0 (chr-ID Gm09; pos 12021371 to 12024371 reverse strand)
attgcgcaggtaatttcatttctcttttttcgatctttttattattattaaagaaataagaagtgttttgtgtttagctattttttaaaaacaaataataataataaaaaagaaatagtgtaggttaatttttttaacaaacaaatgttaggtgtggctgttaattatttcagaatgatttaggtcatgttatgtgtggttattaatttttgattttttttgttttaaaatgtaatttcaaaacaaaaacatattaaaaaaaaaggcgaaattaggtcaaatatttcaaaattgaaaaccaaaaagcattctgatcaaggcttgttaatgattaattttttgttagtagatgaattaaatctgacatcttttcctttttttttttaccattcaacaaagcttgcattgtaacaccaaaatcgatattagttaaataatagcgagaccaaccttgtaacaccaaaatcgatattagttaaataatagtgagtggggtgtaataagaatgtgtttgattgagacatggaaatagaaaaagagaatatgtaaatagatgagaaataatttgaattaaatccaatcttttctctatttctcttcttttcctgtgccaaaaacactctaaaagagtgtttacatgtgtaagtgatttggaaagtgtaatcataggaaaatagagcaagatagagaaaaaagaaaaagggaactataagattggtgcgatgattgaagaaagaagagagtgatcgggagtttgaatttctcctattaataaaattaataattaatatttatcaacaaaaaagattaaaaaactaaataaataagacaatagaagagaaataatgaaagataagatagcagtatggattacgttatagggaattattattatcataataagaaggataaaatatgatacaaaagtgtatgtacaaaaacctcatattctctttataatttattagcagtagcagaagaagaaggctcttattattgtttagaaattgggtaaattaaaggttttgcactgaaaattatgctggttgtatcaataaaagtttcttataaaaatttgtgggtttaatttactctattattctaaaccagatgtcagaacgtgtaaaagccagtacttaagactaccagggttaacgatgcagccagaccactctgatgacattgatatttaatgttaattaatttaatctcgagacaccggggcagcagaaaggagagtgcatatataaatataagttaaatttttaaaacaattatagttttaattctttatcagtgttttatgcgtgcttgttgttgttatttttttgttttggggttaatgagtgcgtattaatataatatggatgaggtcattctgcggaatatgaattgtctttttgtgggtttttatttgtttgttggaaaccgcaaaagcgttcacgcgtttgtggagtctttgttttcttacaccgtaagaaattaagttaatatatgttgaagtcaaatcagcagatgttgagtttgcaagcttatgtgtaaagtgaagtttgtcgtcttctgagcgcgttagagtttctatgctttgacttatatggatactgttgtcttttttttattggtacagtgttctgtctttgaatatggagaaccaaacaaacacaataagtagatataccatatacgtacaccaatacatagagagcttatttgtttgtaaaacgggtagaattgatttttataaaattaaataaaattgggatatttgtctaaattaatgagccatagatttacattgaaatgattttattgaaaactaggagaaactagggtatatagtcaattttattggatttgtttatttttgtgtaaagatgaaagagggggaaagaacagtttgagagggaaaatctatgaacaaaagacatgaaaaagtgaagacggcagcgagaagaaaaatattttaaaagaatgagaggtgtaataagatatttgtacaatttggaatgtctaaaaatgaagactcctactgtcctacaaaaaaagtcaaacaggtttaggtgtaaaaccattaaaaaggcacaccctaaaaatgtgaatgaagcattgtgctccaatcacagacaccaaagcattgcataagctgcgcatagtcaccaaatttagtgttcttatttattgtaagacctttatataaccacaaataaggttcttcctcacatccactgatccattataaagcacaatataaacagttcactgtttctgaaatctgaactacttctactcagtacacatgtcacatattggtgaggggcctagaaatttgcattctgccacaagttatttgcgatgattctgctactaagtacattttccaaacagtggattcaaacttagaagaagctttggatttttaatgtgcttgttgtaaataaggaacagttaatggtttctcaaagtaagctaaaaactgaaagaagaatttccagagtcctaactgtcctgtctaaagttggtttacagattactgtagaatcaggtagtgacaaaaggcacagtaactcactagtgtctccatcaattattaattatgttttatttaatcctgattagttttataaagcatttgtttagtttattatgcgatatgcctcatattcttattaataagaaaattattaatagtatagcttgctttactattgttttttaagtgttgtggtaactggtaactggtaacatatattaagaccaatgatttgatttttatactgtgtttagtgggatattgaaaaacaaaatcgtggagttaaattttcactaacattgttggtgagtctctccacagttaagcatgagtagcatgtccatactagatcctgtgtaaacaacttatcttctgctatactttttagtgttttctatgaagcatggatactctagtctttcctgatattttctgttcattgatatgcagataaaacgagaaatatcaaca

SEQ ID NO: 3867 - DNA, 610 bp, Glycine max
  Intron number 2 from transcript Glyma06g11590.1 (locus Gly ma06g11590) derived from phytozome v7.0 (chr-ID Gm06; pos 8936193 to 8936802 reverse strand)
gaggtaatatatcttaaaatgaatttgctcaagttgggctatgcgaaattcaacaaaagagaaaaagtacaatcttagtatgaaatcataataagcttgatatcttataattagtaagatcatgcattataaagtttaaagaatatggtcaaaacaagggatttcaaggtaacaaggttacatttactgagcatttgagcaatatatagactatacaaaaatattttacgaatgtatttctattacatattaaccacgttgagaggaagcaggtttttacggggcagtaatcttatttgcaaaaaaattgtcaaagaaaatatacatgtatgtacaggttcttcttctcttttttctttttgattaccgtcagtgggaactacgtacaacagcatagtggaaaattattattataaatcataacaatctttttagaaggttagtggcttagtgcaaatgtttttaaatactttataaaactttcgcccccccaaacaataatttttggttccatccctgacatttgcaggtcttccaaaatctaattgaatatattatgagaattgaattttatcacgcaaattaatattatactttatggtgacagata

SEQ ID NO: 3868 - DNA, 473 bp, Glycine max
  Intron number 3 from transcript Glyma09g36860.1 (locus Gly ma09g36860) derived from phytozome v7.0 (chr-ID Gm09; pos 42451464 to 42451936)
ctgaggtacgtgcaattacaaagcagggcatgatgttgaataatatgaaaaccacaagaaaatcttccaagttgtttatgttttttataagacttgttttggaaataattttcaaaacttaatagattttggatcagaattttattattgaatagtattgatttgttttagaaaaatagctttttgtaactaaaatgtgagatgagaatcaaacaaactcttagtgtttttgtgtgtctagctaatctgactgccttgctcaccttagtgttttagctcacaaaaaattggactatagttcttgattgtctctgggtagctgtatttgaacatattgagaaaatgtagttatggtgattgagttggaaaattagcagattttgttagttcctcttcattctgtcttattgacccggtaagtcccatttatttctctagatatttagggaatcaactggtactgcttcagtaga

SEQ ID NO: 3869 - DNA, 6125 bp, Glycine max
  Intron number 27 from transcript Glyma03g29230.1 (locus Gl yma03g29230) derived from phytozome v7.0 (chr-ID Gm03; pos 37189045 to 37195169 reverse strand)
ggcctcttttgccatagttctcttttacgtctttggtatgtttccaattcattattcatgatgattaatcgttatctgcatatttaatttgctatggtaatgaacattgaccttgatcatgaacccaactctaaaattcatggtgctatggtggcttatttatttatatctttctcaaatatgcagagagattggcaagttttgcttacttgatctatctttattattttgttttcttagaatgtgagtttggacctaactcaaccccaaaagctagctcatagggtgagggttgtcctcacgtccaacacttttgggcttggtgcgtggatgacatggtgggtggcctgtttaatagatctaggaaataaggaaacaatcctaatgtgaataaggaaacaatcatatcagaatgttatcttaacacatatcaaaaccatatctcaacatgtttctttttctaaaggaaatcttatcatttggacttgtattatttctctcgtcaataaaatttcttctttaattggggagggcaaaccttggtccaattaggttgctgctttatgacctagaggtcctgtgcattgagttgccctttttataaaaaacaaagattgtttaggtatttattcattgttttaggtaattgctatacaatgttatatcaaatgtagtaagtgttctaatttatattatcatgcttatcttttcattgaccattatatgcaactttttctttgtattttttttctcttctatttctaccttggagggtttcttatttatagcagtcagttttgattgccagcaccacgctagtcagatgtgcttgtggaggatgttgaacaggtgctgattggttgttgtattgagactgagatgagtactgatgtactgagattggttagactgctgactaggatatgaattaggattctgactgtgatactgattgggctgaagtctgagattgattctgatcggagtattggttggggtaatccattggttgagtgagaacataatcgtcatcatgcctatgatggcagaaagtagccaggtcatatttgtgacaaatatgatactgcacattgaagtagcaacctctgccgcagccaccaccacgagagaagttctggtcaccaccatgaacggagttgaaaaacctatttccaccattataattgttgtagcttgaaccaaagtttgacgataagctagactgaccctgagaaacataagcttgtggatttgtagaggcagagtcgctggaaaacgcttgcatagaagaattagggctaaaattaggtttagcagcttcggcaagattaattgaagcaagtaacgaagcaagagctttcttgcgagaaatatgagtctcgtgagcaagaagtagagtcgcgacttcattgatatagagactcaaactttccatttatgaacgtaacaagagattcaaactcatcaggcaaaccatcaagaactatatcaacaagttcagattcagaaacatgttctccaattgatgagagcgagtcaattatggtttgattacgaaacagataatcagaaattgagctattattgagaaagatggtatgaagatcgttgcagagttgatgctttttcgcatgaataatagagtaaaagtgcgtatgaagtttgtcccaaagatgccaagaagttttgcttccgacgagtcatggaagaaccacaccagaaatggtggattgtagccacgagaggaggagctgatcttgttgctcctagagtaagaactcgggtgaagtaataccggcatcgtgataggcaatggtggtgtattgcggtggaatttgaggctcggtgagaagatgttaaaggctatggactttgagcacatgttcaacctgttgacaccataggaggtagttggcgttcttcaacttctgcgagattgagtgtgagaattcttttgcagttacaacagatggagaagctagtagagtgccatttttccctggcagagaaggattggaagcggagggcatgaaaattctagggattgaaacaaagctctatgataccataaatgaatcttgagagagagaataaataaaactgcattgaggtgaaaagatgatattattcagcccaaggaatgaacagtttacacctcaatttatgtagacagttacataactgcaattgtcaactaactctagtcagttagtgacagctgttaaacagctgtcctaacagttaactaactaactataaactcactactaactatagtttaatctttacatattgggaaaaacccaagtcacacatcagctaaagataaagccaagtaatagtatataagtgaggggcaaccctcaccccttgagctagcttttggggttgagttaggcctaaactcacattctaagattttaagatggtatcagagcttattcaagtttaatacaaagggtcacccaccattgttatccacgcaccaagcccaagaagtgctggaagtgagggggtgtattggaaaaaacccaagtaaagataactatctatcgagtaagtatactcttataatctttaacaaaatatgtgggcctttttgtattaagtttaacctacataattgggtttatcatgggaatggatcctctcatgggattttcatgtcactgggccaagtaaagagagagatagaaacaaaagtgaagaactcacatgagagaatctattcctggtttgtagagatatctataaaggatattagctcccatttatttgattgatctttaaggtcaacatttccttgatataatattagagcctccttaactgctccatgttgtgttttttatttgtatatacttcacattggtcagttgtttccttcctgatataatattagagcctccttaacttctccaaatcttgaccattgtctgcttcatcagtgtattattttaaatatcaggacaatataatggtgtgttttatatatgcatattatatgtgcttcacactgaagagactttgcatgacgtgatataatatttgatttctaggacatcttgtctctgataagtcaaaattttgacataattggtcatttaaatattagagcctttcaacctgccctacccctaaactttctgttaccaataaataaatagataaataaatattagaatcttcctcactagagttttcaggttgttgaatgggtgtgactgtgggtagtttttcgataaattgagagaaaaacagaggaaaaatagagaagaaaaaggagaagaacaaagctgattctattgatctgaaaagttagttagaggtagttacaattcaagaatttatatacctctatacaacagaactaattataactaactgatcctattgaggtgcagttagaaaagcccttgtactccctgaagtactgactaagatgaaatgaatgctgatagcaaaagctaatagtccttacagtagttactcattatagaatgggtgctgttacaaaaggctaacagtccttacaaacaaaatacaaaactgttttcacagttatacaatgacatatactgataccccccctcaaacttaagggggagagttttcaatggaaacactcttcacattgagtttgcctctcagagcctcaaatcttgatgtagacagaggtttagttagaatatcagcccactgatctagagctagaatatgaacaattgagagctgcttggccaaaacttctctctcacataaaacacatcaatctccatgtgttttgttcgacagtgaaaaacaagattgtgaacaatagaaacaacactctgattatcacaaaaattaccggagtagtgaaagaaacttgtaactctgtcagtagagtataaatccaagtcaatttagtgaaagtttgagcaatgttgcgatattcagcttcagtactagacctgacagtaaccttttgcttgtgagaccaccaagagactaagtttggaccaagaaaaaatggcagtccttgaggtggagcgcttgtcattcacatgagacgcccaatcagcatcatagagtgcttgaactgttagatttcaacttaaaaccatttggcactaagttgtccaacagatatataagctgcacctcaagaactgaggcagacgatgtgggacttcctaacacccccctccacagatgcctaccaatacaggcgagcttactagaataggcaagaactaagatgggctataggttttgataccatgttaaactcagaaattaggatgaaaactgtgtcctctcctctagagaattctcatttaaataatatgatacaatctgatatctaaccttgaaatttgctaaaaaattatatatggtaacctacagctgggctaagtaattaaggatataattacacaattatagctaaacaatcatacaagatatgctaatttaaagggccaataaatctgcacaaataatgacaaataatctgcttatcaatcttattgatagaatagaggcaacaaaaggtggagaaaggttaggacttaggctaaaataagaatcaacattttttgtggaattagtggaagaaggaaaaagatcagcatagggaaatctcaactcattaacagaacatccttagatatgtaaattctaccagaggatgacaagcacttgtaacccttgtgagataaggaataacccagaatcaaacactcttgagaccgaaaattgagcttgtgtgtatgatatggccttagtaaaggaaaacaggcacacctaaaagttttaagaaaatgataatcagactctttattaaacaaagtaacaaaaggaacaacaaacttgagagagggagtgggaagcctgttgagctgtgagagggtaacctatgagctttacccatccaacaagaagaacaaaactcggtgatgtttttattcagttgagaaatattacactgtttgagaacaattttcattacatgatcattaggatgtcataacctagcatgccaaagattaagactagtggaagaggtaacaccagaatttgaaacaatattagaggtatgattgacagtagcagctgaagtaggaaacttagcatttggaacagaagcagaagtggacatcagcagagaaggattgccttgaagcttgaggttgtgaaaagaatagagtccatcaacaccaaccactccttgtagaagaattttattggtctcctgagatttcacaagatacaaatgagggtgaaacagagttgtcttaggcaaattgactcacacttaactgatttttcgaaattgaaggaacatgtaacaacttatgaagcttaaaggttatggcagtgtcattaggagaaacaaaaattgaggaatcggagttggagatacttaaacctttaccattgcctatgaaaatctgcttaggtctatcaaaatgagtaaattgtatattattttgagagtcaccagtaacatgaaaactggctctagaatctagtatccaagtggagccagatgcatcattaccatgagaggaggagtttgtgagcatggcattgggctgactgggactaggaacagtggacttagcattgggattaaccccaagtattggaggatctggttgaaccagtagaatatgggataggttgcagcgtggtgggatcagaaaaggttagggactcatggctgaaaactgatatcagttctgaaaaaatgacagacattagcagtgtgccacctctagtagaatatgggataggttgcagttagaaaaacccttgtactccctgaagtactaactaacacgaaatgggtgctgttagcaaaagctaacagcccttacagtggttactcattacagaatgggtgctgttagcaaaggctaacagcccttacaaacaaaatacaaaactgttttcacaattatacaatgacatatactgataatagtgatcataatatgattcctgattcaccacaatactcccaagcattaccccccttggggtttctgtcttacagtagcattgttttcaatgctaattattgtttattgaatcttattgtaggtctggatcagtttgttggaggggtttctttgtta

SEQ ID NO: 3870 - DNA, 3549 bp, Glycine max
  Intron number 2 from transcript Glyma07g24950.3 (locus Gly ma07g24950) derived from phytozome v7.0 (chr-ID Gm07; pos 27389849 to 27393397 reverse strand)
aatcttggactgggactatcatcggtccccctagtgtaagttgctgtctgttatttttgacacattggaatccccagctaacatccctatttgcttctatgacaaagtaaatattttgaatttcagtgggggcttgtttaatatatctttgagtaatatgttatagattaataatcagtaaattggtttttttgttctttagacatagacatgtgaaactctggcatatatggattcaaatgttggatgttaaattataaataaaggttccatttgtataaaaacaatacatattattaggtcaaatatatagaatttttagtaaaaccaactccaggtttagtttactgatatggtgctactcaatagacgtttgcattttgtatttcgtacaaagtttttggtgggctgccatttttagtggccggagagaacatacctatgttgtggccaagtctctaaaatactcagttgtatctctgtcttgggacctacattgggcagtgctgagaagtacttgattcagtaacaggtcttttttctactagtttctatcattttaccatctttttttctcagcaagtactactcctattttatttcttttgtttctgatttatctcattttatgtgtccattaatccatgcaacatcctcatctacataacgctttttttgtttgctctttacagcccaccattgagtcagtaccataaagcatagtaggttttattgtatggttatgtttttcttttagcttgagaagcacctttccatctcaaataacaccttcctttcatctgcccagtatgaaatcctataatttttacatatgcatatataaaaatactcttgtactaacgttaaaatactcttatttacagatgtttaggaatacccccattccattaacattatataatttagaaggatgtcaactgccttgtatattttcaaaaaaagtttgatactaattctaccctctcatctaagcccccaccaattttcttgtttgactcccacttctcttgttgaccaatttgtaaccttgtcctcaactgaaaatcttctctatttcaatctttctctttcacattctttctctttgctttggatggaataaagaggttgcttgaagacattatcatggtcaaatttaccaacagagaatgacaattgattctaaccctttgtcttccttttatacaccttccattttctgggttcaagctttatcagtggtgatcaagatggatcatgaagttgggggaatctcttgctgcaccagaagagctttcaagtttaaactgaaatagttctttcttcttcctgagcttctttgttcttatgttttggccttttggatattatgattgagatatcatcaggttgctgagtttttctatggttgcaaacctttctgcgaagtgatggtaggatgaattggatcaatcacgaaaacaaaagtaaacaaaaaaatatattggactattggagtaattacaaatgctagcaacacatcctttgacacatttttttgaacactctactactggctgaaatttattgaaattcactcaaattttggtgagtgccacttatcatataatgaatttctctcctaattttgtagttttcaataaatttctactaatgatggagtgtgtgttagaaggaggttgttagagtgtgttgttagcactcctcttagagtaatacttgaatgcagcaagattttccggtgtctttgcacctgaaataccaaaactcttgaaacagtcatgttcagaacatgacatagaagcaaaaataattcttctcaattaaatgtggaaagcagggaaggggagaaacccttttaaagatgcaatccaaccacacacaccatataactaccaaacctgaactcctgtagaaaacatcagtgggtgcttggtttaagaaatatttttctatttttattttctgttgtaacttttaattagaaaaatgtcaactatattatttttttgttttcaaagatttgtacaggaaacactaaaaactattttttattgttttgattattcctatataaactgttgaaaataggaaacaaagtgaaaataagataacatttttttaatgaaaaattaaaacagaaaacatttctcaaaccaaatacctacttagtctctttttatggaaacctttatattataccattaaaaaatgtagagtagtgggacaaatccaatgttctaaaattctaataaagcttgttgcaaagcagcagtagtcatgagtaaggtaagtttttcaaacttgcatgaagtcatttgacacatttgtaagaatcctgttatgtacttgtagttgtatctaaacaaaatacttacctaagagtgtgctttggatttccaaatgggtatgtcaagcacgaattattgcaagagtgaggtaacgtatctggagaaaaagtgaggtaagttcttcaaatttgcatcaacttgtttgtgctaatccttttaagcacttccatctaaacaaaagacttgacctaagagggtaatgagtttgttaaggataaatcatgtaatgcccggagtatacggaactgaagtaaaaatttgcaggagctaaacactagaaaatccaatatccaaactcatctatccaaattggttcagagtagtcttaagtaaaatcaaaaggcattttgagtttacttgtctctctgtcatttaaatctgcaattctgtatggaaatgaaaattccattttcaggaataatcttaaattcttgattagaaattagaaatttagagtataagtggataataggctgattatgcaaagtagacagatggaacaagaaaagtaaagtctctgaaaaggaatgcccatacctaaatgtccacccagaacttgatagcattaacatcacccaaactgaaagaaatcagtcgtacaaagaaagcattcccttgggaattaaatttccaacttccaagagttagcatggatagctgtggtgcttggtttgcaatcatttctgatcaaggccatacctgttctgtaaaccaaaactatttaactcctagagtattgttttgaccagataaatatgtcttatgattttctattcacatggaattgattttcaaaacttcaaatattacccaaacatcatgattcttcccacaattaggcttacaatgaaccttgtaagaaaaagctttgctggtggttgtctcacaacaagtgatcataacatggaaatgtttttgatgaaataataaaaataataggtgagataatgacagatattaaatgaaaaataaattaatattcaaaataattaaatatcttctataagggattttcaaaggtgtctcactttctagctgctaagcaaaactaaaactagtttctactaaataatatattgatatggcctgtttttcctgtccatcatgttattttaccagactgttcatgaagggcgtatctaccagttgaaattgttttgcagcagggattatccagacaatcctccatctgttagat

SEQ ID NO: 3871 - DNA, 1151 bp, Glycine max
  Intron number 2 from transcript Glyma10g36630.1 (locus Gly ma10g36630) derived from phytozome v7.0 (chr-ID Gm10; pos 44751822 to 44752972)
gagttgcaactgttgatatactcagctacattcaggttggtttcatgcttttggttattctctgtttttttatatcatcgtgtggtgaacattgcaacaaaattagagggagagaaagagagggtgaggacttatagctgtggaagttagtgacaagaaggtgtgcatatgtgtttctttgtgatgattttaagccaagcataacaaaatgatcaatttttgcccagacctgtttttaaccgagctgaatggtgtcgtgtaatccatgtatccgagctcacttggtggtggaataaggctttgttgttgtttgcccataccacactcgtgaacaatactgctgatggaaaagaaaaaagtacaaggaaaataatctataaaatattgtgttaggcttgttatcttgaccgtttttggtagaattgttctctggtgttgatgcttaattgatcagttgtattttgtttccgtaggctggttaatgcaggccttctccttttctaaattgctttcctttctgtcctctgttagtcttgcagttttatctttttatcattctttcttctgtctgttctctgtggaatgcctaattagagtgtttttttcttcttcaatttattggtgattttgttaatgaactgaaattgataaagtgagtgtttgttttgtttgcctatatgtaagttgtaacagagactggtggaaattttttttctgaacgtgttcctttatgccatattaaagatttgtaggataaacaacttcctacaaattgaaatgtcgagtattatgattttgttacttggatattattgtggcagtttaatttagatatttatcttgtttcttgaagtatattacatccttgtaagggtggctgggaaggataggaaagataataaaacatttttttttcatgccattttaaagatttgttggattggcagttattaagtaattatttctcagaaacttgtgttgcacttgtagctagttagatatcttgaagttctgaaaaaaatggttgaaaacatagtaggtgttgggctacatttggatgcctttgcacttcaatagttcaatgtaatactggtttatgttgttattggttgcaaagtgcatgtatgaaagttgagttttctgctagcaga

SEQ ID NO: 3872 - DNA, 501 bp, Glycine max
  Intron number 2 from transcript Glyma20g02830.1 (locus Gly ma20g02830) derived from phytozome v7.0 (chr-ID Gm20; pos 2453830 to 2454330)
gatacaatctcgaaaggcaaagtgagactaaatgctttgaattctgaattagtgttttctataacagtatattttgctttcaaatatttggtcactcactgaactgaatgatatccctccagttcagagcttttttaatacttcattactacaactaaaattagatgccggtgccttctataatcaaatcataggtattctcccacagaatgatactccattttcattcccatttctccaaaaattcttcctttaaaaacatagctcatcaagtattcatctagcttagtcttagcctaggttaaactgtgataatatgcctttggatttttgtgtccttgcaatatagagatcttattgtactagccacatgttaagattcaagaaattaatcaatttaactgggtagttctaacttgcctcttcaattaatttggtatttgtcatcatatgtttatgtgacaagatttgttaaagctttggaacacgtgcttggctgct

SEQ ID NO: 3873 - DNA, 1759 bp, Glycine max
  Intron number 3 from transcript Glyma16g32820.1 (locus Gly ma16g32820) derived from phytozome v7.0 (chr-ID Gm16; pos 35917717 to 35919475)
gaaggggtaagtgagcatgtgtagaggattggcatgtgggtgaatttaatcagacaattcacctcactttcaggtctcacttcaccagtctgataagcaggaggggtgaaactgcagatcaactggtttccttttcatcttgtccttcatagaacagtgatggtggagtgttataattctctttgttgcacaatgagtactaatagtaatagcatctagatatgctggatctataaagcaaggtttgaaggagaatagtattgttctaagtttgtgaaattagcaataagtcatggtaggagggatgaactgtacttgttgagagatgtgtttgaggttaaattcatgttgggagatccacaaaaaagttcatttgccccctcagtaccacctcctcatgtttgatcatacagagttcatgaagctataactttatttgaaaaacaaaagaattgacacttcaagtattttaaaatgtatttatcatgggtgtactattactggtatagcattgataatatctgcagttatcgtgataagcttttactctttatactaattgctgcactgtcacaatttaacagtctttttgtggttttaatatggatgttgtcatgtgatctgtgagtattaattatagtctaaatgttactcacttttactttcaattgctactcgtaatctatttttcagagtttgcttgtgagatgatatactagattcagctttcacaaattaaaatgtgaatcagaagctcattgatttatttaaagtaggttgtctgctattctcactgtttttttttttcatctttaacagaacctgacaaaaacagcttcaatagcagtgtagctgatcagcaggtaggtctgatactctgggtttcaatagttgtgttgaattggattatttcagctaaaaataagctgatgtttcattgtgtaatgtgtataaaatgatgcctggacataatccatgtcaatttcggtttcaaatatttcatgagaagtgacatgagtctatatccgagatctatttttccctctcaaatcttcacccatcagtttagaagtctccattagtgtttgcttattgattttattactatctatagtgttaaatatgaagtttttcattctttttaatgttcctctagtcatgtacgcataatataactccaatgctgatgtttgagctatttttgtcttgatgtagctgttggacatttccatattgtgctaataattacttggcttggctgttaaaattatattgttttgttaggaaaggaggaagagagaagaaagcaataccaagaataataagattatataatatggtgtataatgatggtatccaaaatatcaaattactaaccaaatggtccttttacagtaatataattaaatccaaaacaattgtagtactacttgtataagcccaaatccactaataaaaattatatgataagactactaacccttattaaaattaaaatatggaaaccaataaggagatataatgaaaataggaaacagttcctaagattactttctcaatgagatgactaatttaagatagtctaaaaagatatactgagtatattatgaatttacgatatattctaatactttccattttccccctaattaagtgactgtgggtagacagattattcccacttttaaatgttaagatgagttttgaccatctggtcttcttctgcaggctgtattggagactgtagctaaaattactc

SEQ ID NO: 3874 - DNA, 898 bp, Glycine max
  Intron number 3 from transcript Glyma03g38720.1 (locus Gly ma03g38720) derived from phytozome v7.0 (chr-ID Gm03; pos 45031780 to 45032677)
aacaaggtttgtgccgtattatctctttactcgatttttatcaatttgtttctctctttatgaagatccgcataatgcattatagtttctggtatgctgcatgagttgcccctactctttgatttttcttgcaacattttctctcccccttctgtgcacccttttttgtacctccttcatagtgttgacacaacctgccttttcccctttcttgtactttattcctatggagtgggtggcaaggaagaagaactctctagcatgacttcaatctcattaatgctgcggataaactgacaattatttttcccaactcatattgctgtgacatctaatatcttgcaaacatttaaaacttagactgtgaagctttctgttttttatccttaatgctacctcattctgtcaatctacacctagtagtagtagtttgttgtaagcatgacaaagagtattgtaattgttattttgttccagtatttaaattgaccttatatttgtatttgtattcaataaggatcttcataaatgtgacctttagcacccttgttaatgctatgcaaactgcgaagtattaactcaagcttttttttttaccttccaggagaagagttatatttttctctagcttagggcttgattctcatttattgaatcacctgtgtatttgcacctacctcattcaaacagggattttggaaatgagtttgtgtttttttacttcctttctttcagtatcaattttgtatgttcctaacattgggattctttacctgaaagtgatttgattttggtcattggtgttgtccttgattttcaatgttttatcttggtttttgaaattgacatgggcttgtgtttaggaatcattgagccaataaaatctggaattagagat

SEQ ID NO: 3875 - DNA, 2222 bp, Glycine max
  Intron number 4 from transcript Glyma03g05120.2 (locus Gly ma03g05120) derived from phytozome v7.0 (chr-ID Gm03; pos 5406947 to 5409168)
gaaggtaagtttttcccattttctcatggctgtcctagtgacatactctttttttttccatctcattggttattttaatgaaaaacttgaagcttgaacacataaagttcttggtttgttctttcctgcttagatcattatgtattttgagcttgcttttataagtattagaattcatttctgacctagtctaatccagtagatgaattactaggctaattactaagggtgtgtttgatttgcattttcattttctgttttcattttctgaaaattgttttcatttttaaaagattagaattctgaaaatatgtttggtttgacttcttgttttctgtttttaggaaataaaaacaatgaaaatttatgatatattgacttcttgtcttttttgtatttttaaatttgcttaaaattatattcattgtcatctcattttcattttacccaaaatgaggttcctgttttcaactgaaaacactgaatcaaaattttattgttttcattttctggttgttttctgttttcatttttactggaaatattttaaaaaatccaaccaaatacatttttatcaccattttctgttttcagtgaaaatgaaaacagaaaataggcaaaccaaacgccctctaagttttcaataattagaatcaaattgtagtaactaataaatactatatcataatagtttacactaattacaataattatacagtaaatattgtggtgcttttaagacactctatttttttagtggttttattttgttctgccataatttgattcataaatatctatccgaaatagtggcatggggtggccaaccccaaaactactatagtaagatagcagattaggattgtcaccatattgaagttttgatatataaattaaatactttatgcaacacatataaatgctcaaaaataaaaatcacccaaaatgtctctaaacatatttactgtttacttgattaaatatttgtagcagtatacattaatagagctagtcttcttcagacactaaggtggagcaacataagagattggttagtattgggattagggaagaaattctagattaagaatagaacttgtgtctttagtttggaattatgcactcgatttgagattccatttgaatggataatacaaccataatgactatattgaattacaatgtagtatctttgtgacttaaatatgcatatgacttgacagaaataaatcaagacaccttaccttgtcctgacaaatatgtgctgtcataaggtctgtcaactgtgaagtagcaaagcaagagtatagataatgatatcttctttctatgaatcctcagattgcaagaaaaatgaaaagagcaaataatgattctacaatttgaaaatgggatatcttgagtcctaataagaagctataaagtaaaatacagtgattccttaggtggataatttttggatattgatggaggtacaacaaactgtgttaactgttaactaccccagatcattgtttcagagggcattttttttccaaatagacatggtttcatatgtgtgctggtgacacttctaaatcgaaagaggagcataccaataaaagctcttcataggtccttctgaatttgctttggtaattcatgtgctgctgtttgagtcatgttatgaatggtattatctgataccgatgtggttgttgaccattgcattgttgtgctactacacattcatagcataccaggctttcacaaaagaaggccatggcattttctgatgaattttatttatagatgttatcattttttttatttaaaactatatagtttgggcacatactgagaatctgagatagttgtagtgaaccgccattggggttttgaatgatgtgaagtgaattaagtttcttagggtctgtctaatttgagaaaatgttttctcttttcataaattgaccataaaaatttcttgtgatttgcatatgaaatgaagaacgaaagagttagatcaaaataagtgttaaaagtgaaaaaaaaatgtagcaattatttgtagaataagaatataaaacccaaaaaaaaaacttctattctaactaaactaaacgaaacgaaacatgtccttattataacctcaacctttgacacgtgccaaatgctaaaccaaacatgcccttattatgttgtactttttttgttttgtaggtctgcccggcaccttacct

SEQ ID NO: 3876 - DNA, 8368 bp, Glycine max
  Intron number 2 from transcript Glyma20g13540.1 (locus Gly ma20g13540) derived from phytozome v7.0 (chr-ID Gm20; pos 18765858 to 18774225 reverse strand)
ggaggaagttctgtaagttgaatttctgtccttgtgttatttcttccattcaacttcctctctattaccttaaatgtttgtcgttagttttgatgtcctccatccacaaagagccactcagatatgcattggttctgatatagataggatcattataatattcatccaatccattgtgtctcacttcaacatttggttttctaggttttaacttttttctccatttttattctaagcacttttttctttttgcttgttaatattttggaagggatgttcttccaggaatttattttccaaatggaataggccctttaagacatattctggaaggcccaaaccacctaaggcccgataccttttgttagtggaagttagttagaggagagacagttagaataatgtttcggttatattgggaggagtgaggaattgtaaggatcaggctggaattggaaatagaattgggagaattggaaatagaattgggagctctgagaatctttctcaagcttgggggaccaattgctttcattttgtttatgcttatctatttctgtcttacttccttatctgtttgttgaaaatgaagtgactgcattgctgagaaatttgagttacacaatacaatagagaagtgctgagctatctttttattttttttatttctcagccactgcttgtatatttatatataaaacagaaagagagagaggagataagctgcctttggataaggattagatactcagcttccctcacactcaacatgacaacacataaaacttaatacacactcaacctcacacacactcaaaacagccttttacctacacagctgtctacacaatacagctctctacaatatatatatttaacactccccctcaagctggagcatataaattaaatgctccaagcttggaacatgaactgaagcatctcaagctgcaccaccaaactggaaaggactgcctcctgatggagttgatgctcccaaatacaaaatttgattgaactggggcaggttgctggcttgtgtggaggtagaggctgctgctgccggagtaaatgaaaattgaggagttgatgcactggagaactggcagaagtaacaaacacagtggatgacgatgatgtactaaatgtggaaccaaatgcagacttagtgggctgccaactaaagtagaacttggaccacattggagctaacagagtagaccaccgaagaggaagcaggggtgccaagttcaaaagatgtggcaggacttgaagaaggaaacaacaaattcccagaaacaaaagctgcacttgctgcagggctggacttcaaagtgattagtactgattaggagacaacacactccccctcacgagatggaaggtggagtcaacacttccagcttgggatgaacaatacaagtagaaaaatagacaatgaaacatgccggaaacacattggcagcagattgaaaatgactgaaaaacattcaaagacaattggaatatgttgaaccattaagtagaagccacaacacaatgcttaaccacttaacagaagcaaacacacttaaccacctaaaaggtagaagcaaaccaaagcttaaccatcaagagcagaagctaaacatggtgcttaaccactcaagacagaagaaaaacacaatttttgaatgcttaaccactataaaggaagaagcaacacaacaatgtttaatcatccatggtagaagcttgacatcaatgcttaaccaccatggatagaaacttaatgacttttttttttaatagtagaggttcttgactagattgaaccccaaggacagcaattacttcaaggacagagacaaggaagaagttgctggacaacaggatcaacaaatgacctaaagtagggttcgtgaccagattgaaccccaaggacaacaattacttcaaggacaaagacaagcaagaagttgctagacaacaggatcaacaaatgacctaaagtagggttcttgaccagatcgaaccctggggacagctatattaatcagcagaccacacaacagataaatagaaggacatgagacaatggagctgcacaacaaagggttaagagagacaaactaaaagaagccttaaacaggaccagaacatgccacagttctgaagacaaagaggaagggccaaaagaggaggtttgagcagacaacgatggtgactgacaatggtagacgacgagaagcagcaaaaacagcggaagatgatcacacctgcccagtagagacagtggctgacagcagagaaggaaaacacaggaccggaagtagccatttctggtcaaaagacgaagccctaatggagaaggagaagggaacacaagggctggaactatcaagctatcaataccgaaaacagggactgaaatgtgcccagaaggagactacaaagctgttaaaactgggtacacagggccggaagaagtcatttctgaccaaagagacgaaaccctaatagagaaaaaaggagggaacacgaggctgacacgttccaggtggtcaaaattaaaaaaacaagggctggactgtacccaggactggccgacgaagtgactggaggtggtccggtgacattccgacggttggaaggcggcacatgggcttcacgcgctggaaatgatgcgttgctgtggtggcgcgtggtggcgctgctgctcacgtgacttgcaggggtgggtcgcgcacctcgaggcgcacacaaccctggtttcgccggaaaatttgacgacggcagacagcggccggaggtggcagcggcggcggcggacagcggacggaggacgacggctggcggccagagcaggtcagaacgggatcgttcctgctctgataccatgttgaaaatgaagtgactacattgctgagaaatttgagttacacaatacaatagagaagtgctgagctatctttttattttttttatttctcagccactgcttgtatatttatatataaaacagaaagagagagaggagataagctgcctttggataaggattagatactcagcttccctcacactcaacatgacaacacataaaacttaatacacactcaacctcacacacacactcaaaacagccttttacctacacagctgtctacacaatacagctctctacaatatatatatttaacactgttattgctcctacttatagttgatacttgacaatgttcactcaatgtgtacctgtgccaagtctggaattgttaagccaaggcttaatccaacattacttctcactcaccttgaacccaaaaccatcaaatctgccctttcaaacctaacttggcttgcagcaatgaaggtcgagtatgatgcactgctcagaaatggcacttggatcttagttgacttgcccctggacccccttccaggaaaggcattggctgcaagtaaataagtacaaaaccaggctcgttgccaagggcttttaccaacagctaggatatgactacaatgaaaccttttcccctgccattagacctgtcacaatcaggttaattctctcactctcacatataactgaccactacagcagctggatgtcaacaatgctttcctcaatggaattcttcaagaggaattcatgactcaacctccaggctgagtcctccaacaaacagcttgtgtgaagacttcacaaagccattaatggcttaaaacaagcccccagagcttggtttgacaagctcaaagcaactcttcatttaaaattttcctccagcaagtgtgatccctctctctttgtttactctgaagcagcttatatactagtctatgttgatgatattatcaattctggaaataatttcagccttataatgtctcttgtttcaaagttgaatcctgcattttctctaaaggatttgggtcagctggaatagtgtttgggaatagaggtttcatctcagcctaataggtctcttatcttcacccaatccagatacataagggatttactttcctaaaccaacatggaagaagcacatcctatttcttctcctatggttggaggctgcaaactcactaagactggttctgaggattctttgatcttacactctataggtcagtggttggggctcttcagtatgtcacaatcactagaccagaaatctgtttttcagtgaacaaggtgtgccagtacatgtctaaacccactgaacagcactgggccacagtcaaaaggatccttagatatcttaaaggcaccatatcttggggattgcaattttagctcatttctaccaagaatccctttctcattcatgcatactgtgatgtagattgggcctccgatcctgatgataggaggtccacatctggtgtagctatcattcttagtccaaacttgatctcctggtggtctaagaagcagactgttgttgcatggtccagctcagagttagagtataggagcatggccttatttgtagtagaagttacttggattttgtctcttctctttgaactcaaggtctctcatgcctctcctgtcattctttgtgacaacactagcatagtggccttggctcataatccagttcttcattctcgaaccaaacacatggagttggacctgttttttgttcaagaaaaggtgctgttaggaagcaagaagctactctacttctactcctaataaaacaccataaaagactagagaagagctataaagagataaacaagataaatttcagatttcttcattgatacctcaataggtgcaaaccttacattatataataaccctaatgaatgacaaccatacatgcatgtgtcaccatctagtattttaggaaattaaaataaaaccaaatgacatcacaaggataatatctagattacctaatctataaaaaccatctatttaggcctcctaagcatatcctatctggtgctcaccaatctggttctagtggttcacattcttgctgttggccagtgtaaaaacatcctcaccaaagctctcacacctttcaccttttctgtctgcagagccaagttcagagtgcttcagaaacttttagccaacccccctcatgagcttctggggggtattagagtatacctactctgatgggtgtattttttttcctagtgttatcactgatagctgttagtacaactgttgtaactaactaactgtaattagttagacagttagttcggttattttaattgacctctatataatttgaacatgtaacctttcaacacttgggttgaataataatatcttcctcaatctcaatctctctctctctctctctctctccaattctattagggaggagcttcaaggtgtatattgaccattgtattctgcaccatcttctccagcagtgactcaccaccacagaccaacaatgttggttattcaagctcatggggtttcaactcgaagtcatctacaagctaggccctgacaataaggctgcgaattctttatcctgtcgacaccccgtttttgaacttcacaccatctcaatcaatttctattgtgtggatttccccataatatgtgcagaagtctagaaggatcccaacttggttcagttgagtagcactttgcagtctaattttgatgccaactcccactatgtccttcatgatgggctagtattctttaaaggttgtttaatgtttcccaaatttttagccttgattcctacacttagggatgagtttcacgatacagtcacaggagggcattcgggttttaccaagacccataatgtaacactccgatcgaatcacactagaatgagagggatccaaagactgtacaagtatgagtctgtgtagttgaggatgacttaaaggaattaattggtactacctataccaacaagatgcatttacttttatagcttatcacataagaactccacagttaagcgtgttgggcttggagtagttataggatgagtgatcttctgggaagttttccaaaaagcatgtgggtgaggacaaagcacactgaaaagtcccatgttggtttgtggggacagtcattgaactgaaagtagctgaagcaaattgtcgaggtctctaaaaggactacctatggatggttctaaccagtgaagagttctgaccaacaaggatgatgagtaaagtgtcaccggaagaagtaaaaaatcagggatgttacaaatggtattagagtagagctctttcctagtacagtgtggttcgaggacgaaccaggcggaagctggtgggcatacaataccccgatcgaatcacaccagaatgagagggatccaaagactatataggtatgggactgtgcaattgaagatgacttaaaggaattaattgatactacctataccaacaagatgcatatactttttggtagctcatcagttaagaacttcatagttaagcatgcttggcttggagtagttatgggatgggtgaccttttaagaagtttcccgaaaagcgtgtgaatggggacaaagtacgctgaaaagtcttgtgttggtttgtgggggcaatcattgatctaaaagcagttaggaataattgttgaggtctaggaatgtctacctacggagggttctgaccaacgaggagttgattgaagtgcctccatgcgaagtatcgtagtgtgagagttatcgagaagttgacaattaggggtgttacacataagaggctagcttcctctttcttctggaaagggatgaaggcatccattatggactatatttgccagtgtgatgtttgccagcataacaaataccaagccatgtccactataggtttgctccaacctattccgattccatacatcgtttgggaggacatctccatggatttcataatcggtttacctagctcacaaggctatgatgtgattttggtggtggtagaccaattatctaaatttgctcacttcctctccttgaaacatccttacacaatgtgaaacaatagctggagctttcattaaggatgtagccaaacttcatggattccccaaatccatcatcagtgataaagaccctctgtttctcagcaaattctggactgaattgtttcatctctagggcactgtgttgagaatgagtacaacttataccaccccctgaccaatggccaaatggaggtggtcaatcggtgtttggagaccttcattcattgttttgcttcagagcaaccttccaaatgggatttgtagttgtcgtaggccgagttttggtataacacctcttcacattttgcaacaggaaaatccccatttgaggttgtgtttggccaatcccctccatctgtgcttcattatttgaatggggaaaccttggtggattttttggctacgatactcattgattgggatgaggctcttcgtcaactcaagttccatttgagtagagcccaacaaacaatgaagaagtatgctaacgcccgtcgctgacatgtcatttatgaggttggagattgggtgtacgtgaagcttcaatcacataggcaacagtttctgttgcctgttgaagcaatccaaaatggttcccacactactttggacctttccaactcctttttctggttggagaagtggcttacaaactaaagcttttggattcagctcccattcatccagtttttcatgtttcccagctcaaacgatcagtgaatagtggttcttctgtgagttctttgcctctaggattggaagttggtgaaactaaggtccccagtccagaagctatagttgccactcgtggtactggtggaggaatggctcagtctttggatatcgcaagcagtggaagaggcatcttgggaagtggcaacttccatcaaggacaaatttcccagtttctgccttgaggacaaggcaaatttcataggggatgttattgataggaatttagtttccaaatgaaataggccctttaagacatattctcgaaggcccaaaccacctaaggcctaataccttttattagtggaaattagttagaggagagagtaagaataatgtttttgttatattgggagtgaggaattgtaaggatcatgctggaattggaaatagaattgggagctctgagaatctttctcaagcttgggggaccaattgctctcgttttgtttatgcttatccatttcggtcttacttccttatctgttattgctcctactgatagttgatacctatcatgttctttagcaggatctgtaaattcatgtgaaatcacttgtgttgcttttcaatttgatgctgattttagttgttagtgttttggtttcttgtttaaatagggtgacaaggcacaagtaatacagacactgctttt

SEQ ID NO: 3877 - DNA, 622 bp, Glycine max
  Intron number 3 from transcript Glyma10g32550.1 (locus Gly ma10g32550) derived from phytozome v7.0 (chr-ID Gm10; pos 41010476 to 41011097)
aaaaagggtaaactttaaatcaaaagccattagtttgtggtaaatcacattcaatatggtaaaataatttgtttatttttgtttaaaaaagtttattttacaacagaggttaaaagttgagagataatgaaaatgcatattagggtggaaactgaaagacaagaagagttacaaaaatgtcaaggtgttaggtagaaaaatggccatgtaaggttttaaatgtctgtagggaaaatattttaatattcttcaatattgatattgatttaatgatgcttatatttcaaactaatctaaccacatagaagagaagagaggtaacagttctgatgcttatattcttcttatgtgtgtagttggatttttttttccaaagccaaagtcaaaattcattaatcaagaaaagtccagcacaagttgtgtccgagcatcaatataaagcagaaaatgatgctgcatagttatcgtttatgagtagttggattaccttgccatgaaataataaattgaaaacattggagctagttgattttcatatatttctttacagtataatttaaatttcttataagtcatgatttcgattttcattatttatttcaggtttaactgggggtcaaga

SEQ ID NO: 3878 - DNA, 3842 bp, Glycine max
  Intron number 2 from transcript Glyma08g09970.1 (locus Gly ma08g09970) derived from phytozome v7.0 (chr-ID Gm08; pos 7151973 to 7155814 reverse strand)
tttgttatgtaagtgcctctttttcacccatctaatcacctaaagatttgtttttggttatgcactttcctctaattcttccatgcattttaagccattcttcttcttcggctgctgctgctttttttttttccttcttcactctcttctttttttgtttcacttttagtttaattgttgtgctgcttttccttttattgtgttttggagtttcatggagctccactttaattagcttgcaggaaattaaaagttctgttgttgatgttgaggattttgtctcttttgttttttgtgatggttaatgtcagtttagtgacgaaagagaaggactaagcctgctagttgagtatcaaaatttagatctatgttttaaggagcaacggaaagtctctgatttgatgtttatagcatctgttttctttaatttgtattgtttagtgatttttgtaactcttaattcccactgttgttttttcatcctcttttctcctataaccattctagaccataattaattaccttctttagtttttgagtgtcagtaatcttttaattacctgtttgatttccatgatttggagctgttttggggtggtgagttagtccactataagaaaagctatctttttagtgagtatatcatgtcaattgatgagacatgttgatgttggaataattatttgcttaatctctggatataatttacttaaatgaaatcatacaagagtttgatttgtgaaatataaggagacaactccttttgagtgttctgttaaacctatctgatttaaataatacatttttgcaatcttagttttatcttggagcaactcctggaaacttcctggcatgacccttttcatcttagtatattttgaaaatatcatctgcttttgccagctaataaaagatttaagtctgtaaaatctggcacgatactctaccttaagactcattcatgatttgagaaggacaattccgcaatttactaatgatgaaggacaaaatagttatagttcacaacaaccgacaatacaaaatgttacttttatgcttttgcttaatttagtgcattatagaggcaacttaaattagcaagaaggggggaaaacatgaagtgggaaactacagtgtcttgaagcagtggattatattgtgctaattgctatgaccaactaaatagcccttgaggttgtcttattcacgcacttaaataaataaataaataaaaatggtgctcaacatcaagagacgagctagattctactaaccagaagaaaagatatgaaatgcattacataataatactcattaaagtattattatatgataaggaacataaggtacactttgcattcaagtctcgggtgttaaggtccataaggtacatttttgcttttaagtcttgtcttgtaaacaacaataggcttctttcctgtggtacgaaatgaagaagaataaaaaagataagaaattatgaaaacatttttgctacattgttgttatgaaaagcttaaaaaatatgaaataataaagtcattataattcttcataggtggaatctgattgtgtatccccccaatccctcaatatgcttgcatttttaaaattgccttgtcatggatgcatcaattaacacctgggttcatttaaggaccctgttttttaggggaaggaccaaattttgttagttgtaacttaagtttccaattccctagcaagaatgcaagataagttactgataatatgatagtttgaaggtcatttcctctttttggtaaataaaatataatttgtaccctaaacataattattgcctttccttgagcagtttaggtgagtatttgtgctcataccggttgtagatcaaagttatttatccagaaataagttttcagtggaaagtgttatccagattggttttccataaagtattaaactgcatccgtttttttcttatatcagcaaatgttagtttgttagtttttgttaatgtttagttggcctgcaacagtggcctataacattagtggacaggagagaacagttaactagcatgagtagcttataattggtgagtttcttgagttagtgagtgttcaacacactaatggtgattggtagtagcatagtatgtggggtaaggtggcaattcagagtataattcttaaaaaatttctgtaaaataggtctgcaataagaggccattatatttgtctgcatagtgtttctttatttactggatagtttcctgtgaccagaagtttccttagacagttacttttggtgaaataaatgtgttcttaattcttacactgtgctttcgcttttattagtgttgggactagacaagtttctgtgtgtaaggtgagatattatagcagtagaagggataagttagagaggttcaaaatataaggcagattcaatttggaagaaaatcttgaaatggaactattcatcacctggtgtgtctgaggctatcagattaaaaaatatgaaattaaaaagcaaatgagttaatctagtactttcagtcttttgaatttctttaatagaggtaatggccactctttaatttatgaagaactggttagtaaacagaaacaatcatctatcaaagatggttcatgtcagctataataagtataagcttgtgtatgcttgtaatccttaacaagaattcttttggttcattctttcctatttaaccttcattcgccaatgtttgtttctatcacttccatttatattacatgtattctcatatcctagtattttttttagttacttcccaagtcgcatttctcatatatggttatatcctcttgtgcaaacaagcattattcttttctgctataagtttgctgtttcacatattgttatatcctctggttcataatgaagaaacatacttaggtttgtcctctgggaattcttttagaataaaaaagtattctacatgagccaaatgttttagattcgaaagggactatgtgaaaaactgtaaaactgacatttacaaaaatacatgtggtaggaatgttttaaggtttgaatttctattctctagtgctttattcactatctatcatgcatgatttttaagtctacgaaaacgaataaatgtttgataacaagaaatttgacaactttttttttgtgagatgctgttcaaagaagcactactgtaagtgaaactgttacatgtgaatgtgattgtggtttctcttttcattgtaaatcgtttcttcgagaagttcatgcttcatacactgatctatgatatcttgatgaaattcatatattccaattgttacttgtacggttgtgctcaaggtttgagctatgatatctctctgtaagaagcacttgaataacatgttgactatgaatgtatctgacttccttagtcttgtcgaaggaatattccacataataattatcgtcagtaatatagaaatcctaatatctttttatgtttctgcaatgttattttttattttattgatataagactagtgtatatgttttgctcatatgacggataaatacaatggaatccatgcagttacttctcatgtatatgattcaattggaaatggttttattttattgatataagactagtgtatattttattactgccaacttcatgttaatgcttgaatttgttccatttttgcacagttaatcaaaactccaaaatttttacatggcaaataatgtatttgatcaaaatgtaggtaatggtatcatggtaagctgactaaagtgacagatttgttccatcactgccttctgagaaagaagttaactcttagcaggtccacacaaac

SEQ ID NO: 3879 - DNA, 1056 bp, Glycine max
  Intron number 1 from transcript Glyma17g36780.1 (locus Gly ma17g36780) derived from phytozome v7.0 (chr-ID Gm17; pos 40713756 to 40714811)
gcagcacgctttcaatctgcagctgtaagttcttcattttttctcattctctctgtctgcactgagtaatttgtaataatattcggttcttgcttttgaggtcactgtttctttctgcagttgctgcattggcatcttgggaccattttttttttctttaccactactttttcactggttccattgttgtattgtactcttccttgtgctagatctgaagctggaaccttccccttctggttgtagtatatgccctgcttgatttggttgctcttaacccttttcagaaatcaaaaacacttgcaagttccattctttcagttttattattattattattattattattattattattattatcaggttttagtctatatttgctgttgtgatctgctgctgattctgttatgtagatgctcctcatgtctgattctgcttcatgtattcgtggccataaagacatttgcgctgaaattaacaatctttttgggctttttgcttttgggaagtgtttggaagatcttgtaaaattgagggggagcaaagtgattcggctcaaagtgcccttgtcatttcaagttatcatatctcacataaagtttgttatgattttctttttgctataatttgacaacctttttccagtaaagtaagagagagagagagagagagagagagagagagagagagagagagagagagatgttcactgattactaagattgataggtgaagttaaattgaatactaaatttgtctaacatgtatgcaagcctgcggagtctgtatcaatatgtaagatgtttgtttttccgcgttaaaaatagtgcattcatccaatctgaaggtatctttaattggattttcctgtatcaatttatcttatataactacgtcgtttaacttttaaaatgagcgaatgagttgattgtcttcagaaaagaaaggaatggcaaaatcttagtttagcacacagttttctgttcttattaactgaagatgttaacgtaaacagacatgcttgtgcttacatgtttgctgcatgcaggtact

SEQ ID NO: 3880 - DNA, 1806 bp, Glycine max
  Intron number 2 from transcript Glyma18g52990.1 (locus Gly ma18g52990) derived from phytozome v7.0 (chr-ID Gm18; pos 61397939 to 61399744 reverse strand)
ctggtgaagtctggtaaataaaacttgattgcataatgtgctttgccgatctacattaatttggtgcagagattaaatgcaatttgaagtggtagagaatatactgattttaatctaattttggattaccaattgtttacaagtgttctgattttattctaagcaaaaggtgcaatcaacttactaattgggctcaattaaaacatctactgctatacagtacgaaacaacatacacaaaagaatacgaagtacatgtacgaaagaatacgaaatgcatgtggcttttttttattggttaaacattacatgaaaagaaacaaaaatgaaaaaaaaaattgatggaaatcatggacagctgttgatttatttttgtacttttcatgagatatgcttcgtaccattcagcaatttccatagtcttaagttcagctagttggtgaaattacttactaaaaaccatatttggcaatgagaagtaattaggtttttaagcactaggagagaagtattagtttctttttcttttgtttttattattatttgattattttacattggcaaatggttggattaaaattctagaaataaggaaatgtctgggctttctacttgagtgactcattaaaaatcagcatttcttcattccttatattgctttccaagcttgttatacactgtactttgctagctaaggtactcttcccttttattggatagatactgtgtattctaagtttttccttattggataaagttaattcattcattcagcacaatgttataaaaagggattatgaaaaactccaaaatctacttaggcctccttgctttgcttagcatgtgtttgggtgattgtttgcaaatttaatgttcgatgaacatgatcttgcaaaaagttgattgtagttagatgtgagtttagagttaagtgattatgttttgaaactcttatctcataagtaaacttgtagtaaaatttagtgtaaaattctcaacccaacacagaagtgaaaccttttcacttagcctaacatgcaattataagcaaaatgacattttgtttaaaataaacaagcatttttactccaaaatatcatgtttggtagccccaaatgtgagttggaggctcccacaccaatctaaatgtagcattagaccagaaaacctttttcactgctttgatctatttaacatcatctaagcatacctataatatccatggagttgaactaacagattgaggaaagccagagcttcagacccacattaagattaatgagtttttactcatcattttgctttgcataatgtttacaacgcttcaattcatggtaagagccaatccctttatactactttttatggaaaaagcgatgtgataagaataattttcccatgtttgaaaggacagatgaacattttaatgtataaacttatgtaagaaaacaaaatgaatttgaaatcttttttttttttttttgcatcattttataccttaagtttgagtttctctgcatcccttcaatgagtaagaaatttgtttgttgggatcaatatttcatatttgcccatctagccttaaatcaagagattctattccagtattcttttatagtaaaggactgtagcttctttttgccttttattaacgtttatttgcacttaattgcttctagatggtgatgaatgttgacactatattcaatagttggaagtgacccattctttggattttcatagcaaaaatgtttaattgctatgtttcttttttcttttattttctgtatttttaggtttggagttg

SEQ ID NO: 3881 - DNA, 1421 bp, Glycine max
  Intron number 5 from transcript Glyma14g38390.1 (locus Gly ma14g38390) derived from phytozome v7.0 (chr-ID Gm14; pos 47509381 to 47510801 reverse strand)
tgaggaaatatcaagtggatattattggctccgtatgtattcttggtccatttttctaatcatgttgtggttgtcctatttaatagctccacagattaaatactacatggtctgcgactaggaaagagccactaatcttcacatgacacattgttgagtgtcattaattccttcttatacattgaaaatttttattagttgtcatataaaaattgatttagggtctgtttggatacaatgtataggtgtttttgagagtttctgttctgaaagtagagttttttcagtacagatgctctcgcaaggacttttagccttgtatcaaaacagggtctaagattatgaacacgtggtggtttgaggctatctgataatttcttcagtgggaggttttactgctttagcaattcactaggcaccgttgggagtgctagaattaaaatggaatagcaattttttttaggacataactagttaactgctgcatgtaggtttaattgtgggcaacgtggtgttatgaaatcctacaaataatatttttagaaaagagtatactggtacggcatgtctgataacatgtcttccacccacttccctaatcccctcttatttcagttttaatatttgtgaacaatttgaaatgaagtctagttgaaaatctaatacagtcatgaagcctaaatactctaaaaatgacagtgtctggggaacctctgatttatttttaaaaaaattgtcgtgtatatttgcgatacagttctgaatttctgatactttgaatctttgattgggactaaacttgtgtatgactttctcttctctggattcttaaagctatattttttttttcaactaaagctatattaaataataggcaattatataagtcaagacttctctttgaataggactattgatgcttttttttgacattttgacacgagttaggcaaaaatatgtaattttcttgacttgttcatgagggaaataatatatttagatagggcaaggaaatatatgtaactatggcttcatgttatgattagcagtgctgcttcaaggtcaaggaggcagcagcttaaggggccctaaatttaaggcaacagattaagactcaaatatttgctactgatataattttttttttatccgtaggaaccgtgtactatataattatgtatttctaagaaatcatcaatgtctttttgtaaatattatgcatttatgtaatttttttttttaatttaacgtgtttagaccatatcatatctatgtgccaaaacaaaagaacatatcatatcttgaattttgaatttaaagaatttcccatatccccctatacttgctttaataagtatatggcttcactatttttggtctctctctgtataacacactaacatgacaaactattgttgcag

SEQ ID NO: 3882 - DNA, 2132 bp, Glycine max
  Intron number 1 from transcript Glyma18g52450.1 (locus Gly ma18g52450) derived from phytozome v7.0 (chr-ID Gm18; pos 61055434 to 61057565 reverse strand)
ttacctcatcaagcttcttcttattggcgatagcggttagttattcccttttttctttctctcttaagcgaaccaaacgcctagcttctttcagatttcagatcttattgctttttttcttcttctctggggtttggtgattgattagtttggagacgcatcatttggattatgtttgtgttttcttttcctggattgaaagctattatctggttaattgtctcctttttttggggggagattttaactgtggagtattgtttcttttaagacgtgattgctatatttgacaatgtctaagatgaagcaatgacacaggatgatatacatggtgaagttgttctcgtgtttagggaggaaaagtatagcttgacatagattaaggttctgtgtggataaatttctcaataaacacttatagagaaggagataacaagtcaaaatgaatcaagtttctcccaaattaaaagtaacttatgcacaagttaaaatcagttttttgaaaaattaaacgagagagcttctacaaaattttaagtgcataagttgattttaacttatgatagaagcttaattcatttttactttcttattttcttctcctaaaagtcttactgagaagttcatctagacatggcctaagttgttcaatgagataggtaggtttgagaaaatgcacgtgggagaatatagccatataggaaatatgtcattttatgagtttgtgtgtaaatttacacccacaagattgatagctgtgctctttataacaaataataagtcacagtttacacacaatcaccatcaatctaagagtaataagaacttagtaatgaagtcaaaaaatgaaatatgatggtcaaattaatagaaaaagaacataacaaattagattaaaattagtagaatgtgaactgggaagtctaagcatataagaaagaatggaacttaaaaaatagtcctgtaaggtgtgaaggaatggaggtcaaaatagaggtggctttttgtggaatgctgaaggaagaaggcttttgaatccttttttttagcaaaaaatgcattcaaaaatgggagaggaatcacaattttaccccaaaagtacccaaaacaatgttgtttaaagacaaaagacttgtgtactaatttggttttatgccaagaagctcaatcgcaaaggctatatgcctgttgcagggcttgattgaaaaatatataaggaaacaagaagacctacatcattgatctagaaacactgcctttgaagggtgctgtgataaattccatggaaggcttcagagaaagaaggagatcctataatatatgtttgatttataaatgaaaaagatatgcatgatgtggcaatgactagcatgcaaactctaggacgtctcacaaatgattttcatgtaatagtaggtttgcagtttgcactgaaggtggatttggagtctatgctataatagtcagtgttatgaattatgatgtttgcttcgaacttaaatatgtgagcactgaacatgtgccacatgtgttaaatgtgtgagatagtctagtttcctatgatggcttggttgttgtcgtttgagtcattgactatacactggttatttttgtatatatagataattgtattattacataaatatgcacccataaataatagataaatatgcatgtatgtttggcatcttgaaattgaaaataatccataaaataagtcatagttaatgggtagttattttaatttttgtacctcaaatcctgaaattttgttaagatggtagttattttagaaatttagaaaatctatttttttaagtatcttaaaaaaattaaatagaaagcagattgattagtgtgcaaggtgcaacatgcaacaagtaaaggtccagtatcagtgtctccaaaatttaatatacacatacatgcacgcacacaatactctcccaaatatacagatatatatatatttatgtttgtttttatgtatttgtgcatgtgaatgtgtgtgtattggtatggtgtcttgttttgtctttttcatatttcacttgaacttttgtctttttttaatagctatcggtctaacaattgcaggtgtgggaaagagttgtctgcttttgcgattttct

SEQ ID NO: 3883 - DNA, 1797 bp, Glycine max
  Intron number 1 from transcript Glyma19g02540.1 (locus Gly ma19g02540) derived from phytozome v7.0 (chr-ID Gm19; pos 2351699 to 2353495)
aacgctagtggccttagctttgaagagctttacaggttgattcattcgttcgtttaactatcgattaacgcttcttcgatttcaatacttcaaaccttgttgtgaattgtgcgatgcgggtttggattttttcaatagtgtggttttgttgggtttttttttttttttttgtgattctgcggcattttttagaattaatttgtgttatcgaggatttatagtggaatgtttagattgcgtgtggttaaaattgtggattaattgctttactgaacgttttgtctgtttgtgaaagtttttgatcagttccgtctgtgaaaatttgaatggcgaattatagggtttgaatttgaacattatcaaaggtcttttttttttttttccagctgtctatttgaaatgaatcttctaatggtagtccttcacataagtaggttgtgtgaagagagatagacctaaagagattttttgcatgtctggttgcatgttcaagagattttgacgcgtgtcaattggaagcaatagtttgtagcttccgcatcatttacatgtatttgaggtgattttgtgaaactacgcacgtttctaaagcaaaaccaaacacttgcttttattttgataagatcccatgtgtgtagtgttttttatatctgtattaatcgaaaagctctttttaatgattttatattctttttttcatttgtctacctgaaatgaatcttctaatgtttgtctttcacctaaagagattttaattttgacaagacccgtgtgtagtgtattttatgatctctttcttcatttaatcttgtcatgtgaaaaaactaacatgagaggatccatttcttgtcgtataactgtataagcatccttttatcatctatggagagtctctagccaattgaactttgagttaatattatgccaatttttatgtatttttatttttatttgcatacaacttaatttcttatacatatatcatatattttcaactatcatgtgatttctgttatgcccacaatggtgtaaactatatgatatagtggattactggatttctgccattttccacaatctgcaattgctaacactgttctatatgtgtgtgtctaaatatttaagtattctttttaattgggttactctccccgtttgattgccaaggaagatttttaacaattctctatttgaggttatgatctaatgatgttgtcctagaattactattcaatttgttgattttgaggagtttaaagcttttgaccaggtctgaagcccaggtgaaggaggagggttgtgttaggttctcggcagccaatgtaaaacttgtcttgatactgaacatgaccctcatcaagtggttgtttcctttggggttacaacttctaaaagttgacagattcttatatggcacatgttatattgaaacattcgctgtgatgctatttggctgtcgtagattttatgctttttgtatggtcagttcaccagcttttgcttattcttattcacatggacaaaaaaaatgctgtgttagcttagttcataccatttagtaagaagaaaaagccattaagcttgccatttattaataatttataattgaacaaaaatcaggagtttttatataattgatgttacgtgataggcctgtagtctagttttctttaaattaattatttgcctaagctttctttataaactataagtattatagatctccctacctaccaataatcatatccgtgtatataatttccaaatttctgatcattgtgatatgcccattcagga

SEQ ID NO: 3884 - DNA, 1204 bp, Glycine max
  Intron number 14 from transcript Glyma06g12390.1 (locus Gl yma06g12390) derived from phytozome v7.0 (chr-ID Gm06; pos 9571976 to 9573179)
gcagtgaggtatgaatttaacctgtatctgcatacttgagtggaaacaattttttttcccgcaaagtaaaaaactttaattggttaactagaaacacagatttgttcatgatagcttgttacacaacatgattgtttacatcaatagatagcagttgtagtttaacttttcatacaatgcattccttatgcacatgctgtggaaattctcttctcttgccttccttcaaagaaaaacaaaagggtagaaagttatattctgggaatataattcttttgcattatatctcctgacttctaggtgctatggtaatttataagaacccaacatgtagcccatattatcttccccctagaaatatgtccctgtacaaaattagggaacccagaaaccacctcaatatgaaaaccatgcctttgaaagggtcactttgccattctataattgattgtgaactgtatcttgttagcaatataattgtcttggtaatttactgctagtggcaagttaaatggaatattctggtttacttctgccaataacttgatgggagtccacaatggaaaaagagaaaacaaattaagaaaataatgattatattgcttgtttgaaaatgaaacagaacaaggagagagatctctcctcaaagggtctcccctgtcatggctcagcacttgctcaattctaaaatgctaattaatgacaatttaggatgatcctgttgaccttccgtcctcctatttatttatctaagtaattcctgctaattgttcttaacatgaacccttctttatttttccaagcaagtatccttttacctgtctctcctaacatagcccatgtgaaaggatatgttggaattgatgaagttaccagcaaaatttagtttggcttgaagatagctgtttgagttattcatgccttctactgttgattaatctgggatgtctatttattttgacctcattttatgacatgcctgtaactggattctggacaacttatcaactcatctggatagttatatcacattaaattttccacttttttttgccattttttattattccgagcattcagttgagacttgggaatggtgtcctctggttctttaaacatgatttgttattgtcaccctattattattagttttttcaattgttttctactttgccattcacatttctttattttcaggtgatag

SEQ ID NO: 3885 - DNA, 2197 bp, Glycine max
  Intron number 6 from transcript Glyma10g24670.1 (locus Gly ma10g24670) derived from phytozome v7.0 (chr-ID Gm10; pos 32330908 to 32333104)
ttgaaaagctattgaagaagtttaattattttgatgtgaaacatgtgttctactccttatgactcatccatcaagttaaagaaaaatttgagtaaaggattttcttcacataaatattctcaaagtatcgtttctttattgcatttgacaaacttctctaggcctatctgatattgcacatgcagttggtagattggaaagtaattgaggaatttagtgatacaaaattgaagttttgattttgatgaaataaaattgacaagtggtcatgtctttgctttagctggttgtgcagtatcatgaaaatctattagacaaattattatttcacatggaagcaaaaattattgctttaaatactgctactaatgaggctgaatttcttaaaaatgtattatgtgatttgtcattgttaaataagcgtatacctccaattccaatgcattgtgatagtcaaattgctatatctaaagtgacaagcaaaattttaatgaaaaaagaagacacttaagagtgagacataagtctataagaaatttgatttctcatgatgtcatttctcttgactttgtcaggtcaaaaaataatattgcgaatctgcttacaaaaaggttgacatgtcaacaagtatttgagtcgtcgaggggaatgagattaaagcccattatttagttacaacaatgaacacccatctttgtgtgattggtgatcccatgaatggagttcaacgggtaacaatgaaattgtttgttgactagagtacaccaaaatgaaatttggtggagctgttccgtttctcattcctgtgacgaggtgtattataaattgtggcaatattaaggttgaagtatttatatatgtgtatttttggtaaaaaaaaaaatacctcttaattaatccgatgacaattattgtaggggtgggggtcacaacccactctttgaggattcacctagtgagtgtggtggtggggccgccactatgagatatggactaatctctaagtgacactcacgaaacaagatacaagcgcaaggtcgtgtaacgcgctaccactgagtagaacctaattgaacaccaatattgtaggggttgtgtactaaagtccggttaaagaatatgtagttcaagacaatgaagtcactacatttttctcggatggaagttcataaacactaagtataaggctcaaacccggaaggttccttataccgaaatacaatatcacatgctctttctcttatgtttttatacaaattatcttttagaaaatatattttaaaattttaaattatgtgggggaatgttgataaatatttgtgttttaatttaaaatttaaaaatatatattaattctattttataaaataaaatatttactatagattttcttaagattttgttttaatgagttctgtcatctttttagaaaggaggaaaaagaatatataggcattttgcaacaacaaatatttatcaacattcccccacataatttaaaattttaaaactacagtctcatctttttctcccaaaattttctatatcttctcttataaaataatttatttcttgagagtaagagaattggtgttcataaggttcggggatcctttcgctgcacacgatcggaaccaacgggttgtcgtatcttgggagaggagcgcaatcaaaatttcttacccgtgcaatgggggtgttttctctctaaggatagcatttacgcgcttcaacccatgctatatctttcttcccctaattttttttcttgtgcttattgtatgttataatgcattattcatgtgttgtcaattaaatttattttgctattgttattttgttgtttaattcaagactgtgcatcttcttcgtatttattttctttcattttttattttatttttctaacagttgcagcacgtggactgatcataagggtgtagattgtatagtgcaggtagctctgtgacttgtagatgatattgtaatgcttttcatatttcatgcaagattctttagaagtgttgattttattgtaatgtaatctatacaaatgtgtaggaggaatcttatgtataattcctgtgtataagaagagttcctcttcatgagagactatgtgttgatgatgcatttgatgttgttcctcaggtttcctctaggccttttataatcttagttttttcttttgtcataa

SEQ ID NO: 3886 - DNA, 1002 bp, Glycine max
  Intron number 13 from transcript Glyma09g21300.1 (locus Gl yma09g21300) derived from phytozome v7.0 (chr-ID Gm09; pos 26277428 to 26278429 reverse strand)
gggctgaaggaattactgcaggtgagtacttactggccctagaatactactgtgttcatttcacctcttgaattgttattttgaataaaaagtacttatttcttgcctcatagcatagcataaaattggtttgcttgttaacaccttattgatattctttaatgaattcatgtctctatgaagtacaagccttacattcatgtacacattcagcaatgtgttagactagtgcttttgactcgtatacacatggcttatacagatttcttatttaaataaaaagaaattcattgttactagactattatcaaatccttaaacaatctttaaaattttaaagcttacttgcttttttgtttatttttttttattaatgtgcaattttgatcgcctaatatatttttgatctaatttaatctcttggttttttaaattattatattcatgtccttttgtcaatttctgtctacataactctcagtcattagtttctgcacaaatactttctatctagggtttttgatactattacgtattaacattaaatgttatacatatttttatatattattatatttttattttgatttattaattagtgatcttaaaacactggtaaatatcgtggagaaagtgaatggcagaatgtgcaagaatgtgtcagctgcattatagaatataactactaaaaattccaattgaaaatcataagaattttttttcttaaactttagaataatttttagttcattttactcagaatcaatccaacccattattgatcaggttggtttggtttggtttgaatttgatagaaaaattgtataaatccaacctaacccaaacgggttggtaacgggtttgatggaaccctacctaataatgccttttcttcttctggcttgagccagtgtaatgcttttagcatcttttaaagaagtgtgctactttttcttttctcttggcttaatactctacctttcaggcattcttagacttcag

SEQ ID NO: 3887 - DNA, 925 bp, Glycine max
  Intron number 12 from transcript Glyma20g35290.1 (locus Gl yma20g35290) derived from phytozome v7.0 (chr-ID Gm20; pos 43569146 to 43570070 reverse strand)
ggactactctacttttgagccaagtgccgtttcaggtttgatcaaggtgcttggtactctttacttccatctcttggctttggcttggctttcatattacttgtgccaaatattacacttagaccttttatttcagtatttccctcctttcattcatcttgctatagggcatgcaatggataaatttcttaacacttgtttcattaaaaataagttttagaaatcaagtggttttgttaggatttgaggtttactgcatattttctacttattctgcatgtttttagaagaaaaaaaggggtttagtttttgcagattctgttggccagtctctcttcaaaattcaaaattagattaaaactacgaaatatcactatggctaccatgtggtttgtttgaccactctggcatacattgggctgggaattttctacaacttgcagattgtgtttaggttctcacagcaatgagacaaacaaaacaaagtagtttatttggtctatatggcatatgatctgatcagactgcttaggttgctgtattagcatcccatccattttggtttaagccataatgctataaacctgatgcaaaatgaaatggaagtgtgaaatttcagtattgatctaacattttacggactttatctgtcaatgctccagtgccagccatctcgtgtataatttctctcaagcatgtttgaactttgaagtgacataaatgttagctcacaagtaaatgccattgtatagtgaagttatggatacattcaagaataaatagcaaatggttctgtagaaatctgattcatgtttgtttgtattttgagatttttattttttattttacaactcaactttggaacaattctttcatgttgagtatattgttataattctgcagggtttctgcccaggattaaatc

SEQ ID NO: 3888 - DNA, 847 bp, Glycine max
  Intron number 1 from transcript Glyma05g08830.2 (locus Gly ma05g08830) derived from phytozome v7.0 (chr-ID Gm05; pos 8715676 to 8716522 reverse strand)
gccttcagctgtcattaagttctcgcacggcacaggttctctctttcgcattttctgggcattcgtggtttcgccgcatgttccaaacaatttttaggagaatgtgtatgtgattgtgattgattgcctttttattttcttctgaattttatgggtaaggtaatgatacattgagtagtgcccgttgttaattaaccctgctgccaaataacagattactaaattgaagtcataaggttggtttcaatccctcctactaacagaattaataaaaaaaaaaaggattattagagtagacaaaacaaaagcatgaatactaactaactaactatcagtctattattcttaaggagaacatgtcctgcatactctctctttccctacaatcttttcttggccatccatgtatggttgtaggaccaagaacaagattaactttatgtatgtgtgtacatgtatatagtttgatatattttacttgcagccacaaatatgtaatgtaattaataatgttgattttggctttttgttctactcatgttgttgattggttgtaaagggcaaatttttattcttctcaatttactcagtttgcactattatggctaccaaattgttgaagattttgtagtagatcattttcatcacatttttaatttacttttagatctatgtagttaacttggacagttgttaatttttctaactaatctgatatgttgcctttgtctcatattgagcatctgtcttgagatcaggtagtttgagatataaatttgcacaacttgctaacagaaaagctgtttaatcaataaaagctgtcttgtaattttacagagagaaagag

SEQ ID NO: 3889 - DNA, 7310 bp, Glycine max
  Intron number 6 from transcript Glyma20g00200.1 (locus Gly ma20g00200) derived from phytozome v7.0 (chr-ID Gm20; pos 4323 to 11632)
ttacccaccaagttgtactgacaggtaccccttttgacaaattcctttgtgctcctttgctatactttagtcatttttgtaaaaattcttaagggatttcctagactatcaatgataggaaacaacaggatcttgaaacctatggttctcacaaacaatcaataaacaacaatgatgtgtacctttctccataggaagacttgtacctttctccataggaacttctctccggtgcattttgatttccttgaaagatgagagaaataagatttcacttcctttggcctttcttttctgcctctctccgttagtgatggttatgagtgagagaaaacatttttctggtcaggaaggggaccttatttcacgttagtggatattaagccccttttataaccactactctcatcaagtagtagtcaaccctaaaaacttctcctattaagcccaattataatttagtccttaatcgttaattatttacttattagtccctacataagtcacatgcctctcacatgagacataaattctaacattctcccacttggctcatgtgacattaataaacattatggactaaataaataaatagattaactaacataatgcgcattaaaattgactaaattgttctatacattgggtacatcataatttcatgattaagaataggaaccaatttgagtcatggcggttgtacatcatctaatcgacatagtcccttccatgtactacaaattagtcttctccttaatgtgatcattagttaggagtacataattggtccaacataatgtcttcattcaagacaaaacctgttaacattactctaacacaaacatgcatgcaaacatagagaacaggtaatcagaaacatatcataattgagctcagagtgtcagcaaaattacataaggtaaattacacttaatgatcatcaataaaaataatgcccatactttcaacatgttctataatgtcttgggcaataatcccttattcaaagggtcaactatcataaggtttgtgctaatatgttctattgacactctttgtttctgaacttcttccttcacgataaagtacctcaattttatatgcttagcacccttagagtacttgtcgttcttacaaaaaatattgttgcagagttatcacaatacattttcaacggcctaacaatactgtcgacaattccaagccctgaaataaagttccgcaaccaattaatctgaactgtagcctcaaaatatactacaaattcagctttcagatgcaacaacaactgatgcatacaaaataactttcatttattttcgttccatatcatttctaggacattctgcgagactaaatttgtctcccttctaaattagaataggtgatgttaaacacctttccatcttgaatctctctagtactttatcgatatatatactttctgagataagtctgacaatccttgtgatctattatggaatatttctatccctatcacatagcttacctcacccatatctttcacttcaaagtttctagagagaaatttcttagtctcatgaagaagaccaagatcgttagttgcaagcaagatatcaccaatatacagaattagaaaaataaccttactcccacttaccttcatacatgcactgataaacagtatttgccttaaatttaaaggaaacaatggcatcattaaacctcaaataccattagcgggaaacttacattaagactgtatattgatttctttagtttgcacactatgtgttcctttccttcaattgagaaccccattggttggtccatacaaacattcttctctaaatctccattaagaaagacagttttcacatccatctgatgtagctccaagtcataatgggctactaatgccataataatcctgaaagaatcctttcgtgagaccggtaaaatgtctctttataatcaatgtcatctttctgagtaaattccttagcaacaaatctaaccttgtaacgttcaaggttgccatgagagtcacatttagtcttgaagacccacttacaaccaactctcttacaaccctttggtaatcctacaaggtcccaaactctattatgttctatggaatttatctcttctttcatgacatttaaccacttctcagaattatcacaacttatagcttgtgaaaacaaaactggatcattatcattaatgcttaagtttgtttctatttcatgtaggtataccacataatcattcgaaatagctggtctcctttctctttgagacctctttaatgctacttcttgtggttcttccataataagttcattatgcatcatgggttcattattatgttgctcctcttcattaattttgtagcaataactgaaggagcaatcaccttactattagaggcataagctaaaaggacttacactctaacttctttaattttcatttctcgtggaactgtactcccactgatttcatcatttccaatgaaccttgcatttccagttttgacaattctcatactatgattagaacaataaaacatatacccttttaacttttctggataaccaatgaaatatccactgattgttcttgcatccaattttctttcttgcggattataaatccttatttctgcctgacaaccccaaacatgcaggtgccttatactaggtatcctatttgtccacagttcaaaaggtgtctttggaactaccttactaggaaccctgttcaacaactacatggcagttttcaaggtatacatccacaaggatacggataaagtctaattgattaacatactcctaaccatatccattaaagttctattccgcctttctgatacaccattttgttgtggtgtaccgggaattgtgtattgcacacaaatgcacgtttctgaacaagcttagcaaatggacctgggtgttgcccagtttcatcatatcttccgtaatactcatcacctctatcatatctaataattttcacacttatgtctaattgcccttttacttcattgtagtaaatttctaaggcatccattgcctaagaaatctcgggcagtaagtagacataactgtaacgtgaataatcataaaaaatggtgataaagtatcattcctttccgaaagaactaacatcaaaaggtccacaaatatcagtatgcacaatttcaagaagctgagtgcttcttgcaactcctttctttgtatgttttgtttgttttcctttaatacaacccacacaaatatttagatccgtaaaatctagataaggaagaatttcattttttattaatctttccatcctttctctagaaatgtgacctaaacgtttatgccacaagaaagcagattgttcattcactaaactatgtttagtgccaacattatgatgcagagttaaaacagtttcagcatacaaactgtttatttccaatttatataaaccatcacaagaataccagtaccaatgagatgattatgcttaaataaattgaaacattcattaccaaattaaaagagtatccagtaacatcaagtttagataatgaaactaaattactagataaactaggtacataaagagtttccagtaaatctaaatgatgtccagtgtcgagttttacgcaataagtctcgactgcttacactggagtttcactctattccccatgaaaatgaacttctcatttgagcttatggtttggattgtaaggaatctctgcataatgttagaaacatgagtcatacatccagaattaatccatcatgtatcatggaaaactttagttaagtttgattcaaaacatacacgagcattaagctcacttttcttttcgaaccaagacttgcactttaggtaatccttctggaaatgttcggatttcctacaaaattaacaattatttccctttgataccttcctttggatttgcaaagagtcatcattgttctttaatgaccctttgcctttatcatgcttcttcataaatttcttttcaagctccttgatttccttggtggcttacataatgaactgagtgacttccttgattcttaagccttatttttttcctgaactaacatactgtgcaatccatgcacattccatttatctttcatggtattatagttcatttagaacgggccaagctcagacgataatgagtttagaacaaactgaacaagaaagttctcattcacagccattatattcccaaggtcttaagtcttgctgcaatgtttgtcatctcaatgacatgttcatacatagtacgtgaaccatcaaacttcatggtggtcaatgtactcattaatgtcccagcaacagacttatcagctgtttgagagcactctcccactaatcacataaactttttagcactttcgattatagggaaagttgtcttaatactgtttgcaacagtcattctcatcaacattaggctgagtctgttagatctttcccaagttttataatggactttctcttcattgctactagcatcaataaaagtaacaaacttctcttccaacatagcaagatcatgatccaaaacactaaggtgaaattggacttgctcatttcagtcagagaagttaagcccattaaaattggctcagatgatacataagaatccaatgaattcaaaacatgtattacataataaagttcacataagtgttttgagacataaaatacatgtcatacatatgattcattcagataatggttaatgtatattgatgttctcctttgggtgatacaccaacacacaacatacaaacataatgatgctaataaaattttaacattatttgacaattaaatatgcaccaattagtaatatctatttcctttgggcatataaataaaactaatgatacacataaattgcctacaattatattcattaattataagaacaactaatcaacctttgggtgatccataaatgccttataataatgaatttcaattacccataaaccaataatcatataatttagcatccattattctatgagtaattggaataatcattaagttggaattaaataaccttacaaatttggtcactttggtgactaacaaattcaacatacatttaattccaaccaagtataattgaaataatcattaatttagaattaaataaccttacaaatttggccactttagtgactaacaaattcaacatacatttaattccaaccaaatatgtatggtctgcacatacttattgctattaacaattcataatcattctattaatttcattccaggccataaaataatatttgcatttatttgtgtttttgcattcaaacacgttcaagcaaatatgtagcatatacatatatttactgctaccaataattgcaaaacattcacattaatttaattacataatataaactttcaatcctttaatcaccttcaacaataattcttcgaaaaaaaaggatcaagtgggattggaaataggaaacataaggttgcaaatagcaatttccaaaatttcatattcttccctacaacaaacctacctactcagcttttcaaaattggaattgaatctttacgttaatggcacgcttcctttctttcaccattagaaggaaaaactttctccaaatttaatatatacatgtcgtgtagctttctctccgataatcataagttttcaaataatctttctccaaaaattggtattcaacaataacaaaatattgccaataaaacaatacatgcaacggaaaataaaattcctaaatttcataattaggatttatgcataattggaagaaattaaattatccctaaatttcataattagggttcatacataattgagagaaattaaattatccctaaatttcataattagggttcatacataattgagagaaattaaatcattcttggagaatcataaatttcataacacatgctctgataccacatgtaaaaattcttaaggggtttcctagactatcaatgataggaaacaacaggatcttgaaacatatggttctcacaaacaatcaataaacaacaatagataatgatgtgtacttttctccattggaagacttgtacctttctccataggaacttctctccggtgcattttgatttccttgaaagatgagagaaataagatttcacttcttttggcctttcttttctgtctctctccgttagtgatggctatgagtgagagagaacacttttctggtcaggaaggggaccttatttcacgttagtgggtattaagccccttttataaccactactcccatcaagtagcagtcaaccctaaaaacttctcctattaagcccaattataatttagtctttaatcgttaattatttacttattagtctctacataagtcacatgcctctcacatgagacataaattctaacaattttgtcttaaatgggtaactttcctttgatagatcttgtatggtttactatttctttaacggatatggtaattttatttatttttatttcagaatttatgcagttagtttagcaacattttatgggtatgtttgtagttctttatttaacaaatttctaatagaaagttttcagctcaactgaacccatagtctggataaatagtgcaatagattgctaaatggtgaggggagatgagaatttttttctatagaaaaaacatgtgattatcctgaatctatctattaataagtttcttttgtaaggtgtaataatcaattaatttgcacgtcttataggactcttgattttatacttatttatagaggttaggcaccgtccattcttttttcatgttatacacaataggaactattggttgatgctttttttttaatgctgacacatgccaaaggcagagaaatatctcggtctgtattttggattgagaaagacagttcaaaaactgcgactaacttcaataattttttttttcactgataatcatcaatgacctactctcccaaagtttaaactgtttgatgaagggttcttgaatgatatccatccataatttagaaaccatggtcttcggaaacccactctgaaatttgctgttgtgtctcatatttacactcttttagtatttgatgagatgagtagttgtcatcagttaaacagcatgagcatgattctattttaattttggtgtatgtcatttaactttctgacaccagactcaccactgttctggtttactcatctattacaaaatgactagaatctgatcgagaaaaattggcaagctcaa

SEQ ID NO: 3890 - DNA, 2127 bp, Glycine max
  Intron number 9 from transcript Glyma06g15090.1 (locus Gly ma06g15090) derived from phytozome v7.0 (chr-ID Gm06; pos 11893438 to 11895564)
gattccagtatcttctggattataactgggttagttgttgtcacccttaatctatgttcctgattaagtatctggaatgccttttgtttctaatccactttttatctaattttttgaaaattccaattgatttatctcattatttgtttatttctataaaatgagagaaaatatagagggataatagtggatgctctattatatagtgttcattacaataaatactgataatgagaggatattcaatttcctctaaatctataaatcaaatcctaataaatctatatacattaaatatttctgattctcaacactccccctcaagctgaagcttaagcttgagcttgttacaagaaaatttattcccaacaaaaaacatagaacttgagctccactaaaaaggacaatagtttgaatgagaactcagggatgttggtgaagtcagggatattgctagaaagagagagctggaatattcatcagcctaagataagcaagttccgactttcttaaaaccatcatttggaagcttcaaaccaatatttgaagacgactcagggatcttggtgaaatcggggaatattgctaggaagagagagctggaatatccataagcttaagaaaattcaaagcaagttctgatcttcttaaaaccaagatttggaagcttcaaacaaatagtggagacccaaaattattcaaacttgaaaaaaagaggaaatagtggcagaaacgcacaaccaacaaagcacataagtcattgagaaacacactggaaaactacaacgacaaagaagcaatcggaaagtttttcgctgaaaaatgagtggcaagctgaaggcagttgatggaaaacacactgaaaaaggacggcggcaggactggtgaccagaaatttctccgcaacaacgtaaaaaacgtaaaaatgtcttgcacattgcccaaaatcacaaaccaaataatacctaagaacaggcacaaaacagaaccaaacatggtgctaaagggtttttgcccaaaacaagtccgatggggatgaaacttcagggatagggtcaagttgggtagatgaccttgtcaccggaatcatggtcagaaagaacaccacacacgccagcaaaggaagctgtttggcgtatcaaagcagttgcgcatgagggtgtgtgggagctcttatgatgatcttgtggactgatctgtgtagattagcaaaaggcatgccagaaaaaatggtgttcatctagaaaagttaccggaatggtggcggtggcggcagctggccggaaaaaagtgtcggaaaatgaagcagagtttgccagaaaagtgcagcgagtagaagggctcaccagaagaagggtggcgggcaaaagggagcattcagggatagtgtgttgctggaaaagtgattgtggctggcagtggccaggaaaggagaaacggtcattgataagcagaatcaggtcatcggaataagtgcgacgactagaaaggtccaccaaggacagtaggtccccgggtctctgatgggggacgatttttgttatttcctcaacttggttctagataccatgtaaaatgagagaaaatatagagggataatagactgaaatcgtgtgttagagtacagtggatgctctattatatagtggtgattacaataaatactgatgatgagaggatatttggtttcctctgaatcagatatgtttcctataaatcaaatcctaataaatctatacattaaatatttctgattctcaacaatttatgctaaattagtaacaaagtcaacttggaaagttcaactttcatactaaaatgctcgaggagataacaatctagaatatagggatatactattactgtatgattcttaatgatctatcattgatacaaatccctcacagttttgcagacgtgcattataatattaaaaattgatatcttgttcctacaataatttcactcgatcaatttcaatttagctttgaacattttatgaataatttcaaattaaaagtgagctgtctaaaagttggcagttcttatacacaacgtcagattccagttttcccttgatctttgacactaatgtttaccatttttctgctctttccttttcccagg

SEQ ID NO: 3891 - DNA, 2268 bp, Glycine max
  Intron number 1 from transcript Glyma03g29190.1 (locus Gly ma03g29190) derived from phytozome v7.0 (chr-ID Gm03; pos 37142034 to 37144301)
acttctctagctttgtgcgccagctcaatacttatgtacgtatgagtatgaattatattacactctataataagcatatgattacatgatgattttctgcttagggttattgttttaacaacttgaccttatattaaagatttaacttctatgaaatacttaaaaggctggctgtgtaaagtgggatgatgaaaatctatattgatctttaatttaaagagaaatttatttatgaaattttttaagtcaaattaatggtaaatacacaattgaatttctcactttaaatatgcatgtatcttcttgccttaagagaattgaaacttccaaataacaagagaccgaactggacaaatgaaaaaacatttttggctagtaagttttattgagagaaaaaatagttttcttgagttcatgatgatggaacaggttaacaatatttgtttgacctagattaggctttaattagtttatagttttcttctttaattattagaaatgaaggaagagcttgatgttaagtttctcatttaagaagcgatgtaaccagaagatagaaaatatattttatgtttgtcgatcaacaatcaacacaggatttcagcctttcaggtagtaattccattcctataacatttttataatataattaattgttccatgtaaacgtacgtacggctagctttaattgtgtgtgaagtctcctagaaaagactgaatcaagaattcaagattaacattataaaaaatactgctatgaatgtttttatagttacccacttaattacatattttcacgcggtatgtgtattgatatgatgtgtctggtcaaagccgatcctggtaatgaatttcatacctgctcatccaacattcaagtcaaacacatacaaaaatcaatattagtgggcgtggtgtcgtgcaagacttagtaacattttttctattaactaaatttgataaaaacacatatatacaaaaatcaataaaattgttaatttagactttattgacacatattaaatttatcttgcatttactctatctatcaatctaatggattaaaatatatatagatttttcttaagaatgaaaaggccaaatatgaccatttgagttattagttactgtcttgatcatattaatctattttgactaataaaattatctttagtttctctttaaaatattttttttattatatgaacaaatcatcaccgtaatttgaattcatttatttttaaatctcactttcttttcaagtgagtttcaactacttgatgtggttatgatgatcgactctccaggttttgaagttttagattattttagtgtacccacttttcatcaacaaattaagggagtcctcatacccactaaccactgtagtgccaagcttgtcgctgcaattcaaaagcttaattaagcagaatgattggagtatgcctatttccattgtttttcagagaaagaaacaaggtttctgattttctagttattgatcaatcccataaactccctctaggaatgaatattaattgcatgcttgaattagattcaattttttagtaatcaattccaaaatcatattgaaagctaaaacaaacaaatattaattgcttttacttcatgatgattttagttccaaaatcaattatggtaattaactatccaaacatgcatgctaatatagaaacattaattgtttagattccccacctggtatttgtagggagtagcttttcctggaccgtatactagcatttatttgagttaacattggataatctaaaattatttttaaaaaatatttgatgtaattatatacacttacatgtttaattagttaatgtttctaaaattgattgagttataataacgttaaatagattttcattgaatatatacaaattttatgagttttattaatttgcttttagaataaaaacatttgaacataaataattttacatccaaatcaagtttaatttaaataatataaatttcattcaaaataattttttttcgtttcatatccaatccaaatgagttggcaagttaaagtttgtatctgcaaattaaattcactgtatgtttagacctagatacttccattggtgcatagattattagagcttcttctacacatctctgatttggattttgtaccgtactatattcttttccttaaaaagttgacaccaaaactgaaaaagcatttatctatgttgcaaatgtttagggctttcgtaaaattgcaacaagcag

SEQ ID NO: 3892 - DNA, 2198 bp, Glycine max
  Intron number 4 from transcript Glyma02g43740.1 (locus Gly ma02g43740) derived from phytozome v7.0 (chr-ID Gm02; pos 48472732 to 48474929)
cttgaagctaaggtcccacatactcagaggttcaggtaaattttctgattttctcaaatgtctgtttagtatgcgggagtgagaataaaaaatgagtgaaaaaaaaagtaaaatttggtgagactcatttttattttttattttaattcaaaatttttatcttttttatttcactctaccaaacatattagttctcaaaattttttaaaaaatctattttttaaaagtgtaatttattaattatattagtctaaaattaaggtgaacatattatcataagtttattgataaaaagctattaacatatgttttttttatcggcttaaatccaatccgtatggtaaaattataaagacaaatatcataccaattatgtttaaagattaaaataacaataagtaattaggtttaaagaagtaatttaaattttgaggatttatttaaaatttcttaattttaagaactaatatgataattttatacttcatgtaccaaaatggtaatttagtcttaatttatgctggattgtcttttgggtcaattattgcacagaaatttcaaaagattttctcatttttttttgtggattactttcacgggattactatttctattactatctgggacaacataagtgtttgtattgtctatagaaaaggacaaagtttacgtttgattgaacagtccgtcaaaaaaggaattttggaaacgaaaataaaataaaataaaggcacagcctctgctggaatagtattttgccattttttaaaaaattaattatgtaaagtgatttttgcaaactgtttaaaaaaagcaaaaacaaaaaaagtttggtttgagagtatatggttctgacaatgagcacatattttcctcttgacccatctttgtcacctgcgagaaatagaaatgatacatagatctcactcactcactcactcgaatcacaatggaaacgttagatctattttttccagcgacacactactctgtagtccacttagatcacaaaccttttaagttttaaacaatcacttcgtaaaaattagttttgaatgtaattaattctgaagttgaggaatttatgtttaaatgttttttattaaaaataagttattaatagtgaaattcaacgaaaactgttttttttttatctaatatatggaagctacctaaaattattttagttcaaaattaatattagaccaaaattaatttttcaacttgagatggattaaatataaatatttatttaaaatcaataatgagatattaatgttttttaatggtccaacatggcatattgctttgggtgttaggccttccacatgtcatatatggagcatgcatgtcaatttacaaaaaaaaaaaactttagaaaataaaatataataataacatttaattgagcatttaaatgttaaaactgacagaatatatataaaataaattatgaagttgttaaaaaaatcccgtgagtattttttagttaatctttgcacatatcttctaatattttatttttgatataacaaataatactgataaggtttaaacatactttttttaattttatatagattacctaaaatctttaccagtaggctgatcctattagattgattttctaatgtgtattctactcattaaaagagacagatcctttactgcacattataaccaaaaaaaatgtagtacactccacactatagcatagtttcgtgaatttcgttgaaacttgatcttttgaccatatgtcctataaatctttcagaatttttcatcattgttacgaaacttcttgtaaacaaattgtaactaccgatggcaaataaggcatgattttgcatgacaaattatataatttgaaccatttaaacaaagataaaagataaaaaaaatatcttgcattagattgaattattagtattatatgattttaatttgatatcatcttgaatcaacatgtgtacatagcaatgaattgattattcggtgaaaacacaaggaacgagttatagtaaaaatgtcattcatatcctaggcaaatagtaaaccgaaagaaatattcagggaaatcaggaaatgcctatcacctaggtttgaaattaaatatcaaggaattcacataagctaacaggtattttcactgctttgaatttgttctgataggttccttgacaaagctgcaatcctag

SEQ ID NO: 3893 - DNA, 3262 bp, Glycine max
  Intron number 3 from transcript Glyma03g26690.1 (locus Gly ma03g26690) derived from phytozome v7.0 (chr-ID Gm03; pos 34160195 to 34163456)
aagtgagtggcaacatttcttgtttttgaattcattttacatgtcaattttaacttggctagcttcttattcttttagaatacaaatttgcttggatgatggtactacctctgttcctttttataagaaacaagtgatagtgtattttacgttccttcttacactgtcacttgtttcttataaaaaaggaccggaggtaataacattctgaggtttatagttaatgatcattgtagtttggtctgcattccaccctgcatgatatgtgctggcacttgaacagatacagctagaaactggaatatggagccgtaataaacataagcaatttgtttgaatattttctccgaaatggaatgataatgtgttggtaaactcataacatagattgaacagaattctaagagctgtttatatagtgtggggaaagtaatggttattaaattaggaaggaaaaaggcaggcagtgtttcttgatcttccctgctgtaacaattctaactcaaccttactgctttctggaatacatgtggtttgtttttgtcatagtattttcctagccttctgattttcatataagatattcagactagggaaatttcatgtaacttttgtgctgaatattatcagggatattattgggttattttatataatttcaaggtaattatggtagaattacagtcctattaggatgatgtatagattaggaaagtcatagaaattgttcgctttccagtcaattttatatggctataaagcttataagggcctttcatgtgtgaagcaagatgctccttatattatcaattacagctattattccaagaaatttccttttttcttttggtgaattctagaatttctattagtaattccttggccatttggtataatgattactagcccaccactttttgtatccctttcacttctgtgctctatcttttttctccttctcatgcttcaattgtagttgataaatcaactcataataactaaataatcttagctgggtttttatcttgtagaattttgccattttagatcaacatgatgtggctattctccacaggtatctaattgctgtaaagcatccattacaacctcagtcttccaaaccatatacccaatcactagtgtgaatacttcaagagttagaaggaatcttcatgaccaccacaaatactgaattcctcaagaagtgttttttggagcttgtagtgcccattgtctcagacatgatataatatttttttaaccaaaagcagagcacttaactatcctttctatgcccagaacctatctaacaagtagagaaaacaacttcaaaattagatgaccacatatcttacaatctacaaccagctagctcactgcaaagttaccaagctacttcatagcacaaaaactggtgattatttgctttagaaaatttgaaagcacatgatacaatcatcatgagaaagtttaaaaccttaaaaaaaaagtcaaaaacacatttctgaaaatgtctgtcttctgaaaggaaaagaatagtatgtcttctaactacacaagggatgcctctctctggttccaccaaaagacctttgactgaacctcacttccaacctttcattagttagtgaccgaagacattcattaccacagtgaacataaatggaaatatagggtcagcctgtcagagaccttccttgaatgatgaaaccaatttctagcttctaggtaaaccataattactaaattgaaagtcctacttaaaaattacatctttctgttttttatacctaatgtcctctccaccttataccaaagagagatgtatcagaatattcctaccctcacctcaataggaattctgagtgaaggatatagtagtatctcctagaattatgctcaaccctagaatgaatgagcctttatgatttttttgctcttgctaccaatcagatagtttaaaatccttcaccttaacaacaattatcttttttcaagaacctaagcaatataatactaaaagtagaatttgcactaaaaccaatcttaccattgatatataacttatgaaaaatagctaagaaatttccatttactacatctggtctaaggagccttctcactatcaagatcccaaatagccctcatcacctttaattcaaaaggcctctgtagcctcattgcttatctgcagcaacatgactccaatactactcttcaataaaacgaaataaaggtatataacctcaaaatttagagatttacttttatattgttctacatcagatagccaattctcggcaaccaacctatcctatccaaggcatccaattcggattgtcaaccatttcttctcccacacatcatgaaagggcctccttatagggtaaaatcatttactcgttcagtctggctataggttaatcacttacacatgcattttcctacaggtttaagtctgttgtttgcaggcattgttaatttaaagacattattgattatcttaactttgagatgtaattcttcaactgaagaattcaatgaggaattttgtcccaaaataacgaagttgttctctaattttgagtgttcattagctatcatttttcttttactctaattttgagtggtcaactgaagaattcaactgggtattatattagcaaataatttattcttagaatttgagcttaggggcttacttaactctacaaaaccagcttatatgatgaggaacatccaggctttacatgttctatttaagttatatctttggtcaatgtgggactaaatcaccctactatatatctctgtaagaagcatagttccatttactcttgttttccttaatagagtatacagaagaggggaattatcctctgttgtttcagtttgcatcataattccatgcatttctattctattctattgctgggtcctatcattcatgtttctgaatttgaaatctgaataaaaactgactcataaagctatgatttgtttgaacaaaatttgaaaatgttatataaaagtaagaactctgttaagtactgggtctctgatttacttgaaataacacttatttttctgtacttttatatttttaagttagatataggcattaaatgagttttctttttaaatattatagtaactatagtagtagataactaatggtattctttacaccttcattttctgtcctaagagatttttatttgtcataggtacttgtatagaggcttagctaccggagatcgcc

SEQ ID NO: 3894 - DNA, 1792 bp, Glycine max
  Intron number 1 from transcript Glyma07g29520.1 (locus Gly ma07g29520) derived from phytozome v7.0 (chr-ID Gm07; pos 34365914 to 34367705)
gcctccgcgttcgcgaaaacgaaaccgcattcaaggtaactcttcatcttcctaccttgttaccataattttaaatttgattttttaatttcgtccataaatctctccgtatctaattaaaaaggaacatttcaactaattcacattttaaaaaaaatagttaaagaaaaataattaatttaattaatcaaattaaatctatcaattaataatattactattttaaaattttttatgtttattttttatgtagttaattctttcttattaatattctacttaattctctcttattaatgttgagagaaaaaaattaaataagaatatgtatgaaaaaataattaaggcatcaagtagaaagtaaaaaaaaagtgttataaaaaagagacaaataaatctttaaagaccatgttgtaatcacggatggagagagtaatgtgctaacttacgttattattttttttattgagaaatgttaattttttaaaattttagttttattgatttgttggcataggggatagaatccactatctttctctgtttctcttctcacttaaccatctaatccaccttatatcttcactaatttgtgttattaattattattactatcaacatagtttcgcatggttgtctgataacgttgtctcttaatcgtttagtcagcagttcaattcccgagtcagtgtgtatggaaaaagatctgatggaagaggttggtcttttaaatgaatctcagaatctcagtgtattgagagattagtctttagcttctggtaggagataccttgggttcacaaaaaaaaaaaaaacttgcgttaatactctggcctcttcaaatttgtgtttttaagaattagttctttgaaggtgtaatgtgccttcccatgcaggactaatttgcatatagtattagtattttcagggaaataaaataactagacttgcctcttttggggatgaagttgcgtattatgttgtaggaattgataagaaccctaggctttcaactggaggatacttatgggtgagtttaatttatatgcattgtcggtgtgaaacatttttacatagccatctaataggaattcaccttgtcgtcatattttattaatgaataggattatgtggtaagatagtcaaatcctattggatgtatgtgagagttttatgatgcatataaattaaattcattactgattttctatttaatgttgtgcatgaaatggtttttgtgagaatggcggaagggatgccaatggtgagagaatgattatgtattgaaaatgttgttctagaaaatcaagaaattggcatcttgatggagttcgagtgctttgaaattgggtcttggtcgtagtttattgtagattcagggaatgcttttgctgatattggttaacttaggtggtgtaactagatttctgaagttccgtgactgggagcatgataacatgaaaatccgttctattcttattggctaatataaatttttggtgtggcatattgaatggtgcaaagcttccctgtcgctagtttgtattgttatttgtcatggaaagtttttgaacctggaattgttgttttactaaatgtgtccatcttccttcctgtgaattggttgttcgttctttatttcgtctaatggttcgaaattggaattgatacttggctgtaaatattatgtgcttgattacttgaccagaacattttacaaaatttcatcatgagctattaggttttttcacaaatttaattacttttgtccttcctaaaggtatacaagtgg

SEQ ID NO: 3895 - DNA, 1591 bp, Glycine max
  Intron number 4 from transcript Glyma07g13120.1 (locus Gly ma07g13120) derived from phytozome v7.0 (chr-ID Gm07; pos 11602251 to 11603841 reverse strand)
ttgaggaggaccgacaagctattgagaaatatcaggttcggtattagttttatttgtttgttttttgggtataatgttgggtctttttaattttattttatggtttataaggaggaccaacaatattagttttatttgatttgactaaaattgagatcagtaaaaataatgtacaagatggcttattagaagtggcatgactgtcacaaaccatccaaaattatatggataatatcatagtaccttaaaacttaatcagtgtatcgtttcaacattgtgacttcctcatctcttctattctttggtttctattcattcccttccttaataaatatgaacaggaatttatataattgaacagaaaatggagatatcaaaatttgtcatgcatgaacacctgagtaactattgaactaacgaatgaaaaacatgtacttgaaatttagaggttaacaactgggtgattttgattattcaatgtgaggcagacatctgttctctgttataatatctgttacagtcagcatcttcatgttataaaacatgccacgtgctttttattcatgaattttcattgcctaggactcctttgtttcctgttaaagatgcagattggtgcattgtgatgataagctggtaaatataaatgatcatgtgcccctttgtttaagcttttaaaacaaaagtgattttaagagtgtatagaaaagtggtttatctttttagagattttatgcaaagaacaatctattttttgtttggtaacaattataaaaaatactcttttttgttttaaaagataattatattgatagttttttttcccaggagctatacaaaatatcttctcaaaataataaaatatctgatttcttttagtttctaattattttcaaaagcgttgacaaactcaattaacattttaaaagtgattttcttaaaaataaaattgaattttgttgagaaaaaagctacaacaaatggattctatgttgataagaaatagtttctttctatatgatatagtttaatttattgagaaatatttctcaaatgatcatgtattaagatcaaattctgtaccctgacattattaattctggaggtattggaatttgtcatacatgaagacctgagtaattattgaactatgatgaatgaaaaacacttttttgtagtttagagcatgaacagttgggtgattttggttattcaatgtcaggcggtcacctgttttctgttataatgtgttacagtcagcatcttcatgttacaacaaagcatgccacttgttttttattcatttgaattgaattttcatcacctagaacacttgtggttcctgttgaagatgtagactattgtattgtgatgataaactggtaaatacaaatgatgattttgataagaaattatttctttgaatataatgaaatataatttattaagaaatatttctcagatgctttatatatagataaaatgttctttgccacatatgagtctggtgatcttctctgttgttattctttatgcaattagtatggaaggatttacataaaatatgtctgtgcaggaagatacactggca

SEQ ID NO: 3896 - DNA, 3512 bp, Glycine max
  Intron number 1 from transcript Glyma01g44040.1 (locus Gly ma01g44040) derived from phytozome v7.0 (chr-ID Gm01; pos 54855822 to 54859333)
acttccaaccccccctcagctcctctcacttccaggtattcactctttttcttcttcgcttagctttccctctttttatttcgtttttaattgctgttatgattgtttctcgcttccggagcttattctgtaaatttgttgtccaattagtattatctactaagatgatgattcttattgtgtattagttggtttagttagaaattaattcatcaaagtcctcttgctaattaatcaaactgtgactttcatttatgagttctttttttttcttctttttttgtgttctaagctgtggatgctatctaatttgtgattaccgattagccattgcttcacccttcattgcgaggagtatttcatgatctttcggagatcactatgtcgttttctaatattccgatgcctttattccaaacagtgaataattttatttttctagaaatctctcgatgaagcgactattttgttctccacatacataattctccccttttgctggaaaacttatacacgcggttgctgaattgaactgtgcaaacaagaatcgatcagtttgaaaactgttattttttataccaatctctagaaatgctttacctccttccactttttcctctttggtctgttataatctttcccgttccttatttgattcctctaaccttttttgggtgacatcataaagtattgtagcctagccttctgggtttgtgtgctgccatttttatattgtattgtagtggaatgtccgtatctccttccatcttggattgtcctgtagcaataataagatatgatcttccatcccctttgttgattcagttggcgcctccatacctgtattaagccactctgtattaatttatttatttatttatttttattttcaagtttccccttccgggacattgagcataatttaaaatgaattaaaagtaaaaaagcatcttcttccttggtcgctgttatctttatctttctggttgtgtacgaaacgtatgatttgacaagggaaaaatatcaagtccgtggttggaggtgaaagacaaactaaagaaaagcgaatgaggataattgttttccaactcatcatcctcatccctttacctttctccttccgtgagtgtttgtaccctgggaaactatatcaacatgcttcttttcacttttcaacattattatgccaacttttattattattacgagcaacgatacaagtacatttatttattttaaacatttttatctatttctttccatcatattataaatctacttattataccgataatttttttagttgtttatcaaacattttttttattgttactgttataaattttaatgctttttttccctttttaatcttacaatctgtgaaatataaattgtgcctttctctatcctttaggatgaatgatgcgtatcttcaattgtggttaataaataataaattaattactttgatttttaaaagaactatgacttgcatttggtggtttattttacccatatagtcaccaagatggataataattattgtagatagatattttggtctaatttaagcatgaaaaaatttctatcgacgtggaaaatatataaacgataagatcaggctaacctttggtaggtgggtcctcaagttttttttttattaattaattaattagaaaggagtctggctgggtttgtttctgtctgcccacagtggccaggaacttctttttaagtagtgggcatttctatccgtactacgtattaatatttttaagtattctcttaagattaaaaatctatggctctatacggatttttattctctgtattcaatttattttcgtacacaataaattaatatttaaattttaatggtaagatttataactgcacggtttgcagtttcttttaaaaatgtagaagatccggatccggttctatacgatttaaagtttctgtattcgttatcacttgtatgactttacatttcatgtgactttgactttctttgttatttgtggccttttctgtcaagttatgatatgaaaatgagtttatccgactattttaatttctgctgtatcagtgtcccaaatggtgatatttccacactgtcacccttctttatgttgacacaaacgcgcaatttctatatagtctgttttttaattgataatatcaattgaatggctaatatttgttagttaaaggtgatacttattctgatatgcaactatactattacgaatccaaataaaagtacattgagatttttctttttctttcttttagaacttcgtttataaacacattgtgtgtacctattcaattattgaattattagctagactagctgcataatgtccgtccatagtgcaaataggagtatttggtaatgcgaagtgacacttcccgagttcccgtataccaaatatcaaatatattgaacaaataacattaacagtgccagacccagttagctgttcttttcagcattcagaacagactcgagttccgtgctttcaatacatttatgtatattttttccatgggactggctgctaaaaactattattattactgttattattgtctttcttcagtgattgtcaacctggccaagttctaatattggagttgaataatcggcttatatgatagtgtgatggttatgaagtattttaatatgattttctattttcaaacctacgagcgatagcaaattgcaatgtcaaattaattggaaaagtgtgtttttaagaatttggtgtcgttttttttttctttatataccagtttgtaaaatttgagatttatttttccttatcaataataccaatatattcatcgagtatcttttgaatattaagagtatattttttaaaattttaataaattatggtgatgttatagtaaataatataataaaagtttttaaagttttgtttgcatccatcaacaatgggcccagaaccagaagaaggcgtggaaaatgcgtaccgaatactttaattgcgattagtagttggatcggttggtggtccaaatcccgataagctcatatataaccatcacgtgatggtcaacctttttgttttgacacctaaccatcatatgtacgccagtagtgcctcgtggattatgaatagatctctctgtcgagagggtatagcccgtgtcacttaacactttgatgtattgttttttaaaccaggggaggagacttttgattaatttaaaattcgatgagatgataaatataatttaataaaaaattatttttgtgaaaattaaactcgaatattatttaaatagcatattaattaattatctttcatcatgacttatgacttgatctaattatattttttgtgtgaaaataaatgttacgcaaaaaagttagtttaagatataattaggttgtttcaaaaatgctttggattagaaaggatgaaaatatttgttggaatgcaggaggggagcaatagcagctgcctacagtagcagcg

SEQ ID NO: 3897 - DNA, 1513 bp, Glycine max
  Intron number 14 from transcript Glyma14g04930.1 (locus Gl yma14g04930) derived from phytozome v7.0 (chr-ID Gm14; pos 3407928 to 3409440)
caattcctggtgtgagtaatccctctttctaacttctttaacatctccttttgtaaatgccattaaattgtcaagaatcctcaacatggtgtttctaggcattgaatctttcacaatgtacagggtagtctgggcatgtttagtttagaattttattgcaacttatattctacctgatgcgaattaacacaaagtgccattatatttgtaaattggtgtcactctaaaagaatgtggatgattttgactttgcctttgagtgtttttacatttttctatgcagcatatagatgaaggagattgcagaaacactttgcttccagaaattgtattacacttagaatgatagaagatataaagggattttgttcggtggtggaagtacttttaatttttgaattggtaaatgagttattatatcataaaattaaaatgagatagttcttaacacatcctgaattggtaaatacattatcatgaataaatttatgataataatattgatatgatagaagatatgataaaaaaaacttcgtaccccattgcccagaggctcttcgctatgcgaaggtatgataattatattttttataatctttataatttattatgttacattactaaaagtgatcatttgttaacttcattgaatttgattttgtatttgctactcacatttatatttatattagattgtgtatgagttttgaaaaatatgctggtaaaaaatatgttgtttgaataaagacatgataattttttaaggatacaagtttacaggttatgaaatatttaaattttttcagtgtagattaggtcatgcaagtcaattagtgattgactttgtcgatccatgactcactcagtgacctagtacctagaccaagtcgatgaccagtccaagtttgataacattgggcacaagtacagagagagttatgatataattataaattaaaaaatgaaatttattgaaactagtagatcttttaatttcttttatgtcgcactcaagccccaacttcctttgtgattgcttgatgtgtattgtaagttgtaactgatactacccaacaagtttcatggattgctgcattggaggtgtataatcgcctgctccacattggacttgaatgtttttaaatttgttattgtggaagtttactgtaatattatataattatgtttgtaatcttttataaaaaaaatctttgaatagtattttaattgaattacagttgtatttttaatcaatattttttttgactatttagttgtagttaattataatgtgggtaagtatgggtatgtagataccccaatgggtaagggtatggggattaaaattattatccacaatagtatgagtcatgggtacttagatcttatgctgctgtttatctgttgagtttgagggttaactgtcatgatgtttctataatattattatcattctagggacaggttatcgtttttatctatcaccatgtttgacactattatgatgttcagg

SEQ ID NO: 3898 - DNA, 835 bp, Glycine max
  Intron number 4 from transcript Glyma02g42500.1 (locus Gly ma02g42500) derived from phytozome v7.0 (chr-ID Gm02; pos 47547429 to 47548263)
gttttcttcagcagcacgtcccctcttcatatcaagtaactaatcactactacatattaatttaatttatgccttttcatttttgaagaatccacaagcattgatttcataatatgaatagtaatatagacacaatgtatcttataaataaagacatttagatataataaaaatttaagtttttctctatcttttaagtgttgcatcatattcaatataaaatttttaaatatcttcaatgatacaaatgaattgtttttcaaaaatgttcatatacgacaaaaataaaaattgtatttaattaatttgatttgttagatatattattttttcctttaatatcatttttcatcggtgaattaggtaaaaataatcgatgaacgtcatataaatacatgttattcatcgttaatctagttttaaaatgttcgggttcattccataaaaaaaaagtttgggttcatattcagtaacttggaacatcattttgttattttgaaaaacttacctactaatccatttcaatggttagttgacaccaaactataacccacttgcaatcctccacaaactttccatgagtgtgaaaatacaacatatttgttgtgccattaggtgggaccatatatggcataaactatttaacaatatgattggtgttttcacttttgatagtttagttagttatccctttaccacattttttttcttttctacaaagtttgtagttaccaacttaccatgtgtacctaataaactaagcatacttttgaacatacttaacattaacatttaagcatatgattttgtaggagtgagaattggaacaacccaa

SEQ ID NO: 3899 - DNA, 1395 bp, Glycine max
  Intron number 1 from transcript Glyma19g03850.1 (locus Gly ma19g03850) derived from phytozome v7.0 (chr-ID Gm19; pos 3841703 to 3843097 reverse strand)
cagcgatacgaacacggttatcgccttattgccgggttcgtgtgctttacttttttttttttctttttgaattaactttgcttttagtttttgaaaaatgtcgcatttaatttcattcccgggttttaatatcataatttttggttttgaggaggaaagtttggaatttaaagaatatagaaatgaaaagttatgattttagatgtctggactaaaatcaaagatgactcattttaccgaaattaaaaacaccgttaagcccaatgcttgaggcgaaagtgggttgattgtttcgttactctgttgcatatgtatgttgtataattcataggctagccaagtttgatattcaccaaatgggtagttttcttataatgggtagttttcttttatatatatatataaagagtatttttatttatgaattcatttatcgattaggtcggtgtaaaagaaatgggattttgtaggggttttatggaaaaaacggtgtattgattttcttactgattaggtttctgtttttttttttttttgtattgtggagtcatttgtgatagatcgttttttttttttttgtttaattaccattgtgtttggtcatagggcaaggagtggaagatatggaatatagattttttgtgatgttttgtcttgcaattgaaatagtcatttttgttgcattggctttagtgtgtatttgacttgtatttttagccatgcatggaatcctgcaattgacaattcatgcagcaagtagcaaccatgtgcctcttggttaagattctttgatgccttgacatctttttctagtccatgcttactattttcctcagcacctggtcttatcatctctcaacaatgctgaatgtaatttgtaaacttcatgttggtttgtatgttaagagttttgttggttttaagatttcatttgtaaggattggacttccaaatttcatatagattgaataataactgaacagaaaacattacttgtctaattttcatgaatatggttgattttgaagatcagtttcactgtgagttgatatggatttgtttcattctcactgttgtgtttggttattgtcattgtcgtctatactgttaatttttgtcgtattagtgatttcttacacttaaaatcattacttaatccaactaaaatcaagttgcaaataggtatccaaaagaaaagaatagagagatgtttttcatccaaatttattggccttttagctgaaacagcttttacaaattacaatgttaaccaattttcttaactaggaataaggaattatttgaagtttgaaaagttggattcatatgcttagagatctgatctgatctgtagatgctaattgtgttgcaggtgtgttccatttaggtataaag

SEQ ID NO: 3900 - DNA, 925 bp, Glycine max
  Intron number 2 from transcript Glyma19g07140.4 (locus Gly ma19g07140) derived from phytozome v7.0 (chr-ID Gm19; pos 8415461 to 8416385)
aggtaagagatgctttggttgtaggtgatgtactgttgtgtttaactttagcttgtcatgggattaagccatggttattttatctgtctgggaattgaaatgcttttcttcatttggctttgttttatgtagttttatttttataagaaaaataatttggcagttaagaatccaaagtgtttaattttaaaaaaaaatagattttggcatttggtattgggaatctttcattttgaattaaattactttcccgagagtgagattgttaggaatgagatttttaggaataatttgtttacagttaattaccacagaaaagtttagtaacttaaactttacaaaataattatcacaggaaagttttgttgtcacctttgaaagtgggaaaattttatttccacttatttataatttgatattctagaagaaaataatagtcacaatgcagtgcaattgcaattgaatgttatattgaattttgaggttgatgatcttttcttgagaaagattcattaaaatctcaagaatcaggaccggaaattttaaagcagctcaccttgtgctagctcataaaattaccagtgaatggctgccaggtcatcttgcttccatatttggtcatttaactatgaaaaattgaattcactcaagtgaaagagaaagactctgcatgttatatttttctgatgaatttggagctataagtgagtatataacacttttaagtgtattttcatgtgatcagccttgacttagctgattataatattgtcttgcattttgcatatttctgtcactgatggtccttcttattcatctttttagtttaggaaatttgttgatgctttgtcatcattttaatttttacattctcacatttgtcattacaggtgactgaggctcttgcacgtgcaggccttgagtc

SEQ ID NO: 3901 - DNA, 739 bp, Glycine max
  Intron number 3 from transcript Glyma04g42190.1 (locus Gly ma04g42190) derived from phytozome v7.0 (chr-ID Gm04; pos 47979685 to 47980423 reverse strand)
acatcatattgcctcaggtttgcctacaatagcgcctggtcatgcatgttcaactcttattattattattattattattattattattattattattattattctgctattgtggatctctaatgagaaaacaggaaaactgaaaatccaaaatatttcagcttcaagtatcctaacttttcttcactaataaataagtgagcaaaatgaaaaactggcacggacttaatgagaagcagcagtcagggtgactttttcttattcttatataagtggacaacaacttaaatatgcccccaacaacttaatgaaaaaataaggaaaagttactacaaagtcactgaaaccatttccattttaaacacactagttgaattttattgaaaattacaatgtgagtctttcttctcatttactgagctcaacttatgatcatgtaattttcattaataggaaatgtgctacaaagaacatgtcactagggagaaattattatataatttaaaactgtcacatctctatggttctgagttctgactgatttttatgacacaaaacccagttttataatttatcaattgtgtcatgtggaaacggatcatgtaattatttagttgttagcatccacaaatgaacaaatctatctccagctgatacatgtttgttgataatgagaatgtgcatcatcatgttttcactggcagtaccgagagcctggagttctattgtggcgtggttt

SEQ ID NO: 3902 - DNA, 6324 bp, Glycine max
  Intron number 2 from transcript Glyma20g30540.1 (locus Gly ma20g30540) derived from phytozome v7.0 (chr-ID Gm20; pos 39200158 to 39206481)
ggtcccagatctggacctggacctcgtggcaagaggtgaagtcgttcacccaagacatttaggttttatgcttgtcacaatgacttgaattcctttatccataccattctgggatgagaatattcacgaatcaatgttctccacaagcaaatataagtctccctcctggcttcgatcctaattacagagctcgtgaggtgcacatattattttaactggctgagatcaaactacatttgcatatgagcacaaatctaacatggagatttttgggatgggccaagtcaatttattgtgttgtataaatattgatatttttttaatgatcctagttagcatttgttttttgttggccaaataaaggtataattattatattttattttatttattttcaatattatctgctatactagttgtgtgcttgtaggagccaaactttagtctgttattgagccatgggaattactagtgttggtgacatttgggatatatgggaaaatgttaatagttttaggtcttatggtgctacctagattgcttctttcatcggttagatagatataacaatgtaggaataactgcttcaaattctgatttattccaaagagatatggtgtaaattggtagcttctacggttaaacgaagactcacttgttagagccttcaactaggtttgattgggtcgtttttagtctcccttctcatttcataattttttaaaatatttttataattcgaaagtattgtgaatatggcatattaattatctttttatcaaactattgtactatggttatttttataatgatttttttaaacttcttttcttattgttaagagtttgtttggtggataggatatgataggtaagtcttgttataattcgttgcttgttgaatcaataggattatagtgttattttgttgcttatcttatcttattgttcaagtatttcttatcccgctaaagaggtgggttacgatgaataagataagagttcatatatatatatatatatatatatatatatatatatatatatatatatatatatatatatatatatatatatatatatatatatatatatatatatatccttatatattttgtttataattattataaagtaacttcataaataaaatatattattgtgtaatttaattaaaattattttttatataattttcatagtttataaaaaaaaatttgtaaaaaaaaaaatttaaattttatttttagaaaattatggataattttagtgaaatatatattttttaaaatttgagcatatcatatcattacctgtatatcctatcttatcttgaccattaattgagccttaaaggaaatggttggatctaagagggagtgaattggatcatcaagaacttatttccaaatcttctaggatttgttataaatatcttttaattccaaataaaacttgatgttgaaatcaaaagaaggatttagatgttgtacttaatttggttttttattctttgatgtaagatagctaatacacaacaataaagataaatatgacattagtaagaaatatgctaaaaaaacgtagatgcaaagagaagggaaaagaaagattgtacaagtcaatttgacattggttcaatcacttgcgtgatttacatccaaaattttcatacaacctttgtatgagatttcattaaacaaatcaatgataataaacacacttcgtagatgaatgcacaaacacttatgcaacaagttcttgaattctataagaaccaaactacactatgtagaatcctattacatgaacttgttttgagaaccctagtcaaagatcaatacaacaacaaaaaagacaggaatgatatcacctgtgagtaattgatatgaagaaattcaacacacttatcatatttcctcaaaaaatacccttctagtacccttttgagtgatacatcattttttcatgttaagaaattttgatttccagttatgaaacttcaaaatggcacattcttagctcaaaactcttttctagacaaagttctaaaaaaatactggtcttatgaaaaggtgcttacaagtttgctttttatagagtaaaacaaagttaattgattatgccttgatttaattgattattttgtttataaggctacctaggtagcacaatgaacatgatatgcatttattttatgagataattgattatctaaataagaaatgaattctctaaaggtcaaataatcaattatcttgagtagataatcaattatttgtatacctatgtaaatcctaaatcacaagacatgaaataataaattatattgttcacttaatcgattattttgttcatcatggaactttcaaattttaaacttatttccactctgatttaatccccaaaactaggtgatgataaatggtggtgaaataatgacaataattatagtggtgacaatgactataatggtagtgtggtggtaatgttgatggtaattataacggtgatgatgatgaggtggtgataaaataatggtgatgacgataataagagtttccaatgaaaatatgtaattggtgacaatgatgataataatattattgatgataaggatgatagtgatgataatgataagtttggtgaaggagggatgtgagtgaggacaactatcctattatgctcctaacttcattttcaagaaaataaatatataattggataaaatattaaaaaaagtaataggataaacaaattaaattaatgaaaacaaatttatactaaagagtctttatttaacactatatcatattagtggtaataaattatattccttttgtttctatttatatgactcaattgcctaatttattaaattaagaaaagtgaacaacttagttgataataataaatttatcttaaatttatatttttttttttaaattaactatgtcattaatatttttctctatctttttttctttgatatgaactcttctctctcctctaattaattgtttatcaatataattaatttgatatattttaatctaaaaataattaatgtaagagataatataatttgagtcttataaataataatcaataaggtattacttcttatctagtattacgtaaggatataattaacaaaagaaattaattagattttaaagttctaaataattattttaaaataaaaagaagactaaatttaaagatataggaaggaaataatattatccttaaaaaatttacattgtaaaatatattaatttaatatatatatatatatatatatatatatatatatatatatatatatatatatttaaaaaattatactgacccctatcaattagatatgagattgtgtccaaacgaaatatacttttttaaaaaaaatcatattgacccaaacttttatcgtatttcttaaattttgataaaatttttgggcccggtcgattaaggagaaagaaaaacgtgtctcaactctcaagccatcctctccctccgtactattttctccttaaaaaaaaacggaaagagtggacttgaaaaatttctcttttatttgcagaaacgagccaaggcttagggtttggtcttttggtgtttttgcgaattagggtttgtgatttgatctccatcttcaccaatcaccattaccataacttgatcttctctctcgccatgacggacggcttctggaatcggcagcagcagcagccgcttcaaccttcttccgccatgctcaaacgacctcgtactgaatatggttcgctattttctctctctcacattttcgaccatccaaacacgccctaaggcagatactattgtttagaatttcaaagtttaggtctttataattattttgatactgggcttcattggtatggaatttgtcaaattgataacaggtctctattttttttttctatctttcaaagtttgtttttgagattatgaaaaggctaaggatgatattatggagtttgaatttgtgtaatctaaactagctggacagactcagaatattgatgcgttgctgggccttgaggaatgccctgggataagtatttttatgtttttgagttcttagtgattgaattcttatcgggtttaatttgtgacaaaggaggagtaacaagggcattctgtcgagtgggtataagttgaggttagaaatttggttagattttttattttttctgtttgatgtgttttttcggcaacggtgaagaggatatgcactgaagattggagttgggtagacaaagggttgagaaggatttggatatattaataaaatggtggtaatagtggcattagtcttaaaagggaggcagtaaagacattgatcctaatggcgcaacaaatattaaatataaaattatttgggatgatgtgttgggatgatatcatatgtgaagtatttacagttttacactatagagtaatagatttgttgttggtattgaaatgcttcatttgctaatgatttatcaatgtcatgtaaggagatttatatatgagaatgtgaaggattgacctaacagtgagcattttagtaatgagcggttcctgtttcatctgctagcctttacttttttttattccttattaagtatatagcagaaaagcatgatccaagagtttaaagggtaacgaggcataagcaaaaaagggctaaatcctgttttgactatgtctgtacatagtagactacaattgctctcttgttctgatttgatgataaatggggtcaaattaggtggtgaatgatcctcaaatcaaaagagactttggaaaagggtccaaggtatgatcaaatagatgatcgcaagtcatgggatcatgacctaacttttgacaattgacgataaattgagcattaacaacctggccgatttccatgacctcagacacaatctgatcaactacagcagcctctaaatagtgagcctcatgaccaatactttaagagaacccatagggctgagtgtaaagcaaactttatttaccaccatatccaagtgatggtgaaaactgctgacttgatttacatggggaccatgtggcaaatgaggtgacaaggcatgctggtgtagaggtttgaatgcttgaagctgcattctatttcagaaaagcttgagctacattcaaaagagtacattgctgagcctgcttcctgaacaagaagctatgcttcaatattgtgcactgtaaggatcggttctgcagtttattgaggtgtcaacagtgtcataaatcgtaatatttagaagttcatcaaggatgacatcagtgtgattcagagatgcaagtggaccatttatagagaccaggaaattaatggcggtttaatcaaaatagatgcgcttagattgatcaatcatatttcttcttgtttctgagttcagatatgagttgacatgccttagcagttagcacacaggtgtgaatgaaaataagtgtcgagtctctcagatcttccaggaatgtgtgcacccaatgactctggtcagaagagattgtttaagagaagaaagtagccacaaaagaaaagcatttgatcctgccactcccactgcaggaaactcttgccttcatgtcagaatgcacgattttcctcaaataaattgcaatttgatttttgggtctgtaatgacacacagcgaatttcttaatcactgtctccacctactacttccaaagtaggaaatttttgtcatcaggtcacattgaaattggatgagtttgaaacaggaacacaagagtgggttgaagtggaagatccactgaatgatgttggtgttggggatctgaagaccgaaaaggattaagcagtgaagccatggagtggaatcagatccaagaaaagctttcaataccatgacagaaatcagtaatgagcgataaagagaatgaaagaaaatatttatcaatttatattagagaaattatgtgttctgttattgaaagctaactaaatgaattgatttatgttgcaaggaagacaagagatacaaatatggttgagaatactaactgttttaactacgtagagctgtaaaagcatgagtcttttaaaatactccagtaactacaatttgagtagttactctaatacaactagtcaagtaacaattgttgactttttatgctttagggtgtgttctgataatttgataggtgtcaacaaacatgtttgtgtgtgcgcatcctgctctttatattattatgagcactttgcattttggagcatgtgctttttagttacctgtgttttactagcatctggcatatttgttag

SEQ ID NO: 3903 - DNA, 5219 bp, Glycine max
  Intron number 21 from transcript Glyma04g32570.1 (locus Gl yma04g32570) derived from phytozome v7.0 (chr-ID Gm04; pos 37440887 to 37446105)
atatattgaggtactatcatagcatatagttttgtgctttatatatgtttttttattttcttcattgggtgtctggtctatacaagcaacaaattggatacgtgggctcatgttctgtatgcatgcaaatatgaacaggtgctttggtattgaaatcttgaaggttgtcacagatttgtctttttgtttcttttgcatggtatttggaaaatttaagttgttgaaatagggcttttgtcttgattggttactttctttttgcttctctaaatgggtctcacatgttcaattgactcaactactcatgagatagagatacaaactttgcttgtataagtggcttccctcgaaaatttaggttaaaatttgtgtattatatgtttggatagaataaaaaagtgtgtttataatgtggaagagggttatgcttttgatgttgctattatagctctttttggaatgctgaactgaaatagatgagattaatgataaagattaaagagtgtggtaagtggttgcttgattgcagaatttgcataaccccctgattaagcaatgatagatgcaacaaagacataaaatttatatattttgagatttagtagcacttgaatgaagatcaatgaattgagaatgtgaaatcctccatatgcatttgttggaaggttgaatgttattacatgaggaatttttagggattacgagaatgacttttctaatagcttgaatgagttattcagctgatctagtatttatatacactgttttgtgtttataaggagattaatgatgattctagttccttagtacatgcacggtatattctaggtacaagaatagtgtacctgtatctgaaaggcatttaactactaattccaacactcgctcaagctagagcatataagtcaaatgttccaagcttggaacaaatatattgaattcttggtcctcttagagattgtgaaattactagttaatgattagagctaaaatttgatagtggcttcttaagagagagctttctcccaaataaaatgatcatcaatttatatatatgtttagttcgttcatggaaatggaacactagattggaagctatatgaagagtcgcttcattatcactacataatttcatttgttgagtatcttcgaacttcaattctttaagttgtttaatccaaatgagttcatgagtcatgacacacaataagcttaagtggactgcttatcaataggtttgtttcctttgtcctcattgataagaccttgtcccggtttatgtagttaatcactatgcgttagcggcaatttgtggggtgcattcgtggattttaaatagttgtgacgcaaaaccttggtgtggcgtgggttttctattgtggtgggtgtgatcgcgttttgcggctaaatggtgctagggtgaatgcgtaagcagctgtgattctgtgcttggggagaaaaataaaaatttcccccattcatttgccgtttcaattcatttttgggctttttgaatttttttaagctttttcatttattcccccaccccccaattaattcttctgtcttttccaaattttcccatgttacgtcttttaccaatctaacactattaatcttttgtcttttccatttaagttccccctttttttccttttggtttgttgggcttcaatttaagtcaagtttaatctttttatttaaagaatagcatataatataataataaaaaatataatatactaaaaaatcataaagaaatgtaataaactcaataattacaaaaataaactaaataataataataatgatgaactaaaaaaaacatttgtaataataaactaaagaagaagaataaaaatataataaactagttaataaaagtatactatttaaagcataactgtaatataataaactaaataaaaataataaaaaaaataaaaaaagcataacatataatataataaattaaagaaaaatagtaataactaataaaaaaattcaaaatagtggccattccgctttctgctatcctgctttagcggttttggggttggcctctatgtgccgttatccgggattgactacttaggtgatagtgccctttccaatgtacctcagaattcggatcattgcatctccatggtcattatgaggagattgcatgaaatgactcacccaactacaggaggaaatatcttgtcttgtaatagtgaggtagatgagctttcctaacaatctctgatatcttctgaatttgagccctggctgggtatttttaatttgtgtgactgtgtccatggaactatcgatgggtctacaatccgtcataccaatttctttaagtatgtctaagtcatacttactctaagatgataatctcatcctttgattgagaaactgcaaatgagaaaagagatcttgaacctgctcgtaataacaagttgagactaaataatgaagtgttttattcaatgataatagttaataataccatatctatatacaaagcgaagagaataaactaacatacccaagtgtgctgaggctcctcgttatgtgaaggtataggggaggtcattttatgcagccttacccttgcatatgcaaaaaggctgtttccagatttgaacccatcaccaaaccaatcacctaggcacaactgtaccgctgtgtcaggactccccctcctccttgaagagaatcaattccataaatttccggatttaatctatctaaatggtaagtctatctaaatggaagacatcagaatttacctaattacataaatagtcaatattccctaattatatctaacaggaactttgtgacgagttcaactctctccgtccctaactataagaccctttcaattaattcacgccccttacgaaatgtagttaaattagttaatcacattaagtatgtcaattatttgcactatcaatccaaaatacccttttcttatctctttatccacttaattgtttctcattaatgtttggagagagaataattaagaaagggtatgtatgaaaaaaaataattaatgcatctagaaattagaaaaggatcttataaaaagggacacataaatttctgaaaagtgtcttataattaggggtggagggagtacaagctaatgaatctgttatggggctgtaataggttggcaatccttttccttagtggatctgtcctttgtcaccaaagtgattaaaatcatattcatgcaaaccccaattttgttgttgtaataaaactctacatcatatttgatatgtcttattttatgaaatggcagtattggaaattagctgtgttgggtcttggcgttttttccttatatatactcctaatggtgctttagttctctttttgaatggtccttgcaatcaacaagcttggcctgaaacattggaaatcaaccaagccttcagtagaaggcctatagaagttttccttggtatatgaagtattcagagaagcttacaactattattttttctactatagttcctttgtctgtttatctcttaagggctccctctccttgagctccatctttttgataaagtcatttcttcccagtggctactccgaaatagttgacttatcatctacttcctaaactcataaacacttgacttctgtctccagctgatttattcctttagaaaatcccattcaaagtcattcgtaatcgtgatcttgtctccccttgtgcttctgaaaaagttcctttcagttctaactagtccaggaatcttagtcttgtaaggtttcctttgttacccttgagttcccaaacactttctgatttactattaacagggtagtcgatcgtttgcttaagcggtgcaatagtgccatagtggagtggagtggcccctggctgctacagtaggcttgattctgtcacaccagtgtagtggctacatttgcgggaggaataggggtcattgcagctgtgattgctctgcccctacagatgggcctgaacttctgaatatgctccaaaaaattaaatgttgtgggcttatttttgggatttcataggaaaaaactccctttgtttttcgctttgacatggtgtcacttatctccttcattcaacacttttttctcttgctcttacctgtctctctgttgcatcttttctggccatctctggtggtgcacagcctgttctgcatatttctagcttccatgttgttcagccccatgttctgcaacttttgtcctggtttcttcttcttattatgttcttccctagtttggggttgcaagagcaggggacacatttctattttctgaaagatggttgagtgaggaggtggcgactgatgggagaaagagtttgtcattattaattatatattatattatgaaactaaagggtactctaatcaatgtttaagaatatattaattttttaataataattatgtattatataatagagacaaatatataacatacataaacagaatgcatatgaatagaaaaatgtaacaattaaatagaaataacatagtaataataagagatatatataaaatatgtagaaagaatataatgaatctagagtgtgtgtaaaattttagaatagagggcatctcactgtagcatctttggggggctctgcactgatttccacattagtgactactgtgattaactgattattagttggattgtggagagatgcaaattttcatagagtatttggattttggctgaggcttgggaaactattcactataatgtattttttcattaatattgtgatttttctgtgacaccggtacaattaggcttacagtttttgcagtaggttgagctatataaaatttcatgtatatttctcttcatatctaatgtctgctccttgttactgcatgaaattgctctaaatttctttagttgtaatcccctctgccctttttctatttacctattaagaattttatagggcttggaaatggtagtatttgcaatatctcagctcatatgtagcacatgtgaagaaattggtctccatgtttcccctctaataagttggttgtctgctactgctactatcattatattatatttcatttcgatgctttaatttatctttacatgacagctacaattttgttgtacttattttgtcatttcatcttggtgatacagattaaatagtaaagcctcaattttggacttgagag

SEQ ID NO: 3904 - DNA, 3455 bp, Glycine max
  Intron number 1 from transcript Glyma17g08890.1 (locus Gly ma17g08890) derived from phytozome v7.0 (chr-ID Gm17; pos 6577330 to 6580784)
aaaggcaagcttttcgactactccaacgaaccttggtacgtccctagctctttctttcttctttgcactcatgtatctctatatctattcttctgggttgccttcaactatgcaattagtatacatatatgttttccttgtttctgaatgcactaatattattgctctagtgttttctcttttcctcgaccatgtaaatgtgtacagtgctcaatttctcattaggatttcgccttctattcttcccaagattgtcaacatgcagtaggtttagatttcttgtttagttagacttaatttttcaagggggaaaaaaaataccggaactttttcatgtccgtcgagtgtgtacgactgtagtgtttgtttggggggacaaattattagataattttgcatcattttgtattgctctaaccaaatttcaatttactgtaaagaattaataatatatgacaaaacttatgggcaatatcatatgtattgttcgtgttttttctctaattaagagtcttactaattaacttctacttttataatattgattaagaaattaaaataataaaatctttattgtgtataggagataattttgaatatttcaataaaaatatttttctgtttagttcgttaataacgttttaaagacacaaaattatcatttatcattttttaatataaaattatggagatgaaaattttcaaatctaattaaagaacaatatcaacaacacaacaatacctatagtaatgcttctaaattttgttattaataatacttacttacacgtgatatgaagattagttaagatacataatttcccaccacctaatcaagaggaatattagtaatacactatctctaatacatattttgttattgattgaaattttttgaaaattataaaattatgagagaatcaataaatataatgtaggatccatcttttttgtaattttcagaaatttttagactctctttcaactcaacgggataaattcacttatttcacacaatttttctggtcctgcctaaaccaataagaaagattattgctaacatttctccctaatcaaagtaaatttactagaaataaaagtagtttttttcttataacaggttcaacctcatttaccaaggaaaaaaacccttaattataacttctccatatcaacaaataataaaaagtaatataaatactaatattaaatagttttttttttctaagacttaaaacaaggacttgaaatgccttatatttcagccggccctgcctaatcatttttattttgggactgttaatttgagtatatatatggtgttggtaaagtcacttaacatgttattagaagaatcgggtccgcaataattcaactctaaccacttggttaaaaaaaatctgatataatgtaacttgtttaaaaaaacttaaacaaaggacaggtaataatgtaatataattttgttatctaattttgaaaagtagaatggatcatgcactagtaatatttttttaattggtatcaagtattttttaataagattttaattttatttaaacagataaaatttagtatcacttgtatcaatgagttattgatttataccgtattaattttttaatggaggtggaggcatcttcatctgacatacataagcacaccatctctgagtaaatagaccaatcactgaaaactgaaatgcgccgtattgcattcaacatagaaaaggcagaaacaatacaaaacgctggtgttagtgctgccaatcaaattaatattcgaaaattaatatcacggtcgagaatacaacatacactgtatcagggaatgcagggattcacttccttttatttattcatgtggtatcatcttataacaattttttgacagggagggaaagaaatcacaagttcctttctgtttttcaattaagataaaatttctttaaaatgctcctcctttttaagctggtgttttgaacttaactttaccctttatattccaagttacttatatatgtattcagatggttttctatgggagaaagggataaaaacttattcatcattagattttattataaatgtttaagatattaaaacacatgtaatatgaattttttaaactcatctgatttttttaaatgcatgattacaagtcataaaattttgacaatatatataatataaacttgttaacttacgctcactttttcttttaaaataaattaattaacaagttacaccttacatatattttaataaatttgtatttgtagtttgataacttatttattttaaaaaataagtgggtataaattgaagttagaaaatttcatacacatctattaacatacacttacttattttttagaagttagttaataatttacttcttgcattttaagatttaaaatttatagttataatttaatttaataacttattcattataaaaaataaataggtataagttagcatatattttatatatgccaagtaatttgtgggcttgtggctgcttaatgagtagagaactataaagctgacaacagatagatgaaaagcacaaaggacatgcatggacaaattagcataaaattacaccattctattctatgtaatctaattattcaaatgttattaacaaaaaaatctaatgtaaattgttattgagtttctagtataaaactaactcattataattttaatctattccaacatttattttttatattaactctgataatctcttaacaaattaacaacggaaatgattttgttaacatttttttcatgaaacagtaaaaatctggacagctgtttgaaattcgtttcaaacataccttcacgcttcaggttggatatgggtaaagattgaatcaaaataagtaaaaaaaaaaacccagcgtgattcagttctatacagtaggtgatgcataataaataagaaaagaaaatcacttaaaattcgttttattttggttcaacttcaattaattctcccatatatagttttcgttgattgatttgtgaatttgatgcatttatttacctgaatttgatcttgccggggaagtttaaaaaagaagacattaagcaattcggtcttttgcttgaatgcaaaatgctactactaccttatgagtaatttgaaagcctttagcttgctagctattaggagtaacacagagatagcaaatgctaaacaactaagtttttttaaaaaaatatttttttggaatgctaaaaaatacacttctaatgttttttaaatgcgttctcatacattctaaatagattccttccttcatcgcccgctaattcaattatcaattaaagctatatatatatatatatatgtttgccttccaatgtagtttttgtttaaggtgatgcaattaatatatgaaatctttgctcactgctactttaatttcccgagtcaacagt

SEQ ID NO: 3905 - DNA, 3184 bp, Glycine max
  Intron number 1 from transcript Glyma05g26430.1 (locus Gly ma05g26430) derived from phytozome v7.0 (chr-ID Gm05; pos 32399493 to 32402676 reverse strand)
tttcattcccttcatctggtggtgccaatcttgtggttagtattccttttcctctcttttgttacattccatagaatacaaagaaatcaaattcaaatagtgtaaaaatataaatactatcttattttatacttcttttttttcttctctgcaaacgaacctgcagttccggcttcttcttttaaaaaatcattgttatattcaaaaatattattttaatttattttagagtggttgtttttttaaaaaaaataaaaatttatgaatagttagtgtgaatattcttacattgttaagttggtattttttttttataaatcattactgtaaaaattatgacaataatatatcttaaataaaaaaaatccgattcttaattatttgataagttattgtaagtagtttctatagaaaattttatactaataataaactttcaaaataaaaatgttcttttataaatataattatatacaaattacttatattttttttttacttttatgcattcttgaaattactcttttgaaaaaaaattaaaaattgacttaatacaatgcgagttcgttaaatattgtttatgcattcataaaaaaaatcaacttcatttaatgtgatatgtttaattttttttaattctaagttctaactaaagtgatccattaatatatggtgggtataacttatttggttggttgaatgaattattatatactttcgatatttatcttctattcttatcaataaaaaaagtgattcattataatctaaattaactgtatggttgatttatttatttttataaaaatgttagcttatttttatcaaattttgtaaaaattgaaatctaaattattatttttcgaaaacaaatttaataaaacatgtgttgaatagtaacattaacttgtacgatgttatatatgtaggtaattatatatctgtatagttacttaataaatgagatttattcaattaaattcatttatgttttaatatgagacaaatattataattaaactttaatttgtatctatcattaactatttataaataattttacaatgttaattaataatttggtttttaatgaatttaattgtactagttgttaaatttattaaatcatattacatgttaaaattaatgtctcctactgattatcaccgctaattatataaattttcttaattttttttattttaaaaagtttaaattaaaagacacgaaccagatgtcaatatgtcataagcattacattaatttacagtgatttttccacgacaaacgcgaaagtaatgacacgtctttgactttgtgtaacgttttttcttatttttctcttacaagtcgtactcttattatgctattctgaaagaagattaaaattatatatatataaaaacaaatagatgatgtatgaagaatgaatttttgctagaaaaagtgaaaagatgtgttgtcttttgcaaaaaaatcctaaaattgtagtagtaaacgctgaaataaaaagttgaggaaattttatattttattttaaaaaaagtatttttatttttaattataaaattttcattttgtttttattttttaagtattgaaaataaattatatactgtatttttattttattattttattttattttaaaatataattttaagtataaacaaaattataaccgaaaataatgaataaaaataaatatgacacccacttttcgcacgagaaaaaaggaaaaatgtaaaaggtactattataagagacattttcgagggttcaaatttaaattttagtatttaacaatatttaatcttaatgatctaatgatttctaggctataattgcaaaagcacatggccaaagatttctatccccaagttcagttgcttcaactggatcggtgcttactgtaaaaaaattaagaaaaaaaaaactagatcatttatatatatataagaaaaaaattgatcatttatctatatataagaaaaaaaattgaaattaaaaaataagtataaaaatatatgaaaaaaataagtttttgagttaatatttatttaattttcttttaataatggattatatcttgagttttatacattaaaattaataataattatttttgttaaacttattatttattaaataattattcattagaagttagatatttaaataattgtattaaaaaaatggagtctctctttgatgcacttttgaattcatctagtgttaaaggtgccataaattatctatttctacttcctatcgacaataacaaattctctaaaagatgtttctgtactactctaagtaccatcaaagtttgtaacaattttttgctacggttccttttaaagctttcattacaagaacagattaatattatattagtactctgtttagttatcatatttaagtagaccgcacatgatactcccaatatatacaaggatttctcaagaaatatacgtatcaccatatgctccatcttagtcttatttctatcatcattaaaagaaacaacatgaatcactgacaaatttttaaagcctttgatatttgaattttagggtttgggatgtacctaacgcacgagtctgtgacaattcttcatgtatactaccaatctttaccatattaaaattaatcttttttgatagacaaatagagggaacgaccctagaaagctacagccataccctcaagaataatcaaaatctaatgtaatgtaatattctaattttgtgttgtcgatgtgagctacaaccaatataatgtaattgaatatgttggctgaacatttttggaacgacattatgatagattatacacaactttttttttccaacgatgattactttcataaaacgcaactacaaatctacaacataactcatgtttgcttttgctgaaagcaaacataacttataatagagcgtgttatcaataaatagaacgtactggaaagagtggattgctagcattcttcacaaagagaaatgccaatcaatagtatgttgctagcatttttttttttgttgctaattcattattcctgagcattactatgcaattttttgaatcttaaccgcacatatccactttatatattctgaacttccacaaaaagtatgtttcattaggtaaaaggaggaacgttaagagcatctgatacatt

SEQ ID NO: 3906 - DNA, 5147 bp, Glycine max
  Intron number 9 from transcript Glyma14g27380.1 (locus Gly ma14g27380) derived from phytozome v7.0 (chr-ID Gm14; pos 33572080 to 33577226 reverse strand)
ggtaagttaatgacctttgtactgttttataacacatttgtttgcatgtacatgaatatgaatatgaaattgtatcattttatcaaaaggccccagctatcttatccacatatactgttgcaatgtcaccgtttctaattgaacaacgagctttatatcagtgttttcaaatagcggctatcacggcactatcatgctatagcgtagcgagttttagggaaaacgaaattgcaatggcatcacgttgtggactctgcaaaaatcacaatcacgggtgtcttacgcgtcacggaacctcattgcatcgcggctgttgcgtcgtcggtttccgacaaggttgaacctcattgcggcacaattggggttcatcattttgaaagaaaggaaaccgggtcaggtgcgggctgcagattcaggtcaggtacttcagagttgttttgggcttgcagacaaggcttttagctttgttaaaactcatgtgcagtagttgcgtgggtttttaaaagtttacatgattggtttttaaaacatcataatcaaattttatgtttttacactattctttttactttttactcatggatttgggctttcttcttataagcccaacagtagcattttgacttctacttcacacaagttttcaattttccagaccattctagagcctcatagcatttcctctgattcttagtcaccacgcaaacctatccctacgaaaattttccagccttcttctttgtccagtgcctctgtttttttacaggtaacttttttttctttcttttgtttgatactcccccttcttctttgtctatgtcatctctcttatacccgaccttcttattattctgattttttaaaaatcactgtatggcaaatgagggatcatcaaatcctcctagcactgatcctggatggaaatattgtacttgaggacaaggaaatagttgcatgtgcaatttctgtggcaaggttacaaaagttggaattactagagtaaaagaacacttgatggcaaagccagggaatgttgcagcttgtgccaaatgtcccaaagaagttagagaagaattatggggatatttgaaggatttaacttttgaggagaatattatgttaatgtttgtccagcttatttttatttgcatatagcatgctttttttttatacatatttaattgttatatatatattctatttcaaccgctatgcggcttccgctatttggctgtgacgctatccactatattctatagcggattttcagcttttcacgattttccgtgatccggtattgacaacactgctttatatggatgtgggaagcctcaatgcctttacatttatcagtttatgttgggttaaattatttgtttagtccctttagtttcttagtaaattaattcagcattgtcccaactattataactaaatatacaggtttctataatttccaaactaaatggccctcattgtcagatgtcattatgtccctatgataactatgttgacttccaaattaaaaatgcctagtatcaaatggtgatactagtggcagaccgttaggatccaattgcaaggtatgggacttgagtttcacattggattatgggattctagtgtaggtaaggctttaggctctccaactacaagtctacaacagctagcttttgtggtgagactctcccaaggttcttatcaattggtatcaaacacgtgtgtctcagctgcaaacgagaggaggtggtggtgacaccagcattgcagtgttcgcctaagactagtcaaaaggctagtgcacagccaacctgcatgagcaccagggctgaaaagcggggtgggatgttaggatccaattgcaaggtgtgagacttgaattccgcattggaagtatgagattctagtgtggggtttataaggctttgggctctccaactactacaactagcttttgtgatgtggctgttagtagtagttatcacttagcgtttgttagtacttgttaatgagggagttagttagttatgctagttaattagctgttttagttggttgaagaaatacggggagggaagagacagtacatcttgtcatttgtgagagaattgaagcctttggcattggggaggtgcaaaaacctttgaagttctacaaattaggaagaaatcccttggagctgtgggggaactgttggtggatgatcaatgcagagcagtattttactcataggccaagcccaacaaagttaggctaaggagtggatcttagtgatgatggattatacaaaacagaagtggccgagttctttttctaaattcatggatcaatcccaactgattaatgagtagaataatgaactctgaaaagggaaatgattttctaagattagtagaatgggcccaacagaatggaatagaacattgggatcacatcacaattgcagcaacattgaggctgtgttttatgggcaaaaatactgcaagaaacaatatagagagtaattgaagcatgcatataatgtcttgcatgtcagtccatgtgcgtcacttatgatcattatttggattttttttttaatttatgcaagtgtgaactgatacattgcatgtgttaaaactatagggatttaggtatagagagaggaataggaaataagagaccaaatacactgagattattgatattgactttatttgatatgatgtgttatagtatgactaaaaagatcaatggaatgattggtgctgcaaaagaaccttgtgacaaacatcaaatagttttggagtggagatgaggcgagtatctaaagtcacacatttggaaggcccgactgggtttgagataaaagtcagtgagaaatgcatctggaacataaactggcagatggccaacccaaaatcgtgtgtttgaaactgggtttgagacaaagaccaggctgcacctgggactgagattggggctagatcatagttatcaattccggatagtggtgcagaatggccaacccaaaatcgctatagcgggatgactgctattttgaaattttagatgcaagttaaataattcataatttcatacacattcatgcatgagctcaaaagtaaaacaaaattacccgaacttagagacattcatatgctgccgatagagaacagagatgaaatcatgaaggacctgtgagagagtaaagagcatttactgcaacaaaatggaagagcaaaacaatatgtgagagctggggacagtgagagggaactgaatagaaacaacagagcaaggccagaaatgacaggaaggtgctggaaaacgtcagaaattaccagagatggtgccagagaaaagtaggtcatgtttcagaaacacaagggatcaatattggtgctacagaacagagcaaggctagtcagatttgtatgagcaaggcagaaccacagaacagagactacggtgcaaagaagtgatgagaaaaggagagaaatgaacaaaaacaggtcagtttactaggatgggcaagttgaatttgccccccccccctacaaacccatgaagcaacaatgctttcaggggcaaagaggagggtctttgatgttgaggaaaagaaatgtcttggacatgtgaaagtaatagcactgataatggatgcaattttggccatgaaaagcaccgcttcagctgcaacgggctggtgcaacacgacaacaggatagtgctgatgtcacttgttattaaaaactatgggctagatcacatatggaacaaacatcggtgggtccaaccacatctgactgagatcatcagggtcagaccgatctagaattctagatttattttaaaaaaaggctcttgattttaggaaacttggcagcagaatattgaaggtctccaaagatggtactgctctaataccataccatactgaaattataggattttaggtatagagggagaaaaaggagataaaagagattgaatattctgggattgatattattattgattaatatgatgaaaaacataaagcactaaccctgtttatttactagaccataatcctaaataaagtaacaaattgtttaatcattttatattaggaaatatgaaaactaatctaagatactctaaattattctgacgatataatcaagatactattgtgtattttcgatatatcctaacatcacgtatgttgccatgattcctttttctgattttgggaaaatatgcttgtgtttttaattgccgaactgtgccttgtgttgatacaatttctcaagtctttagtgcttcacatattggttggcagatggtaagagctcttagtgaaaccattctttactgagataattgtttgttggttccaagggaagagagatttttttatttatatttgttttgatgtgtgtgtgtggggggggggggggggagataaataatttactagtatactttttataataaacaaataaaacattaagctcaagtatcaaactaaggatactttagtcataactgtttgttaacttgaagcattttgcctcccctttagattcctcaaacaaggagaggagacaaaaatgggacgggagggattttggcctccttatttttttctcccctcctttccatttccctctaaccaacaccgtaaaaagttagtaagtaaaagtatgcatctcttttgttgcttggaacttgggaaaatgtgcacaaactctttccatagaatgcggatgtttttttgatggcttaaataacttttaggtgctttatatatactcgatttttgttttgggtccttgataagttttttgttgttctgagtctctaatatattaaaagttttgttttgggcccctaccgccaattaagtgatgacatgacatcattccaatgactgatatatattggaagagctgttgagatggtgccacaccatcactaaatgatgacaaggatcccaaacaaaacttttaatatatcagggacttggaacaatgaaaaattttgtcagggactcaaaattaaaatcgggtatttgttttttaatgaataatttgattgtaataatatactgataacagaatgtttctttttgttgcattttctcagatagcttagctaaattccctcgtagaacaagtggt

SEQ ID NO: 3907 - DNA, 3455 bp, Glycine max
  Intron number 3 from transcript Glyma01g07770.1 (locus Gly ma01g07770) derived from phytozome v7.0 (chr-ID Gm01; pos 8572354 to 8575808)
gccttttgtccaaggttgtgccctcaattgaaacatatcatgtttctcatttctttatcctgtttatgtaaagaatgatttgttctcatagtaatttggaggaaagtgatgtagttgtagttttttagcattactctgttcttttgtaatttgccttctcatgctgattgctgcttaaaagggaaaaccaaacaacgtggatggatggcttttgtttcacttttgagcttatataaagaagcttctttcacgtgaaacattatatttttgcttcaaggtgcctaattttgaatatgtaccaaaattagcattctggatctagtttttactgtttacttaattgagatttaacatttattctgatatggaagttaatttgccctttatagttcacagaattaggagccattcatagtttactacaaatttcttctttatcctcttttctttactttttcaaggcgtgggatagggggcacaggattatataatatatatcaataccacataagtttgaattctcaaaaggctgctgtccaaaacttgtctttagtagaggaaaggattatgctgaaacttgaaaggttatggtactttttctgcaagattgtaatggtagatattcaatatttatgggatatactagttagttggcttgaaagaccattgggattgagttatgggatcaagattcaccagttagttgacttgaaataccattggggttgagatataccatagttgagtcggtctgacatgaagcaaatgtgtaaaagttcagtggcataagtggagttgcattttcacaaaacttgataatgccaaatttgtgaaaggaatcagccatccctcatagtaccacctcatagaaactgtaatattgaaactttcatatttttattgattctccagcatactgcagcaagagcttttggaagaaaatgaactttttttttttatttttttattgacagtatgagaagtcgaagctgcacattctcaaaaatctgaatttatcacatgattttgtaacataagaactagagagacagcagaactgatctagtaactgttcagctgacttttatggcctagtctccaaggtggataggacccaatagctctttcatggagggtcttttatgttttagatgctgggttattaaactatacccattaccaataattatgatgttggggattcttacagtcctagcaggattgactatatcataataagaaagaggaataccagcaacacacacaaaagaactttaaaattggaagattgcatgtgaaagtttgttattctgttgctacaatcagaggaagtacattgcctgttagtggcatgtgcctccaatttctccaatttacttccatgtattgaaagttggttgtcaggtttgctttcataagtgctgaggaccctattagtggacaattttgcttgaaggctgtagcaataataactacaatgatccaatattgtgtaagcttcctaaagagattactctttaggaagcttacacagtattggatcattgtagttaacggatcatgtgccaatgcttaatgacttttcaaatcatgtttattctaggaaaagcctcaatctggcaatttagtccagcctgaagatcacagttgttgacttttcactctgaaatcaattagatacatctctctgcatgtaggtataaagaccaaccagaaaagatacagaaaaattagtctgaagtgtaaacttttctagtaagattgagttgtgtagagacattaaaaagaaacagcttttgtgtataatcagccttggcatgatatgaagagtgagactgtctgaaagaaagagacaaactatcttagaatgtcttattatctttgttttcgtaatgatttcttgatgacggttttattagtgcaagccagattagttttaaagtaacagcaatatgtagtggtgaattttaaataattccagagcactgttcattgcacaatggttattcatacagtacaccaagtatatagtgctatcaggttgttatgcaaagcacatcttgatcttcatgtctatttcccacaatccattggtactttctgaaatttatatggggaatggctgctttaagataatatgactgcactgtttggctatctacttcagtctcattttgtttgttaagcccttaattaattgtgtatattgctaattaaaattcccataatattgtagttgatggactatcccctttttgtcttcaagtatgattacttacagtagaaaactagaatgtgattatcaggcacgaaaaaggaggtataaattgaatttgtctatatttctagtatattacctttaaagttagtcctattgtgaattttatgcttgatgtatgctctaagttggctgaaatttatttctttgcctaatttctacttttgtcatcttacaatccctcagacgtatgttgtcttcttggagtcatagtccactttgaattaaaaatttcgaagcattaataaaattttagtcaaatacaaggcatcccttgatggccataaagtacagaggtacaagagatagtggtgggaagagggagttcttggcaattacagattatcccttcaagcagattatgtacgaactatgaattgtgtaaaaaatgctttcagccttcaagaaaaatgttcttgtattacaggttaaatagcaatataagatgtgcattacattatcccggggtgtacaacttgcttttgatgtatttatcccaacaggaaaaaggtgtggttcaattggggtgttgtaaaacttttttgtttagctaatgattgggttgttctttatgctttacatttcgcataaatgtcttttggttgaaggatcaatatactttgtatctggagaattaaaataattctgtaccgtagaatctgtaatattcaacacttcacagacttcattattatctattcttctgtgcatttagtttcttagctgattctgttcagaggtccataccattcagcttgtatgtgatgttttcctgtgctgcagttgctataatacttatatgttatttaggaaagcaaaactgtcattaagaaagcaattttgtcagtgtttccctggttgttagaggtgcattttttcatttcaggaaccattttgtaaaccctgaattgcatttttaaatatgctggtggataaattcctgaccaggggaaaaagagatgattcaggatttgcatgctttttatttaaatattgagttcaacaaatgcaatatgggagcctctgatataaatgttttgatttgatgtgtaaaaataattctccttttctatctctccatgtctgtcttataatattccacgagattatttaatattcatttgtattcttctgctaatatgcttgttatattagcaggtgcctattatccccagtc

SEQ ID NO: 3908 - DNA, 1404 bp, Glycine max
  Intron number 14 from transcript Glyma01g26350.1 (locus Gl yma01g26350) derived from phytozome v7.0 (chr-ID Gm01; pos 34835173 to 34836576)
aagctgaaaacatcagaaacacggtatgcaattgaacctgcacaattttctacatctggtctgcggcttgctattactagtgtcctgatggcacttgacacaaatgccgaacatgtttgtgcccatgctttgcgtgtgttttgagcaaagtctgggtcaaggagccaatatgttacccttgttgaaattaagctttcagttgttttaaatgtattttctgatcaagcaatgaaggaattttcttatttcttagcccctttttttaggtgattatttttggagttaagtggattttttttttcaaatagtaaatatataagatttacccaatagtggttgttgcagtatggggcatgaaaccaatatcctactcctgttgaaacagtttcaattgtttgaagcatgcattttctgattaagcaatgaagcggttatcttaatgctttgctcctttttttaggtgattattttttaatagttacatggaggtttttctttcttactttttttttttttaaaaaaaaataaagatataatattgttttaatagacagttaagttacccaatagtggtttgtcacagtggaaataaactgtgatccctagcaaatgttacctgtattgtccctggggagggttttacttaaccaccactattggccccaaggtctagtctcagctatgcttgcgagataggagttacttagttaaataccagaaaaatagatatagctaagtcgactacagttacactgaattcattcaaagctatttgagaactaggtgatgcaatcttttcttataaggttttattgatttattttatatttttgttgtcaatgtcgtaattcagtttgtaattttttgacaatatatcatcctacattgggcacttgtgttaagtttgaaacagtgttgagcagaaaaaaaaaagaataagaggggaaaccttttaacctaggaaggctgtctttaatggttctggatccatgattactactctctttgccatgcatgcataactcgaagaaatcattttcatttatactgaaataataaaaaaaaaaattgaataataatacaaagaaagttcattggaagtctcaatttttcttgttttgttaagattattatttctgaaatatagatagtagatgattatttccttaaagtgtcctcaattttctttcaaatcttgccctcttgtatagatttataattctggcttcactgtggcttatttggttgatgctcattatttgtttgatacttgtgctgtaatcacttatgaaggtattaaacatcatgatgggtatacttttggttttgaatgaaaatgaaaggaacttgaatgtttcatgctgttattctctcagggtaacaggctgttcaaagaaggaaaat

SEQ ID NO: 3909 - DNA, 1049 bp, Medicago truncatula
  Intron number 10 from transcript Medtr4g012250.2 (locus Me dtr4g012250) derived from phytozome v7.0 (chr-ID MtChr4; p os 2047491 to 2048539)
caatttccaggttcacacccagtttctctgaacaggttctatttatttgagccataatcatgttttgatatgttatattgatttaattaattgtacatctaaagtaggactgctatttcatttgctaccacacgttttgtgttgtgtgtgtgtgttttttttttttgaatggtaaatgtcagcatagttagtattatggtggggatgaccctctcaatctttaccactcaactccttaacactcccaccccaaccacatagccagcctgatctttccattgtgttattgttacaccatgacttggacaattgtgcattgtatttcgtattgggttgtttttgtgcattttctttttgtcaatccttttttgcttaatgttttatctacatcaatgcccagtgctggtttctgagaacctatagattctcaattttaccggaagatacttttcacaattagaccttaaattgtagcccgatatatatcttcttgttcaaagatttcatggcgctaacttacctctaaaccctatctagtagtgcatataacaaagggaagggaacaattttttaaatatctctctgcagtgacaaattattcaaggaattatctcagtatgaatatcattttttcacattccttacattctttgtagttgcaagtacaaaccatttcactaagccatgtcttcgaatgattagattctaaccgtatgcttagaatcagtggtcattttacaatacatcatttgcaaattttttatttttataaatgtacacagtaagatttttttccattatttaaagctaaagtttttgtatatgtgtgtccttttacaacactatcttcacaaattaaaattatatttatctccaataattgcctaaaaaagaaagtattaaatttaattatgtatatgcccttctgttataatgtaaatttacagtgtctccaattaatttgacattttttgtcagtgaatctatattaaatttggatatgttggtatgcagggataatttgcagttactacgacaacgttattatt

SEQ ID NO: 3910 - DNA, 1075 bp, Medicago truncatula
  Intron number 1 from transcript AC234703_11.1 (locus AC234 703_11) derived from phytozome v7.0 (chr-ID AC234703; pos 65492 to 66566)
ctgcatttgggtttctctctgattgaaaaaagttggtaaatttatttatttacagtaaatttctctgtttttttttctttccatcctttagttctgaaatcaatttgatgaatttttggattttttatttctactttgtttcttcaaatgtgtgtgattgttttcatagttcatcttgaagaatgtgttgtagttttacttttcatgaattttttatttattttttctttgtagaagtaataatcagaaacccttttgatgattttgttagattgttcaatcagattgttttggataatgatcagattataaagttctgactttgctgatttcactgttgatgaatactatgttgattaaataatttattttattttattttttgtaattgtaaaggaggtatttgattctggtattcttgtagaagttgcattttttgtgcttgtttgagcttccaaaatgtttatctttttcaatttcttctattttttttaagtccaatcattgattctgatcagttggatatatataaaattaaggattggtttgatttcactttgttggttttttagtcctcaacttgacagatctttgttttatgtatcatattttccaagttgattttgtagctttttgtctttggaacaaattgcgtaatttgatccatgtagccgataaggcttggttgttgccgttgtagtattgtctttggaacaatattttatttgatcagttgctgaagttcttatgagatttgcctttgtaatttgaacacttaaagtggaaatttagattcttgtattactcttatgcaacagatatcacatttattggaaatcaaaatcaatactttgtttaaagaagcatttaatcattttttaaattattataattcctactgctaatccatgccaattgcaaggaagataatcgtttgtgtaaggtatttttcaatttttgcttgttgtgaactttaatcatcattcatgttaactgtgaattaacaaatgctattttcattagttttctgaatttgatgcagcaaagaaacactgatttcactcttttaacagga

SEQ ID NO: 3911 - DNA, 4619 bp, Medicago truncatula
  Intron number 7 from transcript Medtr3g164080.1 (locus Med tr3g164080) derived from phytozome v7.0 (chr-ID MtChr3; po s 43222201 to 43226819)
caggtatatacattcacatgcatgtgctgtacttagattatttgtattcaccttactttcaaaggctattacttgtcttcttatggtgcttactttagatgtcatccttaccccacaagcctcggccacctttaccagcgcaaaacttttgttgaaagtttgataattaaacagtagagtagtgcagaggatgcttaattaaatgtgctcgagtaggacttgttgtttagtcgtaggacataataataccattggcagtccctcaagtgagattgatagatacaaaattaaataggcattttgtatttatgcttttagagcctcgttgccttagcaaggagtaatgcttcttcttcagccatgtaaagcggcttgaatttgctgccatcatattctttataaagcccttcaggaataacatctaatgctctcaaggtgaaacatgttttacaatagaaaatagcagatcaaccaatgtttttacacgacgaatgaactttaaaatcgacggtttctcctagcttgtattgcatttatgatgggaaggtgtttgccttagggtgagtttgagcatcgacataattgtggattttggccatatctctagctgatgtagggtctcgacagcatccaaacctctttagctggattttgggactaagcccaatttatccttgatctcttatcacacatatctgtccatgctttaaatgtccagtcctaggtgtgaaaatatatgcttaccgagccatccacatttgtccactcttccgatgtttagtcttgggtgtgagagggtgtgttgagattctacatcgcctagatatatgaccaaaatagtccttagaagacttgtacaatccttaccttttgagctagctttttagtgccgagttaggcataaaccccttaatctaagagatatgaggaattgatcaaaagtatggaagaaaatgaattttttgaatgaatcaatacataaaatacccacgttatacatgagaacctggacacccctacaagtattcccgcatattcaattcaaaagtcttcccttactactctttctttcctcttatttatactcttttatcctagactctctatcaaggtagtcagagtcgagatcatcctacgcgggattggggaggggttacaagatcgtgaacagggggatcgtaaggtccaaacttacaaatcacacacacacacacacatatatatatgtgtgtgtgtgtgggcgcgcgcatataaaacaacatatagatttgaagattgagaagccataagaaacaaaaacaatggatttgaagcttcaagagccatatgcaagcaaatgaaccagaagggaaaaaatgcaattaaaaaaaagttaaaggactaaatcgttatctgaaattaagttaatggaccatgagtgtaattgccttttatttatttatttatttttgacatgctcttttctcatttcatgctctcatcctgatttgccattgattcataattcaagtcagttcatcccatttgattctccatttcgtgctctcgtcttttgatgctgttcttgaagtccacacgcaactgttctgtcactgattggctgcgtttgctacctctgatcagtgcccactattagatttgagagaactagatagttcccaaaatgtttatgtattgaattattctgaatcttgagttaattacaaggccagtcagctacatgtagctgatcttaacttgcacacactaaaactaacctacaccaacatcggagttggttacatctggcactaacaaacttttacaaactgttgcttgccatgcaatcttctactacaagctgaagcttctcttgcaagctatcctaacaactggcacaagcactaactaactgaatacaatagttaaactaacaattacatatattctcttaagagcgtgtttggatgtaggaatgttttgagggaattcaaatacttgtaagtgaattccatcgtttggatgataattaggagaattttcaaaatgatggaaatttacgaagtattttgttcaagttaattttaaagaatttcaaatgacacaagctaagaatttcaattttcttcattcttataatttttcaaattttgcattttggtcctcacattttccaaattgaccctaataaatttccaaaaatttgcaaattgaaccctaatttcaatttccaaatttggcccaaaaaatttaaatttataaaagttgcccaaaaatgatgacaatgaaattttttattactccatccaaacaaatatatttagtaatgaaggcaatttaattgaaacatttgaattgcctaaaattctaaattcttaaaaaaaaatcatttgcctcatccaaacaccatattttgtttaatattgggcctaactcatccttactaaaccgacttgtaaggtgaggagtctcactctttataaactcatttcgggtgttatctctattttttgtgggacttgggttttttgcaatacactccctcatgcctagctgttgggctttttgcaatacactccctcatgcctagctgttgggcttggtgtgtggatataaatagtggatgaccctaaatggataggctctgataccatattaggtttcagagaaagagatagttgacatttctcaaaatgtttctgtattaaatattctgaatcttgagttagttaacctgccctcactaagcctaacctacaccaacacctgggtggttacagcttttacaaactgtagtttgttatgcaatctactattacaagttgaagattctcttgcaagctatcctaacagctgggaaaatcactaactaactgaatacgatcagtttaactaactattgcacatattctctaaccccctggtattcttctgtgtagttggcttcaacatgttggttctgcttctggtttttttgtttctgctactgttccactctggttctatatcaaatcaagccaaccaactgactgtctcattgctagttctcggttttttgttggtatcttcttggtatgttttgctggtgttgtcttagtttgatcttcaacggtgagttctgtagtcactggacccaacacactgtcgatagtctctgatagtccccgttgtctagccactgacatcagtagcagaaaattctgcgagctgtcctacacataagttaattggaccttgattttggtttgttcttgccttgccaatagttgtggtttgttcatttttgttcctgtccccctagctgagcatgtaggtgtttctttggtacagttttgtcatgcactatttattccatgcttcagctgctgtaatctagatagggccttagttactaatttcaattaagcgccgcacaatgtcattgatgtttgatttgcttttttgtgaaagttggttgtggtttttcgcactacttttctctttcaaatagtatattcttaactagcttgaagcttgataataatctttagcttgaggcggactcttaaactataagaaaaatgtcgtgtaatatcgtgatagtgtctcaaaggttcagtctctcatctcttatgatcagttagttattttcaggatttgtttccatattcaagtagaactcggagtcttgtatccctagaaatcggggtgaaatcttcaaatcactatcaatcataataatatttcaaagtctttaatctttctctattctctttatctaaaatcctttagcttcaacatgttacagcaaaatgtgcaaggcattagacaatagtcgacgctaaacactgacattatcaatcatgataatatttcgaagtctttattgtttctctgctctctttgtctaaaatcatttagcttcaatatgttacagtaaaatgtgcaaggcattagacatatgtcaacgctaaacactgacattttcaatatagtctaacttggcaaccactgttgaacagtttttgcatatccaattttcatacttttagacaatagtttctcaatcggttatttgtgtatttaatgttcttggcgatgtttgctgaccaatcttcgtaaaacagtaacattaatggggtgtatccaacttgtgttcacatatgtatattgagataactgcatactccaaaatgacacaatgctatttctgaatgtattttagttacttaaaaaatgaagcactaacgatctgtaatttggaattactcgtttaatagtacttggattgaggattctttactcttaaagatgagtaattcaaattcagtggcatagtggtaggggcttgggtattatcgctgcccaagtcccacatcaagtaatatgggatttttggtggaatacttaagagacttggttcttccccttgacaactaaattttaggagagggtttcacaaattcttgggggcttatcacgtaatgatcagatatatacaaccaatattttgatctcgataaaattattttgttttcaataatctgtgatgcatggtgaataaggaacataactgtgtttgacaacaagagagcagactctttgtactgataattgtcaatgcagcacttagattttgagccggttcaaactgaaaggcc

SEQ ID NO: 3912 - DNA, 1007 bp, Medicago truncatula
  Intron number 8 from transcript Medtr5g017000.1 (locus Med tr5g017000) derived from phytozome v7.0 (chr-ID MtChr5; po s 6061708 to 6062714 reverse strand)
gttaaggttgtttacaattcttttattagtgtttagatttcttgccatcacttctcaaagtgcattgatatatctgcacatgcgtaccagcccttctgcgtagatctttctatatgcaaatatatttttcaggaaggcttgatttactgtcaatatgcttcttgagtctgttatggctggcgaagttatcattgctttgccacttctatatgctatatttcttttcacgtgataagaataccgagagctacatacatacatttcagactcagatttgaatagatttggtatcttttgattggtaatgatgcatacttggtgaataaactaccaaactagggttcactaacaacttttacaaacacatttactttcttaaaacccacaatcttttattcagttaatgtggctattgactcaatttaaatatcattttctcttgttgtaacatgaacttataccaatacagagctttaagcttcaggcaattatactcagtttcatatgtttaaatattcaggctgatgcagtattgtttgttgtaaggaatattcaccaaaccagaagaatacatatttaattatttcttttgaacctttcacgatatgttggaatttatgatgattgcatatatactaaattcttaataatcttggccctaaaaaaattcttaataatctaacatacttctgcttacagagtcaaatagttggcttgactgtgcttgtgcataatcatctagctgatacaataggcactaggctgaatttttcgttgtattccttgaagcttaaaacaaattaatgcatgaacttaatacctgtaaagattttgtgtgtaaatactttgacagcttgaatattattatcaattttaaagatacgtactagtttttctatactatataagtgtagttaaagttgttttctatactgtataagtgtagttaaagttgaaatatgatcaacagtaacctttcctgtttgactttttagattgacactcct

SEQ ID NO: 3913 - DNA, 2055 bp, Medicago truncatula
  Intron number 2 from transcript Medtr4g087190.1 (locus Med tr4g087190) derived from phytozome v7.0 (chr-ID MtChr4; po s 18298325 to 18300379)
attgtcaatgtaaatgattttctatttttgttactttcatcttctctacaattattttatgatgcattacattggttagaattacttgttcatttaggcttgtttggtgataagctataagctacttgaattagcttataaaaaaccgctataaactcatgaaaataagatataagcccgtgcaaagctgataattgccaaacaggtcttttttaatcatatgagcttataagctataagcttaccaagcagacacctagcaattattaacttattcttgatatttaaattgattagaaaaataaaatggtaggaaagcctccagttcatgatttaacggttaggtagcgtcatgagctcaaggctactaataatcccattgttactgcaagtttagataggcttatcttaaaaatttcaagttcgttatgttccgttttgccagtctcgagaggagggaagtgagagggcgtttgtgtgtgtgtgtgtgtgtgtgtgtgtgggtgggggtggtggtggtgggaagggaggagagggaaagagataaatctcacagtttatttgaataggaaatgcttatgtttaatgtattttatttagttttaattttgagagtattatataaagatggaaattatatgaataattttttttaagctctctaaagtcctcttgcagtacattttttgagttctcccgtattaggaagattttgtattatgaagaaaagtaaacctcatattcaagtatgtggaatatccttcttcccttcccttttcccaaacatagtctaatagctttattggatccttggacactttgtagagttgctagacaatagccagggtttgttgtattatagaatgttgcacttattctcaacagtataattgcagaggttataaccaccattttataccatgtgtattgtggcgttctatagtaaactgcccgtcgcttattattaatggcagcagggtttgtggcattccggtaaactaccactcgtaaaaataggcgactaaaattgccattatttgctaaacaaacctccactttttacatgtctgtttgttatgtttgatttgatttgtgagacttgtaatattttgttctagttctaagggtataatgctgattacatgcctctcttgattgaatgatctaaatgctaaaatttcatttatttttcttaattgaagtggtaaaatgaagatacactgcataatatgctggctgttgtggaaaatacgttaggaaattgtgtaatgcaatttgatctcgtcttggttggtgtcattatgggtgatgattttggttgtaaacttttatgcacacttttgcttattattaatataatcccttttgttcttgcaaaaaaaaacctgatcaaatcaatgattcaaattgcattagttactgataagtataagcaaactttgacatttaactatgtttgtatccatctttacttgcatagtttgtgcttgattcttgtgatttcaattatatttatgcttcttcattcattacctcaattgcatattatatttttcacactcatacactgcatgcatatagtattagaagttctattgtttgtagttattgcaaacaaactcacaggtggcatttagggtgggaataggaaagagtttcccaccgtaagaaaatagtttttgaccattagatttaagatcttatcatgctctctccacactgtattttttttttcttccatttcttcaacctctcgacctgcaattaaattgttatcacgtctcatctccatggccatggctattaaattgttggctcaaaatcatgagttagaccaagggaaaatgctattaaatttcagattttcattttctaaattttgtaggttgagtttgaatggaaaacccgaaatttgatgaaatgagtttgtatgttgagagcttattcattccttttttaattaatttcaaacaagaggttatgtgcatctttaaaagtgaaactacaaaaaaataaacaaagaggtgaaacaagaggttgtgctttgcagcggag

SEQ ID NO: 3914 - DNA, 2416 bp, Medicago truncatula
  Intron number 1 from transcript Medtr2g033010.1 (locus Med tr2g033010) derived from phytozome v7.0 (chr-ID MtChr2; po s 8911643 to 8914058)
attttgtaagtaatcttttttttttttttttcaagaattaatctggttaccttgaatttcatttttaatcaaaataatagcacgtaatcaaggttgacagatccatgttgatgacatcgagggcattttgctctcactagaatctcatcaacttagtttgaaatataagtattcagttaaacgttattgaacaatataaaattaatctggtatattacacttatgtaatttgattgaaattgcattgacgtcagatctacattgatgacagctaggacatttgctctccaagaattttcataacgttgttcaacagtgtaatagtattcaagtattacaccattgtaagttgatcgctcctaattatatatatacatcaattgtcttatactttattatatattttgagtataatattgtatgtactaattcatgatcaaataatttcagcgtagaaatgagatatagctgtgttatgtattttttacttttttttttttttaattttttttttatatatattaggtgtgttacgtatcttaacttgttaaattttcaataaatggtgaatgaaacactatgtagatgtgttgatttataattttccggatagtagaacatgaagattttcacaattaattttaatttatgtgcttacttttgttacatcacttgcttgaataattatgaaatatgtatgcttaatggcatattcaattcatgtggtgatagaggtagcagggtggcttccttaatggttattgatttgaattaatgttactagacatatcattgacgatctattacttctggctggtgtttcaggctttccaaaatcattttctttctttacaaatatcttattttatacactaatgtttatcctcagaaactgagaaaagggaacacttgaactaaaatgttacggatttttatatcgtttatatatctttctctgtgcttcttgtcttgatcagtctaagtgatgatcacacaacattattgattgtttgtcagcttaatttgccttcaatacttatctgtcaccttttttatttattgctctaacattttttttatgaatgcgtgcttaagatgttgaaattagtatttttgtgaacttggtgattagtgggaactgggaataaattacgagaaaaaggtttcatatgtacaactttttgttacgtatcaaaatagaggtggtgctataaagttagaaatagaaattaaattttgctatcaagtattttaggaataaatcccaatgaaaataacctaaattcaatttctatactatagttggctagtccaaccggtatgaaaaaaactagatttgtgtctgacttaagtatgggaggtcgaaaatctgaattacggcaggttagaaaatttttaaaactcatcattattaaaattattattattatcattttattttattttatagattcaatccattagatataacaaagaacattttttttgtcaagaacattgttcgctaagttgtgggagtctagcacattccgctaaaattattcattattagttgttactcatacatgagtctacccaatttatatacaaccccacatgatttggtactctacttgaaacaatgagatcagtagcaaaatgctatgctaatattcaagcatccacccacattaaaatttcttcattctggaagtcataacaagaaattaaaatttttatcatcatgatcacaatgtagcaaaagcggaatgcaatttaatcttttttcttgtgtctttctatttaaaggtaaacaaacaaacattcaccaaaactatatatatttaataacgtgcatgtgatcacaatttggattttctgtaaattcttatataagttgaattcaattcaaaacatgtctagtacatgtaacatgattgccacatttacataaactgaaaggtttgctacatgtccatgaataaggaggaatgtattaaaaccgaattgaatcggatggttcaactagttgaactgtgaacgaacaatgcttacggcgtttccttgaatagtttgatcgtggttttgtccggactcgaacattttaaagtcgtcaactcaatgtctggttgttatatagttattcactttggttatgcaaatttttatgttctgcatgtttggtttattttggtcaagaaatttaagttctttataaagttcaatagttattggagtttttcttctttattctatgcaagtattgatcaagtatagatcctagtgtttatgtcatattgattgtattaagtaatatagatgttataatctatgttttgtatatatgttttcttttctttataatctatgattgtattttctcttggtgtttgggagtttcagttacgtagtttgttgatatctgctggagaacaag

SEQ ID NO: 3915 - DNA, 2402 bp, Medicago truncatula
  Intron number 1 from transcript Medtr3g138860.1 (locus Med tr3g138860) derived from phytozome v7.0 (chr-ID MtChr3; po s 35564064 to 35566465 reverse strand)
ttatacttcgtgttgctaagattgtatggcattaaggtaattgttacaaggaaatcttggcatttactactatgaaacgaattatatattagtatatgtaataatgtaataaagcttatgatatacgcgtattattaataaataaatgattccaaattatgtaaagacttgttgaattaaataaacgaaagtatggttttcttttgtaattctgggtttatttaaagatatagtttaattaattacaaggatttggaaattgcaagcacaatttagtgaattttaacgattttttttaagagacaacttatttaacccccaaccctatataattagttgaatctaattagtttaggacattgggtagttggtgcacttaacttgtggcctagcccacaagtatagcttacactagaatacgagtatcccttacaagcatgaaaagaatatggttagaatattccttaaaaaaaaaaaaaaaaagatgaattttttttttcaaataagagacctttcccactctccatatatctaaaaaaatggttaaaattcagaagtatatttccatattacaaatcatatggttcttttcaaataatgctgtttatttccatataaaagaaataggcagctcatttctcttcaaatcatttagtaaattgtagtatatttttcaaattatgttttttctatcgaatgtatgtttccctaacacacaatgttgatatagtgtccaaattaaaagtatttgatattgtccaatgctgtgaatgaagaaatcaattttaataaggttggttcattttagcttaaaataataattttgaaattatgttaattagaaaataattggacatttaaagtagaatagagtttttatttttattttttttaagataagtaaaatagagtttaatattaaaaagttggttgagggaagtaagacaatagcatattgcattcaacatgtaggagattcaaatttccatctctattgaagtttcatgagtgctttttgagtcttaaaagtttttaattttgtattgagataccattcccattctcctaccttttcattttaaagaatatattcataactatagttttcttattgggaatgactcaatgtcacctttcaaaataatataacatgtatattatatttaaatgtaatatttgggtgtgtgtgaaaattacatttaattaatcattttataataatcttaaatgtcgtttttgcgttggactatttcaattacatgacgcattccactaaaaaaaactcatgcacataaataactattgaatatttttttttaaaggaagaactattgaatattaaaagttagttttcactttctatagagccattgtgtcttcctgttgccttactttcctttcctttttaaaacttttcctcctctttctaattttcatttttttttaataatttctgattttcttttagtttgcctttgaagatattagggaaataatagacgtgtttgtttcagattctttaaaaattaattttgatgtcttggttataagtgtaagtgtttttcataaacaattttgctataaaaatgatttatatgctgaaaatgaaaagcttttattttttggtcaagctattttaactagcttttgaaaaaaaaaaaatgtttcatacaagaacgaaaaaattacaaaatcttattttataattgtaaacaaactcaaaataacattattttctcaaaaatcgattactctaaattatttacatcaagatgatttagaaaaaataaatagaaattaactaaaacataaatgatattttaagaatcttaaacaggcgggttcaaaagctagactgcattgactaaagaaaagctaggcttgctatgtttcttgaacatagcaagttttcttttctccttttacaatcattttttttcttatgttattttactattcttttttttacttttgattcgaattttaaatgagaaatgttagggtcacatccactaacattctcttttaacacactcaatctaaattagccacatcattaatttattttctctcttttaccggcaaccggaagtacaagttgctaaaccaaaagtctctcatctccctttatggtctttctcattacttctgatatggcatcttgctttcttccgttctggccatctctatttgatttctttttgtcaatttgtttccttttttttatatgttcttgccatcttgctttctcattttgtattccaatgggtttttttttagggaatttccaatggattttgttttagattgtagtaactgaaaatcaaaataagcattcttttgcaattatgttggttttttgtgcagatttttgcagtaacgatcttagtatcttctacttt

SEQ ID NO: 3916 - DNA, 1865 bp, Medicago truncatula
  Intron number 2 from transcript Medtr1g008750.1 (locus Med tr1g008750) derived from phytozome v7.0 (chr-ID MtChr1; po s 895159 to 897023 reverse strand)
tttgtggagaattgttggggatcacattatctaaggtttgtttgtttgtttaataagcaattcaattcaacttcgtggatgtgtgtgcgtgcgtgcgtgcgtgtgttcagaaaacaagtagtggttgctagagtgtcttttgaacaaatctcagcgtcgagtaggttgcatcttagcatttggtcttttctgttacttctaggcacaattagtagttaattttgggtgtttgtgattaagttatgtgaatcattgtttgaaatgattttccgttagtaatttgagttttcacttagcatatgacgtagtaattttatgtagttcattttgttgctgtattaaatgtagttaggctcttcaattattgccaccgatatattttctagtgttcctttagatcctgcggtattttttcgataaaaaaaaactagttttggaagcttggggggtcctttgatttaaaaaagcgttttatgttttccccgaactcctttttttttaggataaaaagttagcgtcataatcgtatggtatgtttggtttgagaaaacgtttttatgtttcacttttaatcaaaaagccaacatcttgttttcattatgttttcagttttcaaatatttctacaagatttgtacaacaaacagcaaaaacatttttgcataaaatatatcgtcccggaagtttaagctatcaaatagagaatgagtgtacatggatggccttaaacttgtatcatggtttctctcacatgagtctgttaggattaatacacgaacagtgagtgggaacttcctgaatgagagaaaactagagacatgtgatggtgaaactgccggtttgaactacaccacagagactctattatataggcactgagaaaattaatatacaatctcagtattaaatacataatgactacgatatcatgtctatcctaattatttaaaataaacagaatagatttacataaatatcacctggtcttaatagtgactgactgcaaggttatataaagctttgatgccatgtaaagaattaatattcttcaaagcataagttgcaagttggaggcacatggatatctttttatctccttacagttattttattcatgtcagacatcagtatacacgttggtgtcaaaattaggtgctttatttctgtaggcagtagagtgattgtttggaatgtgttctgcatcaagaaggtttcaagattgtagtctcagttagatatatatatatatatatatatatatatttcttttttaccttatgcaaatttcattcctaaatagatggattcaacaaaacgatgattgtcgatttcagactgttaatcaatccacggacattaatgtttttttttaacaaaaccaaatgacattaatgctgccaacatatggactggtttgaactctatgagaaccttatcttttgtatgttgtctttggttagaacttacaagtgataggtgcatcataaaatatgcttttagattgtcatttatatttctaataaaaacatgctttctcaaatttgttggattatatcaatcattatatcttatttttgcaaagtgactgataatttgtttgatcatgagccaaatattattagttacagaatgttatgtttattgagtttaaaaaggaataataggattgagctgaataaaatataaatatgagtgatgttcgtgttaatagaaacaggctgtatataataggacataaggggagcatcttatacgctcaagcatgtgttttgctccattggagtttcaggttccaaagactttgccaactggcattttcggttactataaggtgttaactgaattatatttgctttaggagctcca

SEQ ID NO: 3917 - DNA, 6142 bp, Medicago truncatula
  Intron number 2 from transcript Medtr2g104330.1 (locus Med tr2g104330) derived from phytozome v7.0 (chr-ID MtChr2; po s 24568183 to 24574324)
actatattaagggacctaatttctgttgatttcaggtacatttatgctacttttaatttgattctatgaatattcttcttcacatgccaaaatccaaagatcaaagttatatcatttatttatttaataaataagatcaaaacatttttgtgtttgttgattaaaaaaaaattgtgtttgtgtttgttttcgtttagctaactaatttagttttttaattaattgattaatatgtttgatgcggtgaaataaagttgctaataaaccaagagatagtctcacatggtatttagttgatagatctatgaaaaaacaataacttgtcataatcttgtaaaaaaaaataaaaaatcctaatgttggtaggtttatggattttgtgtacggaaatgtcattgactaatgttttgaagttattcaaccttgaagtttgatttattcataaaattagccaatgaaaagtgaggaagacatacatgctctaacattagaggttgaaattaaaatattgagcgaatcaaataggagaccctcaacgcttccttatttggtaagtttttttattttgataaagaccttttatggtaagttaagagaatgaaaatcaaacaatatattttaagtttggtaaattagattttaaatgaagtttagattattagtcttataatttcttgtccaactgttgtgactgagggaatgcactgaccgtgtattgtggactggttcatggtccaagccatttaatcaagaatttttttaaatatttctcaaaccgaccccaaaaatacagagatattggaagcacgttttcgattattgtattttgatagatttaaacgtatagatggcagtttgagaaactatcatgatttttacctcaaaagtaattttgctcattaccatcactttttcatggataaacatcttctcaatttttcaaaagaaacgtggagctttatttaaagagatagatatgcacaaaagttttatgggatccatatttaaaaatgattttaaaaatgggtccttatatttaactttttctttcataaatgaagaggatttcaactaatttttcctcaatttttaaattgttgtagtttaatcattttagttttgtttcaaaactcagggttttgaccatgcccgtggatttttctgtaagttaaaaatatgataaaataaagagagaaaatgtttacgaacatagataaaacctagaaaaatggaaaaaaaaaatatatgtagagaaaataataatgatcatgttgtgaatttgaacccttgtgcaaaacaaacaagataatatgtagagaaaaataacaatggaaaacaacaactaaatagttcaagcaacaacattcaactaagaacgaacctagcaacataattgtattttaaatccacattgaaaacaacaaacaaaaataaagagagtattagagcaaacacatcaagattgttcagctagattgtcccaaattggcctacgtatgtaggagagaaaaactatccattttattatcaaggagtcctcaccaaagatacaaataagttgcaaaaaaatcaacttcaacaataaactatagttttaaccctatgtgttccccctctcttaacctacaagaagatctttcaagaagagaagagggaaaagtttgaatttttctctaaatgaaatctttgtacccaaggtgtttcgaatatgtttttcatccataattctcatccaaaagctctcaaccccaacccttaagtttccctaaaagttatgtattttggtgattttgtctcttattcaagaagtctttgcaaaagatacaaataagttacaaaagttcaacttcaacaataaactatagtttaaaccttgtgtgttccttctcttaacctacaagaagatctttaaagaagacaagagcgaaagtttgaatttttctctaataaaatctctccatctaaggtgtttagaatatgtttttcatccataattctcgtccaaaagctctcaacaatagaccttaagtttccctaaaagttatatcttttggtgattttgtctcttattcaagaaccctgaaagaagcactcaacataagagccatacttttatctttgtgatttcttttcttgcctattgttcttgaaccctagcaacactcccaaaaaggtatcaacccttagccgttatgtttcctaaagatcctttcttttggtactttcaaacaaaaaaatctctatttataggcaatttttaaatagactaaactacccttgatttcaatttaaccgtcaaccacattgatacttatccttatctccaactacacttggtagtcccacaacattcaatataacctcttcaaccctcataatgccttcaactctcttaaagatcttgcatccaactaccctcggagtttttaagcaactctgcaaggtgtaccataacctcttcaatcccatgaatgttccctttttcgttatcttaaagatccatttgtatctaactaactttgactttttaggtaggcccataagttgtaccatactttttcaaccctcggaatgtcttccatactcttgaatatttccttgcaatcaagtacctttggcttttgaggtagtcccacaagtggcaaaatatgtctttccttgcatccaattaccatttgtagtcccacaagtttcgaagtctgatttttttttgctttcaaatgctttcctgcaaatatttggttacgagtctagtatcttttcaaccacaattaaatcataatggacatcatctccatagtcgtaccgttttggcgaaaaaatatctcccctatccatactccttaccaaatagcgaggagccatttttggttgtcttcttctagttctacttgtggaagactcagtcttaagatgagttttctccaccagagctttcaaacgcgtgcatacattaggcctattaccttgtaacatgtaaaaatcagtaatctgctttcttcaagctaaccgagtatttttaataccacttatctagattgacgatgagtatttttagcatcgtttctcaaggttgataatgagtattattaccaatgcctttcaaagttgatggcgagtgcttaaggtctctccaaaacctctttagcacggggggatccccatcacaattgcgatcttattctgcatgacctcccttaacattttatctatgaggcacaatgttatgaaatttcttgacttatctttcatcttagtcttctatgattgtgctaggttgaccagaatcaatgccccacccttcaaagcatctacacacttatgttgaatcaaaattgttgtttccaaaatacttcttgtgtcaattttggtacccatgttgatcgcttatataatttattttgtttccccatggtgggtgccatttgttatgaattgaaacccttatgaaaaacctgagcaaataacaatgacaaccaaacaattcaagcaacaatattcaaacaaaaacaaatctaaaaacccaaatgtataacacacacacacaatcaaagtaatgatgaagagagtaaaggaaaaaacacaccaaaaaaacctatcaagaatgcaaatgagaatgcttgaatacttcttctaatgaaatctttctagccaaagtatttagaatgtgtctctcaccaaaaaatcctcaatgttaatcactaactttccttaaaaattccctcttttggttattttacatctcatgcaaaaactccacaaaaagcactcaacactaaatccatgctcttctctttgtgtaacctcttattgcctcttgtttttgaacccaagccacgacaataaaaggtatcaacccttaggctttaagtttcccaagaatccccatttttggtacttttaaacaatgaggtaaaaatataaatttttatatagactaaactacccctatttttaagtcaatatttcaccataattctcctcaaaacaacaatgatgtcaatttaacaatcaaccccattgatgattattcttgtatccaactacactttttaatttcacaagattcaccattacctctttaaccctcacaatgccttccgcactcttggaaatcttgtatccaacaatcctagacttttttaggtacctccataaaatagtgtagggagagggggggcctatggaggccatgatcccccctatatttttaatatttttttatatactacaattaaatatattagaatgttttataaaatatatatttgactatggtccccctaattaatctaattaaaatgttcaccatattattagattaatagacaactaatatcattagttttatatgttatattattttaaattgtcgcatatgctcctttccacaatatattttaaatggaatgaaacacaatgatataactttggaaaataaaagactattttaaagcaaaaaatgagaaactaaagataggggattaaaatataatttagtccttaatggattttattctcctgtgacaaaaatctcatgtctttcacactcgtacaacatggtgattcggagttcgggcaagagataaccaaagtttcgctaaaaaaaatgttccttgtactcgacccccctaactctaaatttctggctccgctcctgcctccatatgttgtaccttaaactcttcaacccccaaaaagttggtatgtattcaatttgtttactttgtgtagggacatttctaaaataacaaggtgtttttttttcttttcaaaagttaataataaatgtatctaataatttaaaataaaacaaatattaagagaatttttttcttttaaatatgacatgtatttaggtacaaaaataataaatcaatcagttgatattcttttatctatgtgataataccttacactatcaaattttaagaatgggtggagtaattgttttattaaaaaaatatcttaatataaaaaaacatcatttgaaaaaaaaattatatctaaggacgaatcgtttgagagaatttaagtttgattatggataaaaaaaatattgattaaactttacttacctcccaacattaaactcttgattagtaggacctcgaccatgtgacatctttatcgaaatccatttcaaattcttaatatttgtgattctcaacatccatcacttgataatccagtataagaaaaacattcattgatattagaaaccagaaagctatggaccagttctaagatggaccatctattactaaactgtaacgacgactgccgttggtttgacaaaaacaaaaaaaccaaatcaatggagttttgagttgcacatgtttatttttcttatacattataataaaaaagattatgattttttacttttgaaacttagactaatcatcgtataattatcgaagattttcaaatactaatccatccttcagttggtatagtggacctcctatcaaaatggttcatgtagaacttgtcttctagtggaggtagtctttattgattttgacgcattacctttgattattgatcatttatttatctcaatataataatctaaaagctagcatgctcttgacccgtgggaattataaaatatactttacaattctcaagccatccttcaaaaaaaataaaaataaattctcaagcttacgaatgaactaaaagatttatcttcgtgagtttatatcagttggtttgaacaatacataatatatgtaaggtatagggttcaaactctgtccacaaaaaagaaaagatttaaaaaaaatcaactatatataaatataaatataaatagaaacaaggggtgttttggttctctcagcaagaaaaagatggattcattgtaataatttatcaatgcctcattaaagaatttgacaaagccaaatttcagataattgtttttttacatatattttttcctagaaacatatggagatgagcaaaaacatctcaacggtagttaactaccgctgacttataactaaaaaacgaacacaaattaaccgccgctgggtttttgatcatttccatgtgtttctagaaaacaatgaaggtcaaaaaaacaagctttcaaatctcatacactaatgtctttaaataatttcaactagga

SEQ ID NO: 3918 - DNA, 1339 bp, Medicago truncatula
  Intron number 3 from transcript Medtr5g073060.1 (locus Med tr5g073060) derived from phytozome v7.0 (chr-ID MtChr5; po s 26111217 to 26112555 reverse strand)
aatctgttgagtatgattcggattatgtatttacactctagactaggtacatccttgcgtgtgttatttttctagaatggttgctgtcatcttagattttttattctgcctttttatttatttatttatcttcaatgttcacttgttatgtataactttaactctgtttatttaattagaattattctcctgtttaattactagttcctctattagtttagttttttccctttcttttaatttaaaatgtggccgattcagttgagattggataataaagcattcaaattaaattacattgaaattcatgaaaataagaaagatcctactatactcctacaaagttcagttttgagtatatacctagttactttctagagctgaatgaagatgaatattcaatacatcaaatttgtccacacttactattagtgttgggacagactctgctggaagataatttaacaggagggtgactgagttctatttccttctttctttgccttaaggaccttatgtttcttgcactctagatgcaattatacatcaatttcacctaccacggaacctcaatattataaataaatatttttattggttttgatggatgtttaatttaagagataaatttactacatattatttgaagcaacaaaattggcttactcttcggatttcatttaataaaatggctatttatttactctaaagaaaagtcatcgtttacttttttatttttttacacaaacaaaacttatgtcatttcattaataatattagttgcaatacatcttgaaattacatcaaaaatattgcgtgaagcatgggataagctgcacttgttaaaaatttggatttttaactattaacccagcttgattctagtccaaccttattgatcaaatcgaacacctttacaatttcgtggtgactggtgacaaacattatcctcactacctgctcatagttctctacggtcacaaggtagtttcattgttttagtattagccattaacatcatagttttgaagcactggtttgggttattctgtaggcgcaaaatgatcatatattcaagaataggtcaagagattatggtgatagtggatgaaataaaggtagtgccttggaagtggaatctcgcccgcctaaaagggagtccatgtcttttctatgaatggtgttgggatcgtggaaaatgtgtcaagagacaaaaggtgacttcgttgggtttttttctgtgttttgatttgatgttgtttatgttgttgttctgttgtagctgctattgttttttaattcagtttgtctgcggtatttggctattctgtggtgtatt

SEQ ID NO: 3919 - DNA, 3817 bp, Medicago truncatula
  Intron number 1 from transcript Medtr5g018950.1 (locus Med tr5g018950) derived from phytozome v7.0 (chr-ID MtChr5; po s 7017735 to 7021551)
gtcacattagttgtagttgaccacaatttttcaaggtatgattttaaaaaattgtttgtaaaataagttttcttgattttcataaattttgtttcttcatcttcgttttcttcttatattttccttttttaagaagtcgttttcgtcttatatatattatcaaagggagggttatagcaaccaagaataaagatacgatgacacccttctttaatgtgtacatctttttgtaccactttagaaaatttcagttaatcaaatatatggtttatatgatcacattttttcagttatatgaccactatttttttcagaatttagaagctgaaaaatgtgatcgcgcaactaaaatatgcgtgaccattatttttccacttaattaaccaaataaatagtggtcacacaactaaaaaaatgtggtcacacggaccatatatatttgactaacttaaattttccagagttgtagaaagaaaatgtacatattaaagatgtcaatctatcattgatgtacaatgaagggaaaattgtgcatgtaaatgatggcttcttcttcctcagtttctatttagtttatttcttctatacatattctcttaattcttatgctttgaaattcaatattacatatcccttttcattttatttcttcctttgaaatttgctaattttgactttctcttttttatttaaggcgtattcaaaccatctatcatatctctattaaaacaacaaatcctagctcaattgaacgttacaattggagttcaaaccccgattcttttactttgtgtgtgagttttcaatgatattgtcatttcatctatctaaaaaaaatctcacaatacaaattaaagagaagtcaacaataaaagactactaaggctttgtttggtaaaaatcagatataagctagctcatagctgataagctagttgatagctgaaaagctagctgatagctgatgactgatagctgatagcttatagctgaaaaagatcgtttattaaaaataatgtgtttggtaaaattagctgttgaagtgactgattaatataaaatgacatgtttgtttatttatttttttaataaattttatacataattgttttactttttcaattcttttttaaatatttaaattcatttcaaattaatttcatctctaaaatgataaatgtgttttatgaattcaattaatattttgtatttacctaaaataactccactatttattgtagattttttttaaaattatatattatattatatgaattcaaagcaacgtaaaaaaaaagtgaacaaagaaaatatatatataaaaaaaaaactacaacatgagtggtgtacatatggatagtgcaaggggctggttgcccgaaatataagattctaagaagagattttgaaccatctaaaaaaataaataaaatattcaaatagatagcaacatgagaccgtataaaaaataaaaaataaaataacctaagaaccatatttccaaccaaacaataaataaaaattcaaatagaaagcaatttataaggcaaccgtaataaaacattaacacaacgtgggaagttttttctttatcgtgggtagttttttcaataaaaaataatattaaagggtataaatggaagaaaatgtgaaaagctataagtttaaaagctatttgaaatagcttctcaaaaaaagctataagctcgtgagaaaagcttgttaccaaacgcatcacgttttcatccaacaagcttataagttagtccaacaagctataagctagcttttttgtgttaccaaacacagtctaagtgttcaccttataccctttgctaaatggcttggggcaaagcagtaccgaagctacttagcgtcggctaaattatcgctaagctaaaactataccttcattaatcgactgagacaaatcttagcatcagcccaagcgacactagttggcaaaatctatcccatgttaaagtaaaataaaattctaacactgtgcaatcaacttccataattgaataaattatctctctttcagagttcatacaccacagtcaacagaaattaacacattcccaactctaaaactttaaatttggagaacttgtagaaataaatttttttagtattttttttaatttattttaggcaacatattttgataatatttgctacaatttaaaatggttaccattaaaaaaaatattgttttgagaattttgatagcgaccaaatgctgcaatgatggaagcaccaaaatgatatatatgtgaatgcagtttgagaaagtgttcaagggtcatgctcatgccgccattatttaagaaaaattatacagaataaatttgcttaagataataagataacaaagagaataattataagcattaattagttagctataatgtttcttgaaggactgagtttgtgaaattgtcaaaaattggatgacatgatatgttgcaatcaaggaagaaatatatatatatatatatatgttctattttataggataagaatttgaccttgaatactttaaatagttgaattctttaaatatatagtaatagaaatttaagaaattctccaagagcatgagagacaagaattgtcccttatagacatcacagtttgcagagactgagtctagctttccagattgaagttatgcctttgaacaattttattttatacccaaatttcttctttcaatgtcaaatattgaattattatccaattacctaagtaattaaacctagttgcatacgtgcacctgatcaatattctgggataaaagaccagttctttaatattccatgtttatgttcctttctttgattagttcaaaagaatatttttaatatagaatgattatttcaattttgattacggatgaaaaacccataataattttttcgaccataataatttatgtatagtactgtcatggaaatttatgtatagtcgtaccatgataattttatgtacagtactgtcatgaaaattttaattgcgcataatgtcattgattattttgtgtatgattgaagaaggaaaaaagtcatttttttgaataaaaacaaaaatggaaaaaaagtcattattattattattttatgaatgaaaaatgtcattatatattgcaagcgaagtttttttttttaaactgcacaaaaaacaaaagtttttccttcaaaaaaaaaaagaagttttttcaaacgagaatcactaatcattgtacgattcgaacttatctagagaggaacacacctctaaatcttaagatttacaccatcaaaccaacctcgagggttttgcacgtgaagttggtttgaattttttagataaatatgattcgtttttgctaaaagtagcgacaacatataagttagataacatataagccagttgatagatggtaaatttatgttaaataattagtttataagatagctcatcacttgagatttagaagattaaccccaataatatcaaacaaatagtcgcaactatagtctttataaaggggggtcacaaggtgaccagtttaacgttgttgcatgtccaacatttaatttgaatttagaacattggttaagttagaataaacatgtatcatctcacctcagtggcggaaccagaaattttatagagtttgggcaaagattgcatgtttcctgcggataattttatagacttcttatataatgttacttcctttaattgcacatttcatgcggatataccttttctgcggatcctaaaatcctaaggaaacaattacccacgaaggtattacatttaccta

SEQ ID NO: 3920 - DNA, 639 bp, Medicago truncatula
  Intron number 10 from transcript Medtr1g083230.1 (locus Me dtr1g083230) derived from phytozome v7.0 (chr-ID MtChr1; p os 16291144 to 16291782 reverse strand)
aggcaaaggtaggttgagaccttttatgataagtactgctcgtagcttattgttctttggccatagttcatttatttatattattctattattctgtggacacaatcgtcacctgttttaggttatattattgcatgaaaattcgactttattctatgtgcagtcgcaattagccttgacaattcatctgaatgtgcaaattctctccttggtatcacaatgccattaaaatgttaatggtttgatagttgaaagtaatttgcagcaatgagaaaatattggtagtgcaagatattttttcatttaaaaatttatatttctaattatgatcagcactcagcagaaccataataatatttcttaggcattgtattattctctaagtaacaaactataaagtaattataatctcaactgttgaagaaggaaacaatagttaaagtctcactgttgatttccaattaagaaatataatttcgcactgtttcctctaaataaaactcctcacagtttagaggaaccaaatccaaaatacctgtactttatgcctacaaatatcactgaaacctgacaattatctctactgcatgtacaaatttgtcaggaatttatacggcggtgtctgacatataaccaggc

SEQ ID NO: 3921 - DNA, 5543 bp, Medicago truncatula
  Intron number 1 from transcript Medtr5g046700.1 (locus Med tr5g046700) derived from phytozome v7.0 (chr-ID MtChr5; po s 19643589 to 19649131)
agaaaccgccggaaacaccgtgagttgatgaacttttccttacactgctttcaactttctattttgtgtggggtgagttcgtaattaacgtgaaattgtgaggacgaaaatggaaagaaaataactgaattctattttatattcatcgggatcggtgcaaatccatgtccgtacaattaggaatcttcttcttcccaaacagaacataatccgagatagattttatttttcttcttttgtttttttggtatctttgggtctgttttacaatttttaaaaagtcggggttaaaaaaaggaaaaaaaaaatttatgtaaacttttcggatttctgaagcttcactgttttttttttttttttttttttttttttaagcttcactgttattgaggcgagaatagtgtgtcccgaaccatctaaatctctttctgctttattttcagacagagctataattatttacaatttgcattatttatgcattattttaaatgttacaaagttttgattaaaattgggatattttaattaaggatgtaagtcagataaaaagtgggatgaaaagggataataaaatttaattgaccactaccacaaagttaaacctccaatatatatttctttttctacaatgtctgtaagtttcgctgctaaattttgatgacaaaaatttgtggaaattatgatagaagatacaactatcagctttcttatcatttccatctttgctaccaaatttcaacttctaatattttttgattgggtggtgagcttgagacttcttatctttttaagtgacacgaaaaatatgatatttttataacaaaatttgttagagtataattgaaaaaaaaaaactaactattttaatattatttatgttattatttgagcctctccttaaattatttctcctattcaaatatttaacaggtcttttatatgatgatacaaatttgtattcttgttagacaaaataaacgtcattgagtatttgttaaaaactattttaaacatttatttatttattatgttaaatcataataaattcaaagttttgtcatcgtgagcctagttcaactgacatggacaatgcataaatatatgcaagatccaaagttcgaaccctggatgccaccaaaaaaaataataaattcaaagttttgtataatattttgccaaacaacctttaacttaaaaatagctttaaaactaaaaaaataaagaaaccaaacagctttatcttctttcttaaatacctttattctacatttgttttaatgtagtttctagaccataaaaaagcatggtcaaacaacaccgtatatgtttgttctatctagatctcaagtttcaatattttgagtatcaataatttttgttttaggttgattgtatagagttttattctgtcttcaattaaatccttttcaataaacagtttttttaatgacaaatatattatataaataaagaaaaagaagaaatatcctctttaataaatggtgaaatgatatggtattatttagtctttgtgtcgggtatcgagaataaacaaacaccatcaagtttcttttattatttagtagatggtgtctcagactttgcacttcgttgtcacaagtgtcccaggctcatgattaaatataaagtagtcctttaatgtgcacttccgttatcagtttagtccatgacgttaaaaatttatgttaactaatgaggtgaccaatgttttgggctaacaaggtgcatgaggtgttagaaggactaaagtgaaagtagaaaattgtcactttagtccctgaactgaaaattcaatatccccaaattaaatatcaaatccataaattccgaatttaatccccaaatcgctaaatctcaaacccctaagattcgatttgaaattcaacttggagatattgattttcggtttagggatcaaaatgatcattttctactttcactttagtccatatgatacctcatgcaccttgttagcacaaaacatttgtcatctcattatcagaagtttttaacgatagagtctaaattgataataaaaaagcatattcaaggactattgtatttaatcctagagaaatgatatttgtacaaccattttgtaacaacgtttagacaactttctctctcatactcacatgatgttcttatcctttctcttcctttttctctctccattgtttttgaccaataagaagagagaaaaacaaagttatcactaaaattgtcatataatagatgtacaaatatcattgctcttattcctaaataagaaacctttgtgacaatgaagtgctgaatcaagaatttcaaattgaccatttactctttatcatttcactttttaatgattttttttttttgacataaacttacaaatacagctttttagttgctggcattaacgtgatgctaaccacttgcagctttatttctttatttttttgatggaaatcacttgcagtttaaaagtgtagcatttggatgacatagagttgagtgatattggtgaaattgaccaatcacaattacataatatttgtgaaagagagaaacataaatttatgattgatcaatgtcactaatgtgacccaactctatgtcatctaaatgctatccaatttattcaaactatatacgcatttagtcaatttttacacattagattgaattgcagagtttctactttcttggtacgattcttattcatttcactgccacatgatagcactgtcattaatttgcactttatgttcataattattatgtatgtactaggcctagctagaatgcaatacactactttgatgaaaaaagtttcatgacatattgcttcttttcctaaaataatgtttgcgtgtgttttcattgtaaggctgggcctctcctttcatttttttttacaataatttataaaaaatcttgtggtccatattttttgtgcattattaatatcttattaacagaagattatgataattgatatggtctttgtttttttgtaagcattatgatatactatacgatgcagaaataatactgtcctttggcccaaatataatgtggctcatatattttgagctgacactcaataaactgatttaatagttgtagattaacctaactaaaattgaggctcttagttttttttttttttaaggaaaaattgattcttagttgaattgtcaagtattcaatttaaattattatagcaattttattttctcttaacttttaactctcaccatatacataagaaggggtttattagtccaaaattcaatgtaagtaaaatccggtcaattattctttcaacaaatattcaaaagttttattcttttttttttggtagataaaaattttattttattttttgtcaaatagcctagtggctagagctcacacaatttaattatggagaagtggggtgaaccccggcccctgcatataacatgcaatatccctaccaactgagcgctcacggggataaattttattcttaaattgcaccaaatatagaattcgtacattcaaatttcaaacatgtcttctagtctaacgtgacatagaaattttctaaacttggtcctcatcatgtgttaaaatcagatatcacaactctctatttcagtttgtatagtgcatgcatgaacagtgtatcttataacatccttaatcttgttattttagttttcagtattcttggtgcttttattttttacaaatcataagtgacttattttgtagtagtaatcttgttatttctgttttctgtggggtgagttcgtaattaacatgaaattgtgaggacgaaaatgaaaagaaaataacagaattccacatcaatcatatctaaatcgaatcaagttgaggtttgtttgtttgttatttttgaatttaatttttaattccattttgtattcatcgggatcggtgcaaatctatgtccgtacaattaggaatcttcttcccaaacagaacataatctgagatagattttattttcattctttagttttttagtatttttttaggtctgttttataatttttaaaaagtcatggttaaaaaaaaaacaaaggattatattttttcaagtaacctttttcggatttctgaaacttcaacacacgagcaccgccgttattgtggggagactgtattcttttgttttatggaaaagccataattatttatgatttacattataaagttttgattttgattaaaaatggattatttagctaccaagtttcaacacccaagaatttcgtccaatggtaaaagcttaagactttgatgtgtactttatttttatttttttgagggattgatgtgtactttatttagatctatggtttgaattatttaaggatcaacaatttgtgttgggtcggcctatgcatattttttttttgactttaattgaatcctctaatgaatgttgaaattggttctagagattatttggtctttttgcaggatattgagtttttttatttttatttttttatttcacatttaaaacgattttttttgcataaacttacaaataagtgtctttacttttgggcattagcatgatgctaaccacttgcagctttatttatttatttatttttatggaaacgacttgcagatttaaagttcaaactatagtacgcatttagtcatttttacattattttcactttatgctcataattattatgtactaggcctagctagtatccaatacactactttgattaaaaaagtttcatgacgtattgcttctttcctaaaataatgtttgcgtgttttaattttaaggcggggcctctccttcttttttcttttttaatttatatataaaatataaaattgtggtctttattttttgttttttacatatatacaacattttatgtccattaataacttattaacagaagattatgataattgatatggtctttgttttttttgaaagcattatgatatatgggtttaaaccgtgcagaaataatgttgagtcttttggcccaactatataatgtggctcatattttttgagttgacacaatttatttaaatgatactagtataatctaaaagttctagattagcctaactaaatttgaggctcttaattgaaatgtcaagtgttcaatttcaaatattataacaattttactttgtcttaactctcctctaatacttaaaagaacaggtctgttaattcaaaattcagtcaaaaagtaggtaaaatttggtcaataattctttcaacaaagattaaaaaaatttattcttaaattgaacccaatatagaatatgcacatgcttccttttgtttgatatggatcagcatttcaaacatgtcttctagcatgaacagtaaaagtggtcctcatcatgtgtagtgcatgcatgaacagtgtatcttatagcagtgtatgcttggtgcttttatttttgacaaattgttaatgacttattttgtaggagtaaaagtaagaagaagggggaaaagcgaataa

SEQ ID NO: 3922 - DNA, 961 bp, Medicago truncatula
  Intron number 2 from transcript Medtr1g111710.1 (locus Med tr1g111710) derived from phytozome v7.0 (chr-ID MtChr1; po s 23871878 to 23872838)
aacacagctctgtattttaccaggtaggagttttttctttgtatggactgagatctcaaattgtccttgaacggttcttattcacacacaaaagcttttacttggtcatatatgtatttatttgtatttccacatttactctcaatcattattgtatattttcctcttgattagtgatttgacataaatattctctcgtcttagacgttaaaaaacacttgttgattatgatatattctaagtaaatgaaaatgaacttaagatatcatatacctttgctggacaaatgtaaatgaagttatattctatatgccttatgtatataggaaacgagatgataatgtttgtatcatgcttccctattatttttattttttgtatgatttcttttaatcattcagtactgcaatatgctcaaaagttaatatttgtattatgactcggttatttcatttaagtgatgagttagctgtgattcctgttgcctcccattttaaattataccaatgctgttttcttctatctaacttatgaagcaataactcataagtattagcttgcaaactcagagaaaagggaaattatatttttgaatattctctattctgaattccgaattctgaatatgtagattcatatcacaagaaattatacaactaccaaccttcactcacttaaacgctaacatacaccctctgtatctgactttaaaaataggtactacaaacagtgcttatttggcacttcaagaactaattctttagtgtttacgaggcactttcatgctctttagagcagctaacccaagctaaaactaaagctagtatacattactcatacaacgagtcatgtcatgattatttatccatggtcgtaatgcgcgtcagcttcagcttcaaatttttccggacatcctaaattttcttgctgtgtatgatttcttgctaggaaatttccattg

SEQ ID NO: 3923 - DNA, 1219 bp, Medicago truncatula
  Intron number 1 from transcript Medtr5g072090.1 (locus Med tr5g072090) derived from phytozome v7.0 (chr-ID MtChr5; po s 25618828 to 25620046)
tgcccctattggtccttctaccaacgtttcccaaggttatgtcagatttcatttactgaattatttgagtaactacaaattatgaatacaattctattgattatttgattttaaaatttttgaacaaaatacttatgacaatgtcttggtcactaactctcttcgatggttatgctcattaatgtcttagctatgaataatcattgaaggtttaagaaaatcaaagtaattaacaattatcattagtttaatatctaaacctaatcaataattgatcggttataataggttaaatcttagatttaagtttaataatcctgatttacctcaaatcaatttatggacaaagttagggttcataatcattgatcgcataaaaaacattaaaaacaagattgagggaataaaataataaagtaatcgactgaaattcatagaatcatttaaagttacatgaacaaataattattgaaaagttcaactttcaagacctaacaaatagaggatttagctactcataatttctaaacacataattatatttgaataagaaaacaagagaaaagggtcattgatagatgattctttggcacttgattagttcccgcagctccaatccttctgaaatcgcatttctaactttgtatactcgtcaaaaagcgttgcaatactaacctatggttcgcgatgcgtgcttattcctcacgacgcgaggtaggtcatgagtatctgtgttggccttatcgctctatatcacgatgcgggtctcatagcccacgatgcgagatatacaatggcgatctccttgatttcaatcgttttcttacaatacacgactcatagcccgcgatgcgagttaggcaaaagctgactccttggtttcttcattccttgattcatttcttctaaccagaacgtttgtaacaactataccccaaacttaatcaatgatatacttgtaaaaagcataacacaatagagagttgtctgattctggtggatttcgataactttaaagcattttcccgtctttaggtatttcatgactttctaaatgatttatttacaaaacttgactaaagcaatcataaacttcctactttattgctaaaatggcactaattgatgactcaaccctatataatttttttgtcatcaattacacaatgcgttttggatagttactttatagaccaatttttccgtcagaagtttacct

SEQ ID NO: 3924 - DNA, 2084 bp, Medicago truncatula
  Intron number 1 from transcript Medtr5g021520.1 (locus Med tr5g021520) derived from phytozome v7.0 (chr-ID MtChr5; po s 8224381 to 8226464 reverse strand)
aattattttcttgtgttaatatcaataattagtcaacaaagttatagtatattcataattttttaaatatttgaatgagaaaatttagtaccaaagcattttaaaaatggattcaattattattgattaaaaataagtcatttaggtaatttttttatagtaaattagtaacaatgttgaaatagaataataaatatcttgatttttttttaaaataacattaagatatgtgagtattgaattttgttcttatcttttggtggtaggtggttgaattcatattcgagacattattattgtcttaaaaagagaataactttttaatttctttcttcttatcatttttcaatttcaagaaaatatattaaaattacttttttagataatttaagaagcagaattgatttggtaaaaaaaacaaaaaacagaattgataaaatattcaaaactttattatatcaaatatatttattttcatttaatattttttattaaaaatgaaaatattctaaattttcacaattctattaactagtcaatatatcctttaaagaaaaaatatatttgcatttaagatggtggcaccccaaaaagatgtataaaagaatgaacaattctcttccacactcttatttaaaatgaatgagttaaagcttctttcgtttcatctactcttttttttttttttttttttttttttttttttatcaaaacaacatttttttaaggaatcaaaacaacttcttttgtttcatctactctttttttatttttatcaaagctagtttttattttcatagtttcaccaataccacaaactctacctttgaacttcaagtttgtttctctttcaactctcatctttgttcaatttattttttgtaggttgtttcatcaataattttaacattttttttagaattgtgaatataattgtcaacaaaacacgatttatgtgttttattgtttccaattttttaggatatgttaacaatttttttattgtatatttggataggaaaaacatggagggggagcaacaaacattagtcaaaatttggacaaagagataaatctattgaaaaaacaaatccaagagaaacgacttgaataaatcaaagtgagttcagtaggatggtcgattctttgaaatagtacatagattgttatgtgtaattatttttgctagaggattataccttttattttccactataaattgaaggagaaaatgtggttcgattataccttatattttcgtgactaattttagggtttctctttttaaccaattgatttaatcaccgactcttatgtgattattagttgcgttgtgtttatgtttataaattctcaccatttgtgtgcttccttcaatcttaccatttccttcgttattatgtcttccttcaatcttaccatgttgtggtcaatattatttaattattttccataattaacatcaattgagagaagagtgatgtttcataattagctatggaggatggtatttttgataaacattatgaagaagaagttatcaaagagcaaatgaatgattttttccaaaatacagaaataggtgtggatttaaaccctaaccaagcttatatgttcaagcaatgttttatcatctgaacaaattctatgaatcaaaatatataggagcggtgcaaaaacatcaaggaaaatggacaacattctgaagataatagagaaaatgaatctcacactgagatatatttgaacagaagtttgagtgccaatttaaaaaatttgaccaccttttatgtcctaagtgtttagtaaatacttcaaaactaccagcataatttttgcatttttttcattgcccatgttgtctaacgtgataatgaatatcttgtgtctttatttttgtaatttctttatagctcttttgtcgtactttgcacaaataccctgatcaacaaattatatatctagtaagcaacaatgttctacattcatttcttaacacatgtttttgttaattaactaatttaatggtttacttttgagaaagtaaagcaaccaatttggtcagagccagaaggtgacagaga

SEQ ID NO: 3925 - DNA, 1867 bp, Medicago truncatula
  Intron number 1 from transcript Medtr2g088190.1 (locus Med tr2g088190) derived from phytozome v7.0 (chr-ID MtChr2; po s 19880555 to 19882421 reverse strand)
aactaccaccagtttgcaggtttgcataatagttctttaagtgtaaaccactaatgtaatactctttctccggtcgttattataagaaaattttcaaaaaaaattatgttatatttataataaaatgtaggtcaaatgcatttaaaggtcctttaagtttttcgtttttcccaaagttgtcctttaagtttcaaaagttccaaacaagttctttaagtttcaaaagtcccaaacaagttcttttagtttttgaatcgtttcaaacaagtccttttagaggatgatggtgtgatgatttagatgataacaacaaagagcattatccaccatttgtcatgtctaaaaagatgactaattttaagtgggtgttaggagccagatttggtaccaaagatgagttcaaggaagaaattaccaactatgctatctacaataggacttgtttgaaacgattcaaaaactaaaaggatttgtttgagacttttgaaacttaaaggacgactttagggaaaatgaaaaacttaaaggacctttagatgcatttgacctaaaatgtaacaacttttaaggtgtagttattatttaaaagacttttctatatttaatttaatgcttctctttttaatattagtaggtgtattttatgagggtatattcataaaaatattaaaaaagttaaattcattaattattgcattggttttgttgcttatagtaaagaccggagagagtataagagaaatgttatttgaacaaccatttaattgtctaactatgtatttatatactatgctgatacaatttcattttttatttgttttttttcctctcatcaaatcaataataataaataacatgtacttttatatacgtctcaagttttagttgttaagataactttcttttaaatatatatatatatatatatatatatatatatatatatatatatatatatatggttttttaattcttcgatttttaaggaaaataacatgacataaataaagtttaatcaataattatttcaagtagagtttaaatttagaactttcaattgatttgacctttatggataaaattacactctcactcctatgttgccctagttagtatgacacttgtgtaagtgaaaataataagtaaccattagtgtttgttaaagatagtgaagaaaaaattatatggtataagactttagtgatatctaatacattgatgcgtgaattgaactcgcaaatctccacttctgtgtgagtttttctgctagactcatttaaaaaaatgttaatggtagaacaactagtaacagaagagtaaacaaacgataatttgcaacacaataaacatgtctacaactaaaaagcggttgtagttctagaatatttcgattgacaaagttagggtttacaatgttacaagctttatacgtcaatttattgattacaacaataacccttaatcgtagtgcgcgccctgacccccccccaatctgttccctacaacaaacaataggattaaacgcacgggggatactcgctacgctcgctcttctacctctcccttgtccccttgacactgcctatgagccatactcaacaagcataaactatatgttatttttgtttgcttgaaagaccaaataagaaaaagtgtggaaaatcctagacaaatttggtggtatactcttacttttaacattaagcaagcattaaccattctaatcaatgataacaatattctttggttgttaatatccttatttccattaattttttcggttgcttatagctagagccaccacctacttagaattatctgtccttgatgacttgctaatgataacaaacttgcagtgatattgtga

SEQ ID NO: 3926 - DNA, 1851 bp, Medicago truncatula
  Intron number 1 from transcript Medtr6g008860.1 (locus Med tr6g008860) derived from phytozome v7.0 (chr-ID MtChr6; po s 1286228 to 1288078 reverse strand)
ggaacttgtttaggtttgagtgagtagatcaagacggtgcaaatatacacatgcaatatatataaaaaacgtgaagttagttctcttcaatctaccctcataagatgggttgaaaactaacttcacatcccttatacattttgaatgtgttgttcacaaataccatatcaacaacatcataattaaagaattcacaaatctatgtgaaatgatcaacttactcggttaaattgagatggagagagtaaaagatttggaatagaggaggaaaaaaaaaacaaaagtgtttgcagtgtagttagatcaaaccctaaacaccatttatatagccctcaaggtccaataaaaaagaatgaaaaataaaataagaaagaaatttgatattgcaaatcttattcatacagcctggcagttcaaaatttgtggtcaaacgtgggactttaacagtctatgttgctgcattttgaagaaagaaacattaaaaataggaaattttggtagggtgtaaaatgttgctgcaaacattgaccaaattgttgcatcgatttagtgtgtattgggagatggagattaaaaggtaaaaaaattgaaccttgttttgggtagattgtttaaagccacagaaacatgtggtcactggtcatttattttttcgtgtaaataaattgtcttttttttcgtatgataaaaaaatttaaggttagagcactgttgactaaatttttataaatataatagacctcattaatgtaaagactaaacatggatgaattaagatctttgcatgtatgattttcgtacccactttatttttttttaagaaggatgtttatagcatttttttgttttgttttgttacatagatgaaaatatttgagttggataaattagggctgtcctaacctcttatattcaaacaacacaacgtaccaaacttcgttatatcattgcttccaatgtgaaaataattgaccacatttttcagcgaagcgcaaaatcaacaagatcaaattgtaactcgtgaatccaaagaaaacaatttagtagtagtcaagcttgatttctattttgattcaacttgcaagatgtggatatttttctaaggcatggtttgatattattttacaaactgaattattgattattgatattattcagcttgcgataagtctcaagttattaatccctgctaattcactatcatcattgttggtgtatatctctaatcacacctccttaattaccacaactccactcttgtaggtaaaatactcaatcatatataatacatgcacactcgcacgcccgcacgctcattcgcacacaatatatttaatgactataaaaaagtgaatgaaaaaatgaaatactttttttcactattgacggatcaaggaactttatttattagtttggcgccataaattttcttataaaaatatacattttttgttactactatttttttgattgattcatcaattttcgcccatttcatccatgtcttttgtgcttcttgtttcttaattcttcgtccctatctttgttgattgttcaagaataatattgcctcctcacaattgatacattaatatgtatactcttagtatcttactatgaactaatatcttcccttttgaacagataagtagtataattggagatcaatgattttttttaaagctcatcctcttcatcatcatcattcttcatacattcatcatcaaaaaatccagattttttttttaaatcatgtacaacattcaaaaactttttctagtttatttctagatttctaatcgctagtttgtaacattgcagttatttgtggagaaattactagaaggaaac

SEQ ID NO: 3927 - DNA, 1204 bp, Medicago truncatula
  Intron number 5 from transcript Medtr3g144480.1 (locus Med tr3g144480) derived from phytozome v7.0 (chr-ID MtChr3; po s 37452044 to 37453247 reverse strand)
cttttggcttcattacatcaactgttactctacaggtactttgatcaaactgtatttactcaacaactttttagggcttcatcttcaaactttaaacttcaatgacttttgtctaactagaagtaaattagaatatataggatgcaggtttagcagggggcatacaaatgttagcttagatgtgaaagttgaaaaaaaatactataccagacatctcatggtatatgtatattgaatccatcatccatcttactccctccactcaccatccctaatcttgcatcccaaaggtttgagcacaaatattaagaaataatgaagttagataactgtgggtcgatgagatggaatattttgagtgtgatgaataagtattgcagatattattattgcacgtctttaaaacttgtaatttttaggattgactgctgggcagtaaagagtcaataagaaagaatgacctctattgcaaaaatgagaatgttatggtagatatgtggtcacataggacgaaataagataaagaataaaattagagttgtaaataaaaagaagaaagtttacccctcaaaaaaagaagaaagtattttcactggtgtctataatttataatgctttaacttggttatataacgcatctacattgttggttagcacactcatattggtatcacatatacggtgacatgatcaatcataatgagcagttcaccatcattaaatcaatgttgaataatttcaattacagtagtattagaagaaaataaaatttggttatggaggatatggctgtattatatattattcattcatcccacacaaacaaacacataagctatacccatgtgtttatgtgtgtgagcacctgtgagatttgatgcaccgtatacatctattgtgtttgcatttgtatgtttgcgctcacctctgggatttaaagcagttatgagtctataacatgttctgtctttaacttgttcagtataaccctggttaatagagtacttcgttgtaaccattgtttgtggagttaatttactgtcaaaaatttggggcttgcgttttcatctgaaaggtgcttcatcatataatctcattatatttgtgtaactttctgaggaaactactaatttcaatgatttgttattttgttatatatatttaacttttgattttatcttttttcttccattccagaaagaaa

SEQ ID NO: 3928 - DNA, 3621 bp, Medicago truncatula
  Intron number 4 from transcript Medtr3g030260.1 (locus Med tr3g030260) derived from phytozome v7.0 (chr-ID MtChr3; po s 8159411 to 8163031 reverse strand)
gaaattgtccatttggggctagctgtttctacaaggtaccatctctcttatgtctcttgctttcttttatatttcccttggtcaagcttgattatcatgattgttgaaaaatatgagtaacatgattgttttttattcaatagattgctttctgcagtgcttttcctttctttgttagattagttcttgaaatccatccatatagtcaaggataaattatccattccccccaaatccttgtagatgttgttgacttatgtgcgataagcaagaaccacaagtgaatgaggcacgctttgcaacttttcctttctttcaataaatgccaacacagaatgttgaaatttgaagtgaatatctttcacctccagtagtttattcatttatgacaaacctcccattgtgtgaaaaaattatattaactatcataggaagatgatgtagaggcatgctttaattttacctaaaatttgtaaaagaatttgacgaaatgaaacaactagtagttttgttttagtttacagttttttcttataggggatgggggttaagataactaactgaacaacgatcattcagggtacacacatatgtattatatattaattaattttagtaaaatttttagattttgtctcatgcagcaggcaagtggtattttggactttggttttctatagtgctactgttatttttactaattgtctttaatttgtaccattgtctccaagatcttccaagtagtttcatgatccttgtcacattcaccattttactagatctatagatctcttccccatatttaatttccacagcatctcttatttcatcttcatcttttgtatgttccaatctgtttgagcttttgaaggcctagaagtagtttcttcaatattggttggtgcctactgcctagtgtatgttgcaagttaattagtgtcattacataagaaacaacttcataagtcaaagtatcattttcaaaaatatgtttgatcttccaacttctccatctcccctccacccatttctcctataaaccactaaatagtagttgcttaatagaggggaaatgagttcaaaggattttgttgtgttaacacaaccaatctgatttatattcatgattagtagtacactagtgctctagttataacctcaattacattccctactaatacaatgttcatgagaaatgtaaaagtcatacttacaatgtccaaatcaatgattaggattaaggtttgtacttttactccctgatacagagccgctagttgctagcattgtcctttacgacttacacaacattctatcatgcaatctcatctataaaaataaaggagacctctttgagttatgacgcattgcattggcaatggtagctagacccaaatccaaagaaaccttcaaaattatcttcaaaggattaagctcttaaccaccaaatgggtctactagacttgtaaatggggagtcacccacaaaattttgtaggtatggccctatagtcacccaaaatttgtaggtatggccctgtaggttactagtataatacaatattggaaaaatgttggtagtggaaaccaatttcagattaaaataatactggtagtgggtaagagtggaagtaggtacttaatgtttaagattaccgttaggattgtaatagcattctttattttggatagcaaaatattagtaagttagtggttaggttatagtagtttctagggtttgaaccttgaacttcttaaaactcctttgatgtcccttagctcaccagctacttacttgggaatgacactcttgtttttccatttggtcaaacaaatacatcattgaagaccacattcagattaacaaattgctagtagccaacatgtaaagctaaaagtgagtatggaaacaactactatcatatggacatacctatatccagacccttcctattgtcatcacttcatgacatgaacagacaaaagaccagagcggaaatcagtgctaattgagcgcttttgtgatccatgagttgtttttgattggctgaaaatgatactagaggctagagctatggcttgtagccggattcaaaatgcagttataaatctgtgtttttgggtcctgaaacagatctgagaatgggtaattgactcacactgcttattcagcagctagctaggattggctttcctattctgtttattacgtagtgtttttgttgatagggcaggattatgaaccaacaagataggattggctaagatattgttcattcccaacaagatagtgtttattacgtagtctttctccaccattgtcctagcctcccaaaacccttaaccacgagttcatctttactccatttaggtttgctcaatttaccccatttatcatcatggatgtgtgacatgtggcaaaatagaaaaccaagggctgggattaaaaaggttgtaaaaagcacttgtttttataaaaaacaaggctacgcgcgtttgttgtctgctggtgcacgctccttctttatcatctcaagcttggaattcaccaagggatccttataggcaaaggattttctttctcacctggatcggcttaacaattttggaggcactcttaataacaatgctagtatcataatctctttttgtaatgggtttcttcttcttggtgggttgtgcactataaccgggccttgttctaggtttcctttcggtagaatgatgatacttggcaactgcaacagactctttcacggcaatccatatttaacagaaaaatatgttggtcctgaagagagaaaagtaccaaaaagggagaaacaaccctaaataaaatcctacagaatcgatttcaatccataatccatgttgcttgtatcagaaaaagaaaaggaagggggtggcaccgcttctgtatgaacagaaagggcggcgacggcgagtgggagagggaagcacggaagtgatgtggggagaggaagaagaagggtcgtgagtggagttggaacaaaagcgcgtacccttgttttttataaaaaaaatgcattttccaacccttttaatcccagcccttggttttctaatttgccacatgtcacacatccatgatggtaaatggggtaaatggagcaaacccaaatggagcaaagatggactccttaaccactgccacccttgtttccaaacaccttccatcaccaccacctccacctgacaaaatcataactttgtaatttatatgtaattgatatcatatcctgcctttatttagtccacccgaaacacagggcagttaaacataatacctcatggactagagcacccttgctaaaaattttctgtaacttttttttataaaaatttaattaaaaggagaaaacaaattaggccttagtgtctatgttcaaaagttgaactaaatcctaaaatactataaaacattttataaaacatcgggagaaaagtctactcatatttataatgcatgtaaatgtaaatattgtatttggttccttgcatatccattttatattagtttttgagatgctttagatttgtttctcttttaatgatttgatatctgtttctttcagcatacagtgaagcctggctcatacac

SEQ ID NO: 3929 - DNA, 1356 bp, Medicago truncatula
  Intron number 2 from transcript Medtr5g025460.2 (locus Med tr5g025460) derived from phytozome v7.0 (chr-ID MtChr5; po s 10174503 to 10175858 reverse strand)
ctgtgataggtgaggtttcatgttttgaagttttttttagttgtaactgtaattcgttatttgtttggatgatattagaagtgaatgtgtgtgatttgattctgaaatgttgttaactgaaggttaatttctgtgactagtagtgatgttgaattggatttgattttgattcgtttcactgaaaatgattatatggatgttaatcactttttgtttaagtaattggttatgaaatgtcgaatgtgtgttttataggaaatacttattgttaataggtttgtatattagttaactagtaaagatcatgtgttactttgcacggatgtggggaaaatatggcgggaaacaaatgtgtgaaatttcgtcatgtgtcactaggggaacaaatttcttcaaacgtatatagacgctgaatcaattattcaaaattgataaaagtaggaaatcatgatttacttatcattttccatccaagtaaagaagcttgtggtagaaatttatgattttgagatatagcggaagtgtcaataaatgcttgttcggtgtattggagttgattatgatttttagaaccggtttgtaggagaatgaggtttgattttggaaattgctgatgtttgatttgttgaacgatgtccataacataattaaaaaactgtacggtaagtatttcaattgctatatcctgggattgtaaaatgcaggtaaaggaatgcattagaggagattgtttattgtttgtatttatatcactacatagctatttctacccgatgccttttattatggatgctttccgctgatgaaaaaatgtttcatttgctagaaataagttaaaaaggatactgttggaaaaaaagataagatgcccagtctgtagtgtgtgcttagtaaaagctcttgtttatgtttatagtgacgttaaatcacttaatacgatgttctctggattatagtgggtaatttggctgaaattattaagagtagcgtgctaaattacgcagaatgcagttccatagtatctagcatgttagagctgagtgtggtttgtggtcaagacatttgatttatatatttagtgtgaggtgctggcataacctttcaattttggttttgtagtgcaaatttagaaatattagttttctaaatcatgttctggttagcacttaattggggttaggattttacgttttgctttatagcatatcatgtttccttttgatagttaaaattgtcatgtattgttcttttaatgagaatggattgtatttttctagcctaaagatctttgaataaaattttgggttctatatttttacaggatagcaaaggctttggatagttgtagtgctagca

SEQ ID NO: 3930 - DNA, 1093 bp, Medicago truncatula
  Intron number 6 from transcript Medtr1g106810.1 (locus Med tr1g106810) derived from phytozome v7.0 (chr-ID MtChr1; po s 22383804 to 22384896)
ctgtataccatctgctatcgtaagttcattttaaaagctgctggtccccattattgcctttatatatatgattcttggagcttgaatgtctcatccttaatctattttgtgcatggataattgaatcctaaatattttgcaaatgtcaggtgtcgcaccatagtttaaatttttacttgcaaacctgtttttttttttttgtgcgtacatgtaaaactaaacttcaataatgtaacaaatgctcatttgatgaatttaaatgctcttttgcttgccgttggatcactttgcactaatccagtggcttacagttacagagtctaggtgttttttctccttaccagtcgtgtgacaaacatattctgtaattataagagtactggcttactctgtccggtcttgattatgagaaaaaacaactgatttcaaacttattaagaaatttagtccagtgtaattattattttttatcttataaaaaaacaagtgtgctctcaaaagtacaattcataggaagttgtttcatgtaaatacaagagcgagtcattaaaaaatagaacttatatcaattgaagagtattttaggaatgacattattaaatagagtaaaagtagttagatttattgtaataaaaagaagagtacactaatgttgtgcgagattcatgggtaacatagtagtggcaatgataataaaaagaagagtacaataatgttgtgagattcctactatataaaatattttatctgaatttggatacagattttttataaagattttgatttacaaattaactattcactgcaatccttattttgtcctacaattaaattaaaaaacgtagtaagtagttgtagtcaaaataaacctaatggagagatcaaccccttaacacagctccaataaactgaatccatcctgactgttgatatgccatgatggaatctgtagctgcaaaaacaaatatttgcacccttgttggccatgaagtcatgaacttaacgctccagttatttacttgtcattatcaggttattttgatatgtttgatagaagagcaggtgttctgaaatagaatacaaggtaatctga

SEQ ID NO: 3931 - DNA, 875 bp, Medicago truncatula
  Intron number 1 from transcript Medtr2g007510.1 (locus Med tr2g007510) derived from phytozome v7.0 (chr-ID MtChr2; po s 1152949 to 1153823 reverse strand)
caaatttggagtttctacgcataaaactatccgaggtatgttttatcatagaatggaatgagagtgaacaatgtgattcatttgtatttttaatttttaattttatagaattgaattttaccctaattttctatgaagcacagacaccccccggattaagcgtgtcccgttgtagacacatgtcgtgtccaacacgacaccgacacttgtaattacactgaataatgtgatcttttcaaattattagttgtgtcgcgtgtcctgttcgatgtacgtatatgtgcttcatagctaatttctactacccaaggttatcaatatcgggactttacttcaagtcgaaagggagtagcaaaatcggaaactcgtaaaatcgcaatcaaaatcgaaggattttactcaaggacttttgtagaatcgatataggatagcgaagtcgggactcgtaaaatcgcaatcaaaatcgaggattctaccaaaacaaaaataatgttaaatatatgttataaattgcatatagtcataaatgacttaaagttcaaagtccacaaaatacatatacataaatgactcaaagcctagatgcaaatattctttagtagtcataataatgttaaataacctaacaatgctaaataatcctgtgtaacaattgaggaagtgaaaaatgaaattttttggcattttttgtcacaattttgataggattttgcctgtttttgggactttgctatgaatttgagtcattgaagctacacaaagtcgcaaaaaccaggattttaggacttaagtcgcgtttttgataacaatgctactacctgtctttttaataaaatttaggtttatcaccctcgtgactttcctacgttcaacaa

SEQ ID NO: 3932 - DNA, 2165 bp, Medicago truncatula
  Intron number 2 from transcript Medtr8g122470.2 (locus Med tr8g122470) derived from phytozome v7.0 (chr-ID MtChr8; po s 28689665 to 28691829)
taacccttcttcccccaattcgcttctacttcaaggtaaattcctcattcacctttttcgcttttcgataatcgctttttccatttcaattacaatcattatcgcacttttttcggtttttttgaattttattcggtgaataatcgaattgttgatgtttattcatcatcagtgttctatgtagctaggttttgaattttgattataaactaattcgtctctaagcaatttttgcatgagggaaattaggttcgcaaatttgtttcccttttgttaggtttgtaatttatttacttaatcgtgcatcatgcatgtttgaatgtttgagtgattatcatgtagtttaggtcattgtgattttttatcactttgtgtataagggggaaatttttgaactgtattcatatgatttttttttttgaatttggtggcatatgttaagagaaactgcaaagtatatttttttcgattaaaatacaagtaaaaatgcaaatgctatacaattgtatttgaatgttttttttatttattatttggattggaatgtgcttgatatttttgatttggcatgtgagaaagtgtagctgatagtttagtcttgtgtgttttgatttgttcctggttaaaagcttctaaattctatctaatgtggatttttttacttctcagtttcatgcattgtttctgaaatcaataccttttgaatatgcacttttttggggtcatgagcccaacaggttttgctatgtattgaaatcttaatcacaaatgggctgtttatgttgttgctttgttgtttgagcagtcactgccttacgtttttttgtgtcagctaaaatacttggagttggctgtttaaacatatatgaatgcatttgacgagctttgtcacattttgcattgctgatgatactacgagctttatcacatttaaacatatataaatgcatttgacgagctttatcacatattgcattgctgatgatactatgatatatatgatatcaatacaaatataaacagttatttatgcatgtgaagggtttctttgtgctcatgcacaaaaaaggagggttataaaaaaagacgagttcctattgaaggaactggatacagagtgattggcttcaagtgattaatgagcattacctaaggccgaatcgttcgggagaacccgagtttgattcctaggtggaacaattcctggccagactttaccttacttagctcttggcctaactctggattactatggtccattaccctagaaactagaaggttaactcaaaaaaaaatggataggccaaattcgttgggtattgttagctagagtgaatatgatcctattttactcttgttctcaagtttcaaggtgtgctttaacttcattttattgggattgattgggaatttcaaattgtcatgatatcatctactgtggtgataagttggtgcaggagctgtaaggttattcctttatagaatggacttggtacacatcacattagcactgattcctccatcttataagcatgctttttggagtgcttacactctacacatgaaatggtacctctgccttgtctgtctatccacacgtgcggatgtacttgcctttccaacctgtcagggttgacggaggagtttgagtctcatactgaatgggtgcgcaacacaactcccatctatggtgctcttaccaggttgcttgcatgagtgtgcatatgttcattgaataggagttccatcctggaagaaaggactttgcctacatgttggacagttgaagttgtcttttaattcttagtaaatttttctgcatgggtcagatgatcgtggaaatcatgtgaacttccaaaatttcagattttgtttacagggtccattttgcgtgaattgatcttcacatgtaaagaggcttttatacaagttgggatttaacaaataagctgtaatggtgttcatgtgaattttttcaaatattctttatttttgaattgtttaattagtttcacatgatttgttcggtaatattattattatttttttaatggcatgatttgttccataataatctcgtgtcctggaggaaaaagtaatagctacgaactactagtagtttctgatgctttttcatttttgtagtgtattgtgtggtctggaga

SEQ ID NO: 3933 - DNA, 1760 bp, Medicago truncatula
  Intron number 1 from transcript Medtr2g025370.1 (locus Med tr2g025370) derived from phytozome v7.0 (chr-ID MtChr2; po s 6715219 to 6716978 reverse strand)
atcactttccccatttctgttaaacaggttttttctttctccattctcattttctatctctttcctcatatgggttgtagtcaaaatcaaattttatttatttatgtagcattaatttttgattgaattgattttgtagcattgattttggttaaaaatgagttgaagtgatttatgtttggatgctttgaagtgatttgtatgaaaaatattgtttggatattgtgtaaagtggatattgtgtaaagaaccaaaatgtgttggatttggttgtttataatgggaagattttgtcaaacaaggtatttttttaaattgaaattttgtagtggatttggttgttttttatgggaagattttgtttgatgcattgagcttaattgggttctgaatttcaaatttagcatgattaatttgtttggatgagggcaataaagttttcttacactaccttgtttctttgttatacttatttggtattaattttatgaaaatttagaccaaaatttatgtttatcttggtgttgttgtgacttatttgaagttttttaacattgttttataacaacaaaagaaaatatatatgtatgttttgatgatgcagtcatgtcatggtagctgtgaaggttatggagtcattggagttaaactatatcattttgatttttattgtcttccaatttgtaactctattaagcaacttataatttgtttgtgttactgataatctgttcctttttatatgtttacatttaccctttgggtctgttatttttctactatcttgcgcacaaaagaaaatgcttaatctttctaaatgttctttttctcaatgtggaattgtattttggttggtcaataagatcttgtgcagaaaaaaaaatgattactctttctaaatgttctttttctcaaatgtggaagattgttattttggttggtcaatgttattaatggataatgtagggttttggcctaattctagatattttgtgctccattatatccacataattttatgttctatattatctgagaggttgggaccactaaattgtgatattaagtttttcaactttcgtgaaactttacatgggaaattgcagtgtaatttccttaaaaggcattgaaatgaccaggttttgtatctggttattatgactgttataatttagactcttagtctatcttgcatcaaatatcatctactggtttggctaggatataatgatgttttggttgagtacgggctgttaacactgacacttcatattgaaggtgtgtccggtgtccgacaacgtcatgacaccgacacatgttacattcaattattccatattctcaaattattaccggtgtcgacgtgtcagtgtctttgtcatgtctagtgtccgtgtttgtgttttccataatattctcaattacttccatattcttttgttgttgatctgtagctttcctaaccaaaaagtaggagaggtcactgttttgggctaattgagtgggctccataagatgcctctttggtgttgaatattatacatggaattgcccttaagattcccttgtttgtggaagagcatgatgattgaatatgactatgttgtggaagggcatgatgattgaatatgactatggtgtttgtctttatattccttggtaatttagtattacatctttttacagcactatggcattacctaacatgtttctattggcgaataattttggcagcctggtccaagggagaatctccttca

SEQ ID NO: 3934 - DNA, 899 bp, Medicago truncatula
  Intron number 2 from transcript Medtr7g096540.1 (locus Med tr7g096540) derived from phytozome v7.0 (chr-ID MtChr7; po s 21581708 to 21582606 reverse strand)
ttgaaattgggggtgtctcctttactgttaaaccagtatcagcctatattatttccctgtttatttttattttttatgatcctaaatgtatagtttgattttatttaagatataaacaattttattctataatttttatgcatagtttcatttcagatctttcatgctacagcctacatacattagtaatattaaaatgttggtaagaagtttgctgattcctggggcaatatgaacagctgtttggattgggagtcaagttttacattaaaatcatttcatgtttaatctactgattgatgatttcagctactaaacatagatgaaaattctcactaaaattatcgaattagagactaaatgtaaataaaaattgtcatagttgaaatatattttgttgagatttgagccatatttaatccttacactcatatcataactttgttgtgataaaaacacttctattcagtcaatggcaggacttgaatgttcctggaaatcgattgttaatcataacgctggaacccttgtttatagtctctgttgatttggttaataggacggttgccaagtaatgagccattattcttcttatggtattacttctgttgggcaattatacttcgtatttagctattcatggtagttagttaggaatttcattttatatccaatgcttggtcttggttaagattactgtataattagttactccaattttgatttattattggcactatttggtggtagtcggtcgtatcttggtcattgtatcaagcctgtattagttaaagagctaatatatttatagaattacggtgttggatcaccatgtgccccatctcatggatttgaatttttgtttactgaaatgaaatggttaacttgtgcagactcag

SEQ ID NO: 3935 - DNA, 1610 bp, Medicago truncatula
  Intron number 1 from transcript Medtr1g065750.1 (locus Med tr1g065750) derived from phytozome v7.0 (chr-ID MtChr1; po s 13185687 to 13187296)
gatttgatttctcagtcctacatcgagaaatcttagtttgtaattcttcataggtgttgcttacaatgtctacttgattgctttgattcacttcgtaattgttttgaattaagtttttgattaacgttaagaatttcttttgatcattgcctactttatatctgttaatgttgatgtgtcgttggtagtaagcgtttcctggatgcggctgccaaatatatatatgcaaatttgcaattaacacaattttacattcacttccactgtttgtccatatcattcatctcattaaaatataataattgaatggcaaggaacttatgtataagaatttcgaccagtaaaaatttaaaatcattataagaaaattgcgtactgacccctcattgattcagaatctgatttgtcactgtaggacattttggtttcaagacttatagctgttcaaatgtactattgctttccctgctgcttatcgaaacatggttttcttcggtttgagttgaagtgaagtaaacttatatgttggcttcataatttgagtggaagtgaagtaataaatcttcatattacataagttttgcattgaacgtcttacataaactgtttaggtttcttgtttttgcaatattcttcaaatctttccatcctctttcctggctattttacgttggctaatctttttggtgctttatttgagaaaaaataatcattgtgcttcgttttggtatgtgtttgaaacggtagtagagttaaacatctctcaagaattgactcgctgcatcaagtttatatgcttaattcaagaaggataactttaattttgtcacataatgcattaactgtttttgcaatcggatggaaaaatttaagacattgtctggtatttcgcaattatacagcaggatagtcattttggtggagcaataaatgagaatgagagaatactaaacaattattcacctagttccgagaaacctgttacaagggttcatgtaagcttcagccttccaccatgttcgagtccatgtttcataattacaattttctctattctaaaatcaagcatcgacaagtttgagtctgtccggctcaaggaatcgattccatgtccaacagaggttccaaaagtgtgcatcatgaaccccttctaacaagagatcagtcgaagatttcaatcttgattctctgcctgcttagccacatattgtaatttcctttgcgcttcacttcttttgcactttttcggttgaattgtcattgatttttctttagcttaacattgcaaatcccagcactggatgttgaaacaagcttgacactagtaatctactttttttcttttgagtttatcattctttttctaatatacacagctctggggattatttatgctcaatctagaatttgattctctgcttgttaatttgaatatatacttccttatttgacctagattaaacattgatgcactatagaaaaacattgcagaatttaatctccatgtgattattgatctatgtactttcttttctcttgctgttctgcttctattttctgaaatataaaagatttgttaataactcatttactttgcataggacttgtaa

SEQ ID NO: 3936 - DNA, 3037 bp, Medicago truncatula
  Intron number 2 from transcript Medtr5g069330.1 (locus Med tr5g069330) derived from phytozome v7.0 (chr-ID MtChr5; po s 25043509 to 25046545)
aaagttacaaaaatgtaatttgtttctttatttagtaacattttaaggatgttataaatctctgtcaatgtatatctttgtgttgaagttatgttctttttttttgtgttcatcttttcaaattgtgttggtttatgtatcatatctataaacaacttcaaatttcctaccagcatatattgtattgcacatttaacaatatgaacaaaatttagttcctataaaattaaattagtgacatgtttaatttccataatttattttaaaccatatagtaaaattataatcacataattactatttttatagctaaataataatccataatttttaatataatttgcagaccatatagattaaattttgacataattttttcatccatttcactatctacttccattattatcgtatttaataattacatattagttcatgaacttccatttttcctaccaaaataattaaattcctataaaataatccacaatagtaattgattttttttttccaattttcatccaatttatgatccgaatacttcctcttctttattcgtacaaagtaattcatgcctttgatactcttttatgctaaaatataacacaaagctactatcatatcaaccatcatactcttgatttgtacttaagttgagaatattcatgatgttgtactttgttgcatgttttgttttccaataagagataacaccagcacaaatacacgtcacatgcaaatttggtttctcaagcaaacaagtattccttatcattgcattctttgatttcccttacataatcatgtgaatcttttgaaagtttaattgtcccaatgttatcttacccaaagtcatgtcaatatatctcagccatatcaatcaatactttgcttttgtaatctatctataaagtatacatatataataacacctattcaattcttatagttgtctacgtcctccttatttattttttaacctaatattaatgatagataatgcttcatctggtcctatttatatgagaatatatcaacaccaaatgttcatatatttcgacaaaatttatgtttatatacatttacttttgctcatcaaaatttctcttatagatatgaccgaatggagtagtcattttaagtgggtttaaagttgataatcaatttatataatgtgacatttatatttcaattatcccgtgtttatttataattctttccatttgtatatcaaagcaaaataataataatgtttctaatgtaaatacataaattcactaaaaaaataaaataaaccatctcttattttctttatataggttaatatgcaatttcttagaaaatatgtaaacaaaattttcaaagtatcaatattgatgattaaacaagtccaagacaatttcttgattccattatgactatcaatcaatctaagttctttcattcatattctccaaatccaagatacaatttactatactcttacactctagcacactcattattaaatctatgaccattgaaagtatattacaggaatcttatgcttgctaatttctttctcaattaatttactatgtatgtaaacttagctaacttataatcattattctacatagtacttttccctattttccatttggttcggtctgtagttctcaaagacttataatatatacagattctttagtttatttaataaccatttattatccaaatcaaatctataatcttccctacttctacactctaacacattcatgataaaatctatgaccattcaaaacatgttacaggaatcttatgcttacataatactttttccttttttcacttttctcggtttaatgtgtatttttcaatgtctattaatatataaataatattttttcccaacaaaatgcttaattgggaagacaaagatatctgaacatgctttcaaatacacaagtgtatggagaccaattttctaagacaattaaattcaattttatgaagccaattttcaaatacacaatgggatggaaccaattttatgaagcaaatcgttttaaaggcaaagatgaaattagattcaagttctcaatttacacagataattgtgtatttgcagtctttaagattaacaaaaattacaagtaatattcatgtactgattaagcatattaccatccttttaatcgaatgactactattgacttggttggttttactatttagtgttcatggaaatcttatacatgaaccaaatatatgtagagatatttttacatacaattcggtcataaaattttgtttaatgcaatttaatctaattcccgaaaacaatacgtaaatcattaatgttatatttacccaattgttcaaaatgtattttttgattggaaataacaaagtgtatgtgatcctgcatacatgattaacatatgtaatgaatgaaacatatgtaacaaagtgtattcctattttaaatgtctttgctatttttggaaaaatatctttatacaactatccaaccaattattattttattcaatgaaacatatgtaatgaatgataaatttatatctatatatacatcactttatgttacaacaagttcatgacttttacaatatacttgatctttcagatggaacctataacaaaattacttctatccaatcctatttattgtgttcatattgcacaattatcatcacaggtttaatattttattacttcattagttctaagtagttaaatttttattgtctataaaactaactctactttatttatcccttctaatagacaaatgctgagattgatccagattttatacagaaatattatgctcggttaggaaacaagtggtgtgtatggaatgatgaaggattccatactgtcaaattcaaccaagactaccattatcctctgttaacaaaaggatggaacaaaataaaattgcattatcaatttcctgataatgttgatgttgtcttatcttactatggaagtagtttttttgcacttaaatctttcaatactctaaact

SEQ ID NO: 3937 - DNA, 3394 bp, Medicago truncatula
  Intron number 4 from transcript Medtr3g102130.1 (locus Med tr3g102130) derived from phytozome v7.0 (chr-ID MtChr3; po s 24827367 to 24830760 reverse strand)
taacaggtacatccaaactgatgaaagtaagagatattgggtcttcttcctttaaagagttcatatgctgttttctccaacataggtctgatatagatcctattttgaatataacatgaagtattgactgcttctgcccaaaaatgtttagctaagttgttttcatggatcatggttctggccatttcttgtaaagttctgttttttctctctacaactccattttgttgtggagttctaggagaggaaaactcatggagaatcccatgtttttcacaaaaaagttcaaatggctcattttcaaattctccaccatgatcacttctgactttcaaaattttcaattctttttcagattgtatttgagtgcagaagctgctaaacacttcacatgcatagtctttacttttaatgaattttacccaagtccatctgctgtaatcatcaacaatgactaatccatatttacttccatataaggatgcagtgttaactggaccaaaaagatcaatatggagtaattctaagggtctggaggttgatacaatgtctttagatttgaacgaacttttcacaattttccctttctgacatgcaccacaaagtgcatctgaatgataatcaatgttaggcaatcctttgaccagttgtaacttgctaattttagaaattaatctccaattagcatgtcccaaccttttatgccatacccattttttatcattcattgacagaaggcaaactaccttctgatcagccagatcagagaaatttattttatagacattctcaactctctttcccttgaatgtaatggatttgtcatccttgttaactagtgtgcagttggtcttactgaacgttacatcatacccattgtcacaaaattgacttatgctcaataggttatgcttcagaccatctactagccacacattattaattgagatggaggaattaccaatagtacctgtaccaatgatctttccagtttggttgccaccaaacttcacttctcctccatctttcattgtaagggtaaggaacaaagctttctctccagtcatgtgccttgaacatccgctgtctaggtaccatgacctttgtttctctcttgcccttaagcacacctgcatttttggccaattcagatttaggtacccatatcttcatgagtccttttgggttagctttggaggttttacttttcctcccttgtaccttagggtgaatgctgagtggcttctgatcattcaatactttaggtttgacaccttttggtattgttttctcagaagcagtagctgctttgttcttctgatccttttgttttggaattttagattctggtttaatcagattctgatgaacaggttctgatcttttcagaattttaatcttttgactcttaggatcagattttgtcattaccttgatcttaagattctctggctttgatgtgatcttagcctgtgaacctgaagcttcaggttttgactgaacagcagttatagcatttgtaccttcaggcacaaaggtggatttcaatccatccttgatacaatcacagtagctcttgagactgtattctttggatttctcctcagaatatccaatccctttgcctttgttcttgtatgtgctgtagatcatagaagcaactttgcttctgtctattccagccataataaaatcatccaaggcaatctcatgtttattgcctgaacctttatcacatttttcttgtagcttctgacaaagactcttgagtctatcttcatatgttgctgatatgaggttaaaccctttgagttcttcttcagaagcttttagttccaatagagttgacttttgttgtttcatcaaatcaacatatttttcttttaaatctgtcaactcattggttctgtgttcaaacagtgataaaagttcttttagagaatcaacaagttcttgtctagggattttagaatatacctcattttcatcttctgaatctgattcagcttctgatactgcttctgatgatactgttgctaccaacccaacggctgccttagcatcatcatcagcttcttctctatcagaaccagattcactatccaaatcttcccaggtcgccatcaagctctttttgatttgctttctgaatttactggaattgaagcttgatttcttggatttgcctttaaacttctccttctgaagatcagggcaatcagcaatgaaatgaccaggcttcttacaattgaagcatcccttctgatcttctttcttggagttcttgtagctacctctcttgctcaaaaatttcttctgcttccttgccagatactcaagcttgttggacagcatagccatttttacagattgatcttcatcagaatctccatcaggtgattcttcttcagattcactggctttgtaggctttggaagattttgagatctttcctttagatggtaaagcaatggatttactcttcttagaggtttcatgctcatttaaactcatttcatgcactttgagtgagctaacaagatcttcaacacttaaagtatttagatccttagcttcctcaatagcagttactttgggtctccatcttgaaggtaagcttctcaaaatcttactaacatgatcagaagcaacatagcttttcttcagtatttgcaatccagaaactaaagtttgaaatcttgagtacatttcttctatactctcatcatccttcattctgaaaagttcatactgatgaactagcatcaaagctttagcctcttttactttcttgctgccttcaaagtttgcacatagagaagcaaacatagccttcgcagtagatttgtcactcattttcatgtattcggtgcgaggtatagaagccacaataatccctctgattttgtggtgcttcttgtaaagcttcttctgagcaggagtatgtatttttctatctatagcagctccttcttcatctaaatccaggtcatcaactccatcttccagtatgtcccataactcttcatctaatcccatgataaagttgtacatattagttttccaccaagaaaactcttctggatctccattaaaccttggagcttttccagagtctgttttcttgtcagcagtatcatagtcatgcttgacgcttgtgtattttggagtaactgattcctcatctccagacatgtttttctaatagatcttgaactgtaacacggttaagtgctgtgataacagagcaagctctgataccaattgaaggtgagaaaaacacaagaagggggggttgaattgtgttttctttttctgtctaaaaaaattcttcttctgataaaacttcagaagcagtttgagagtgcttctgatgaaatgatcagaatcagat

SEQ ID NO: 3938 - DNA, 1176 bp, Medicago truncatula
  Intron number 1 from transcript Medtr7g005480.1 (locus Med tr7g005480) derived from phytozome v7.0 (chr-ID MtChr7; po s 465608 to 466783 reverse strand)
ccttcagacctctttgacaacgatccgtaaagaataccgtttccagaatagctcctccctggttgggaacgatttcttaatcacctttcttattgtttgtttgatacgcaaccaaatttctgctgcgcgccgccacaattacctttttttttccagtatgttttacgtgttttgatagcatattactgtttgttttttgaattaactcaatacgtgtcgtgttatctctatgattcttgtatatccttttgttgatattcgcatgtatgtttttcttatcgcaatcgcatgtgacaaccaaactcataataattacccgcaattagcacatgcaacgattgatgagaaagaagcactttgtattttaacctgaacttttgtagttttgtgagagagtaggagttacgattgaattgcttgcggccaatcaactatttgtttattcaaacaaaaattcaataaaagtgaatggtactgaaatcgatccacctttgataatcactaatgtttcgtaatcggacgtgtggcacttgtatttattaagcaaatagatgattcttgaaagtattgctagattaagctgatgcacttgacttagtttgttatatatacataatatattaatactagatgtgttgtatggttgcctcagtttttattaagcgcatattcatgtaaggaatttaggcctaataatttcagtggatatgatgtggtcatcaaatttagatttaaagagttcatcttagatcccataggtttatggcgttaatttatctttgtcaaagtcgccatggatattgttgttttgttacatcagaatagccgagcatcatgggcgtatcttttccgattctgttctttataatttattttcctcaatgatgccttgcttgcctaagcgtccagtacaacctatttatttttatgctattgggttttcaatgatgactttgttcatacgaatatattattaaagctgtttctaattattgatggctagtcttttgagaaatacatcaatggctatacttcatcattaaagcttatttctatattatcgttaactattcttttgtgtttgttgaacgattacatcaattttcaatacctgccaattctatgttgggaagtgcatacatcgcctcaaaatcaggaagctgaagaccaagacag

SEQ ID NO: 3939 - DNA, 3685 bp, Medicago truncatula
  Intron number 1 from transcript Medtr7g092290.1 (locus Med tr7g092290) derived from phytozome v7.0 (chr-ID MtChr7; po s 20271691 to 20275375)
tcatcaaagatttccccaaagttgatccttcaaaggtttcttcttttcctattttccccttcattttgcataatttttagtctttattactgtaagatagggggaaaaaaactgagaaatgagtatgcataattgttattctgttgatttgtccaaatgggtttcccccaaaatttggaattgagaaaaatgtgtaataggtaacctaaatcactattatgttgatttattcaaaaggtttttttgctaaagtttggaaatttaccttaataattacctgggtggtgtttgtaataatgttaaaaggctaaaagatgtgcaatgtgtgtcccaagttgttattatgttgatttagcccaaatttgaaaggtttgctcattaaccatcttagaagtgtttgttgtcttaatttgtgtggaaaattagaaatgggtttttccgaatgggttgctccgaaagttttagatttagggcctgtttggatcagcttatttgttgatttgaggcctgtttgaattgagttatttgagcttatctactgacataagccaatgtgagactgtttgagagaacttatgaaaacaatctataacatgtccattagcacgtatatcttatatgatagcattttgactttattttctagcactgtgataaacgtaaacatttatatgataaacacttgattaagttgtttattcaaataaggccttactcaccatgtgggaagtgtctgcttggttatgcggggatttgtttgaagatttaatgagagatattatgtgcaagagaaaactacgttgcagttctcagttgataataataatatattattcaactgagatgcattttgtaggaaaaactacatggctctttggctaaataaaccattttcttcaatgtttttttttctttctaaatgggcattatcattgtggagtgtgagaagggttagatgtctgcagtcttaccttaataactcctactggttttctacatggcatttttaaaaaaataattttattcatacaatttgcttgtatgtttggactttataatgctgtagttatatttattttttcaaaatattgaagtttaaatggattctctcatattttagtaatgcgtaatttctgacagtttgaataaaatcttttgaatacccctcatctgaatgtttatattcaatacagtcctgtgcaaaatatttaaattggaaaataagactacatttgataaactctactttcatgaaggcattccagatttgacatgcaaaggagttagggactggaagacattccccttgctttgattcacttttctccttttcctctttgatcttggcttgtttttatccttgtactatatagtaactctctctctcctctcctccttaaaaaagtgttgttttcattaataaaatttcaagttccgaataaaaaaactcctaaacagtgttgttttcattaaaaaaattgtgcaatcataacccatttcctagacacacacacactggttaaaaaaaaaacacttgattaatcttgtcaaaattccagtgttgtgaaatatcaccgatggcgaatttttgacaaccgccacggccaatttgtgaaagatggcggtgccatggtgttctatggtggatttgagctgtggacttcaaactcttctgtattatgcataaggaggaggctgatacacacaacactttatggcctagttttctactttttttcctttgggtggggtgaagggggcgggggtttaatcttcaatatggcttttgttcccaaagtaatatttgaacttatctttgagactttcattattccatttatttaagttgaagcaacactgatataaatacactatttgttcatagtagaaggtttcatcatgttattaacaagtttaaaccagaatatgtaatatgttaaattcccaaacatagataattagggtatcctggtttcaaaagaacatttttgttttgcatttcttcttgttttctattttaattacaaaaacaactttactttcacctcgtttcttgtgtaggaagcagaaaaaacaattgaatgtttttgtgtttatttcctgtgtttcacttttaattacaaaaatacctcagttgtttcttgcttttaaggatttgtcttggaaaccaggaaaataactattttttgtttctgttgtttccttcatatatatttgaaaatgggagacaaagggaaaacaatgtttgtgtttttataatcaaaagtgaaacatgtaatgagaacggataacattttctcaaattaaatagacagtcagttttctcccacaactcttgctcagctattgatagattgatttcctccataatcagaaacttcagagctagatattttaagtatatgtagaaactggcatagctcccaggggattcatttatttggaatctaacagaaaccaaattacaaataggtagcagcagcagcacaatgtgtgcatctgccagtaccaaatgatttaagacaattgtaaatttaaaaggctctattttgttcacttgatgccttactttaggattctccgtcttttgaaatatttatatagacactttgtttttcggatttcacacatgactttatattgtttgtttcacattctacaatgtattcaagttcacttcgcaagctgatgagccaacagtgtttactagtatttgtttagaatacctattatcgtattcattcttaattcacagttgcccaatatttaggagctcacagttatacacaataagaacaacagagtcctcctccactgcaaatacaatatgtgcggggctagtaaattgacttagactgtctggtttcacattttatgatctataacgttcatattattcgacagagttggagttttcttgtatcagagaagtgttgctacttaatatcctctgctttaagactaagaccttgtttggataaacagttattaagtgtttatcatataagtgcttgtgaataaactatttttgtaacaaaatataaaataaagtcaaattattttcatatattagctgaaagctgtttgtataagttatcctggaggctcatggaaataaaggtgaaaacagtttatggacatgctataaactgtttctataagctctcccaaacagtcgcacaagtgcttatgtcagtagataagtttaaataagttaatccaaacatctcctaatagttatcaactaccaagtcatcatcacaatatcagtatataaaagttgaaattgggttattcacatgcatttaaaaaaactttgatgagaatgtccctcacttcagtgactgttgttcttagttaaggaattttctgctagtcatagttttttagaaacattgttcttaattcttttgagcacaggagtcatcaaggatcttatttttattttttcctcttaaatttttattttcattggttgtcttgtatctagacgcttgaactttcttactcttgaatacaaatattcttctgtagaaagatctttttaatatgtttgtactcgtctattttacaccttgcatatttgatcatgcattgtaaattgtaagctgtgcagataatttatatttatgggtttaatggtttctcaggtgactccagaagtgcattttcagaaggatttggg

SEQ ID NO: 3940 - DNA, 365 bp, Medicago truncatula
  Intron number 2 from transcript Medtr1g146460.1 (locus Med tr1g146460) derived from phytozome v7.0 (chr-ID MtChr1; po s 32378720 to 32379084 reverse strand)
ttcagacagaggattcttactcatttatctttacagtaagtcatatgttattccttcactaaacttaagagttttattattttgacatgcaaatttgacaacgatttagatggttaatgaagtttaaactgatgtcaatgtgttgtaaataattaactatcactgaacttaataacttctaaaagccacaaattgtgctcattggtttggttgatttgagctttcatttcattggactagaaaaaaaaaatgtagtgatcaaatttgagatggtaggtattctgtgttataaaattgaaattatgtgattttttgttaataattgaacaggattacaattgttccattgagttcttccgttcgcc

SEQ ID NO: 3941 - DNA, 4686 bp, Medicago truncatula
  Intron number 1 from transcript Medtr3g040890.1 (locus Med tr3g040890) derived from phytozome v7.0 (chr-ID MtChr3; po s 11261275 to 11265960 reverse strand)
gaacaggtttggtttgttttgattctgttatgagtttgtttttattactaagttatctcgagttcggatttgcatcgcggtaaataatagcagataaacgatgagctagcttgtagttgataagttaattgattgaatttgtgtgtttggtaaaattagtggttgaactaacttataaatatgaaatggggtaaacttggaataaaatatgataagctataaactacttgaattagcttatctaagaacgctataagctcatgagaaagtgactgttatgaaacagtttttttttagtcaaatgagcttataagacataagctataagttcaaaaaaggtggaagattgtaggatcaattagtagtccatttaatgaaatgggtaatctatagtttatgtctctgtagtccactcatgactgctgctcagaatgcaatggaacaggttttgtttgatttataagtttagcagattagattgttatgatttatgagttgttagtgttagggatagctagttagaatcatttttacagttagttcggagtttgtgactatagctctatttggaaaaaacaacttaattctaagcaaaaaatcactttttaaattcactgaataaatgatgtatctctctccggtcacttataaacaaaatatcactttttatattcattgaataaatgaacctaaaaagtgattgtttgcttataatagtgatcagagggagtaggttcttaagaaaagatgaatttaagtcaaattattttattataagctatacgttctcctgcagaccttatgaaattaagctgaaaactggctctcaagtgtttatgctagcagataagctcaattaagtcaatccaaacaggtcgtaactatcttttacgttacagtttttttataatatgtttttattataaaagataatgtgaagtgatactgttttcatataagctgtaagatgtttttataagctttccttgggagcttatggaaataaattaaaaacagcttatagatatattttttccataagctctctcaaacagtcccacaagtgcttatcttagtagataagctcaaatgactcaatccatacagactctataactatctattatagttatgttatacagttatacttaatcacatttcgatgctcaaatcgccatggagtaggtttctttccaagtttggtagtagttagttctttagggtatgtttgggagtttggaatggagggagggttttggacaaaaggaaggagtaagtgaaagaattgagggctttgggtggtaaagggctctggggagtttatttttctccataatacaaaatctcccttatttgggggaactcaaaaattgtattggaggatgattttggattagttagttataacttacgagtttgttactgtttgagatagttagaatcattttttgagtttgttgggagtttatgactatgaccctgtttggataatcagcttagttaagtgcttatgctatattacaaagggttaattaatgccaaacggttttaacacatgttataatttgtttattgtttcagtaagccgtactggagtgtttatgaaaataagccgaaaacaacttatggacatgtcatactctgttttcatatgctctctcaatcagtattagaagtgtttatgtgagtagataagctcatataagtcaattcgaactaacttaggtaatacatttagaatcatttttagagttagttgggtatctccaactatgacgcgctgtttggatgaactacttaattaagctataaccgtttatcatttatgtgcttagcataagcagtaagttgttttcacttaagctatatagctgtttttatattattttatttaaaaaaaatttgggaaagtggaaattattgttaattaaagtgcactagtggccaatttagaacggtaccggaggtgatcagaactcattaccttgatgttagaaggttaagctcttacaagttatcacagagctagcacctcaagtataaactgtttttttcataataaactatagttaaagtgcaccagaatctacctccatttacagtccagagagatagacacaggtggaagattagttggacctattagtggggtccacttatgaaaatgagtccaactaacttatcacctatgcctatttttctcatgagtcggtagataaatggagcaattccagacctagggtatttagttagaactttagtgtatgagatagtcaggatcatttttttagttggtttagagttagtgactatgaccctgtttgggtaaccagcttaattaagtgcttatgctataacaaaatataagttaaaaacattgttttcatgtaagttgttttctgtttcaaataagctatactggtgagtttttaaaaataagttgataagcagaaagcaacttttagacatgttattagttgtttccaaatgctctctcaaacagccttacatgtgtttatcttagtagctaagctcagataagtcaatgcacacaagtcttgtatatagctgggacagatctttatgccgaagctcatgacggccgctcaaaatgccatgaacaagtttgttaacgttataagtttgtttggattagtaagttacttcagtgtttatttataacttacaagatgttgctgatagagacacttagaatcttttttggagttgggagcttgtaatatatgcaatgtttggataaaaaactttattaagtgcttatagccccctagtcatacaagtgcttatgtataagctattcctatagtaaaaatgtcaaacttttcagataagctataaactttcttagatagcttatggagataagctgaaaacaacttatggacatgtcataatatgtttccataagctctttcaaacagtctcacaattgctctctcaaataagtcaattgaaaccggcactaattatctgttatggttctgttatatttaagctaatggtcgccgctcaaaacgctatggaacaggtttctaccaattatgttacaactttgttcaaatttgttagttaaataacggtgttcagatacaactaacaagtctgttactgttgaactcattatagttgcttgtccaaaaaagaatcctcaaagttagttgggaacttgcgtctgtaactctgttacagttctgttatacttaagctcatgagtttttagattgtttaatttttttctttctaaagagatcccagagtttaaaaacaacttgttaaccgggtcaatggtttctccatatttacgaggtaagaaaacccctgttcctctgcatacacttttaacaccagacccaacttgcaaaccagttcacaacccagatacatgacaaacaaccagattatcttggtgttgaacttgaataagagaatgccatactgaatgaggcaaaggctccgtgcgtttcacaccctcgtaataccatcatggaagctacacctaaagagatcccaaagtttgaaaacacaaaaattgaactttctaagaaccaccatgcagttgagttatgatatattgacatctattttgtgacaacttttccaacaacctagaaatccatacccctatgatatattggcatggtgttttttgagctttttttcttttgcttttacaaaaatacctgggttatcaaaatagttgttgcaaaagagatgttcaaatatcatttctctgcaatttgatatcatatgggttttatagtaagtaccagagtcttatgaggttattggtgattctgttgaaagtctgttaggaatttgttatatcgcggtattcagttacaaactgttactgttattgttatttaacaccatatttatagttagttcaagttagtgcatctgtaggacggtagctattagttacagttttgttacttgggtccaattagtttagcttgtaaaagattcttagccgaattagaatctagttcttaacttaatcttactaaataggtttttatgggtttattggtatttatggacttgatgagatgatttataaacagttgagctgcaatggttgatttcaatttataagataagttatttgaatactcctaatcattataaggctattatttcaagttttcaacctttcttttcctatgattattttgttgaaaaaattattcaattttcatttcaattagctgtgatacttaggatgcgtttggaatagctttttttacaacttatctggtcttaatcttatggcatgaacacttgtggcgattatggacaagttagatggaaaagtttgtaaaaacgttgtctggcagagttgattttcacttatgggagaaggagctattaacttaaatactcatagtattacaatatcattgtttctgtatactggcaattcgattcagttagttgcctcctcagtataccacaattcaaactcttaactgatatgccgattctctctctcgttttctttaaatttctcactctttattgcagatccctagttcagcaattctatctgttacgagttagattcatcaaattttgtataagtgtgtgccttccagtaaaatttaatctgattactgttactttgtctgacacaggtgtttggtgctgagtacgtgtcgctgc

SEQ ID NO: 3942 - DNA, 818 bp, Medicago truncatula
  Intron number 6 from transcript Medtr8g129070.1 (locus Med tr8g129070) derived from phytozome v7.0 (chr-ID MtChr8; po s 30349519 to 30350336 reverse strand)
ataagcttcttgagaaaggtatatgatcatcttgatcacatttggtcctttttagaatttgatgtgaattggtggactccatttgaatatttaggaacatagtttgatacttggcttgcaggcaatcaactgcagttgctttttttttttttaccgatttgtagctttgaattcccttcatttttctgtcactcactcttgtgtataatgctgtgcattgatgaaaatttccaagcatgttccagtggttgaaaaccttgcaagtcaatcaataaaataaatacacaggaatctcctctccttgtataacattgaccttctagtagaatattattttaattatttggatctggatctcgcatgacatgttatatttttaatgatagcctggcacacatatcttaatacaaatttactctctctctccacatggccctcacatgagaatcgaatgattatcctgaaatgactttatctgttgcataaatgattataatatgttggtttttacttgctagtaaccctctctttattctccagatttaattattactaaaaaacattcttaatgaagtggcatatttaagcatcaatttccctctttataaatttaatttcgttagtatttaatatggtttacataaatcctggtggcaatgaagtttgtgtgttacaaagctttagaataactgttgtcaacttttagtttattttttatttttatcttacccgcgttgatatatgtgtatcaaatctaatatggcctatattctgctatttcaggtgggaatcgtcttgtccccgtgggtcttggagat

SEQ ID NO: 3943 - DNA, 848 bp, Medicago truncatula
  Intron number 3 from transcript Medtr2g047020.1 (locus Med tr2g047020) derived from phytozome v7.0 (chr-ID MtChr2; po s 13249936 to 13250783)
ttttggaaacaaatacggtacgtgccaacgtcaaaacatataagttgttcttctggttgataactactaaaattctagattcttatttatccattctcaattataagtgtttaactaaacttattttcataagaaaaggatgttattatttcgaatttgtaatttcttgagatttgttgatgatattcataaactttacattctgatcaaataatgatttggaattgaaagggcactgatacaattgaagtcataatcatgaacttgtgcaatgacaaagaagtgcagtggagtggaaaagccttcaacaagatgaaaaacctgaaaattcttataattagaagtgcacgcttttctagaggtcctcaaaaactaccaaatagtttgagagttctagattggaatggatacccttcacaatctttaccagcagatttcaatcctaagaatcttatgatacttagccttcctgaaagttgtcttgtatcgttcaaattgctcaaggtatgtattttttttttacacattaaactggtttatgcatagcaatgctgtgtcttttaggtctatgaatgttatttttaagaggtttggttttgcaatctagaaagggttagtagtgcagcttgttgtctatctgcctttcgttcctatgtgtgtgtgtgtatatatatggtactaaaaaagttaacaattaaacaattaaccttgtttgaatgaaagagcatgccaattagatgcatttgttactggtcactataatgtgagtatccagtaaatatctcataatttcattattttaatgttttgtaggtgtttgagtccttgagctttctggattttaaagg

SEQ ID NO: 3944 - DNA, 3116 bp, Medicago truncatula
  Intron number 1 from transcript Medtr5g088110.1 (locus Med tr5g088110) derived from phytozome v7.0 (chr-ID MtChr5; po s 34162677 to 34165792)
atttcggcgctgtaagtttcatcttccttaatttattagactcatgattgtagtaatagaaacactgtttttcttttttaatttcatttatatatagggtctgtttggctagacacatttttgaacttatagcttataagctggtatgatatgattaaaaaagacctgtttcgtaacaatcattttctcaccagcttataacttttttttagtatgttatagcatcttttgataagctaattcaagtagcttatagcttaaaacttttagcttatcatggtctctcaattttaccctgtaatcttaggctctggttggtatgacataaatttggtttgtggtgtatagcttatagcttataagctggtattataataaaagacctgtttggtaactgttaattttacacaagcttatagcttatttctatgagcttatagcggtttataataagctaattcaagtagtttatagcggtttataataagctaattcaagtagcttatagtttatcactttttatctcaattttaccccttgcaatctcaattgaaaaaataaatattaatttaatgcacaattttttatgtcatttcatatttataagctacaataaccactaattttaccaaacattacaaattcaataagctagcttatccgctatcagctataagctagcttataggtcattttctacaagctcatttataagttagcttatcagctatccgctctgttttaccaaacagaaaaattaaattttaattaatatatcctttgtatgtcattcatatttataagctattccatttgctaagtttaccaaaaactacaaattcaatcactagcttatatgcttgcttatagctatcctctaatctagtttatcagttattctctatttttttaaccaaacaaagccataaacttttttaaccttaacaatgattatcttgttgttgttatttatgataattattattattatttattatttatgaagaaagaaattggcgggagatgggggaaatccgagtaactctgtcaaagagtcgtttttggtcttgagcaccgatggtaatgaggtgtagattgggtagggctgtggatttatgggaactcattaattgcgttaaatatgattatcttagtttggaggatgttttagaataagctaccaactaaagattatctttcatgagaggggttggtattaattttcagggttttgtgttaggaggatgtggtactttggaaaatgtaaatcatttattcttcaattgtctaattttttccggcggtttgtagtgagactttgaaatgtcttggggtttcgttcgccttccaatttggagatttcgaacttgttgtctattttaaaagtcttgtgaagagtagaaaatttagtgagaaactgggtgtgattatttggttttctaatgtttgtgtagtttggaaacttagaaacggtgtgattttttctcaaaggattcgtatgtgaaaagttttgaaagagtaaaaaaaattatcttggaaaatccttaaaattagtcaagtgggttcttttactctattaattacctgttctgttgagagttcactttctgtttgaagttggggtgttctcagttctatgcaatgtagtcaggaacgagttcttacgtaggttcgatcggctggtgaagggacgtaatgttggggaacgtaacacggttcgtaagaacccactcaagggcatagttgtaacttcacacacatacacacacgaaaacataaaaattactatacataaacaaaataacttatagatcacaacatcaaactaagttaattaataatagtttgtcattttttatatcatttactactgtttttttctgaaataaaaggcaaggtatttattatttatttataagaaaaggcaaggtatttcttttttaaagtcacatgtttgtttaaaaaagtaagtgatttataaggtgtttctttttgaaagtcacgtgtttgtttaaaaaagtaaggtatttcggtattgggccttaaggctcaaacaagagataagatttctacaagtttaacctaatttgactgagtcctcttcttccccatggagcgccgcagcagaaacagaaaacaagagttgcaaatccttgattacatcttcccttatacagtgtttttcttcttctcaatcttcttttattttgacccaacgcggttcgtagagcccagcacgttttttccttacgtttctgctgcagaaactcgatcctgaccataaaaatggcaaaaacgacccagatcaaggtcgtagctcgttttggtggggtaagcacgtaagatcgtgcgatcctacatgctgggactcgatcctggctaccttggttctatgtactggttgaggggggtggtgttcagttgcactctggagtttttcaaggggtgtttgtggctgttctgcattgtttgatctgttctgcttttttttttcttttctttctcctgctgcagtagtgaggtctgagtctgactgcttggtactagttgagttcatctagtttaagggttactttgtcgaggcattctctttcatcttgtctggaagccttttgttcctataccttaataataagtttcatttcattgatatcaagtttctattggtggcgtggcaggcaaacttttgctgcaagtttggttgtagcagctagttagtctcaggtttggtatttttacctcaggagttttttccgggtagaattctggaagaagataggatatttaacaggttgtacaatctggtttgggtggtgtgtcagttttgagcttggtaggtgttttcttatttcttatctccttttgttttgtagtcttttgttagcttcaaactttgtgatttctttgtttagttttgcacgccttgtgcctgattctgagcatattaatacacttttccttttcaattttgttttttttttttttttttgtgtgaaatgttgaaaatttgaatttggttgttattcatgataactattattatgctgtgaaatgttgaaaaagtgattttggttgatatagggtgaggaagttccgagcaatttcccatttaagat

SEQ ID NO: 3945 - DNA, 1993 bp, Medicago truncatula
  Intron number 4 from transcript Medtr5g106940.1 (locus Med tr5g106940) derived from phytozome v7.0 (chr-ID MtChr5; po s 43114055 to 43116047)
tgtgttaaaggtctggtggagcggaatttgcctgggtaggtctttattcatgtcagcataacatggttttttgccaatatatatatatatatattgctgtgttttaagcaaggggtagccttggcgcaatgataaagttgttgtcacgtgactgaaaggtcacttcggtcacgtgttcaagtcctggaaacaatctcttgtgtagaaaacagggtaaggctgcgtacaatataccaaatggtgggaccccttcccggaccctgcgtatgcgggagctttagagcaccgggatgcttttttcttgttgtacattaaggcctaaactagactgtatcgactagttttgctggctttgtcttttcatatggtaaccctccaaaacttgacttggaggaattattaataaattatttatgctatatatctatttgctcttgtcaatgggagaaaaattgatgaattcttcctatggttagaattatttaatctatcccacatctgaaggtgtttgcagggtcccaataaggatatcccaataattaaagatagaggtagatcaagaacaattccaagcgtctgaaatattaagtttggttaatggttgaataaagagttatggcatagaattggaattctaaatttgattcaattctactatagtatatagtttaattaaagataaaattacttataaaccttaacattagaagatatttgatatataatactactatagaagcataagggatatttatctcaattttattaaaaaataatactggagttattgtcactacaaatcttgggatattaacgtcactggggaaggacgttgataggaacctgaaaggtcgaagtgaggcctgggataaagagtaaaagttagttcatgaggtggcactaattgtcatgtgaatggggagaggaaaatgatttaaatcatccatttagaattattaatgatgtgacattgattgacatgtgagtggggttataaaagagaggaagggggggaaggtaggagttctctgaactctggtttatcatcccttttctgttttatcaccattgtagaccttttaggctcatccatttacattcaataatacaatttctttatcttaaatttcggggttctatcagatgttaatctcaaatgtggtgtataatactaaagaagaaggaaggatattaatgtcactacaaaccctaaaaaaattgaaagaagcacgaagggtatttagattgaggcgttgatcatgttttcattctatttgtggaattggtaatttttagggagttggccaagaattgaaatagtttgggcgagttattgtaattctatggaattgtagtaacatcaataacccaagctcaactctagactcctaaacagataccaagtgaaacaataaaaagatttaggtctaaatggcatctcaaaagaattgttctttgtcaatgcggttaagggaggatgaccaaaattccaccacataaacataggattgcaatttgcgacctatggtactgccatgatcggtggccactatttaacaacattcagcattatacaatggtgtcatttgatttgagtaggtgattttgccattctggccaatggtaaaagatttcggctgttgttattgtatctcacatttttcgcagcatccatcaattcctggaaagataaagtacatactgaatgcatttgttttttctattaaaatgaaatggtgtagatgtacataaaagggttccttatatgctttacccaaataaaaacgaaccttatatgccactcataatttgtactgtaaatcatgaattttgtgcatgtcatgtttgaatacttttccttgcataattttctttcttccaacataaaatgcaacttttcatatagacttaaaaaagtaagccgccttcaaattatcagctatttatttatgtagtgatggggagttaaatacaattttcttttgtcacagct

SEQ ID NO: 3946 - DNA, 3303 bp, Medicago truncatula
  Intron number 1 from transcript Medtr3g103940.1 (locus Med tr3g103940) derived from phytozome v7.0 (chr-ID MtChr3; po s 25693069 to 25696371)
tcacgtcaacggcgccaacatttccgactgtcccagtaagtctaaaactgatctgataaattaatatcatatatgcatgatatcacaacttacaatttcatgcatatactattacataaaactatgatataggtcattattgttacaaatattgaaagtgttttagacttatatcacaattttgaggttaagtttgtccggcaacagacgaatatgatagcccgtactctaactaagtcggtcatttgtagtggtcaggtttatgatttggatttattaaaaaaaaatgtatgataaatgaaagagaagaatactagtaatagtttattgcatatttgaagtcggacgaaaattgtgaaaattactctgaactactttgatttagcaaaaataagatagggtacttttaaacaaaccgtaatgtttacacacttggcttggcttgcatggtgattctgacttgtgattttagagtgtactcctctcataagttttgagtgttttgagtttgattgtgtcaatttgaatgaaaattctttaatatacacatgatagagacagttctattctttttttaaaagtaaccttgttttattacatatctaattagaaaacttcatgcggatttatttaaaagagaaaactatgttaacaaaaatttatatatttggtacaatattcaaattcagttcatataagtttatttttgttgaccaaagcttttcttataaactaaggctttgtttggaaatttggaggggaagggaggggagggtttcagggggttgaaaatatatagaaaaatgaacaaaaaattcatatttttttaaagaacaattttttagagaataataaactaatacttatgattaatatacttttaattttaagaatattatgacaacatagattgaatttgaaaaatttatataaaccctccataacccccaaatacaatttttgagttctcccaaatgagggggattttttattatgagtaaaaaattaaccccaaagccctctcctcccaatatcttctatttctttcacttgctccttcctttttaccaaaaccctcccctccaaacttccaaataaagcttaagagaatacatttagacgtgtacctctccaaaacgtagcttcccttatgtttatactcctatacacacgcatagagttatcccggacaaactgtacttttgaaattacagttattattatgtttaccatttcacattttatttagtcaaaaaacataaaaacatgaattttaatgaatcctactaacgtagaccatatcatcttttccctttctgacatttttcggcctcctgtcgtttttctcatgtgaaaattggagaaaccctgcctcttgtcgatgattaataacaattattattttgaatattttattaatattcagatatttaactattttttataaataaattcatttgtactttttttaactaatctccttaaaacatagtattccacaatattctccaacattggaaggttatgtagtttaattgatttgagttgagaaatttaaaaagcttgtgttaaagttgtggttcaaatcgtaataaagaaaaaataatatactattaacaataatatattaacatttccctaaaaaaataatattgtactagaatttagtatattattcgagaaaaataatatacaaaaaaataatatactactaatttacataatagtaatgagagtttagaacctgatacaagaatttaattgaaaactactacaaatgacactatttttggtagatattttattgttggaattgcgataattgttatgggtggggagaatataaccatgatcaattttgaatgacctgtcatctatattgggtgggaggatgaattggttgcagaaaattaattgcagaccttgcatctagacaggttaaatgggcatcgtcaacgtacgccattgccttcaataagttcgcatatcaattacaactacttttctaattttcttttcttttttaagagtattcttcattacttaatctttctctcatgttactgtaattttagaaacatgataggagtagcaaaattaattgcacaaaattaattagagtcatgctaacgtgttagcgttttctaataaattatgtcaaagagatcttatgtagaggaacaaaggaattagaattgatagactaataaaaaatcaaatttcaaccaacgacaatgtctcaaatgttaatatcgctataaaaatgtcctttacttaatgatctcattgaacaaacttttttataaaaagaaaaaacaaacatttttttttagtcttgttaacttatggcctaagaatgcacttcagagaatttaaatggagcatgattgtgtattggaaaaaacaaaattgtgactttaattttttatttttttttgaataaaaatgtgactttaaattttaaaagttgaatacacaatttttaaacaatttctattataagttctttaatatgtgtcattaagacatatattagcatttaccaacatttagggcttgaatagatgatggatattgcattttcagactcaagtttatcatgtgataagtataatctagctaaaaaatgtttcattaaagaattaaactcgaatcttcgagcaattcaacttatgcgaaacacgttaatcatttgaactcaattgtttcattattttaactcaaattttaacacatcgattatcttgacaaacttctatcatcttaattagtgtataattatttttaggtagaacaaaatgacatttttaattagtgtataattagttttttttttcttatatttaattacagagcaaataatctattactgtacccagtgcatatacttgattctttcctaaaaagaagctggtctaagtataaaaatgcatgttaataatcttttttgtgcttttcattacagatacccaactcattttgacctttcattatgttaaacataagtagcagcagtagtagtagatgtgggttattgaaataaattgttacataggcagataataattcatgttaatattccatcaatttttcttgttttgggttaattaattaaaaaaaaaattgtgttttgagttgattaaaacttttctttacagcattttttttcctttaaaactatcatcgatgacaaagttgttgacgacataaacatgtccttaggacattcattagcatttttctaatacgaatattggtgtggtgacagagcttcttggtctatctgcaaactcccccgacgct

SEQ ID NO: 3947 - DNA, 1867 bp, Medicago truncatula
  Intron number 3 from transcript Medtr3g036990.1 (locus Med tr3g036990) derived from phytozome v7.0 (chr-ID MtChr3; po s 9913296 to 9915162)
cccccaaatcattaaggtggaaccctcagagtagggtatgctcataaaactcaagaaatcgcaactaaatttacaagcacaatttctaaattgaacgttattaatctataatttgaattccacactcaaagtatctagtcgttattttataaaaagtttgcagacaaatattaagacaagatgaagagtgtttgtgattctttataaaagtattgaatgaaagttagcttatatagttgatttataataactaaaaataggaatgatcgttaaattcttaactgactcaattttattaaagttgctaaaaaaaataacatgattgatatacaaaggacatttgtattgaaacaacacttctacaaacaagggtccgaaatttgtttagttgaatttagcatccaagtttcagcaaaggttagcaatcactaaagttttcactccatctcatctttttcatagattagcatgagtgctagttcttagtgaattaaagttatgattacttgagtgatgcttatgctcacctcatttcttgttggtgtgtaatctgttcatactcttctttatctatcaatttagctttttttatgatttcacatatgtctacttttatctttgtttttgtggttaagttcatcatgagttaaacctctttcggtggtttagtcatgatgaggttatggtattatttaatttagatttgaagaactataacttcatgcttcttttaagcaaactgttttaacactaatctttgaaagtaaaccttgatcacttatatttttcttgccaaatccatagaacatgaaggagatgagaatgaaaatgtttgtttaatatgagttacgtccttaagtatcggaaggagatgggaacaagaaatattgcttgaacttaaaagatctttgagacatttagagatgcgcaaagatctatttagaattattgtcaaaagccactactcatcctccccatagactaagagctactaatgtcataacctagtaatgttattaaatgtgtcaagcttagaattagaaaagttttcgaataaatatttaatttagtctatatacgatcaatatctcgtcaattttgtctctgaacttttaaaatcaactataaagtcccaaaccatgagaaatacgtcaatttggtcttttctgactgatttagggaccatattgatagatgagaatatagtttagagattatcttgatgtatttctcgttgtttatgaatcttttacattgattttaataattcatatgagaaactttgctaaaaaaaaaaaaaaattcatataagaaactaatgataattggtttagagatttaagacccgtttattatagcttttttcaaaaaagatttttgtagtgtaatatgtttttgttataatttttttaacaaattttttttcaagaaaaccttcatatgataaatccgtttgattagcttatcttaaaacgtcattctaagtatttcatcattttgttaaaaaacaaattcgatactaaattttgaaaaaatttataaaaaaaagctatttcaaatatcttttcataaaaatcatttttgaaaaatgtcattttaaaaaaatatgaaatttttactatgtaaaatttcgaacaatgaatacttaagttaatgaatgttaaaatctcttttttaacttatactaaattagtttgaaataacttctattatttttgactaaatttctaaaagaatctatttttagaaaatacaaagaaaatcttttttttttagaatctaaaacgggctttaattgatttattaaaagttttttgtgtgtggggtcttagtacgtggagagcaagcataaacccagacacagaac

SEQ ID NO: 3948 - DNA, 3002 bp, Medicago truncatula
  Intron number 3 from transcript Medtr5g080310.2 (locus Med tr5g080310) derived from phytozome v7.0 (chr-ID MtChr5; po s 30038859 to 30041860 reverse strand)
gttacaagcctcctaaaagacccttgacaaacaaggtatgatgctatctttttgagcgtgtgtgtatatattttgatttctcgtctatgcacaatttttggtaagactagacgagatatggttatgaatgaatgaaaacattagagagttgcaatagaacattgtggtgtaatttgatccatgtagccgaccccatttagtgggataaggattggtagttgttgctgtagagtagattgttatgaatcatggattcatagggataaagatcatagtgagtagcaaaaaagctagtataagagtattcacgtgggagataatcatagagatccatagtggaatgaatagattgataaaagagaatgaatacaacagagtgagttatatatgggagtgagttggagtaactaactccctaattacctaaccaacttgttaactctagttaacctatcatctaactctagttttttcactatactgtaatatagatcagatggagggtagttaagtcgcaagaggcaaaggaagacttagagatatatgagttggacagagatatgatttatgacaaaacattgtggcatcgtttgatccatgtagtcaaccctacttagtgggataagacttggttgttgttattatgtattagatttttttagttattttatgaatgtgtgttagctatgtagagctgtctaaaatttataatttgaaaataaagttggcatttggtatattaataggattttatttttaaaggtaaagtgactttattggtttattatgtcattgaaatgctaataggatttgtctctaatttatttgtgtgtgtggagtttgtatgagtatgttgtgcagttcaaaagtggtttctattaatgtttaggttttagaatttatccaaacacttatatctaaatagagtgatatacgcttatctgttatagtttttagtaattctatggatctaacatggggcatttctaaatattctttctgaggttttagaacttacaaatctgattaatcattagcttttcgatggatggaaatatgctcctcacttgtggactttgccatgcttttattactgaacatatgcattttttctgttgcttacttggaaataggaacaaactcttgcatttatattttgtatgcttttgccttgaagttttaagaatcaataaatgaagcatttcaatttgtgaagtttgaaagtaatcactgtcgcttcatggtcggtgacttaatagcatctatcttcatgatgcatttgggacttgccttttgggtgattgtctataatctataccaaggttgtattattcaagaatttaggtaatttgtgaagcctctgtagactcaacccctagacttgtaaaaaaagttactcaaaatagtgattctaaaaaatgataaaaattacttgaaattcatatttaacagtaaaaaagtcatagaaaataccaaaaattgtggtaaccactaatcactaaccaagaagtttaatcctctaagggttaaagtaactaaattgtctaaacattaaaattcaaataaaagtttcttgcctaggaatgacacaggcagcagttcttgccagtaatcttcagagatgcagagagacagaagcactaaaatatactcaaatgcacgtgagacagaatcactggagatgcaaagagaagttcaagagagaatctacagagagaggacataactagaaagagaatcgccggagagagacgcataaaatttctggagtaatcgggaaaaatgccctaacattttgatgttttcaggttttgacaaaagagactgggaacaaagccttaactttaatgcaactcatgctcttgagtgttttaactcaatatccctaaaatacccccacaaaagcccaaattaatttccgactgttctgtggatatttttcctgggtactcatggggtggtggcatttcctgctattattgatgcacacaaccacaacaatatggaaggtgcagtgatgttcattggctgctatgccccgcttcagcgttgtagcgctccaatgataacaccagatcaaacaacataaataccaaatcatacatgaattcctaatgttaaaaaatttcaaaataaaaactagagctgattcattcgtcattcaaatgtccaatcctacaagaagatcatctccattatcatggagaatataacatccatgaaactacagctaacttgaggcatatgatatgattacattcttccgaatcaaaccttctaaaacaatgtttgctacttttcttccctcttgccaagatccgaacctacttgattttcactcatttgaccttgacctaaacatacttctcaatgatgcttttagatcactgatacaaactataaccaaattagtagtaacaaatctagtcataataggtctggtcaaattcctcccatatttggacttcttcaacatggtaataagcattgttctagagtatatgtccgtggttatccttcttcccccctttacggtaacttgatgaaccgttagtctttttagatatttcagcatatgattacatttccctttatgattacatttcccttgctaccttgaaattttcagcagtattcataaccatgtcgactgcatacttgatactcctcagatacaaatttgatttcatcatctagcatcttcaaatacatattttttttttttagaagtcagaagtgtccaatgaaaataggaaaattgttcccttacagtcgcttgttcaccaaaaagtagtagaacgaatgcctttgtctgtcgacccatcattcatgatcaaaacagttggttgtcgtctaacttttttggttttaaattaatgtggaactctaaccatagtgttccatgttagttgtagtgttgtacaatctaattcgagattcattgtgttatattttgacatgttctaaatttattcttaatttctgcaggaaattgacgagtt

SEQ ID NO: 3949 - DNA, 5528 bp, Medicago truncatula
  Intron number 1 from transcript Medtr5g095320.1 (locus Med tr5g095320) derived from phytozome v7.0 (chr-ID MtChr5; po s 37766075 to 37771602)
gaggaggctgggttgggaatcgaaggagggtaaagaaaataatactgcatatatactcaaccctattatgtttgattcaacttgagatttccctccttcaagaaagattcagtgcaattactctacctaaaactacaagaattcaatgtttaataattctgtcctgtgattttggtttagaagcatagattcacttaatgttgattttgtgcaccatcgtttcgaacgaatatttttttctatcttttcttgtagaacacctcatttatgtaccattttacgtattatcatctctctttacatgttgttctctgaagtgttcttctataagtctgtcctatgattttgatgatgtttgagacaaatttcatgacagaaagtgactactatatcatgttggatttagtaaagtcccacttcgaacacaatacaacaaaacatcatgtttatatttgtctcaaatgtcaatttcaaatggagcttggcacttgagcttctcaatctttgtcattcactattagctccattttagacctctaaaacggaagagaatttcatctattgatcattttacctctttagattttataatcgaagcatatgtagtttgaactaacaatttatatatgaacctattctgtctgtagtagtttattagagactaccatcaaaacgtaaaagccaatcctaaaagtagtaaagtgttacatataaactactacataatgatacattggtttaatacaaaaagttctatgagagaaacgtttcatattttctcaaattgtgattttttattcacttgaaaaggttgtccttaacatcctgaaagtaggtaaatgtttcatatctttctctcaaattgtgattcccttcaaaaaatacatattacttgtaaggagaaaaaaacattttacaatacattactaagtcttctgtccttccatttgcggctagtattaatctcaaaacatacagctttttactaatgaaacttcttataaggttattatttttttctgtaagaaaagtcaatcaaatctgaaatttaatcgttgctactgcgggagattgttactttgaaaacgtctccgaatttgatttttagatgttgagcttagtccataggtaccaacatttgagattgcatatttatcttcgaacacgttgaagattttctcaagtcatatttaccgaatccattgtcaatgctgtatttcacttcggactatcttgccttacttacacgagatgttgaaaatatgattaacttcccaaacaactgaaattaagtaggtctgataagcatttttaaactgaagggttggaatagagttaatcttatttactatgaggaatagttgtttgtgtaagaattaagattttctttttaagttgaggtgattatttgagaatgtagttcttgaaaaggtgaataatttggaaagcaactgaaagtaagtaggccttgctagcatttttaaactgcaggaatgtaatagacttaacatagttactatgatttattttgtcatgtatctttaattctttttagactagagttcaccggcattataaggattcatgtaattggttttattttattcaatacaaatgattttgatgatgtttgagacaaatttcatgacagaaagtgactcctatatcatgttggatttagtaaagtcccacatccaacacaatagaacaaaacattatgtttatatttgtctcaaatgtcatttgtaaatgggagaagagtgtaaggaagatagattagatagattggctcttaagcttctcaatctatcttccaacgccattctttttaagaccagaaatgcgaatctcgctctcctctgtggcgttcttctctatgtctttatgctatttattataaacagccgatgtgggactcagaaaacatggttcattataaagagtaacagcattcaaattgcattgcagcatacttcttgtgaaagacaatcatcattataatggaccagattttaaccgattttctcatggcctttggagcacaaatcatcagttgaggattgtcatttgtggatggattagataaaagtaaaattccagaactttgctactctttcaaataagcacagaattcagactgttgtgctgctaagttgcaataaaatatcagtttgatgatatatcttatgcaagttctctctatcagattttttctaccaactacttatttgtacaacaatctcaagctaggtgcaaaagttgttggtgtttgtgaccttgtgccagagatgtttaggacaacctcttcaagtgattaagaaattacaacttgagaaaatgtgaaacaattgtctcccattcttcaaaattgagcttagtcctcttcaaaattgagaaaaagttttgttcattttaagattgtggattcaaaattgacattctgtagtttatgtgaacctattcttcaattccctctgcgagagttcaaacaagtaaataggtagactcacttgtatgttgggttattttaaaacgtctccgaatttgatttgcagttgagcttagtccataattagtaccaacacttgagattgttactgcatatgctcaatcatattgtgtttgattcaacttgagatttccctcctttaactgcataaatttacaagtattcaatgtctaataattttgtcctgtgattttggtttgtactgcatgcatgtttagaattatagttgattacaagtattcaatgtctaataattatagttgattttgtgcaccatctcttgaatttagtctcctaaatgtttcaaacgaaatatttttccatcttatcttttagagcacttcatttacgtaatattttacgtattattttactttttttagctatggcattggattgagaaagaggcgttagtttagtttcaagtgtgtgattaattgagtcagatcaacaagacttgaagctcaaactcgcagataagttcctttcaaagatgattaacttccaaaacaactgaaattaagtaggtcttattagcatttttaaattgatcttagttactatgattcagttaaggaatagttaatgtgctgcgtagagaaatttcttaagacaaagccttccgtagttccttcccttcccaatcccgactagtttcttaagacgtagtaaagtacttatacgtataattggctttttattttgtcatgtatctttaattatttttagcctagaatgcacagacattatagagattcgtataattggtttcattttattcaatacaaatgattttggtgatgtttgaggcaaatttcatgacagaacgtgactactatatcatgttcgatttaggaaagttctacatcgaacaccatacaacaaagtttatatttgtttgaaatgtgaattacaaatggaaggaaaagttggaaggatatagattcacgatcttacttctcaatttataatcttgtaacataatttctttttttatctctaaaatggaagagaattttatctcctccatattaacttgtgtgcacctttcaaatttcattttacctccttttggattttaaaatatttagaaaatcacttcattttggtcctctataatcaaagataatttcttttcccatcctcttaacatccggcatgccttccaaattgatcactttacatctgtttggattttataatccaaaatgtatttgacgtttttttgattaaaaagtccgaactgtgttttcacagttatgatcaaatttaacccacattccaaattataaatcactatgatcaatctattccctttataaatcacttaattatggttctcaataagggaaacaaaattcttttcccacccaattaatttattaagcgccctccaaattgatcattttacctttatttggattttataatccaaagagtatttgacattttttagattataaaatctgaactgtatttatacaattttgatcaaattcaaatcatatttcaaattttatattcatcacaactcacattttaatcctggttgatttaacaataaattttatttttatgtgtgtcgaacacagttcgaagtatataatccaaaatgtgtcaattcacccgaatcataattattaacacaatatgtgcccgtttcaaattatatcattcgaaccaatactgagcaatagttcatattataaaaccgaaatgtgtcaggctgtggacgattcagacggttttttgtgtgtttattgcatttttggttgattgggtcattttaaacgtttattttgacttttgttacagtctaggattgtgttgttccgattagctctgaagattgtcgtgatttctgttgtaaatgaatagacacagttgtccatgcagagtaatattagggaatctagttcttgaaaaggtgattaacttccaaaacaactgaaattaagaaggttttgttagcacgtttaaactgcgggattgtaatcgacttaatctaagttacaatgatgattatgttatgaaaattggtgtgctgtgttgaaaatttttctaaaaaaaaattaaatagcaaaagaaaaattagtttatgatacatttatatgttgtttttatggaattctacaacctgagacataatttatacgtttagttagatgagagtattcatagcaatgataattggtgatattatttgagcattttgtgttttggtgataaatgatgaaaaaacaaaaataatgacagctgtgggacctttcggaccagagcctaaatctggcgccgtagaccactcggccaaactgtcttgttgtgttcaatttataagacaaatcatgggacaataacaaacaataacattttatcacaacagaacaactagctcactgtttagtaagaagagaatagacgaagagaaaggatcgagttcaattagttcaattgtaccgtagcctcacacacaaacaagggaatttgatgaaataaaagagaaccgaaaactataaccacatcatccattcttccttgaatcatctcagacatctcaattctaaaagcatgacagtgaacacacaaaatacattgacacctagagacgtggataacaaacatcttaccgactgttgagaaaataaatatatctttgataacgaaaggggggaaaatgcataaaaattataaggataaggaaaaactcaccagctagaaattagagttatgaaatcaacaatttagttcgaaagataggagagcctttggcgataaataagaaattgaatattctgcaatgtgatcacaggtttcacatataaaagaccccatacaagtgcagatcttgaagtaattttatccctttctcatcacagtaacgctgaaaaagttcccttgtatcttgcagtgccttcgacttgaaaaacatacggtgtgaagattaatactaacaaagttttgtttacattaaaagagttaaaaggtaatattactgcaggaaatttcgttcaaaaaggaa

SEQ ID NO: 3950 - DNA, 2699 bp, Medicago truncatula
  Intron number 1 from transcript Medtr4g022510.1 (locus Med tr4g022510) derived from phytozome v7.0 (chr-ID MtChr4; po s 4626142 to 4628840 reverse strand)
agtacgagcttcaatcctcttcttcttcaaatcctgtaagtattttttttttcctttgtgtactgggttttgattttgggaaaatttgttagaatttgatttgttcttgttagaatgatggtaaaaatctgaactttttactttttttaaggttgtttggattgaatttatttcaacttatatacttgcataagctaaactctctaggatagcttacgtaaacaacttagatatgaaaataatttgattttaatttccccatttttggataaacaacttaatttgtagcttataacacatgtgcttataatgataagcgcttatgtataatctattaccataactaaagatgaaataaagttaaattggcttttgtataagctataagctgttttcataagttatcttgaacttatgaaaataagctcaaaacagtttaggaacaacttaattcttttttgtataagtgaaattgtgtttgtataagtcatacgccattttcgtaagttacaccaaacaatttccaattgcttataccagtagataaactcaaataagtcaattcaaacagacccttcatcttttgttatagacatagtttatggttttatgcatcaagatgtttatccaaacattgtcttaatctgaatgtgtttagtagctgctcatgctggattctataaaattaagttttaggaaaaagctacattgttacatttttagctttttcctcaaaatcacgtgtcatagatacaaaatgtttggagctagtttggaaaaactgatgtggaagctatttctataataaaatataaaattaagttaaattgttttttgtataagatataagttgtagtcataagatatcttgtaagagcttatgaaaatatgctgaaaacagtttatgaacatatcataagatgttttcataacttctaccaagtagtctccaagtgcttataccagataagctcaaattagtcaatccaaacataccctttttttttgctatagacatggtttatacatacgtacttatatgataagcgctataaacacttattaaatagcaccaaaccttgtgatcgaaggtgtgtccgacatgtgtcggtgccccacactgacacatgtcattacattgaattatgtttttttctcaaataattactggtgccgacgtgtcagtgtcgtgccctgtatccgtgctacagaggttgtagattgctagggtcaattttgtcaatcgcagattgcacggaaaatagttgtttgttcaaattctgctaagttaagttgctatagtatcactaacttattaagcgtattccagaataataacaatatgttctaattcggctacgtctattacacctctatagcttcaatttgacaatcttgctagatgctagtgggatgtgattgttagggtgtggttaaattaggtttagttttgaaatagttgaactactgagatttgaggaatggtgtcataatgtctgattgcattgcagtatgagaaggttatctgtagtgacctgtgattgcttgctaggaaagggggagaagggattgaattgataacgatattattgtgtgagaatgagatataggttatggggtcatgtcatgggagtggtagggttttgcttggtttgtataactgaataagcatttgaacgatggattatattattgcttaatacctagtactttagtagattctagttttcttactatgataagctataagttgtcttaatctgaatgtgtttaggagctgctaatgcctgatcttgaaaattaaagttgtgggaaaaagctacattgttacatttttaactttttcctaaaaatcaggtgtcatagctacaaaatgtttggagctattggataaactattgtgaaagtacttctaagagataaaaaaaaaaatgaaatgatcttataataacaatgatactaattaatatcttctctcagaagttgaaactaaaagaacaaggagctgcccatgcctgattttgtaaaattaagttgtgaggaaaagctacattgttagtttcttcctaataatcagttgtcatagctacaaaatgctcagagctagtttgtataaactgttgtggaagtgcattgttttacagtgacattcgatgaaaatatactattttggcacatcactccactgttataactgtattttgaaatttattgtatgaaactgcaaagtagttactttacaccggcaatggatgtccctttaactctagttctattaatagcttctctcaaactgaagttaacttgtatatctcgaattttcagaaactctcgtgtctagtttcttcatgagtttaagacttataacagttgaaaaacttctacctataaccttgaaactaaaacaaacttgacattagccaaatgtactgttagtgtttacttgaagactcgatagtttgatggcaataagtagatgatgtttttatttctaaaaggtggtgttactttttatttctaagagtctgcaattttgttttgtaactttctttcacaatattctttgcaactagtttcgtttggggcaattttctagcttttttcagttggattttggtaaagtcattcttgtggacatgaataattaggatctattcttattttgcagcctgctgacaagttcggttcatttttggtgg

SEQ ID NO: 3951 - DNA, 871 bp, Medicago truncatula
  Intron number 16 from transcript Medtr2g014360.1 (locus Me dtr2g014360) derived from phytozome v7.0 (chr-ID MtChr2; p os 3640790 to 3641660 reverse strand)
tgggaacgtggtgcgtagcaggcgctgtttcggtggtgtgaccactaataaatttaatactaaataccatactattctaaaagtgtagaaatctagcagaataaagtatacttatttggcatatttggttttgaataaaagggatttggtagttatgttaccatctctcatcattgacctgttttattcctgtcattactaggttttatttttgtcatcattaggattaatttgtttccttttctggttcataaggtaaggatggctgagaggctacttactctatatataccattgtaatatattttcatattcaatcaatgagaatacaaaaaacttattctctgaaattctacaaaaagaaataccaaaataccttaaacattactcaaagtttcatgaagtattcataatatgaaataaaagggatagcaaaatcgataatcgctaataagaattatatacaactagtacaagttatcgttttactatttataggtctgctttgaccgcattccacttctgccacgcggcctggcgcggtggtcctgatttttctgctatagcagccggcgcgaccgcttttgacaacaatttccaagtatacaaagttgaaatttttgggcctgtttggctagagaaaaccttttgtttttagtgtatgtcttcacgttgattacaaaattgctaccttgaggaggggggattgttggttaacctgttgtttatttaaacaagttatacgggaactgaattgttattagttttgctattgactcctttttttacttgcatcatggaaacatggccaaacatattataacccctacatttccttgttgtagatataaacacttcattcaatcaacag

SEQ ID NO: 3952 - DNA, 2672 bp, Medicago truncatula
  Intron number 1 from transcript Medtr5g045520.1 (locus Med tr5g045520) derived from phytozome v7.0 (chr-ID MtChr5; po s 19039457 to 19042128 reverse strand)
atttctctcttctagattaacgaaactctttgcaggtttgtgattttctgtttctaatatatattctttggttaaaatgagcatattagattgtataaatcacccttttggtcattgttttcaattttgtaatcaaaatttgattttgcttatgttttgtcatctgggttgttttctaattcttattatcaatcaatattgtgtttctttttattttttggtgtgggtgagtattgcttttaccgtcatgattcatgtagcaggataaagttgatattagaatcgaccctttaagctatggataaatatttaacttgaacggttcaaatttaacatcatggagtgttcatagctttatctatagatgtgttggatagtattgctattaacatgtgtatctacaaatgactagatttagtgatagtaggctgggaaattttttgtgattcattaagtggtattggttggttacattagccactgttacttcagtgatgcatttgtgcagcttagttcatttcactcactatttcatgaaaatcaatatgacgtggctagtgtatagaccaaatttgattaacaatgtattaaagcttatcatttatagaattccaacaaagcaaacgttcattcttctagttttttatgtgattatttgaagttaaagttttcaactctgcaattttatatatctaaacatttcagatgctttgtggtttctctataaagttgagttgctaaattaatttgaagatgaccacttctgatgttaaattattaatgtttaggtgagtttaagttgatgaatcttttacatatgtttatcatgtaatcaattttgattgttatgccctgccttcatgttaacttattttttgtatcatgggccaccattgtggtcacatcagacgccttgaaatatctttcatagtgtaaccaagctcttgccggaagaaatttagtacaaaagttcaatgattggtgtaactattattggtgtacaatgattggattgattttgttgtgacttggaaaacttatggaaaactagttttaaaaccggtttgatcctttttgaagtagatatatgttattgaatgaaatttagtatttgcaaaaaaaaaatggaaaactagtttttttggaaactggtttaaaactggattttgaataaaaaaactggtttaaaaccggtttgaataaaaaaaaactggtttttatgacaaactggttctgaaccatatccgaactggttgtactcaaaaaccggtttttagagaagtggtttcaggaggtttttaactttgcacacccctacccgtaccataatattattgatttttgttatgtcatgaaattagaacttgaacaaagtcataaatttggggaatgtaatgttttgattcaggcttatggatatttgggtgttttgatttatgaatgtttatgtttcatgatatttgagttttatatatatttaatttatcttgatcaaatagcggtcataccgctatcccacttttgggggtggccgcattctgggattgactactattaggggtgtgcatatcaaccagttttaggcccaaacccataaccatatccagtccactttaaaatatctggattttttgtaaatgagttaccaaccaacccattttaaacgggttggatatccaaaccggctaaaattcggatccagattttaaccatttcagatttccattttctttctcttttccaatttccaaatctgaaaattctaaacctaatccccaaattcgcaaccctaattcccccaaattggcaaccctaattccgccccctctttctccgccgctgccggttcgtttcgcttccattcttccattttcgttcctttccaattcttccttctattttactttttatttttaatcgaatcacaattcatgaaatgcacctatgaataaatgcttcaaatgttaaattaacatgtggggattctttttcttcttagggttgattgatttcactttttgttgtgtgattgaatgaatttggttagtgaagtggttatccaaaccggtttttatcctagttatatttcaacagtgtagtttggaattttatgttcaaacagagatagttagtttaattgggaatcttgtttttctattctgcataatggtatcttaacataatataataacaataaaatttaggtaattgctgcaacttatacaaggcatattactatctattcacagattacaaaattgctttaattcttacaatgtggctattagctacataattcatgtgcttatatttcaaaaaactggattttgaataaaaaaaactggtttagttcaaaaaactgatttttctgacaaaccggttctgaaccggttttgaaccatatccaaactggttgtacttaaaaaccggtttttagtgaagtggtttcaggaacaaaaccaaaaccaatatttggttttggttttggtttggttttaactttgcacacccctaactactatgatgtgattagcaaattgggatttctgctttagttgactctattcctttatttgttcattcagttatgctgaaaattgttgtttttgttgagaaaatgcactgaatttattatttcaatttgtcctttctcagattattccaagtttcta

SEQ ID NO: 3953 - DNA, 3205 bp, Medicago truncatula
  Intron number 1 from transcript Medtr3g086730.1 (locus Med tr3g086730) derived from phytozome v7.0 (chr-ID MtChr3; po s 20412846 to 20416050 reverse strand)
ctctctctctctctctctactgaagaaacaagcatgtaagtaaaactcatcatgtgcacgtgtacacccacatcacatgctttttcctctttttgtgtcaaaacctattattaccacatgctcttcttgtcttttaccactcaatgcaaaacttcaaatttattcattaattttccactcaatgcaattaattgttctggttgttatagtttaactaccttaaaagatattttatgtttaatccgaatttaaactctggtgtatttatttcagtatatgcggtccatagccaaataaaaaatatgttgactccttatgtttattgtaaataaatcaaatcaagtaattgtgctcaagtataaataagtttcgattgatgatgaatgttttgggtgcatttgagttcgaataaactaatttatttaacaagatctctcaacaacaacaacaaaaaaagtttatttaattaataagtaattatgcatagcagttttgatcgaaaagttatgcatagcagctaaagatgccatttaggtctttggaccaaccaaactagttatttttctagttgtccctcttcataaaggtagtctaatgtttaggggtcaaagcgtaattataggaccttactttatggtacaaatggatggtatttttaaatggaatttaattttttgaaaataaagtatttcaatgtgcagcaaatttctatacatacgtgtgcttagttattttagcatccgtttcttttcagacaataaaagaaaactgctgtggagttaatgttaccaagttatagtccaagaaataattaattaaaaggagaaattattggttcaccaaaaaataacaggagagattattgttctcaccaatcaacattgatttggatagttttctccatgctgtaattttcatttgcagcccaaatcaatatatcttttgaactcggtgtgtaactaatcttcaaatcagcaaagagacattcatgtttttgtaatatgttaaattatctctcaaaaatattaacattttaaactatattttatctaaagcaagaactttatttgttttagaaaatgacggactcaagtaaggtatgtgatttcaacaagtgcgagagtgatgaaagagataaagttctatcgcacaattcatgggacaatcagcctctttcatcattccaatgcaagtcaagaaataatatgaagtgtgttataaaatgtgagagtgataaagaagtgaactctcctgttttttactaagtgggctttctatctctgttaaaaatttaaaataaatacaaatttgagaaaatgaagaaaaaaaaaattatttgtcttttgttttttttggagaaaatatatgcttcagtctaattactagataaaatgggtctgcaagaatgtttgttaatcatagcatatatttggattagcgatcagacttcaaatatcatatcaggaggcagtttctgccataatttttaaaagctacaaaagatattttcacataaaaatgcacgttttgacaattttcaccgctaaaacaaacaagtcaataatatgatcatgattttagaaaaactatatttaaaaatttagaaaaataaatcattgtaattttaccaaactcatcattaatccaaacatactattgaagaatttatggtcctttgcatttgtacaattttgttttgttactttgaaaaggtaacgggtaagaagagcatgatccccaattccccatggaccataattgacagagaaatagtgaaggtagttggccaattatactatgtacaatgtaaatggtagatatctaaggaatggaatcagtgatttttcatttgcttccaaagttaggtttactaaagtcagattaattctggcattttgtctaccaagtaggtcccatagacagttcatcttgaccttttaagatttcattttccttttgtgtgttttcacatttgaattcctgtgcttagtcctttccatatttccatccatagaatagtaaatcttatataatataatactatagactatagtgcttcaaacaaggggaggggaggggggcctgctatttttttcccctactattctcaattctttctatacaaaactgttataccttacagattccctttacttgtttatatgtttcctagatattgatcctttttgtttcagtgaattgtaattcattgtcttgtccttcactagagattagaaatttcttattcttattcttttgttaaaaagtaattttatgacaatccatgtctatcatgctcaatttttaaataataaacaagacaatccatatctcttttaatatggaccataaaaatagagtgtatagtttgtaattatgcataattcattattgggtcaacatgacctttttcaagccaaaataaataatatatcgcactgtattagtcaatgccatgatgaattctatattcatttcatcggttacttacttacttatcaatatttggagaaaatagaatgttacacatggtttgaaaaagaaaagaaaattgcatataataagaatattattagtttgctgacaaaaaaaaaaaattattagttttagtaaaaacaaaagaatattattagttcattgttccaaaaaaatgtattatttctgcaagaaaacaacatcatcatcatctttattattattattattattattgattcgtaggcaaacgaatcattctgttagaaattatttgaaatgcatctcttgctggttcatacaaaggcaaatatcctaataagatatgtttgaatatttcagacgtacaaacaaactatcatgtctctagtgttcggaagttgatatggcattgcgtgttcagcctaaaatcaaacatttttgttggagatggcttcggtactgcctacccacgaggtttaacttgcaaagtcggagtccattgctaatcagcttgtgtggtggtgccataacgatctggaagatgaaatgcacatgtctatgcattgtaagtttgctactgattgttgtaaagaagcaaatctttagggtaagatagagtcacacatgacgtcaagcggtagtttttcctccattatctttttcattcttagagtgcttgatgtgaagaatagtgttagatttgtagctattttacgaagtatatatatggcgtgtgtagtgcttgttt

SEQ ID NO: 3954 - DNA, 719 bp, Medicago truncatula
  Intron number 1 from transcript Medtr5g034890.1 (locus Med tr5g034890) derived from phytozome v7.0 (chr-ID MtChr5; po s 14328090 to 14328808 reverse strand)
atcagatcaagtatctcttagaacagttgtataagcaagcccaaccttagttgcacacccaactctagcttgttttttacttttgttctcagtagctgtgtctttgtatccttctttctatatatatattatcattgtttctggatcttgtgctttttcaccttcaatatgttttacaagctttaactctgatgatatttactgttttcactgcttgctctgaaagattatatgtttattcttttgttttgttttgctctgatactctttcttttgtttctattcttcttgttgatgacaaaagggggagtaaatgtatagtatttttaaggcactgagccctactataaccaattctaaatttcctttaaatacttctgatttgattttataagtattttattgaaatttaattaataagaatagaacttagggggagcttacaaacctcaccttaaagatctattagactcagggggagcttacaaacctctgtcccagtagtcaacttattaattagatcaacaacaattgaacattttaaatactattgtttgtcatcatcaaaaagggggagattgttggaacaaaatgtgtttcacagtgaaccctattaagttttgatgataacaaggtattaaaaattgtcaattggttattactaataattgttcaagtgtacaggaccaaaggctactcaagttatttcaataggtctt

SEQ ID NO: 3955 - DNA, 1699 bp, Medicago truncatula
  Intron number 3 from transcript Medtr2g097160.1 (locus Med tr2g097160) derived from phytozome v7.0 (chr-ID MtChr2; po s 22719903 to 22721601)
aactcaaaaggcaagaaagggaagctcggcggcaggtattctttccttattccacattgcaaactggtttgtttttctattgttaattttattcattattaaagatactaagatattcatttgtttggcttcttgttttttgcaatgtgtttataacctgtgtcaaagagcataataatttaaatttgactaatcaaaatggagagtttctcgaaatgaaatttgttatgtgtactcgaaggtttaataaggttactgacatttataaattgtgtaaattatcaaactattgttcaaactgtcatgcacatgataggattactttaaggaatactatctacagacatgatattcagatattggtgaaaaatatttaattcaagacatcatccaaaattgtatcggacaattaacccatagagttgctctgctaaaaaccagttaaaacctgaaggaactggtcatgagctggtaaatacggacaattcacctgtttggaatggtttgatgttgagacattttcgaaaaacaaaaggaaataatattttagataaagggggagcaaatgaggaggaagaatgaggtagcagagataatacaaaggatgatttggcttccattgttgcctctcttggctgagattgagaccctttcccttctctatctccaaaacttgaccttcttttaaccaattaaccttgagagtgttatcaaaaccctccttggtggattttctactgttctttgctgcaaccatgagtgccagctgaaatcttcttctgctcactctctcgagctaaaaagccaaagccgttttgtttgccatagctcttcactcgaatgaacccatctcataaatcaaaatctgctgtgtacacaacagagcaaaggtactgagaacagaacaataaacaagcgggagaaagcgagtgcaagtcctatgaggacatcaataatttaattttgttctcagatcatcactcattattaaaaatgggtacaatgattaaacaacactatattgatgcggccgtgactctattttatgcaataccctattgtttagtgttctgagactctgcacaatgagttgacaacactagtagttgattattatgccatcaatttgttgtcttttcttttttgttatttgatttctggtacatatattttggattttaaaatattactgcatgcaattttttattctattaaattataaatataattttttgactaatatttagtatagggtagtgttaacttatgcccttagggcacatgttaagaaatccagaaaaaggaatatttccttaaactttgtgcattcaattcattaaaacattaaagattaaatttaatgcacgcattccaatacattatttctacatttggcttataaacttgtgccttaagggcacaagttaacatttccctttagtatattatataaaattattaaatattatttaattgttactggttcaacatgattttatcacaattagagcattaaatcttgaactagtgttttcactggttaaatgattagttggttttttatacattgtatgtatgcctgcttgttattcaatgggggagaggggatctatgttgattgaagtctaagtggttgattagattttggtacatcttatttaaaggccgaagaagctcggcagtcaaagcaagaccgtta

SEQ ID NO: 3956 - DNA, 852 bp, Medicago truncatula
  Intron number 1 from transcript Medtr4g108340.1 (locus Med tr4g108340) derived from phytozome v7.0 (chr-ID MtChr4; po s 23984008 to 23984859 reverse strand)
ctccttctcgtaagcatcattctcttctttcaattatcaatttaatcctcagaaattaatttcgtaattagggtttcttttcagaaattcaattgtaagatagtagaattgagggaatatatggttttcttctttgaatcactggtttgtacgtgaagattgttggaaatttggaatttttatgtttggatcgataaagttgatttttttcttcatgtcaaaatgaaattgtgaaagagacagtgaaaggtatttagggttttgttcttgattgatgattttgtgtttgtaaattcttctttcattcgctagttaggtttattctgtagctttcaatggttttcagattttttgttgcttagggtgggtgagattttgattttgactggtgattgggatttcaattctatgattcataattttgtactaaaggaactctatatgattcatactataggaaattgtgtttcaattatgttaggtacccaatctttgattatgaagaaaataggatagaatttctgaagggtttccccttcacaatagtgtcactactctattcttacaaatagccttgtgacaacctcaactaaataactaactaactaactactaataacaaatcttaactactttaattactctagttagtcattattctatatcctaattatgttgcaccagcactcagaatacatagatgaaatgaattactttttaaaggcttttcatcgtcatagttttatgttttatcaatgtcatacgcttagtttatcaatgtcatactctttagttgtttctatggtgtataaagggttgacttggttggatttttattttgttgcagcattc

SEQ ID NO: 3957 - DNA, 3395 bp, Medicago truncatula
  Intron number 1 from transcript Medtr5g084100.1 (locus Med tr5g084100) derived from phytozome v7.0 (chr-ID MtChr5; po s 31976179 to 31979573)
ctcatcgtatttgtttattttttattttttaaatttatgatcttttttatgtttttactttctgggtatttgtttattgctcttgtttttgctttagtttcacattatagattctgggtattttttgtttttgtttttaatttcggttttgtcaactttgtgatctagttgtttcattgctttgttgttgtgttggacaattttgtttcattgattcgggttagtagtgtaatttaaccgcaatagtttgtagttaacttgaaattcaacatgctgaagtatcagttgttgttgagttaaggaaaattggttggagatttaacgatcatagagataaatacagggatagaaacaatgcttttatatgttggaacctttggatctccccagatgttagagggagagttggttcttgctttgtggtgtttcattgctttgttgtggtgttagaactctttgtttatcaagcactgagtcatacacatacgcgaatacgacactggcatatagacaccagtaataaatttaaaaagtgaaagtgatctcttagaattttggttgagcctaactcaactcttacaaaacgatttgtaagataaggattgtgcaccacttataaacacattttttggctttatctcatttaatgtaagactcttaacacacccctgaatccacatatccaaatacaagactgacacatagacactagacaccaataattattgtaaaatgtgaaagtgatttcttataatgattgagttaggctcaactcttatgaaaccgacttgtaaggtaaatattgtccaccgactataaacacatttttaggcattatatcattcaacgtgagactcttaacacaccccctcacgcacaagattggacatttggagcatgacccgaatgattggatggtggtggtccaattaattttggatgtactctgataccattttagaatttgaattgggcctaactcaacccttacacaactgatttgtaaggtgataataatccaccacttctataaacacatttttaggctttctctcatcgaattttgagactctataaaatgattatgtggaactttgtcagacactgaacacatcttcaattaagtgtcattgctacattgcactcatggcttctatcttctataaaggagataggaaaatgataaggctagtatggacaccttaaaatgctgttttaaaactgaactatacagttcaatcggttgaactgtgaatcggtactgtgcacggtttggttgtttgagtggttcaatcgtggtactgtccatggtttgattatttgagtggttcaatcgtggtactgttcacagtttggttatttgagtggttcgactgcggtttcgttctggttcaagcagtttaaaacagttaaaccatgacctaaatgtcttgagagtttgatgtttggttcggttttttaaacattcttaaacctcgtggttttgatatttactcaagcctcactgcccatatttctgacagataccaatctttaatgttgagtagggtttgggaacctgtgagtcgagtcctaccaggttgagattcaaagttcacattatagcttaaaaaactaatgaattacttgatatttcttttgattttgtattataaatttgttttacatggaattgcaagtcattggcgggacttatcattttttactagttagcagcagagcacaaatggagctggaagaaaatgtatgttttaaccttagaagcaaacacataaacccgccaattaagccccgatgctcatgtttattttattaacttttatgtaagtttggccattaaggcttcattgttggaagtttggccatcatctacctatatataatttatagtatcttacttacaattttggtgtttcttttcttccaattttacccttcatttaaagtatcttacttacaattttttcttttatccaatcaaatagatataagttttaaacatctatacctgtactgtactgtacataaagaagataccagattttggtactgccatttattctttcaattttaacttttattcaaactattttgtttttcaattttataatgaaagcggaccttcatgctagtctttataataaaagtcttttattctagttatttctcatggttttgaaagtttaatccttatgaaataaattgttgtcagtttaatttttcagtggaatgtagtgattatggtataccaatccattttttaaaatctaactagactattttattccttttcacttcattctaccgtatatcactaatctaaacatattcaggttttgtcgagagttgagcgagaaaaggagactggaggggtttgaggggaaaagggatgggacatgagtacagtctctctataaccagagtttttggaggggagggggagacttatgattataatatctttgtttgagtgtattataaagagggaagtgatttgggaaattgtccaaagaccttcaaaatccttcatcaattcattttttgagttcctcaaaatttggagattttagtcctatgaagaaaaataaactctatgtaaggttggggactatcctcccttccctttcttccttgctttcctctcaacacctccacacctttccactcccaactccaaaattgacccttaggggtcacttggacgtggcttaaaaatagtatctaagaaaaataagtcttgaaatctgcaggaaatcttatgcttatgatttaattgcgttttgtacaataagatacagaaattacgtgttctttataatctggcacatttggttgatgtatttggtgaactgtgtgtgaacgatccatcactatcaccaatagtgggtgaatctcagtcttcgttgttttatattgcgcttttattccttaaatatgattgaactatggaaccatttggtagtaggatttccaagtttcaagatatatctacatatggacaaacatacatggtaaacacgcactttgttttgatattgattcatgtgaggcaatgttgtatttgatatttaattaagctggaaattaaccccattagctgcacattatgtaatctatagatatttaggaatgtatgtattgaatgtcaatggggacaaaaatgttgaggttgactcacagtccttcaatcctttttgatatttgaaatttggatactctaaaggcattgatcttgttgtgtgtattagtcctttagttctttttcgatacttgaaaatttgaaaattcaacttgaaatggacttagaatctgtaattttatttctttaatgtgtgtgatgctgcatttgtcatattagttttgccaactgttttggtgcaaaatcgcagggatat

SEQ ID NO: 3958 - DNA, 2203 bp, Medicago truncatula
  Intron number 1 from transcript Medtr8g139350.1 (locus Med tr8g139350) derived from phytozome v7.0 (chr-ID MtChr8; po s 33997730 to 33999932 reverse strand)
acgtcatcaacacttcaggtagcatcagaaggaaggtaaaatgtttcttctcaaattctaatcctcttgtttatcgctttcaaatggcacaccaaatcaaacatatcaaagagagatttgataaggttgctgctgataggcttaagtttggccttcaaatcaatgatagtgataatcgtgttgtaaaaaggcgcgaattgacacattcatatgtgattgattctgatgtgataggaagggaacatgataaacaaaaaatcattgatatgttattgcaagatagcggtgatagtaatagtctctctgttattcctgttgttggaattggaggattaggaaagactacacttgcaaaggcagtgtttaatgataagagtttagatgagacttttccattgaagatgtgggtgtgtgtctctgatgattttgaacttaagaatctgcttgttaaaatcctcaatgcagctagtgttagtggttcttctgctgatcctaacccaattcaccaagagagctttacaaaccttgatttggagcagctacaaaatcgtctaaggaacgtgattgctggtaaaaagttcttactcgtcttggacgatgtatggaatgaggatcgtgtcaaatgggttgagttgaagtatttaatacaagtaggcgctgaagaaagtaaagtcttggtgactacacgtagccactcaattgccaaaatgatgggcaccaacacatcatacattttggaaggtctttctctagaggattccttatctgtgtttgtcaaatgggcttttaaagaggaagaagagaaaaaatatccagaattggtggagattgggaaagaaattgtacaaaaatgtggagggcttcctttggccctaagaacattagggagttctctattcttaaaatttgatgttgaagagtggaagtttatcagagacagtgagatttggaatttaccacaaaaagaagatgacattttgcctggtctcaaattaagttatgatcagttaccttcttatttaaaacaatgttttgcttgcttctctctctttgaaaagaactttgatttttctaattttcatgttagtgtgctatgggtggcacttggttttcttccgccaccaagtaggggtaaaaccttggaagatatgaacattcagtttgtgtacgagcttcagtctagatcatttcttcaaaattttagagactttggtggtggtttttgtggttttaaattgcatgatttggtgcatgatctttcattgtatgttgcaagagatgagtttcaattgttgaaatttcataatgaaaatatactcgagaatgtccttcatctgtcatttcttaaaaatgatttgcttggcctaacgccggttcctactggcctgagaaccttgatatttcctaagggagccaacaatgaagctttcttgaaaactttggtgtcaaggtgcaaattcttgcgtgttttacagttacctgattctacatacgagagtttgccccgctctattggcaaattaaaacatttaagatatctcaatcttggaaaaagcaaagaattgaagagccttcctgactcattgtgcaaactccagaatctatacactttgaaactcaatggttgcataaagcttaaaaaattacccaatggaataggaaatttgataagccttcggcagctaatcataactacaaagcaatatactttaccagaaaaagagattgcaaagttgacttgtttagaaattttatctgtcaattcttgtgacaatctagagacgttgttgcttgaagggatacaactttctaacctaaagtggttgggtatttcttcttgtggaaatctaaagtctatgccacttcacgttattcccaacttagagtggttgttcattactaattgccataagttgaaattttcatttcacaatgagaaccaaatcccaaagttaaagctgaagttgctaagtcttgaatctttgccacaacttgtgagttttcctgaatggttgaaaggatgtgccgacacattaaacaccttggtaattgatggctgtgaaaatcttgatgagcttcctgagtggttatcaactatgatttgtttcaatagatttgtagttataaattgcccaaaattgctttcgctccccgattgcttttcaaaccttgaaagtttattaattgtagattgtccagaatt

SEQ ID NO: 3959 - DNA, 2077 bp, Medicago truncatula
  Intron number 8 from transcript Medtr1g047060.1 (locus Med tr1g047060) derived from phytozome v7.0 (chr-ID MtChr1; po s 11222336 to 11224412 reverse strand)
aggggacttacagtactctacaataaacagaaaaggtagaaatcactagcagttgatataataaaaccttggaggactagggcaaatatatattttttgaaatttatctagtcttatgaatgtgaatgcatattttatagcaattctatttatttcaaaattatgcaaagtagtttgttaagatgctatgggattgtattttgtagtgaaactttctctaaagaacaacaaccaccaccaagcttatcccacttggtggattttgctacatggatcagagaatatcattgactcttgtaaaatattgtctgattgtaatttaacaaaaaaaagttaggtgtcagatgaagacccaaaaattaggataaattttagtggccagcgtaattccttaggagaaggaagtaaattttccataaatgatttaagctaaagtttggtaggagtttggattgtaagaatttaaacctgtgtttcctttcctttattccttgtagagtgatgtgctaattctaattgactacagagattaagaatgatctcgcttattagacactcagataatgaaaagtgcaagcatagtgtcaaactttcttgctagacagggataactacaaagatactcctatggtgaatggtgttttatctgaagagagacagtgtacccctttgataagtgtacccctttttgtatgggctaaaagggggaagcttgctgaggaacagtgtacccctttgataagaacccaagcaatggggaaaccctactttaaaagctagttgtcaagggggaagaactaagccacacaggtactctaccaaccattccatactactcggtgtaagacatgagcactccataacgcccaagtccatatcataaccatgagagacgatgtcttggaggctgcactgtccgttacttttctcgacctttttcgattagcttttgttagtcatctctttctgagacacctgcaaccaacaatgataccatttcataagaactcaaacgcttgacaaacctaattcccttaatatctagctgtcaaggggggaaaactaagcaggaaaatactccgttgatcacctcataagattagatgtgggacatacatgggcttccattttatccataactccccatcacccttcttattgcaattgttagggaggatattttgttaaagtttttctgtctttgatgacttgtccatttttataagaatttgggtgctttgatgacttgtccatttagttatgaattttggtttcaggtaccctagttgattggtaggttagtatgatcaaatgtcctctacaattgggtatgagttatggttggattagttgactttttcctccctattgggcttggttcagtttttggctccagatgttgggtttcgttcaaaatcttggtattatccatacctcccttatttagtggtttgtatgagaatgttccattgtacatgaggataaactagattagatagaattagaaatgttagcattaaccagagaatatggatagcaccttactgtagaataattggttcaatatcgacttaggtgatttagacatgtgtcgagaagatatgtagattgaatgtaggagattaggttaaatgaaggttactccaattgcaagagtcgggggaagacctagaaaatctataggggaaactattaggataaatttgaggtcagtgtttgggcaagagatatgatttgtgattgaacactatgacatagttaatccttgcagtcaactccacctagtgtataaggatcagttgttgtaatataacgataaaatctctgaagaaaactaatgttttggcatgcaaagattggaagaactaattagacactttgctcttttttcaatggctttcatgattaaaaaagtccaatgtaatggatgatttaggaagggtagtcggaaaaacctctatgcaatgatatcttatcttcatcttgtattgaaaattttgtcaactttttatatgcatcacctcacttttacatcttttttctgtttgtaataaaccaggtttggcgaaaccactga

SEQ ID NO: 3960 - DNA, 942 bp, Medicago truncatula
  Intron number 5 from transcript Medtr4g073460.1 (locus Med tr4g073460) derived from phytozome v7.0 (chr-ID MtChr4; po s 14554121 to 14555062)
atttggaagtggttaaaaaggtataagtgtctagaatgtatgactgcatggttaataaaattattgtttttgtgttcccattatcttggatggcgcataaaatggaaaatgtgaatgtcagaacaaaagaaaataaataaaggaaaagagctgtgttgtgtataatgcaaatgttcaatatatgttcaacatggaaaattggaagttggcatccttatttttggattgtctatctttcataatttcatatcatgattttaacttgtggttgtgattgcattgaagggaatccggatgttatacaattcacaccatagctaggtttaggataggtcatatcgatttatgggtctgttgtagatagctatacctgacatttacaagagatattgatttgacgacctgaaccgctgatatccagtgacacagaagaaattccaaccttttaacccaaggctcccctttgttctcctggttacattgcaactgccaaagtgttggtcaatgtgatctaaaactgcaccgttattacttcaattgtggttgtagaccttgatttaaaacactgcttcatgcaggaagcctgtgagtgcatttttaatgacgatattcttctgaaataaatatttataaatttccctgtttcatatcaagatagagttcaatggttttgacgcgtaggtattgattataatcttgtagatattcacaggagattgttttggaaatttggatttgtatcatagcattctaaaaaaaatcgtaaaatttgatgtcacttttatatgtttttgtgtttatgttttgtgctcaacaagtcataatgaaaaaggagtcaatcaagaataacatcactttttgcagaaaggtgtacattttttcaccaatcgactttcttttagtgtaggttgtacgtgaaggggagggttgggaatctccaag

SEQ ID NO: 3961 - DNA, 1849 bp, Medicago truncatula
  Intron number 1 from transcript Medtr5g018730.1 (locus Med tr5g018730) derived from phytozome v7.0 (chr-ID MtChr5; po s 6866729 to 6868577)
atctcgttgttaaagttaattctgcactttccaatgtaagttaatagtgttaaaagctacattttgtatgttaatattaacattttcgtttttggtcttcttttaattttaatttcttgtatgatttaactaatttagttcacctagtgggatctttgaatttatttattaaatttttatgatctggagaagaaagaaccaaattggttccctgcttcacgtttctgctgtaaattgattggtgttaattctgccctgggttcttaatgttcatatcatcataccaataacgtaaaccaaataatttattatctaacacctaaatctttgtcctccttgtgtttgattggttgcatttcgcttcattttacataaagaagttataattattcaactcatgatattgaaatagcatttgggtaccattggccaatcacaatgcttgtgtttctcttttttttcacaagcgtgacattgtgattgaccaatattacccaaatgctatccaagatattgatacctcttgtgcatttcgctccttccaaagtgaaacgaaagtagttctccatttgcaaagaattcggatgtatttatagtgtgactgcaatgaatgagccgcacttgattgaaggtctagatttcaatataattttttcaattttttaaaatatcgatttaaggttgaattgtgattaattgtgtgtgcactcatggagtcgcggctgcacatatttcacacacctacttgcaaatctccaacaatgaatattctatataggttttgttaatgtaagaatgctaatgctaatgagtttttttaagatattcttatagtgatacatatttttttgcgacattgatatgtggtctagggaataaaataatatagtaagacacatagtttagttgatgattattcggtcattataaacttttacttctgaagaataaaataaatttttgaaagcaatttttcattatagtaagtactaaaaaaaaagaacaaaatggtcatgtaaacacggttcatttgataactacaaaaataatattatataagggttaagtattaggtcacgaattccccactcttccatatttaaaatgtatgaacgtcaactattaaattacttgacggaaaaaaattgcaaaacatatgtaattaaatgttacacaattttttagtcctcgcatttttctggatcaacgcattatattttttgcacataaatccaaccttttcattggactcatatcccacttttggtctagactagagagttagaacttagagacatggaccgtaacaatggacaggaaacaaccaaaagatgctatgcatccctttggaaccacgtcctataggccacacgagtcacacaagaattcgacaaccaagtcttataagtcataccaccaagggcggattcagaaataaattgacgtaagaacataatcagaaatgcatagtcagctcgccacgtcagcaattctgcacaatcatatgggtcaagggctaaaatcaaataatcttattttacagggttgaaatctaatttattttttttacaggggtaaatcagaactcgcccaaattacaggggtaaagacatattaaccctttagtgaaatagtgaaatttcacaatcaagtacagcttggtaaatcatttttactaagctatataaatatggtcccatccgtgacttcaactttgtcacatccttaaaattattgttactttttcaacatgaaaatgttacattattttcctctcttttccctagcaactctatccctgctcgttgtctcagccagcaccaccatctcttccaccagcagccaaaga

SEQ ID NO: 3962 - DNA, 3083 bp, Medicago truncatula
  Intron number 1 from transcript Medtr1g086930.1 (locus Med tr1g086930) derived from phytozome v7.0 (chr-ID MtChr1; po s 17367209 to 17370291)
tggctgggacgggttgataaagtactggtaagttcattctcatgctgtgccatatgtaattacataatcttatttagtatgttgttgtttgaagcatgcctcgctcatgccagattttctgttaccattttgatagaattttgtgtatattattcaatattcaattctagctaatataggtctctagtttattttcgacataacacatatcttagcttctttagattgcattaaattatagtgtcgtgatagtcatcatcagtttattggtccaagagtctagcaggagacatggggaaggtgtttgagtagagatttgtgtaaaattttattttgttgaagtcacccgagtccttagacaatcttcatttcggcaacctctagcttttaggaaaccaatccctgttatctacagccgtttgacacttgtctacgtactgtctcttgtcttcctaacactttcttctccacttgtatggatagcttgttttaagcttgctcttattcaagaaaagaatgttctatttctgctgaatattttgacttggaatgagaggagttgcatggctatttaactcctatcatttgtatattaaggtgtttgacattcaataaactgccattttcatccacaaccttggcacacactttcacatcaatctctatacaaaggaaacccgaaaaatttatccttgacatgtgaatttgtttattgcacctggtcatgcaatttaggggtctttgttagtagtaagtagttatgttaccagtagcggtactatcatgcgtgatagcaggatagccgagacgacatacacactgtgaccccttattcctgcgagctgcgttcagcaggaacagtgtttgtggcagcgaatcactgccaaattgcgatgaaattgggcgcagtcactcttcctcgtccaccttctagggttcgtgggtgaaatttcacaaatacccatatttttaaactgttttgtttaattttaagggtataccgatcaatgcatgtttttaaagttgccagtttatttatttgtattcgcgaacatttttttctggttacaaaaaaagttcctctccttcatcgcggcgctttgttctccttgtacaaagctttgtttccctgcgtgaagctttcttctgcgcaaagctacaaagctgtgtctccttcctcgcaaagctacacaactgttcttctgtgttgttggttttcctatcttcttctgcatgcaaaggagactgctatgttcttctctgttctgttggttttctttactatgttcttcttgttcttctctgttccgttagttgttaaggtattagggtgttggtggcaaatgaccaaagttaattgtaattattaagtatgattacccctttaattttgtgtatttttctatttctgagtatttacgtatcctattgggatttctgtttagtttgtttactgttttttagtcttcacaatattgcctttcccgctttactatccaagatagataagtagtaagacacgtgcttgtttggcacatttaatgccacatggattaacactcatcaccaaggatcaagtctttcagaaaggatttggattttcctttcttagacgccaactagcatttaacatggcagattaggcacatttgttaccactaatggggaccctaagcagaggggactaacgagaccaatggaatcacaggtcaaggatattttttgcgtttcattaatatagggactactgcaaaggtcattgccaaagtttccggcgaaagtggtagttaaattatttaatgttctaataatacatttggatagttattggaattaggatgtgaataatacatttgattttggttaaaaaatcaacccccttttctaaatcatgatagccatggtgtcaaactattgagttaactcatagaatccttcaagtttatgattttaggtgtcaaaattgacttaactcctacaatcgctttcatataaactcaggcagttttgcatagactcataaatacagcaatgataagactccataatgcacagacactaacctcttagttgtagcactcaacttcattcgcttttatgttttctggttcatgactgcataagaaaacctatggttgcaagtttgcaacatacctaagaggccaacgagatgattgaattcaattccgttgagctgaaacctagaactaccaagctgaatccagcagctcctcaatggattttttcattttcatccttttgagtgtggcagccagcccactaaaataacattgaaggaaagaaatgctcatctttagtattgtctggtctgatctggagctgtggtcccaccttggtttaatttattggttgcttacagacttataaaactttgctattgtggcttgctttgatattaatttagactgtatttgttttgcatgtagtattaaactattcagcaatcagcatacatgctttaaatattatctttgagcagagtttatgtgacaattttgttgtaaaatgttttcaagctaaacactattagtatcttaagttgttaacacacaatatgatatattttgctattccgtcagttagaatttgacatattgatcctgctatgattcctttcaccggaatcaatagaatttggcaatatccctttcctaatcctgataaaattaacaaggtgttcggtgctcctctgacagcttccatgccgtttatgctgagattcaagatgatattctgcttgtttatcgtgtatactattttggcagttgttgcatatcttttttatttgaattttaataagattctacaaatatcaatgtttatattcaaacagacacacacttcttaatcccttttgttttcattctttataaatcatgctgccaacaccatttgactttgaactacctcaaatatccataattgcactcaaacaaattgtgctttggaccaagctgtgttcaaacatgaactcaaacacatttattaattcaagtttctggatatagatgtttattgacatcaatgtctttatgttggattgcagggactaggtctgttca

SEQ ID NO: 3963 - DNA, 1217 bp, Medicago truncatula
  Intron number 1 from transcript AC225507_18.1 (locus AC225 507_18) derived from phytozome v7.0 (chr-ID AC225507; pos 78595 to 79811)
tactcaatcgtgatcccgggtacgaaactaccaattgcgttggcatttgaattttaaatcttgttcttctttcttgcgtattttgatcgaatagttgtttttcttgcagaattaacacacaaaataaaataaaataatgactgaattcctttgattttcttgtatggacgattcgtgacagttaagttattgagtggagtttgtgtcgatcgctgtgataaacattgcaatggaacagagaaattaaaaatagcaaatttttgttgattttgaatttgagtgctatttttttgtagattgtttgatcaatcagggaatagggatagtatatggctattttggattctgcaaatttgagtgtgatccacttgtatagtatccgaaaagtgaggaattgcaggttcgaacctatgctcaaatgtcatgcatgcgtttaccatctgagctgtaattactcaaatgtcatgcatgcgtttaccatctgagctgtaattacaagacaccatgtatttttgtttttggttgctgtaagctatgagtgactctcttctcatgataggctattatgatttttttttttatttttttatttttttatttttttattttttgttgaaattttcaccttatcttcgttaaacattcatgactggtggctatttatcatcgaggaagaaatatttgcacttgaacattacatttttatgtcgaaaacatagttaattgcacgtgcgttcacggctacatttcctagcttcaatataataccattattagagttgctttgaggcacgataaatgtgatgcagacgccgttccaaaaggaccgttagaggattcgttcatatcgtgggtttacttttgtaagacgtaagctttcaggaaccaatagtttcggatttgtgtctatcaagttatgtatcaaagtttgggaatcccatgtatgaatgtagtatttcttttgttttatgtcttctactattgggagaaacgggtggtatgtcccaatttttacatgttcaggtttctctactcttctgtatatacagtttggaactgaatgtttattttctttgtttttttttttaattagcaagagcgtttaagttggaaatcttatatataatttttgagttttgcttcttcatagtttgagaactcattgtggttatgatttttcaggcaagcaaagcatattgttagaggtttaaagaagc

SEQ ID NO: 3964 - DNA, 2833 bp, Medicago truncatula
  Intron number 1 from transcript Medtr7g009510.1 (locus Med tr7g009510) derived from phytozome v7.0 (chr-ID MtChr7; po s 1701049 to 1703881)
gactaattcgctgccccgtgtgctgctactagttacatcttccaggtgatgtttactacatgtttcgattatctgtgagtttgtcagaatcataatgtgttaccgtgattttatcaaactcattgtgatttcagacatgtactaatagcactggtttataccaaattttgagttttatcattcagggtcattttgtatttttttgtgagatttttgttgtatagttgagtctttaatatggtggatagagtgaataacatgttctaatcacttcctctgcataaccaatgtagtttgctgcaaagtgtatactttttattttacagaaaaagatagaaaggtatatatacaatttcctttcatgtaaaattcaagaaagttgcaaaagaaaattacaaatacaaagataggtaatattacttagtagtatttgctttcttccacttaacaatgtgttatcttttctgcaattttataactgtaatatttggatgtcattatactctggaattaattgaaattgaatctgcaaagggaaacttgcacaatgcatttgtttgtttatgaaacacgaacaccgataacacattaacacggatagatcgacacagataatcattcgaaaaaatgaaataattgaatgtaatcaatcatgttcatatgtatcaatgttgtgtaagtgtcaaacacctacatgaatcagagaacaaatacatcttcaatataaagtgtcgatgttacataacttttgtatattttaggtttatgtgctcaatgcaatttccactatgcttgtccatctttatgctaccaactgttggccactttacaagttatgatgattagtagttagcacatagcacaacttttctagcactttattttttttattggattagaattattactacaattccttggttactaaaaatgaataaatcaagtaatttttaaatgaaagtgttttataaattccatgccttacatatttcattttatatttgttttcaacttaatataatttaaagaaacattccacattttatttgtttttttataaattcaggttaagttggacacaagtagcattttaggtagacattgtctttggtcaacttcggctaagagacttgtgattgagtcaaataaatgtatctttggattgaaaagctatgtattgttaatgttctccactactcttcctaaaattatataataataataactttttgtttgtttctttttccttttctaaacatggctttgaagattactttaataaagtagatgattacttgtcaaaaatatatacttatgtatggtaaacaatttctcataaaacctagtcaacaattgaaaagcacatgaaatattattctcaaatttcttgtctgtttttataattgaaaaatgttagtgtattagtttgtttacaaaagattagtctattagttattatcttagcatttttgcttttatcaagatttaaatttcggtttttttaactcttttaatctttaactcaaatcagttcagttacctaattcttcaaatcatacagcaattataaatgaagcattctcatacaatgtaaaaatattgttggaatacaacgtcgattttttgatatttaaataacatcgttctttttcttttgacgatcctagcttatatagttacttgctagtagatgagttttttttttcgcaatttgtaatagttgagaaataattactcttttttattgttaataagagattaattactcaaatatgtaaacacaagtaaaaaaaacaaaacggcattgatatcttccgttagtaaatttttcaacacactttagtgtcgaaatcaaactttttaattagaagaatctgaaacccctaatttgaatttgtgatcttctaggaaggaaaacaacacattttaaattagatggtccacaacatatagatttgaaaaatcaccaattttgacttcaggtattacacacaccggccataactcactctttcaaatgggaacttgaattttgaaagaggttttcaaacttttcattaacatttttattgttcattaaagggagtaccacatttgtgttacctagtttttattttatttttgaaagagttttatctagctagttatatgaaattaatatttttgattaacataagtattgacgtgtccgtttgtccgttttttttttttgaatgaaaattatagttggctactatcataggataaattaaacattccttcaaaaaaaaaaggataaattaaacatgaaattgtagaatgaattatgctatatattaattatcatttttattttaaatactaatatttaattcaaattttaatgataattagtttagattttatttgttattgattagtcgtttaagttttagataaggtttaatttaaagtttaaattagaattaaatttgatttagattaaattaaatttgtttaaattttgaaatttgaacaaaattcaattatttaacttggtaaaaaatgataaaattataaatcaaagagtttaaatttaaattagaataaaaaagctacaccaaaatttgattatatatattcataaaatgtaggactataaaccaatgtcgtgccatttactaaagaatacacaactaaggaacataagaaatgatacaaatgatttgtgacaaaaagaagcaaactatttttccttacctactttgtgtctttttttaatcatcttcatgagtttatgtattgaatggacctagctagaggcaagaaattctcaataggctacacgtcccttgtcgtccaatcaaaatcataa

SEQ ID NO: 3965 - DNA, 1868 bp, Medicago truncatula
  Intron number 2 from transcript AC233671_9.1 (locus AC2336 71_9) derived from phytozome v7.0 (chr-ID AC233671; pos 32 640 to 34507)
tctaaagagcagcacaaatgtaagtttcctttttgagagaaaaaaagcactagttttattttcagattattttatttccttccatttcttcttcaaactatgagtcaatgttgtaaaaaggaattggagattgaaacgatgaggcatgccgtggtttaaacggctcgaaccaagacaaaaccacgatcgaaccactgaaataaccgaaccatgccgaagagtggttcaaggttcaatcggtgggactgcctcgtttgatttttaaatcactgcttttaaaggaaatagtgataatctagcttctattatagggagtttaagctttaattactatatggggtatttgttgctaacaaataggtcttttggataacctgagtgttagttggaaaaagctgtccaattttaaatacacaacttggagttcattattcaatcatcaattcttttattttatattttatgatactacacttagcttacaattgcagattaaactatttgatttattttaaagaatcaaactttgatgaagagtagatatcaaaatgtttggtatcatgaacaattcttgggaatatgttctcacaataatttacaagaagtttagaataatcctcattgtttctgtatcttgtaatatgtgacattgcatttgtcttagtcaatggtatatatgctgtaaagataatttaaagataataggattaaaagtttgatttggtagtatcaaaatggatttgtttaatgcatgtatgaaatcttcttatttttaaccatttccttttcgtttttcctatgcatgctgtttaaattagtggaagaaaatggagaaccaatgtcaaagtcacttttctgctaaaacatgtaaccaatgttaagttgattaaaataattaaacatgtggctaaggtgtaaagttttgtaatcagaagatcaagtattaaaaaaaagttagttcctttaaaaagttaacctttcattagattataagttataatataaagcactgtggtttagatgagacttcattcaataaatccctgtggataaatctggaaaagtcattgattgaatacaaaattaggtttgccactattagattagtcatgtacagtgtgtgcaatcccactttgatttataaataatgattatctatatggcctaattctgtcaacttcaaaataaaatttagttgttcaaatactatagcatgaagtcaccgcgattacacttttaaatattcacctaactttttcattttcaagtttgaaaactgtatgattattctgttgttttatagaaaagtcatttgaatcactgttacctaactttttttggcaatatattctgaaattatgacttgatgatttgtggaccagaaaagttaccttggtagttaatatatattttacataattgaattttatgaagcattgcgctaagcattcaaacactaattgacatttagggccgctttggattggtttatttgagtttgtctactgacataagcacttgtggaaattttttagagagcttattaaaacaactaatggcatgtccataagctgctttcagcttatttccatgatatccagaatagtgtgttaaaacagcttatagcttatatgaaaacaatattttattttatcttttgttatagaaatagcttttgcataagcacttatatgataggtgcttattctctatgcacttatatgataagtgcttatgctatatcaacttagttaagatgtttatccaaacagggcctatatttcttaaacactaaaattagaaaatttccatttgctgtacatttgcttttgttcttactgttacaccggtgtaatttggttatgcag

SEQ ID NO: 3966 - DNA, 4116 bp, Medicago truncatula
  Intron number 1 from transcript Medtr4g031840.1 (locus Med tr4g031840) derived from phytozome v7.0 (chr-ID MtChr4; po s 7429577 to 7433692 reverse strand)
atgtatgttatcttgatcttatattgttgcaaatatttttcatatattattatataatgcaaaactatatatagcttcatgcattttgcagagattagcttgaacatctcatattcgagacttaaaatcttgtttggctttcgatccctttcctttcatgttatgttcttattattataagaaattatatttatctgtttttcttaatttgtaattttaatctcaatacacataaagttcttttttttttttaggggaatacacataaagttcttaatcaacctaacgtcgatcaaacatatattaaacttaggcttcttttttttttaaactttctgaatatagttcatgaacttgctgaaactattttcttgaatttttcttaattataaattaaattaaataactatttataaagagtatatatatcctattttatttcataatgataggtgttaactgtagaagtttatgtagtgaaaataatgaaatatataggtactatgtgaattattaagggagtacaaaaaatgaatattctggtgtaagaaaattttaatttttttatgggaggtgcaataatttttttatggtcataagattttgacacaatatttagacacataataggcaaaaagaactaaattaaatattatttattttcaaaattattaaatgatatataattttatgtatgggtactaaaattaataatttttatttgatattgtaatcaattaaagatgtgtttgattcttaaaacgataaatactgaacataacaatatatgagaatacataactgtattatttcaaaaataaaataaaaatacatgagattacttaactgtattagagggagtgtatttttcatgttgaaaaataaaaggtgtatttatgtattttttatattttgtatttaggacaaaaaagttgcatcatgtcttatggttttgatattggtaaaaattcattttgttcaatctcttgctatttattttgtccaatattatctcatcaccagtttccaaataaacacggtacacaaaaaaaaagttatctagtctaataatagtctgttttacttttaacggtatgtttgtttcaagttatatttgttgatttttgggaataaaatgatagaaatgtatatgtctatgtttattacaagtttactaaattttattcttgggtataaaatattcctggaaatagaaaaaatttcccaaagaaattggtgggaataaattctaatgtagttacctattataatccttatttttatggttccgaggaatattataaactaaccaaacatgttttttctatatatcttggaataaaattctcatttttatacttcaaagaatgttatttccagaaataaatttggtaaacttaaaacaaacacactctagcatttagagatgtgataatgatgccttccaacaaaggatgttgataatgataatgacaatacttcactttattttgttccaacatttatacttgtacatggtatatggagtattggacgtttagatctgctctacagcatgtactatttatgagttgtacttaccctattcatattaattaattgtagttgtaggttctttctacaaagggcatgttatcttatgtccttaggacacaagttttttttttttgttggtggtcaggatttgaaccctggaccttgcatattgtatgcattgttcataccaactgaactaagctcacgaggacaggatacaagttaaagagtttaaaatagaaattaaaaataaatttttatattaaaaatacaacttttaagatattgaatgcacaaatttcaataaaaactttttacatttggtttcttttttttttttgatgttacatttggtttcttaacttatgcctcaagggcataaattaacatttttttttttaattattggacttcttttttacatgaattattggactttacttatattctttcttttcactgttattaacaaaaaattattttttaggttctttaaataatgaatatatttggtttatataattatccaatgaacttaatagttaactttttgtttataataatgatcaaatagtgtattcattaaaaggttatacgcattttgatgtcagtttctatccaatttatcattttacatagtttttttgtttttgttttgaaccgggtcttatgttaataaaaatgaacaagttaattatttatttattagtaataaataaatccattttttcattcaactttattaaaaaaatatttacatacattttcttgattattgaggtgaaagatcctataaagggtttacgacacaaagcttattacttacatacattttctttcttattatttcccaattcaatattaattttatagataaatattatatcaacaacatgataaatcaagtaatcgattgatttgatttaaatcaaaaactcaataatacacctatgaatcctagctagtttgagagcagtccatttggacctgccaaattaacaataattgtccatataaacattttttaactaactttgatgaaagagataattgtcaaatatagtatattttatcacttaaaatgtttctggtacacgtccatgttgtaacgagagataattgtccatataagctcacggggatataatatgcaatatctcacactttttattaaatttgtcattttcaatccccgtgagcttaactcagttggtagagatattgcatattatatgcaggggtcggagttcgaaccccggacacctcacttctccacaattaaattgtgtgagctctagccactaggctacttgacaaaaaaaaaacttaaaaaacctcataatgcatataacctattgaagtcatccaaaatccaactttgctttacatatgtcaaaatatatagaagcatttttattttttatttttcgtacaaaagaggaggaagtcttgcataatctcaagtatttaaacacacaaactggatgctcacacacaaaaatacacctattataatcatttcaaaaatatattattttattctttatctttctaacatttcttgagcatttgagtgtccctgtttagagtgtctaaatgcttctaacaaaacaaattaagtagttttcacaaaagagagcatatgttcaacaagaaaacgaaactaaaatgttagtctaacgttctatatcatgcaaacaaaaaacaaaaaaaaattgaccacgccctacaatttttctatttaggtttaattactcttttaatctttcactttcattttgatcctttaactaatgttaatctgaatcccttaatcttatttcttttactcaagtaggtcttgtttagttaatatttaatctcaaatatttaaggtgaactaacattgtaggtgtttcaccttagatatatttggggttaaatattaacggaatatatctacttgaattacaaagatataattaaggatcaaaatgaacaaaataaatagtttaagggtaaagagagtaattttgttttttattgacttaatacatcatttagtccctaacttatttttggtttttactttggtcccctaactataaagtgtcttaatttggtctcgtaaatcttacgtcgtttactattttggtcccattaaaatattagacattataaaatattaaccgagaggaccgaaataataaacgactgaagatttatgagaccaaattgatacactttatagttagaaatcaaagtgaaaaccaaaaataagttaagagactaaatgatgtattaagccttttttatttataataacacttgcatctttagagtgtacacacactcattcacattttcttaattcttttataaacaaatgttaattaagttttgcttaaaaaacaaaaatgtttagtagtttgtatgttatcatagtcggtgaattctggagttcattcttccacctgaccattttagctatgcattaaggattcccattctcataattaaggtgtaattcctcttcctctagtaaacaaattctaaaaaaaaattattctgctttgcaggaaaaagttagtccttcatcag

SEQ ID NO: 3967 - DNA, 622 bp, Medicago truncatula
  Intron number 2 from transcript Medtr8g025590.1 (locus Med tr8g025590) derived from phytozome v7.0 (chr-ID MtChr8; po s 5236184 to 5236805 reverse strand)
acaaagtactttacactccattgtgttgcaattcttttacatctattacttggttgtaccaataagctttataatggatatggtagtctatgatttgtgtatttaacttcagaattattgaattttattctaaaggattaaatatgtttttagtccctagaaaattacaacttttcaagttcaactctagtcttggtctactgactaaaaatagttcttataaattaaaataggaactaaaattgaataaaatttatgttgaggttagacttgaaatgtgcttattttgtaaggattaaaagttgtaaggattaaaatatatttagccctaatctaaataagcatacttaataccttcaaagttgcataaggtgtcatatagttggttattgaaatttaatggcccaagtattgctcattggtagatactttagtaaccagttacccatcatgtttaaggggagatgataagtttcaagagtcttcacttgctattgaatgtggtttcctgttatagtttttttgatgatcatatagatgagtgagtctatctttctatggacactagtcctataaaatcttgaatgtccttgatgttttccgttttgggcacagaaacaag

SEQ ID NO: 3968 - DNA, 1536 bp, Medicago truncatula
  Intron number 1 from transcript Medtr3g097680.1 (locus Med tr3g097680) derived from phytozome v7.0 (chr-ID MtChr3; po s 23465009 to 23466544 reverse strand)
tggaggcttgcttctcaaggtagcaaatctttcagtggtcaagatacgacaattttgccagattgtattttgtttctttattttaatctagttctacaaattacttctgtgttctttctttgtgaagcttccttctttatgggtaaactactaaaatatcattgtatgacaataagggtgaatatatatatatatatactatatcataaacttatagcaagaaattaattatttaaaaaaacattttagtaagaaggatactcttttactaccttaatctaactattttaaataaacaaatgccaacatttgttaagaaaattaaaaaagaaattttatttcaaaaatgatgtatttaacacattaaaacttcaaagaacaacatgttttacaaaaatttatcaatgatttcctcatttgaatccttaaaaatggccttataacatttgttagcatgactatttaaacaattattacttttttcataactttctctcaagagaaaagatcatgataatctatagttcagccgatgaataaataaaaaacatcacttgaaactcaaacacataactacttcgaatctgagtcaaagtatctgatctatatgtattgtaagttgatggtttactctttttttaagttgtgtctccctaagtattgattttaaggattcatgtagataattatattatttattttttaatgaatggaactagttgtagagaaggagacatagaaattacataggattctcaaaaagtataggctgtatgtgtgcaagtatgcacatttacggagacataatacttgacacgctcagtcagttgaagatgaacccatttgctttgcatatgtaatcacacacagctgttgcttctctgtacacatatcatatcatatgcaaaaccgtgttatgggacctgctttccttgtgcaaactgtggcttatatgttactatgtccgttattatccttttctttctctaaagtctaaactataggaacaatatttaattcaataaatcaagatcaaaagtctcacatcatcagcggtataatttgacttttgcactccttatcatattctttatatttataccttttttagtaatgctatcagtatatatcatttcctatgaattaattaatttaacctttttttttttatataggaaattcgattaaaatgagagcaaagttcagtatgaactgatccaaagtcctgtattaaaaaattatctcttttttatatataatttgtcctatattaatgtaattaatattttcaaaatttagacaaatttttaatcttattggctcgcattactaatgtaagaagcattttttgttacttgcagcaaaggttttgaaagggtcgaatctcctctcgtaacacaaatcctaattttgtttttcattttgaaaaaaaaaataataacattatttattttatctgaattttttatataacctttatctcgttctttcttttatttttatattattacatcaagccaccaggtcacatgcagg

SEQ ID NO: 3969 - DNA, 1271 bp, Medicago truncatula
  Intron number 1 from transcript Medtr1g099580.1 (locus Med tr1g099580) derived from phytozome v7.0 (chr-ID MtChr1; po s 20393399 to 20394669)
gtaacagccgcggaatcactttcacccttggatctgtaagctactagggttcgatttccaaattcattgcataatttacgttataatatctttgttaattaatttgattcaatttgttttattctctctcattttgcttttctcattttcttcataatgttgtcaaattaagttcttcgatgctgattttactttactcatgctgttatttgtttctcactgtgtacttgattcggtttttttaatttttttaaaattgattttgaggtgagtgagggttattgttttacggtttttttcttgatgatttgattgtttcgaaacacgaagaaaaattgttgaatctgatgcgattgtgacaagttttggtgtgaagatgtgtagttttgttgcttattgatattattttattttttaaaattttgaagcgattcaaattgttgtttatcgtttcagttttgaagtgtttgaggtgaatggcaaaaatcttgtgctgttatttttttcctgcggtgcacttgattcggtggtttttaaatttttctgtatttaaattaattttgaggtgaatgagggttattgttgtgtttttatttttatttttttatgatttgatttttgggaaatatgaagaaaattgttgaatctggtgcaattgtgaatcaaaatgttgtttgttgttttagattcgaagtgtttgaggtgcatcagaaaagtgttatgctggattttagtatttaagattcggagtgggttttttaacttaactgttatgtgtttgcttttgatttatccacctctttctgtcgatattatgagtattgtttgtgaactgcgttgatgcacttgaatctttggtctctagctgtatttccgtttatgtaagatctatagcttgtgtgtaacttttgtcgtttgaaaatgacgtttagcatgtgtgtaacttttgtcgtttgaagatgacgtttgatcgacaaattaaacaagacaaaatataacacatgttctatttttataccatatatgatgcatttttaaaaacagaatagaatgtgacacagggttaaaaatatgctgcattttagttccactttttgaagagaattaattttaacgattgggacttcgcctgtatacataccacttacctaagccttcatgttaattacatggtattctttaagagaaatttatgtgttattttttattatgcaatgttgatcagtagctcactagctgaattttaacgaaacttatattgctgtttgtga

SEQ ID NO: 3970 - DNA, 1796 bp, Medicago truncatula
  Intron number 1 from transcript Medtr6g014840.1 (locus Med tr6g014840) derived from phytozome v7.0 (chr-ID MtChr6; po s 3568979 to 3570774)
acactttcagttttaagcctaatcccattgttagagtaaccttatggttttgtcgatttacatggaataatgattttcaatactttgatatttatatacaaaaacgagattacagatcttgcacaaaagactgtacttggtttataaatcggtatggaccatgtaggcttaaggggacttctttagattgttttccatggaatccaaaatttgctatagtttatgaacatatgcaacttggtcatgaaaataatactcttaatgtgtaattttatcatcaactatatatgcctccttgaaatttatatagttggaaaaacaaaaataatggaataatttattataagttttgctatagtttcttttgactcgtatgaattttggtattgttaatcgtcaaatattgagcattacaattaatgagtttgatcttcttttctttctcaattttttctacttcatttaaaaatgaatatttcttctattgtttcttttaaaagtgaatatgtttttgctcccctatcctttgttttttcttttgtttttaagaccatcataaactttgtttgagaatttggaggaaagggaaagcccgttgtcttgtttgggtgttttaaacaccagcccttgtaagttacatattaactttttaaatcaaatttacacatttgattttgtgaattcttcatattttaatataattgattctttaaaattttatcataatttttgcatttttgcaattagggatcgatcaaatgaaatattgactttatgaatgtagatttttgctctattttaaatggatcctcctgttagtcaaatatcaagttttaaaaaaaaaaaaaaaaaaaaaaaaaaaaaaaaaacttgagatttattcaaccattaatcacacgggcttcttatcaaaagacccaacaagataattgaacaatttaccatacataaaataagcggagatctacaaattttacaaaaattataatcaaatccattaatcgtgattcacatgttaagagcgggtggaagttcacattaaggctatgtttggtagaaactataaggaaagaaagaggaaaaaaaaaaaggttaaaaaatattctctcttccattgtttggtttaccagccataaggcaaggaaagaaagttttatgttgaaatccactcaaaaatataatcactattaaattggacggaaagtggaaggaaggtttactttttggatgaaatgttataaatgcccatccaatttttaaaaataacaacaacttgatagttttttcttccatttaaattgtgacactaaactcttatttaaacctattatacccttttttttaacaaaaataaaatgtgatactctttaatacttaacttacattataatttaatgtttattttattattttaatcaaaatattattttaatcaaactcttgtaaaaatatgtatattaatgtattggaaattttatttttgtttgagggtagctttgtcatttttttgtttacatacctttcttttctcttattttctcaccactttcactcctaataaacaaccaaaataatcatctcacttttcattcactttcttttcactttcattcctttaacaatctttccttttactttcttttcttttgtatccaaacatagcctaaaggatggcatcatgcatataaacaagtggcatcattaaagtatggaatcatagcatcatgcattaaaggatagagttggcttgttaaactttaggtgacacacactaagagcaggtggaactgcacatt

SEQ ID NO: 3971 - DNA, 1509 bp, Medicago truncatula
  Intron number 1 from transcript Medtr5g102550.1 (locus Med tr5g102550) derived from phytozome v7.0 (chr-ID MtChr5; po s 41063002 to 41064510 reverse strand)
tgcaaggttcatcatcaggtatatggaaattatgcatgcatattttattcctataaagatatgcattttttaatgttacttgataaatattgaatttatgtgtgatcagataaatgttagatcagattgcttggtagattggactggtaaatgattttcttgttttataaattgactattgaaacacatctttattctatgttactcaatccaagcaagctattgactttttcattttagctgaaactgattttcctatggaaatggaagtagtgttgacatgaactgtaaaacctcaaataaattttggttctagggaggtttttcttcaccatatgcaattgacaagacatgtattgactcagttgcagaacaaacatgctgagaaagctactttggaagataaattaatgaggcgaagcactaatttcagccttgagacagggctgcgcttcaggagcccaaaaacattagtaactttactagaataggagagatgttcctagagaactgattgtagaccaattgtgtcatgattgttggtcaaggctagaaggctcaagaaagtggttgagatgccagggtctagtgggagctagttattcagtagtgtcgtgaacgagtagtgaatgagagtggtaatgtaggggaggttacttcgtacctagaaagagatggcgtgaatgatcattctttcgacctctttaggaacttatctcttggaaagtgttaagtatatattatatacttgctcttttctatttatgttgttttttcatccttctgaaaccatttattgtttatactttgaagcttactttgagtcttgcttcttacctagaatgttattattattattttacactccacgtttcctaatacgattttcaaccaagatgctctcacttggtgaagtagcaaaaccagcaagggcattagcgaaaaggggacttaattgtttaagctctaatctgaaaatcactactgtcataagtattgttgaaaaggaagtcaggaaggtgtgattcagattctaaaagcactctgctaagaaaacatacgaaagaaacgagtggtagtcatggttaaatggtctctgtgtcaaagtcagtgatgaaatcaaccaaagatgaacattcagacgagactcctatcagaaattggaagagaaaacaccttccacgaaaagaaaatgagtttaatacaaagaattatagtgaaaatcttgttggattatggattgaggtttggtaggccatggataaaatgttttaaaaagttgttattgattcttttagccgaacctagagtgtctcatctgaggttttcttttgatttcttctcttttatatttttgttctcttcaaaaattgcaaattatccttattttccaagtttctgcttgagtattcatgtttggctaatgttatgtcgtgtaagctactaagcttaaagatatctctttttgtatcagctagtggaagagtgaaactggataagaatattgag

SEQ ID NO: 3972 - DNA, 791 bp, Medicago truncatula
  Intron number 1 from transcript Medtr6g093190.1 (locus Med tr6g093190) derived from phytozome v7.0 (chr-ID MtChr6; po s 19884242 to 19885032)
ctgatcgtaaacaagaagaagaagttaacgaggtgaaaaattgctttggattttttttgtggatcatttgattttgacctaattttgtgctcatgagagagtgatttaattagttgttcttgagttaagtgatgagtgtgtgtgtgtgtgcagtttagaacttaattttgtagcttataaaataagttattttattaggttcttgatttgttgctttataatgattgttgtattgcttaatatttttgtaacttaaattgattgttgtattgattagagaatgattttagattgtttatcttacttagttttgattagttgctattaggggattgtttggaacttattttgcagcttataaaataagcacttatcgtataagtgtttacgaataagctatttctataacacaagattaaattaagtcaagcttcgtttgcataatctataagctgtttttgtaagccatttggagagcttctaagctggaaatagtttctaaaatgtcatcagttgttttcataagttttcccatagaagctcaaataagcaagaatccaaaagagacagttggaaaacaatgtgtgttggagaaggatttagaataagaaatgaaaagaaaatcaatgaatgactttgttaatttccactcaagggtttgattgatgtcgtgggatatttcaattgtatatctaattatttttgctatccttgtatttgtatctcatttttttttatcgtcaacattaaaatatatcagctggttgaagaagtggagcaggaagaaggtg

SEQ ID NO: 3973 - DNA, 601 bp, Medicago truncatula
  Intron number 19 from transcript Medtr5g005530.1 (locus Me dtr5g005530) derived from phytozome v7.0 (chr-ID MtChr5; p os 220123 to 220723 reverse strand)
caggtatgtcgtcccttctattagttttctttcggtatgcagtttgtatatcaattatgggcccgtttgttatagtttttttttaaatagatttttgtagtgcaatatgtttttgttataatttttaacagaaattttcaaggaaagcttcaaatgaaaaatctgtttgaatagcttatcttaaaatgtcattctaagtatttcatcattttgttataattttttttggatactaaattttgaaaaaatctctaaaaaaaaagctatttcaaatagcttttcataaaaatcatttttgaaaaatgtgatttttactatgtaaaatgtcaaacaatgaatatttaagttaatgaatgttaaaatcttttttttaacttataccaaatgagtttgaaataacttctattatttttgactaaatttccaaaaaaatatatttttagaaatacaaagaaaaatccattttcttagaatctaaaacaaacgggccctaatatctggtgaatttttctctagatgcatttatcttgacaagttgataagtatcctatcattatttttgctagctttttggtttggtgaatactctgcttgagaattc

SEQ ID NO: 3974 - DNA, 3227 bp, Medicago truncatula
  Intron number 2 from transcript Medtr3g104020.1 (locus Med tr3g104020) derived from phytozome v7.0 (chr-ID MtChr3; po s 25740624 to 25743850 reverse strand)
tttcacttttttttttgcctacgtaaagaaaactggtattcatttttccacaagaaatcaatattattcatgtagttaatattttaattttttggtcaagatatgtagtttaatattagtatccaccctaggcagtagagggaaaaaagtgtcaccaaagtagagagatattattatggcaaattaaaccatagtacaaatgattgttttttcttgaggtccatactaatgattgttgataaaacaaaatgtaccactagtacaaaaacaacaacgttgtattgacaaaaaaaacactattgaatctaggatagttactagctaggtagggtatttattttgttaatcattgtagtattagattgtgctattttatttgcatcacattttattcgcaaacacatcataaatctacattgtaggagccaattatttttgggtgaaaagccaaaaaaaaaaaaaaaaaatcaattattaaaaaaaggcaacaaagataggatattgaattgagaatatgggagtaaattaaatgagggcttgaggggcaagattggtagtgggaaaacaagttacggcgaaagtggttgtatggggtcagcatctaagtaagcataaaatagtgaattagatgaaaagaggtgacaaggaaaaagtgtcactttaatgtgggatgaatggggggttcaggtggaaggaagggttgtgaggaagtgatttggctatcataaataaattcacatccatagatataaaaattaaaaagaaattgagtggttcgtattttagattacaatttgttcaaattgttgacttacttaaaacatgttatatgtacaatgtaaccatgttctagtcactctttttgcaacaagatcccacaatgacacaacgttcttgtgtctacgggagatgattttaaatacttttttcatagatgattatctcaccagatagattgctcaaccttcattgcatattcaaatcaaataaatttagaaaaccattatagcaggaaaaataattatgggtaccaccacctaatgtaataccttacctagatagatatgacccttctttttcgtattgtccttcttctaacaataccacgtcagctcactcagttatgtctttgtaccaagtatggtatgttctttccacaatgtgtaacttcctttataatggtttcatttcatttctgcgacctctccttgttggcttatgacagatgattggacattccagagaaatctgttaacacacaaccaattaaaagctaaaggcatgttccaagtctaggtatatcaatactaaaaagatcgttgaaaaagttaaacagtaatcggaaaaaaatataaaccagttcttatagttgagttttgtgactttgattagtgttaattcaacgaaaacaatgaattgagttaaggtttgatgtgcatattaattttctattatttttgtcaatctgagacatattcaatcattatctctagaaggagggaaatgtttattgtcattaaggttttgaatagtttttattaataaaagtttactattcttcttgtcatgagatttgagaatatgactttgatttgtgttgatagttgatttaacaaagataatgagaaataagttgtgttgaggtttggtgtatgcatctttgtttttgttgtttttttgttgatctcatatttatttggtcatcgtctcaattgtgaaggcgagttttttgaggtttgtctaaagggaagatgttggttttggttagagttttatatattgatctacgagttgaccatccatcaaatggagtttctccttgatatggtttcaactagagcacacttgagtatgcacgaggttgtatctaatatcgcatgttcaattttcactctttgtgcggcttccttcgagtctgtgaatcatctttttgttgcttgtggggtggccattaaggtgttgtatatgatttttagatagttaggttatgaatgaattttgtgagggatctagtaagtcgtttttaggggttcttaggcaaagctaggagagataagatcaggcgaggtttttttactgctacgacattatgttgtgtggaccatttaagattctagatgcggaggaattgatcaataagattcagttcacttcgtggtattggtttttcaggtgacactttgattcccattaatttcactttgagagggttgtggaacttcttctctgctggagttggtagcctctctaggggcttttttgggtgtctttgagcaggattttgggtctgttttatgacttcctgagtcatatctctctggtggtgtaagttttgttatttttcatgtgtttttgcactaatagggagggagggaggttttttgttttgggcactaaaagtgggtgtagtttactaacttgtaccttagtgttttggggtgggtgtaaattagcaaccccttacatatattccattagaagaagggaaaaaaaacgaagcgatgtttttgagtattaaaaacatgccctcatttgcatcatctttctaccttgttaatgtatacaaaataaaatggaaaaagttattgacccttgtttttagcttctctccgactcttctcttcgttctttcttgtccatcgaagatgggtgattttggattgtatttttggaatatcacccatttgcatcatctctctctctctctctctctctctctctaaataaatggtttccacatgaatttattgtttttctttgatttcgccgtctaaatgctacattattttgtttgtcatcttcttgtgttcttttgttttttcatctttcgctatgattacttaattcatatcgacaaatcaatttcgatctactaaaaatatgatttggatatcaatgttactaacttgaaggtatagatactccattcattttgattttatcacatatgaaaatgttttatcattttttgcatttaactcaactgttgtgaatttgctctcatattccttccttttagttttagtagtgttttatttttctatttatattctactaattcgaatgaataattttttgagaaaaaataataatttggtaatgttcacccgctaaaattgaaaggctgtaaatcaacaaaccatctttagttatttttaaatttatatttattgctgcagaattaaattatcaatttttttgagtatgtagacgaaatagtaaagtaa
